United States Patent Application Publication US 2007/0072175 A1 - sequence listing, part 14

SEQ ID NO: 36451 - DNA, 774 bp, Macaca Mulatta
ggggtggattggatttgggctgaaggtacatggttcgccaaccctgtattatgtttatagcgtttgttttacaaagtgtatctgattctgaaaaaatgaaaaatggttattataggctagatggtaggactaaattaacagatagatatgacatgacaattcagtttgccttaagtgcaactttcagtttctatcttaactataacttgagatattaatttagaattacaaatgtgtgtatatgtatatatgggtcatatttatacacaaggcacacatactatgagcaccctgcagtttgtaggcatttttacatgcgaatgttattggaactgataggcatcacaggaagaaattttgcctctacctactctcaccatgtcagttgacaggactcaggacatgggagaagagtgagcttcctttctgaagttgatggtagctgtcaagatttttgaaaagttagtgccaggaattaggtgattggtaagcagcggcccattccttgccttcagtgaaatgacatcctaaaaacgtacgaaaagaatacttaatgataatgatggcagaatttgatatataataaggaaaccaaaagcagtggttcttgctcccaaactatagggaaatatcagtcatctttttaaatcaatcatttaatttacataaacttttatattaagccaggaacaaattgctaatattcgccttatgaactagactttgtaaatccctaaatatttttaaagttttcaaacctaaaatcgattttga

SEQ ID NO: 36452 - DNA, 788 bp, Macaca Mulatta
  misc_feature (1)...(788): n = A,T,C or G
ggcgaggtagcgggcnnnnnnnnnnnnnnnnnnnnnnnnnnnnnnnnnnnnnnnnnngcgnnnnnnnnnnnnnngnnnnnnnnnnnnnnnnnnaatctggccactgcactccaacctgggcgnnnnnnnnnnnnnnnnnnnnnnnnnnnnnnnnnnnnnnnnnnnnnnnnnnnnnnnngttggtttcattttgaacgtcaaatagtggtctagagtgaattaattttcaaaccattcaacatataactctaaaatctaactgagaatttatactactccctctgaacaagcatttcctccaaaatcaaacatgtcattaatactaaagtactacctcagtgtcaaaggaaaaggaaatagagatctgaagttgagtttattttctgatctgtctacatcataaaaagtccttaatcttctgtgaaacttatttttatgtgtgctaaccactactgaaactatcacttaaaaccactctcatctcgtattttgcaatagaaactgagaagtcactactatatgatcagaaattttccagtccccatacaggcaacctggcagctatcactgactcccctacactgacacctctacttctgggtagctgtatagactctatattcagacttagagaatctactcagaatatgagtttcaatgatcggatgagaagaatagcttattcttagacccttttttctatgttaatgtggtccaaatttatcttgccccccaaattccttgaagccctgtgggaacttctagaaaatgggcctatcacagggcct

SEQ ID NO: 36453 - DNA, 276 bp, Macaca Mulatta
tctgtggtctcctccctgccctctccccactggggagaggcctgtgacttgccctgaaccagctgctgggccttgtttgttgggggtggtgggcaggtgagcagaagtggggagggaaatggggaagaagtctactccaaacctaggtctctatgtgagaccagccctaggtgcttctctaggagggaaacagggagacctggggtcccgtggataactgagtggggagtctgccaggggaggggacctcgccattgtgccttctgtgtgtattgt

SEQ ID NO: 36454 - DNA, 438 bp, Macaca Mulatta
  misc_feature (1)...(438): n = A,T,C or G
gtaaaattgaattcacctggcaggaggtgatgataggcctgtatagctctatcctcatgttccccatcaacctcctgattgttcagatctttcggaacgcccgtccccgggccactaaggagcagaacaccgagaaacgggaccaggggtcccccaacctgactccctccccacagcccnnnnnnnnnnnnnnnnnnnnnnnnnnnnnnnnnnnnnnnncaggatgtgtcaaggattgtcagctccctcttcaaagccatcaagctgccatccccctcctcgggctgggactcagtgaacttgatggacataaaaaatatcctggccttggtggaagatgtcatttgtccacagaacacatcagggcaggtgttctgggaggaagccaaaatgagagaggaccccgtaacactcactgtggggtcatcacaaatgaaa

SEQ ID NO: 36455 - DNA, 794 bp, Macaca Mulatta
  misc_feature (1)...(794): n = A,T,C or G
agaacacaccaagtttcaccctaaacaagcacaattttttgggatgttggggaagaaaaccggaaatagtttggagaaaaccccacacaaatggggggggtgaacgtgccaactccaacacagatcagtagtcctggcttgggannnnnnnnnnnnnnnnnnnatcaacgttataacaaaataacattgaacaaaacagcactatctgtggacctgctgtaaaactccaccttagcctgatgagtgaaatctaaaaaatttaatcaatgaaatatgacactgtgagcctctgtggttggcctatggggtcctgctctgccatcccagtctattttagtcctgggtgtggtttggtgccacctgctgtggatgtgtagaatgcagatggggaattagaaaactatgaatgcatgtgtcctcagagtcaaatgaaaatatttcaagacagtgggaatgatcatctgtcaaatgctcctgctgattcaagaaagatgggaattagatgtatcagtatggaggtgtgggagcctcacaggcgtggatttaagagagaatgaaaaaggaggaattggagatatgaaggtagaaaactcaagagttttgccttaaagagaaaaagagatatgggggtataggtagaaagaaatataggatttgannnnnnnnnnnnnnnnnnnnnnggaggatgtttaaacattaatgggaattaatgcagtcaggagggaaaaaacattgaagagggagaactgctgaaacaacactcaataggccataagaagggatctgatgcaccc

SEQ ID NO: 36456 - DNA, 762 bp, Macaca Mulatta
  misc_feature (1)...(762): n = A,T,C or G
ggcttaggaataaatttaagccaaaaaaccctacagatcattgctaagagaaaagaatcactccccccaaaatcacgaaatatattgtgaattctatcaatttagtgttcttctagtcacagtggcagcaggcttttttgtatttcattcatatggaatgcaaaggactggcatatccaaagcaatcttgaaaaaagttgaagccctatgtggtggtacactcctannnnnnnnnnnnncnnnnnnnnnnnnnnnnnnngattgcttgagcttagaggttaaagcctgtagagtgcgatgatcgtgcctgtgaatacccactgannnnnnnnnnnnnnnnnnnggcgcgaccttctctccnnnnnnnnnnnnnnnnnnnnnnnttggaagaattgcactacctgttttcaagatttactataaagcttcaatatcaggctaatatagtactggcttaaggaaagacaaatacagcaatgaaacagactagaanacccagaaacagatccatactntaataataatttcatttttaacaacgcagcanagcaaaataatggagaaaggaaagtttgttcagtcaatggtactaaaaaaaatggacatctttatggaaataaactttcatacaccaatattaatctgagacgatacctaaaatggaatagctgaaaacttttaatatggtaacagaaaaacttaggtggaagtattcttaacanactttgggggtacctttaaggaacctttttttttgacata

SEQ ID NO: 36457 - DNA, 670 bp, Macaca Mulatta
  misc_feature (1)...(670): n = A,T,C or G
aaggaacttcantgaatttnnnnnnnnnnnnnnnnnnntttgtgaactgaatatcatgaaccatgttttgatatccctttttcacgtgccagcggaatggggtgtttgatgtttcttcatatgtcaaggagatgcttcaaaatgtcaattgctttaaacttaaattacctctcaagagaccaaggtacatttacctcattgtgtatataatgtttaatatttgtcagagcattctccaggtttgcagttttatttctataaagtatgggtattatgttgctcagttactcaaatggtactgtattgtttatatttgtaccccaaataacatcatctgtactttctgttttctgtattgtatttgtgcagaattcttttggctttatcagtgtaatctctgccctttaagatatgtacagaaaatctacatacaaatttccatttaagtcgaatgatactgagaagcctgtaaagaggagaaaaaaacataagctgcatttccccataagttttttaaattgtatattgtatttgtagtaatattccaaatgtaaataggaaatagaagagtgatgcttatgttaagtcctaacactacagtagaagaacggaagcagtgcaaataaattacannnnnnnnnnnnnnnnnnnnnnnnnnnnnnnnnnnnnn

SEQ ID NO: 36458 - DNA, 926 bp, Macaca Mulatta
  misc_feature (1)...(926): n = A,T,C or G
ggnnnnnnnnnnnnnnnnnnnnnnnnnnnnnnnnnnnnnnnnnnnnnnnnnnnnnnnnnnnnnnnnnnnnnnnnnnnnnnnnnnnnnnnnnnnnnnnnnnnnnnnnnnnnnnnnnnnnnnnnnnnnnnnnnnnnnnnnnnnnnnnnnnnnnnnnnnnnnnnnnnnnnnnnnnnnnnnnnnnnnnnnnnnnnnnnnnnnnnnnnnnnnnnnnnnnnnnnnnnnnnnnnnnnnnnnnnnnnnnnnnnnnnnnnnnnnnnnnnnnnnnnnnngcgnnnnnnnnnnnnnnnnnnnnnnnnngaaagaggtgttggccgcccccggggccccaagaaaaattttataaaagactttctttttggggcgcccggcggccccaaagggagagggaaaaagggggaaaaaggggttttcccaaaaagaaaacgccgaaagcgagaaaaaaagggctgggaggatgccccgcacaatgaaaaaaaggccccccgggggggaaagacgaaaggggttttggaaaagaagccccgaaaggggggagttcgaggaggggcgtaggcggggggacctatacggcacggggggtggcccggaagcgagaacgnnnnnnnnnnnnnnnnnnngagccccccgccgcgcgtgggaagagtagtgagaaaagaagggggggacaagaagcaataaaaaagcttgtcgctccgcgcgggatgagggaccgcacgtgaaaagagggggaggtgagaaaaggaaaaaaagcgacggggacggggagagaaaaaaaccacgtggtgcgtgcgcgggnnnnnnnnnnnnnnnnnncgccccgcgcagggagaaaagagggcggcgagacacaaagaggtggccgcccaaatggacgcaccgccgcggctaggaaaagagaagcggagagcagggaagaagaccccccg

SEQ ID NO: 36459 - DNA, 799 bp, Macaca Mulatta
ggggcttgttggccagaaccacccgattgcttgctgtcccagcggcgcctcttcatcgccgccgccatgcccggaggtctgcttctcggggacgaggctcccaactttgaggccaataccaccgtcggccgcatccgtttccacgactttctgggagactcatggggcattctcttctcccaccctcgggactttaccccagtgtgcaccacagagctcggcagagctgcaaagctggcaccagaatttgccaagaggaatgttaagttgattgccctttcaatagacagtgttgaggaccatcttgcctggagcaaggatatcaatgcttacaactgtgaagagcccacagaaaagttaccttttcccatcatcgatgataagaatcgggaccttgccatcctgttgggcatgctggatccagcagagaaggatgaaaagggcatgcctgtgacagctcgtgtggtgtttgtttttggtcctgataagaagctgaagctgtctatcctctacccagctaccactggcaggaactttgatgagattctcagggtagtcatctctctccagctgacagcagaaaaaagggttgccaccccagttgattggaaggatggggatagcgtgatggtccttccaaccatccccgaagaagaagccaaaaaacttttcccgaaaggagtcttcaccaaagagctcccttctggcaagaaatatctccgctacacaccccagcccttattctcttggagaagtagttatgtgagccagagatgtccgctgcaatcatgttttctgc

SEQ ID NO: 36460 - DNA, 1185 bp, Macaca Mulatta
  misc_feature (1)...(1185): n = A,T,C or G
ggccgggctgcgaagtgcgaggggaggagcccgagccgtcgctgccgccgccgctgaggtagaggagcatgtctgcaactcgagccaagaaagtgaagatggccaccaaatcatgccccgagtgcgaccaacaggttcctgttgcatgtaaatcatgtccctgtggttacatatttattagcagaaaacttttaaatgcaaaacactcagagaaatcaccaccttctacaggtaaccacagatcttccttctgtcactgttcatataaatggaatcatacaaaaacaagcatgaggccaagaggaggcgaacagagagagttaggagagagaagataaattctacagtaaataaagatttagaaaacagaaagaggtctcgaagtaacagccattcagatcatatcagacgaggaagaggaagacctaaaagtgcatctgccaaaaagcatgaggaagaaagagagaaacaggaaaaggaaattgacatctatgctaacctgtctgatgaaaaggctttcgtgttttcagtcgccttggcagaaataaatagaaaaattatcaatcaaagacttattctctgatacttggtctgccaaacctgctgaaacttctgtcaggattacatcagcaaattctcaaacagttacggactctcaggagcattctgactgcatcaataagggccattgattgtttctctcctgtcatttagcctgtgccacacaagctgtgtaggcttggactgttctgggatttccttgtttaccaaggagtattgtcagtgttttgtgtttgggatataagtaagtgtatttnnnnnnnnnnnnnnnnnnnnnnnctggatggatgtaaaggataaaaagtgatggggtgtggggtaggtatgaaaactagggtaataagatgcttgattgttttcaggtttgccaccagagatgcaataattttaatactgtcagagtgatttttaaaaatatatatttcagattttcagttgctaacagattgcatctatacagttcattttactttttagtaaattgggcaattggatattttatntgaatgggggaaattaaagaatataaacctggtacatttttggttctttaaaattggattttttttttccnttgggcccttttaaattttttatttaacctttaaagggtaattggaagtt

SEQ ID NO: 36461 - DNA, 5157 bp, Macaca Mulatta
  misc_feature (1)...(5157): n = A,T,C or G
gatttctttaaagcctcatggaacacatcattattgctggatgcccggacacttaacgcacctgacagcaggcgaagtgctcagaatgggacaggatgtcacctggaatcagcactaagtgattcagactgtccttacttttaaatggtgctgttcttcatttcaagatgccgttgcagctctgataaatgcaaactgacaaccttcaaggtcacaacggaggaaaaaatcactggtgcttgaagcatagaagactgcccttcacaacgaaaatccctgattattgtttgaaatgctgaggaacttgctgcgaaggagacttttttcttatcccactaaatactactttgtggttcttgttttttccctaatcaccttctccgttttaaggattcatcaaaagcccgaatttgtaagtgtcagacacttggagcttgctggggagaatcctagtagtgatattaattgcaccaaagttttacagggtgatgtaaatgaaatccaaaaggtaaagcttgagatcctaacagtgaaatttaaaaagcgccctcggtggacacctgacgactatataaacatgaccagtgactgtacttctttcatcaagagacgcaaatatattgtagaaccccttagtaaagaagaggcagagtttccaatagcatattctatagtggttcatcacaagattgaaatgcttgacaggctgctgagggccatctatatgcctcagaatttctattgcattcatgtggacacaaaatccgaggattcctatttagctgcagtgatgggcatcgcttcctgtttcagtaatgtctttgtggccagccgattggagagtgtggtttatgcatcatggagtcgggttcaggctgacctcaactgcatgaaggacctctatgcaatgagtgcaaactggaagtacttgataaatctttgtggtatggattttcctattaaaaccaacctagaaattgtnnnnnnnnnnnnnnnnnnnnnnnnnnnnnnnnnnnnnnnnnnnnnnnnnnnnnnnnnnnnnnnnnnnnnnnnnnnnnnnnnnnnnnnnnnnnnnnnnnnnnnnnnnnnnnnnnnnnnnnnnnnnnnnnnnnnnnnnnnnnnnnnnnnnnnnnnnnnnnnnnnnnnnnnnnnnnnnnnnnnnnnnnnnnnnnnnnnnnnnnnnnnnnnnnnnnnnnnnnnnnnnnnnnnnnnnnnnnnnnnnnnnnnnnnnnnnnnnnnnnnnnnnnnnnnnnnnnnnnnnnnnnnnnnnnnnnnnnnnnnnnnnnnnnnnnnnnnnnnnnnnnnnnnnnnnnnnnnnnnnnnnnnnnnnnnnnnnnnnnnnnnnnnnnnnnnnnnnnnnnnnnnnnnnnnnnnnnnnnnnnnnnnnnnnnnnnnnnnnnnnnnnnnnnnnnnnnnnnnnnnnnnnnnnnnnnnnnnnnnnnnnnnnnnnnnnnnnnnnnnnnnnnnnnnnnnnnnnnnnnnnnnnnnnnnnnnnnnnnnnnnnnnnnnnnnnnnnnnnnnnnnnnnnnnnnnnnnnnnnnnnnnnnnnnnnnnnnnnnnnnnnnnnnnnnnnnnnnnnnnnnnnnnnnnnnnnnnnnnnnnnnnnnnnnnnnnnnnnnnnnnnnnnnnnnnnnnnnnnnnnnnnnnnnnnnnnnnnnnnnnnnnnnnnnnnnnnnnnnnnnnnnnnnnnnnnnnnnnnnnnnnnnnnnnnnnnnnnnnnnnnnnnnnnnnnnnnnnnnnnnnnnnnnnnnnnnnnnnnnnnnnnnnnnnnnnnnnnnnnnnnnnnnnnnnnnnnnnnnnnnnnnnnnnnnnnnnnnnnnnnnnnnnnnnnnnnnnnnnnnnnnnnnnnnnnnnnnnnnnnnnnnnnnnnnnnnnnnnnnnnnnnnnnnnnnnnnnnnnnnnnnnnnnnnnnnnnnnnnnnnnnnnnnnnnnnnnnnnnnnnnnnnnnnnnnnnnnnnnnnnnnnnnnnnnnnnnnnnnnnnnnnnnnnnnnnnnnnnnnnnnnnnnnnnnnnnnnnnnnnnnnnnnnnnnnnnnnnnnnnnnnnnnnnnnnnnnnnnnnnnnnnnnnnnnnnnnnnnnnnnnnnnnnnnnnnnnnnnnnnnnnnnnnnnnnnnnnnnnnnnnnnnnnnnnnnnnnnnnnnnnnnnnnnnnnnnnnnnnnnnnnnnnnnnnnnnnnnnnnnnnnnnnnnnnnnnnnnnnnnnnnnnnnnnnnnnnnnnnnnnnnnnnnnnnnnnnnnnnnnnnnnnnnnnnnnnnnnnnnnnnnnnnnnnnnnnnnnnnnnnnnnnnnnnnnnnnnnnnnnnnnnnnnnnnnnnnnnnnnnnnnnnnnnnnnnnnnnnnnnnnnnnnnnnnnnnnnnnnnnnnnnnnnnnnnnnnnnnnnnnnnnnnnnnnnnnnnnnnnnnnnnnnnnnnnnnnnnnnnnnnnnnnnnnnnnnnnnnnnnnnnnnnnnnnnnnnnnnnnnnnnnnnnnnnnnnnnnnnnnnnnnnnnnnnnnnnnnnnnnnnnnnnnnnnnnnnnnnnnnnnnnnnnnnnnnnnnnnnnnnnnnnnnnnnnnnnnnnnnnnnnnnnnnnnnnnnnnnnnnnnnnnnnnnnnnnnnnnnnnnnnnnnnnnnnnnnnnnnnnnnnnnnnnnnnnnnnnnnnnnnnnnnnnnnnnnnnnnnnnnnnnnnnnnnnnnnnnnnnnnnnnnnnnnnnnnnnnnnnnnnnnnnnnnnnnnnnnnnnnnnnnnnnnnnnnnnnnnnnnnnnnnnnnnnnnnnnnnnnnnnnnnnnnnnnnnnnnnnnnnnnnnnnnnnnnnnnnnnnnnnnnnnnnnnnnnnnnnnnnnnnnnnnnnnnnnnnnnnnnnnnnnnnnnnnnnnnnnnnnnnnnnnnnnnnnnnnnnnnnnnnnnnnnnnnnnnnnnnnnnnnnnnnnnnnnnnnnnnnnnnnnnnnnnnnnnnnnnnnnnnnnnnnnnnnnnnnnnnnnnnnnnnnnnnnnnnnnnnnnnnnnnnnnnnnnnnnnnnnnnnnnnnnnnnnnnnnnnnnnnnnnnnnnnnnnnnnnnnnnnnnnnnnnnnnnnnnnnnnnnnnnnnnnnnnnnnnnnnnnnnnnnnnnnnnnnnnnnnnnnnnnnnnnnnnnnnnnnnnnnnnnnnnnnnnnnnnnnnnnnnnnnnnnnnnnnnnnnnnnnnnnnnnnnnnnnnnnnnnnnnnnnnnnnnnnnnnnnnnnnnnnnnnnnnnnnnnnnnnnnnnnnnnnnnnnnnnnnnnnnnnnnnnnnnnnnnnnnnnnnnnnnnnnnnnnnnnnnnnnnnnnnnnnnnnnnnnnnnnnnnnnnnnnnnnnnnnnnnnnnnnnnnnnnnnnnnnnnnnnnnnnnnnnnnnnnnnnnnnnnnnnnnnnnnnnnnnnnnnnnnnnnnnnnnnnnnnnnnnnnnnnnnnnnnnnnnnnnnnnnnnnnnnnnnnnnnnnnnnnnnnnnnnnnnnnnnnnnnnnnnnnnnnnnnnnnnnnnnnnnnnnnnnnnnnnnnnnnnnnnnnnnnnnnnnnnnnnnnnnnnnnnnnnnnnnnnnnnnnnnnnnnnnnnnnnnnnnnnnnnnnnnnnnnnnnnnnnnnnnnnnnnnnnnnnnnnnnnnnnnnnnnnnnnnnnnnnnnnnnnnnnnnnnnnnnnnnnnnnnnnnnnnnnnnnnnnnnnnnnnnnnnnnnnnnnnnnnnnnnnnnnnnnnnnnnnnnnnnnnnnnnnnnnnnnnnnnnnnnnnnnnnnnnnnnnnnnnnnnnnnnnnnnnnnnnnnnnnnnnnnnnnnnnnnnnnnnnnnnnnnnnnnnnnnnnnnnnnnnnnnnnnnnnnnnnnnnnnnnnnnnnnnnnnnnnnnnnnnnnnnnnnnnnnnnnnnnnnnnnnnnnnnnnnnnnnnnnnnnnnnnnnnnnnnnnnnnnnnnnnnnnnnnnnnnnnnnnnnnnnnnnnnnnnnnnnnnnnnnnnnnnnnnnnnnnnnnnnnnnnnnnnnnnnnnnnnnnnnnnnnnnnnnnnnnnnnnnnnnnnnnnnnnnnnnnnnnnnnnnnnnnnnnnnnnnnnnnnnnnnnnnnnnnnnnnnnnnnnnnnnnnnnnnnnnnnnnnnnnnnnnnnnnnnnnnnnnnnnnnnnnnnnnnnnnnnnnnnnnnnnnnnnnnnnnnnnnnnnnnnnnnnnnnnnnnnnnnnnnnnnnnnnnnnnnnnnnnnnnnnnnnnnnnnnnnnnnnnnnnnnnngccaggcacagtggctcacgcctgtaatcnnnnnnnnnnnnnnnnnnnnnnnnnnnnnnnnnnnnnnnnnnnnnnnnnnnnnnnnnnnnnnnnnnnnnnnnnnnnnnnnnnnnnnnnnnnnnnnnnnnnnnnnnnnnnnnnnnnnnnnnnnnnnnnnnnnnnnnnnnnnnnnnnnnnnnnnnnnnnnnnnnnnnnnnnnnnnnnnnnnnnnnnnnnnnnnnnnnnnnnnnnnnnnnnnnnnnnnnnnnnnnnnnnnnnnnnnnnnnnnnnnnnnnnnnnnnnnttgtaatggaaggattctagttaatgagtattgcatcaagatttatatctttcttactaaggacaagagttaataaaaattgttctttattttacaggcagttactgaagctcttcccagaactcagtaaacagccactcagccttgaaaatggagcgttgttgtttctaaacatatgtttatgtcatttactcagtacagttcacttaaataacaagtagattttctcttgtagtgatttgggtaagaagaggccatgtttcagttcatttcctctgtagggtcgattgaattggactttttcagttgttcagaaaaataaaaataatttctcactatattagatagagatactcctcaacttacgatgtgggtaggtcccggtaaacctgttataatttgaaaatatcatattgaaaatgaatttaatatctctaacctgaaatcataacttagcctagactaccttaaatgttctcagaatatttagcctgcagttgggcaaaaccatttaacacaaagcctattttataataaagtgttgagtagctcatgttatttactgaatactgtcctgaaagtaaaaaaaatgattgtataggtactcaaagtatgatttctactgaaagcatatcacttgtgcactgtgttaaagttgaaaaactgtta

SEQ ID NO: 36462 - DNA, 2777 bp, Macaca Mulatta
  misc_feature (1)...(2777): n = A,T,C or G
agcgttctgtggaggaagtgcgaggtcaggccatgaacttggnnnnnnnnnnnnnnnnnnnnnnnnnnnnnnnnnnnnnnnnnnnnnnnnnnnnnnnnnnnnnnnnnnnnnnnnnnnnnnnnnnnnnnnnnnnnnnnnnnnnnnnnnnnnnnnnnnnnnnnnnnnnnnnnnnnnnnnnnnnnnnnnnnnnnnnnnnnnnnnnnnnnnnnnnnnnnnnnnnnnnnnnnnnnnnnnnnnnnnnnnnnnnnnnnnnnnnnnnnnnnnnnnnnnnnnnnnnnnnnnnnnnnnnnnnnnnnnnnnnnnnnnnnnnnnnnnnnnnnnnnnnnnnnnnnnnnnnnnnnnnnnnnnnnnnnnnnnnnnnnnnnnnnnnnnnnnnnnnnnnnnnnnnnnnnnnnnnnnnnnnnnnnnnnnnnnnnnnnnnnnnnnnnnnnnnnnnnnnnnnnnnnnnnnnnnnnnnnnnnnnnnnnnnnnnnnnnnnnnnnnnnnnnnnnnnnnnnnnnnnnnnnnnnnnnnnnnnnnnnnnnnnnnnnnnnnnnnnnnnnnnnnnnnnnnnnnnnnnnnnnnnnnnnnnnnnnnnnnnnnnnnnnnnnnnnnnnnnnnnnnnnnnnnnnnnnnnnnnnnnnnnnnnnnnnnnnnnnnnnnnnnnnnnnnnnnnnnnnnnnnnnnnnnnnnnnnnnnnnnnnnnnnnnnnnnnnnnnnnnnnnnnnnnnnnnnnnnnnnnnnnnnnnnnnnnnnnnnnnnagagaatgaatggaaaccagctgacatattcagtactctgggggaaagggaacgtgatagaagttcgttggaggcaaaaaaagcccagtggaggaaagagctannnnnnnnnnnnnnnnnnnnnnnnnnnnnnnnnnnnnnnnnnnnnnnnnnnnnnnnnnnnnnnnnnnnnnnnnnnnnnnnnnnnnnnnnnnnnnnnnnnnnnnnnnnnnnnnnnnnnnnnnnnnnnnnnnnnnnnnnnnnnnnnnnnnnnnnnnnnnnnnnnnnnnnnnnnnnnnnnnnnnnnnnnnnnnnnnnnnnnnnnnnnnnnnnnnnnnnnnnnnnnnnnnnnnnnnnnnnnnnnnnnnnnnnnnnnnnnnnnnnnnnnnnnnnnnnnnnnnnnnnnnnnnnnnnnnnnnnnnnnnnnnnnnnnnnnnnnnnnnnnnnnnnnnnnnnnnnnnnnnnnnnnnnnnnnnnnnnnnnnnnnnnnnnnnnnnnnnnnnnnnnnnnnnnnnnnnnnnnnnnnnnnnnnnnnnnnnnnnnnnnnnnnnnnnnnnnnnnnnnnnnnnnnnnnnnnnnnnnnnnnnnnnnnnnnnnnnnnnnnnnnnnnnnnnnnnnnnnnnnnnnnnnnnnnnnnnnnnnnnnnnnnnnnnnnnnnnnnnnnnnnnnnnnnnnnnnnnnnnnnnnnnnnnnnnnnnnnnnnnnnnnnnnnnnnnnnnnntttttccgttccatgactgctctcttggacccagctcagattgaggaannnnnnnnnnnnnnnnnnnnnnnnnnnnnnnnnnnnnnnnnnnnnnnnnnnnnnnnnnnnnnnnnnnnnnnnnnnnnnnnnnnnnnnnnnnnnnnnnnnnnnnnnnnnnnnnnnnnnnnnnnnnnnnnnnnnnnnnnnnnnnnnnnnnnnnnnnnnnnnnnnnnnnnnnnnnnnnnnnnnnnnnnnnnnnnnnnnnnnnnnnnnnnnnnnnnnnnnnnnnnnnnnnnnnnnnnnnnnnnnnnnnnnnnnnnnnnnnnnnnnnnnnnnnnnnnnnnnnnnnnnnnnnnnnnnnnnnnnnnnnnnnnnnnnnnnnnnnnnnnnnnnnnnnnnnnnnnnnnnnnnnnnnnnnnnnnnnnnnnnnnnnnnnnnnnnnnnnnnnnnnnnnnnnnnnnnnnnnnnnnnnnnnnnnnnnnnnnnnnnnnnnnnnnnnnnnnnnnnnnnnnnnnnnnnnnnnnnnnnnnnnnnnnnnnnnnnnnnnnnnnnnnnnnnnnnnnnnnnnnnnnnnnnnnnnnnnnnnnnnnnnnnnnnnnnnnnnnnnnnnnnnnnnnnnnnnnnnnnnnnnnnnnnnnnnnnnnnnnnnnnnnnnnnnnnnnnnnnnnnnnnnnnnnnnnnnnnnnnnnnnnnnnnnnnnnnnnnnnnnnnnnnnnnnnnnnnnnnnnnnnnnnnnnnnnnnnnnnnnnnnnnnnnnnnnnnnnnnnnnnnnnnnnnnnnnnnnnnnnnnnnnnnnnnnnnnnnnnnnnnnnnnnnnnnnnnnnnnnnnnnnnnnnnnnnnnnnnnnnnnnnnnnnnnnnnnnnnnnnnnnnnnnnnnnnnnnnnnnnnnnnnnnnnnnnnnnnnnnnnnnnnnnnnnnnnnnnnnnnnnnnnnnnnnnnnnnnnnnnnnnnnnnnnnnnnnnnnnnnnnnnnnnnnnnnnnnnnnnnnnnnnnnnnnnnnnnnnnnnnnnnnnaggaagaagagcctctgaatattcattcattcagcaaggaaaggnnnggtctccatcaccaccagttccagcagtgaaaaacagaacccaacaaactcaaaatacattacacttaccactaaaaaacagtagctatgagagagagaatttgatttcaggaggtaatcaaacagaattatcacctggaatttctgaatcatcccattttattccctatgttcgaacaaatgagatctattaccttgatcccgatgcaccattgtctcagccttcaacccaggaccctcagtaccaaaattcacaagnagactgtggccaagaacgacagctatttgattctgac

SEQ ID NO: 36463 - DNA, 778 bp, Macaca Mulatta
  misc_feature (1)...(778): n = A,T,C or G
attttttcttttgccccacagggctaggaagtggccagatggggtttatattttggggttcaatggcaggccttttgccctccccagggttcaagggggatttctttttgccctcaggcttcaacagggtggctggggattacagatgcaccacccaccatatccgggctaattttttgggttggtagagaaagggtnnnnnnnnnnnnnnnnnnngctggtctcgatcttctgacctcaagcnnnnnnnnnnnnnnnnnnnnnnnnnnnnnnnnnnnnnnnnncgtgcccagccctaactttttaaataaataaaaatatgctctagggcaagttgtacaacccacgccccacggactgggccacatgtggcccaggatggctttgaatgcagcccaatacaaattggtacactttcttaaaacattataagattttttgcannnnnnnnnnnnnnnnnnnnnnnnnnnnnctaatcagctatcattagtgttagtgtgttttatgtgtggcgtgaaaccattcttctttctccagtgtggcccagggaagccaaaagattagacacccttgctctagggagaaaacttaagttcttctcatgaagaacaaaagcagcactgtagtattatagaattaagctgaatatttagaggtgtttgcaattttctaattttcttcttatttttgtgatctaaagcttattgttattgaaatgtcatgaagattttttcaaatatatgaaaatttactaggattcccatagcctatagattcc

SEQ ID NO: 36464 - DNA, 190 bp, Macaca Mulatta
aagattctcccttgcatgagaatcttacttgccctccacttaccaccatttgtagtaattcccctgtttgcttcctgccctgttatgaacacctctgaaggtaagccccaggcagggaacatactactattatagcgcacgcagctggcaagcactccttctccctttctctgtttgtgtttatgtatac

SEQ ID NO: 36465 - DNA, 593 bp, Macaca Mulatta
gtctatgtagataaaaatcttacagagttttggttagatgcatatgtgcaatatttaaaaggtaacagccaagatcctaatgataagaatacttttatgaacaatattcctgattttttaagcaattttccaaattttcagcatgatattaatatttcatcatcaaatgaaatcatttcttcccggggcttcattcagacaacagatgtttcttcctcaaccaaaaagaaaataatgttattccaattacgacgcatagctgaagactgtcaaattcccttaatagtatataaccaggcatttatatattttgatcagtatgctgcaataatagaaaacactgttcgaaatgtattggttgcatcagcagctatgttcattgtttccttattgttaatcccttatccattttgttccttgtgggtgacttttgctattggttctgtgattgtaggagtaacgggtttcatggcattctggaaagtcaatcttgattccatatccatgattaatcttgtcatttgtatagggttttctttcgatttttctgcacacatttcctatgcatttatttctagttctcagccctcagt

SEQ ID NO: 36466 - DNA, 591 bp, Macaca Mulatta
cccattgcctggggatgggatcaccttccagaccacagcagatgtgggacacacagcctcctgacttcaggaagagccagatctgtacagggaggaaggggtgagagggggaccccacccctagactcaggaaggaagtcgggttggaccttaacatctgcatcggacaactccaccccttccttggccttgcacctgcccgcctacacacctacgtgtctagggcttgggccatgacttaggcagaggagtgcagaggagggtctggcagggggctgctcaggctgcctagctgcccctttgccaggttaataaagcactgacttgcttctcagcctccctcccatctttgcacagtttctggcccctcactttgttgctggggctgtttctgggtccctctgtagggcctggaaaccgcagaatgcctgaggctctcagggactggggctctacgtcccccggcctgggtgagttgggggtggggtaccagcaggacagggcagtatcctactgatccaagctatgagaatccaaatgttctttcccaggtttggcattttatagttaaaacatttctgcaacagcagt

SEQ ID NO: 36467 - DNA, 1944 bp, Macaca Mulatta
ggtcagcacgtcaactgcatgggcagggcgccagataacatcctgtgcgctgctgagcagagctgggacgcggccacctttctgcaccggcagcaccatgtcgctcatggtcgtcagcgtggcgtgtgttgggttcttcttgatccagacgacttgtccacacacgggtggtcaggacaagacctccctgtctgcccggcccagcgctctggtgcctcagggaggacacgtgactcttcggtgtcactatcgtcgtgggctttacaactttaccaacttcactctgtacaaagacgacagaagccacgttcccatcttccccggcagaatattccaggagagcttcctcatgggccctgtgaccccggcagacgcagggacctacagatgtcggggttcatacccgcactcccccactgagtggtcggcactcagtgaccccctggcgatcatggtcacaggagtccacagaaaaccttccctcctggccctcccaggtcccctggtgaaatcaggagagacggtcaccctacaatgttcgtcagataccgtgtttgagcacttctttctgcaccgtgaggtgacgtttgaggagcccttgcaccttgttggagagcgccatggtgggggttcccaggtcaactattccatcaattccacgacgtctgaccttgcagagacctacagatgctacggttctgccactcactccccctatgtgttgtcagctcccagtgaccccctggacatcgtgatcacaggtctatatgagaaaccttctctctcagcccagccgggccccacagtgcaggcaggagagaacgtgaccttgtcctgcagctcccagacctcgtttgacatgtaccatctatccagggagggggaggccaatgaacttaggctccctgcagtgtcaagtgtcaatggaactttccaggccaacttccttctgggccctgccacccacggagggacctacagatgcttcggctcttaccgtgactctccctatgagtggtcagacccgagtgacccactgtccgtttccgttacaggaaacccttcacgtagttggccttcacccactgaaccaagctccaaaaccagtaaccccagacacctgcatgttctgattgggacctcagtggccatgatcctcttcaccatcttcttctttctcctgcatcgctggtgctccaacaaaaagaatgctgctgtaatggaccaagagcctgcgggggacagaacagtgaacagggaggactctgaagaacaagaccctcaggaggtgacatacgcacagttggatcaccgcgttctcacacagggaaaaatcactcgcccttctcagaggcccaagacacccccaacagataccagcgtgtacacggaacttccaaatgctgagcccagatcgaaagttgtcttctatccatgagcaccaccgtcaggccttgaaggggtcttctagggagacaacagccctgtctcaaaaccggcttcacagctccaatgtaccagccgcaggaatctgaaggtgtgagtctgcatcttagagcatcgctcttcctcacaccacgaatctgaacgtgcctctctcttgcttacaaatgtctaaggtccccactgcctgctgcagagaaaacacactcctttgcttagcccacaattctccacttcacttgacccctgcccacctctccaacctactggcttacttcctagtcctactggaggctgtgatcacactgaggaactcacaattccaaacatacaagagactccctgttaacacagcacttagacacgtgctgttccatcttccctcatgctgttccacctcccctcagactatctttcagcccttggcagcagtgaaacttataaatttttttatcatttcaatgtagctctctcctcttcaaataaacacgtctgccctca

SEQ ID NO: 36468 - DNA, 652 bp, Macaca Mulatta
  misc_feature (1)...(652): n = A,T,C or G
caacatgcaagccacggacacccaggagaaagagtagaccaagaccctcaacatgtttgcctccttcgttgacaaggtacggttcctggagcagcagaacaagatgccagagaccaagtggagcttcctgcagcagcagaagacggtttggagcaacttgttctcggacaacgtgttggagagctacatcaacaaccttctgtggctgctggagaccctgggccaggagaagctgaaactggaggcggagcttggcaacatgcaggggctctgnnnnnnnnnnnnnnngaggacttcaagaaaaagtacgaggatgagatcaataagcttacagagatggaggatgaatttgtcctggtcaagaaggctgtggatgaagcttacatgaacaagggagagctggagtttcatctggaagggctgactgacgagatcagcttcctcaggcagctgtatgaagaggagatcccagagctacagtcccagatcttggatacatctgtggtgctgtccatggacaacagcagctccctggacatggacagtatcatcgcggaggtcaaggcgcagtacgaggagatcgccaactgcagccgggccgaggctgagattatgtaccagatcaagtatgaggagctgcagacactggctg

SEQ ID NO: 36469 - DNA, 1303 bp, Macaca Mulatta
  misc_feature (1)...(1303): n = A,T,C or G
ggtagcacattgaaaacctctagagaagaggttttcaataaaaggcttggaaatgaactagaataggcaatagatctcttcagatgccgctttcccatgtaatgcaagcgtttctacagaataccagaggtgtgaaatatgtgacacttaagaacagtgatttttattgggaattttcttagggttataacacttaaagcaacaaccaattagtaacagccacagaaaaggggaatgaatcaactcttggttctttcctcaacccggcagtgttgtggataagtgcgtttgtaatgccctggcaatggctacatttgacactagaaaaaataaacatatttaataatttttgtttctccttaggaataagactttagaactgttttgtactgtgaattacggatgctctttgaaggaaagaaatatcgattctaatgttcttcagaagctggcagggataagcaggacatcgactggaacgtatgctaaaagaaagcagacaaatttctattttcttacctgagcaaatattttattgaaacgcttctgtatgtcaaaggagtccacaacttcagctacacaacttttttgtattgaaagaactcatacttttttgtaggctttttatttcacattttaaattttaaaatgaactttttaacgcactaaaaaatgccctaagaaagattttttacctcccagaacccctaataaaggaaatgtttagttttttatgaaaaatgacaagtcagtggttaaacttctcatgtctttggtgctttggccctaatagcactggacaacaccacgaccacatggaaacatatttttggaagcaaaacttaaattttgtataacgtatgctatggagagctaagaaaatttaaggactacttgttttnnnnnnnnnnnnnnnnnntaaaatggaatccactgtgttgaagactcttaatatcatgtgcttgtctaaccattttttgttttataaattagaataaaatctagttgtgattatggtcatcaaacgaatttgtttgggaaagctacatcttatttgtgaaatgtttttttaaatcagtaactataaactgattcagctttttcgttaaactttgtacctgggctgtaatacttgtgactcatgaaaaattatggttgacaaacaggataaaatttcccctgcattttattttcccagtgagtcgtaaaaaaccttaattttttgttgaaaggtttgtatgttaaaaccaatgttaacatttcttatatcccttcctggaaaaaggaaattcccgaatttgaa

SEQ ID NO: 36470 - DNA, 288 bp, Macaca Mulatta
  misc_feature (1)...(288): n = A,T,C or G
gtggtttgtcctgaatgacacaaccagcgggcagctgcacctgcggctggagtggctttcattgcttaccgaccaggaagctctgaccgaggnnnnnnnnnnnnnnnnnnnnnnnnnnnnnnnnnnnnnnnnnnnnnnnnnnnnnnnnnnnnnnnnnnnnnnnnnnnnnnnnnnnnnnnnnnnnnnnnnnnnnnnnnnnnnnnnnnnnnnnnnnnnnnnnnaacaaggtcagcaaagacccttcttcctatgtcaaactatctgtaggcaagaagacacatacaagta

SEQ ID NO: 36471 - DNA, 739 bp, Macaca Mulatta
gggagctgtgcaggagggtgagatgatggaatagaaaaggggatggaggacagcagcatgaagaatatctgtgagaggtgcatgaaattagggcgtaaaggagccggttgggggtgggacttgctgggacacagcagcttcagtggtcaaacttggtctccatttcaggacaactcctgctcaggggaagtgggtgcataggcacattgacatagagacacacctgtctcccagaagcctcttccagaggatcccagggccagcaggcaggggaagaagtagggcacatccaaggggctccactgtaaagaaagagtatgcactgggatccagatgacaggagaggagggaacacgtggtgattatggacaccatagaaaaggaatgctgcagaattcagatcagtccaaagtgtactaggtaaatgaaagaagagagggcaactttgctaacactgattaacatttaggattttgaaaattatggtgtttgcaaaaactgcatttgagttaagtattttgcaagggagatgttattggtgatttgtagaaaatcctatctttccggttacaaaatataacttcattttgcagcccaagatatgatgtctcatctttgaagtttttttcttccccaagtatgcctggaaaagggaaatatgggtaaaaataatcccttttttatgggtttttaagggggggtaggaaattttttttagatgaaaatatgggcccaaaaa

SEQ ID NO: 36472 - DNA, 88 bp, Macaca Mulatta
gatttcgattaaaaggcagctctgctagttactgtgtcttggctggaatggaaagcctttggaatagcagtgttcccgtgtgtgaacg

SEQ ID NO: 36473 - DNA, 508 bp, Macaca Mulatta
taaaaagaaagctctttgcatcagattgcttgacctgaaggttctctctgccattctctgccatttccctggctcctggacagacgcccctacacctctttcatctggttgcggtcaccagttcaacacttctgctctgttttctggaaacgctatcgcttcaaactcatagcctttatggtcatatcgattctagcacttttgctgttcaactttatatattcagctccggtgagtggcagccctgcaggcaaggacagaggtggtctcaggatgactctggggagagcgtcttcagctcgccaccccaggctaactgttgtctgttctctctagcactatttggccatgagctggatcaaacctcaacttcagctatatcctcccattaaaatattcaatatcatcacttcactaaacaccagcaatgccagctcttccatccttcccacccaggatccaaacctaaagcctacaacagaccatgagtggaaactccatccaggac

SEQ ID NO: 36474 - DNA, 982 bp, Macaca Mulatta
  misc_feature (1)...(982): n = A,T,C or G
ggaagatacaagattttgatactgacattctcttatataatgagagtttcatttgcagtttcaaaaatggtgttacgatatttattttaaaatgaagactgcttttcatttacattaagttgttaaaatagatagatgtgatctgcagaagttgtttaatctttttcatctgaatttcgggccgggagggagcaatataactaaggacaaaaaatgttttgtttttcttgtgtatttatgaccacctacttttatgttttgtgaaatggacagtaacctgtttcctaaaagattcctgtgggtactttttgagttgtgataatagcaaaattgcctttcagtaataatatcacactaatgcttcttttaaacattaaacctattttccttttttacaaaataagggaaaatgtgataagaagtttgtatacactgccggaatatagattattatttatcttttgaaccagagttaaatggnnnnnnnnnnnnnnnnnngtgatgattgttgtgttgatctccccacaattaatttatcttttgacaaaggggggtaaagagtttcagtttacctccttttaattgtatattattttttgctttttttattgtgaaaagtgataggtttttattttgtggagagagaaattaaagattagaggaaccagttgattttaattatgcctacttttttccttagagataagttgaacatataattcagtattttcagtgtcatgaaaaacatgaatgttgtacaattttcttcctcaaaaaacttgttaaatgcaagtatccttgggtatgttttttaaaagagaaccaatgcagggggtattttgagtattttccaggagaaagaataaaaaacctttaattgctggtatttaggtttaacccagaaaatccaacctagcccctgtttaaacagtttaaaagtatttaataacctactctttttttacctttctggaaaaattaa

SEQ ID NO: 36475 - DNA, 511 bp, Macaca Mulatta
cagatgtgtatcatgagatattaaggatagatccttcaaaaagagaaaccaatctttgttaatggttcactaatcaactgttttgctatctagtagaactgctaatacagtattgtaaaaattatttattatgactattacatttagaataaaaaatggaacgagtaggccagtttgcctggaatggaaggttcacttaggacataagaggaaggtgtcaataagggcctaactgtcaaggaatcctaacaagaaaggctctagaggatgccactgaaagtttttgatgtgaggaaaacagtatttgaggaaatgtaatttaacagtagagtgcaaatataggagggaaaagagatgagctattgggatcaggtaaactatattttttacccaagtgcatgcatgtagtaaagatagtagtagggatgaaaataatcaatgaacagaaactttcaaggcaaaaacccaaatgaaactctagctattggctagagtgagctaattgaggaaa

SEQ ID NO: 36476 - DNA, 346 bp, Macaca Mulatta
caataggctgcaaggttctctctttcggaggtaagcttccctctgattatgaataagaagatgagtgaagcgggtgctcctctgtagctaggcatggggacgtggaagaattctactgctacctgaaaagaaatctgctgtgcttagagaacccacataatcacacacaacaggtaatgcacacataagcacaccagcagaattccacctcaccctgaaagaggcacttacacttatctatcaacatggtcttcttagactccaggaatgtgtcctacatacatgggacatattacacagttcttacctttccagacccaaagaccgcctcttgggtgtatctgaa

SEQ ID NO: 36477 - DNA, 785 bp, Macaca Mulatta
gggtagagtatttcattgtgaactttatcagttcatgaaaaagataaaatttaatgataaagtaactgaacataaaaggaaaacaaccctataaataattattcagaagtaatcagcattctaatcttaagaactaagaagatttactatttttccttgagcaaaagtgattttaaaagctacttcgttccatttttcccatattacatcgatcagtaacaacgaacacttcttgttttaccagcttctgtgttataaatgattaggaactataaattttatataggagggaagggggaggtaggttcacattggcttcttaggccatgttaaggggataaattaactgagaatcgaacatagatttttttcccatgagtttttgtgatgagatttatcggcgtttttgaacagaagaaattagaatggagaggagacggggaatttctaaagacaagaattacggttaaaaagacaactgtagatagtatgtaattgctgaggaacaataatagggacagctacacattattccctgttcagttacctttggtgcttaaagcacctagaaactctaacggagtttccttgatatctggtactgtcttagtggaagaaagtggcctcagcattattatgtcttaagtgactaacagcatgcagttttgtgtcatggagtcagaatttgtgcatacctataataataaagtggtatttcccattagttacttttttgaagataattatatgtataaaagttatatgtataaaaattttaaattaat

SEQ ID NO: 36478 - DNA, 750 bp, Macaca Mulatta
ggaaaggaaatttcatcctatacaaaggccctgaggcctgtgttgttcaataaagagcaaagagtcaggtatgtctggaatagaatgagcaaggaagaaagagaagatgaggtcagagaaacaatgaggacagagggaagagcttggaaggctttcagttcattgtaggactccacaaggtcctacattgtaggactccattcagtaaaacaggagaaactgtaggtttttcacacatcctaagtaaaggagtgacataatctgacttacattttgaaaggatcattctgattgctctgtcgagattacactgtgagcaggcaaagatagaatcaaaggtaactattaggaaagtacattatgtgaatcttgtaagagatgacgatggcttaggttaaagtgatagtaataaaagtaatgggaagtgttcaaaatatggctatgttttcaaggtagagccaatgagattttcttgtagtttaaatgtggaatgaaaataaaggaaagagtcaagaataactaagatttttggctaaacaacctacagtggggtcagatcaattgagatggggaagactgtgtgttaaaccatttggggagaagggcaaatatccaaggttcactttttgacatactttgagtttgagatttctactaggtatcccagtttgaaaaattgagcacgcagttggatgaaatccaactataaaatgggggataataaatctttagaataatgaacagaagtta

SEQ ID NO: 36479 - DNA, 442 bp, Macaca Mulatta
acttcagttgagaagggatggatttcgaaatttgtatcgtggaatctttcccccattgatgcagaagacaactacactttcacttatgtttggtctgtatgaggatttatcctgccttatccacaagcatgtcagtgctccagagtttgcaacccgtagtgtggcggcagtgcttgcagggacaacagaagcaattttcactccactggaaagagttcagacattgcttcaagaccacaagcatctttttttttttaccaacacttatcaggttttcaaggccctgatatgttttggaattggagagtattatcgaggcttgatgcccattcttttccggaatggactcagcaatgtcttgttttttggccttcgaggtcccattaatgagcatctgcctactgcaacgactcccagagctcattttgtcagtgattttatc

SEQ ID NO: 36480 - DNA, 561 bp, Macaca Mulatta
  misc_feature (1)...(561): n = A,T,C or G
ctttactaaaaatatagaatagctgggtgcggaggtgggcactnnnnnnnnnnnnnnnnnnnnnnnnnnnnnnnnnnnnnnnnnnnnngcccgggaggcnnnnnnnnnnnnnnnnnnnnnnnnnnnnnnnnnnnnnnntcctgggcaacaaagcaaaactctgtctccnnnnnnnnnnnnnnnnnngttggtgagaagataaactggaacccttgtacattgcaaaatataaaatggtacatctgccttagaaaacaatttaacaattctctatgaagtgaatactggattaccagatgacctaagagtacctctgctgggtacagacagcagagccaagagaattacaatcatacatccatacaaaagcctgcatgcagccttaattatttccactaaaaatggagataattcaaacctgctgaacagtggaatatcatatggtcataggaaggaagtgccaatctgtgtcgcagcactgagccttcaaaggatggtgcctcagtgaaagaaactgaatcacagatgcgcagtagatgctgggcctctgtatcctgaatg

SEQ ID NO: 36481 - DNA, 5648 bp, Macaca Mulatta
  misc_feature (1)...(5648): n = A,T,C or G
ccaggttctcaaacaccagctgctgcgcgtcaaaaggaaggtcacatcaggccagcagatttatgtgaacaatgcattctccaagtgcacactgccaatgtttgtgaacctgaccttcagggaggtgagacactggagatctcacaaagatgtcgatgaatcctccctcgctgtcaccgttcatgaaagtatagagcagttattctggtccttggagaagaagtgtggtcagaaactggtctctagggctcttggctacatcaccatggccaaaatgggtctgagtgaaatggaattggaggatgtgttagccctagacaacagtgtaatgagcgagctcaatgaaaacaccagacccagcaatcccctgagagtaccttttttgtacattgcaaggctcaaggagggtctcagtggatacctaatagaaaggcatgtgaaaaatgtcacactcctagtctgggccaacagacacctgcatctcatagcccagaagctatatctgcaggatnnnnnnnnnnnnnnnnnnnnnnnnnnnnnnnnnnnnnnnnnnnnnnnnnnnnnnnnnnnnnnnnnnnnnnnnnnnnnnnnnnnnnnnnnnnnnnnnnnnnnnnnnnnnnnnnnnnnnnnnnnnnnnnnnnnnnnnnnnnnnnnnnnnnnnnnnnnnnnnnnnnnnnnnnnnnnnnnnnnnnnnnnnnnnnnnnnnnnnnnnnnnnnnnnnnnnnnnnnnnnnnnnnnnnnnnnnnnnnnnnnnnnnnnnnnnnnnnnnnnnnnnnnnnnnnnnnnnnnnnnnnnnnnnnnnnnnnnnnnnnnnnnnnnnnnnnnnnnnnnnnnnnnnnnnnnnnnnnnnnnnnnnnnnnnnnnnnnnnnnnnnnnnnnnnnnnnnnnnnnnnnnnnnnnnnnnnnnnnnnnnnnnnnnnnnnnnnnnnnnnnnnnnnnnnnnnnnnnnnnnnnnnnnnnnnnnnnnnnnnnnnnnnnnnnnnnnnnnnnnnnnnnnnnnnnnnnnnnnnnnnnnnnnnnnnnnnnnnnnnnnnnnnnnnnnnnnnnnnnnnnnnnnnnnnnnnnnnnnnnnnnnnnnnnnnnnnnnnnnnnnnnnnnnnnnnnnnnnnnnnnnnnnnnnnnnnnnnnnnnnnnnnnnnnnnnnnnnnnnnnnnnnnnnnnnnnnnnnnnnnnnnnnnnnnnnnnnnnnnnnnnnnnnnnnnnnnnnnnnnnnnnnnnnnnnnnnnnnnnnnnnnnnnnnnnnnnnnnnnnnnnnnnnnnnnnnnnnnnnnnnnnnnnnnnnnnnnnnnnnnnnnnnnnnnnnnnnnnnnnnnnnnnnnnnnnnnnnnnnnnnnnnnnnnnnnnnnnnnnnnnnnnnnnnnnnnnnnnnnnnnnnnnnnnnnnnnnnnnnnnnnnnnnnnnnnnnnnnnnnnnnnnnnnnnnnnnnnnnnnnnnnnnnnnnnnnnnnnnnnnnnnnnnnnnnnnnnnnnnnnnnnnnnnnnnnnnnnnnnnnnnnnnnnnnnnnnnnnnnnnnnnnnnnnnnnnnnnnnnnnnnnnnnnnnnnnnnnnnnnnnnnnnnnnnnnnnnnnnnnnnnnnnnnnnnnnnnnnnnnnnnnnnnnnnnnnnnnnnnnnnnnnnnnnnnnnnnnnnnnnnnnnnnnnnnnnnnnnnnnnnnnnnnnnnnnnnnnnnnnnnnnnnnnnnnnnnnnnnnnnnnnnnnnnnnnnnnnnnnnnnnnnnnnnnnnnnnnnnnnnnnnnnnnnnnnnnnnnnnnnnnnnnnnnnnnnnnnnnnnnnnnnnnnnnnnnnnnnnnnnnnnnnnnnnnnnnnnnnnnnnnnnnnnnnnnnnnnnnnnnnnnnnnnnnnnnnnnnnnnnnnnnnnnnnnnnnnnnnnnnnnnnnnnnnnnnnnnnnnnnnnnnnnnnnnnnnnnnnnnnnnnnnnnnnnnnnnnnnnnnnnnnnnnnnnnnnnnnnnnnnnnnnnnnnnnnnnnnnnnnnnnnnnnnnnnnnnnnnnnnnnnnnnnnnnnnnnnnnnnnnnnnnnnnnnnnnnnnnnnnnnnnnnnnnnnnnnnnnnnnnnnnnnnnnnnnnnnnnnnnnnnnnnnnnnnnnnnnnnnnnnnnnnnnnnnnnnnnnnnnnnnnnnnnnnnnnnnnnnnnnnnnnnnnnnnnnnnnnnnnnnnnnnnnnnnnnnnnnnnnnnnnnnnnnnnnnnnnnnnnnnnnnnnnnnnnnnnnnnnnnnnnnnnnnnnnnnnnnnnnnnnnnnnnnnnnnnnnnnnnnnnnnnnnnnnnnnnnnnnnnnnnnnnnnnnnnnnnnnnnnnnnnnnnnnnnnnnnnnnnnnnnnnnnnnnnnnnnnnnnnnnnnnnnnnnnnnnnnnnnnnnnnnnnnnnnnnnnnnnnnnnnnnnnnnnnnnnnnnnnnnnnnnnnnnnnnnnnnnnnnnnnnnnnnnnnnnnnnnnnnnnnnnnnnnnnnnnnnnnnnnnnnnnnnnnnnnnnnnnnnnnnnnnnnnnnnnnnnnnnnnnnnnnnnnnnnnnnnnnnnnnnnnnnnnnnnnnnnnnnnnnnnnnnnnnnnnnnnnnnnnnnnnnnnnnnnnnnnnnnnnnnnnnnnnnnnnnnnnnnnnnnnnnnnnnnnnnnnnnnnnnnnnnnnnnnnnnnnnnnnnnnnnnnnnnnnnnnnnnnnnnnnnnnnnnnnnnnnnnnnnnnnnnnnnnnnnnnnnnnnnnnnnnnnnnnnnnnnnnnnnnnnnnnnnnnnnnccctgactgtcctgatatcgttgtgtttatcacatcggccgagactgtgaacatctggagtctgacagatgaagtgatctgtcggcgcgtgcaacttccgaacaacttcttgaaaaatctggaggattttgaaatntctcccaatggaaagctaggcattatatccaggggagatgaaaacatcaatgtgctagatttacacagtggtaaattgcgggtggttcacgcctctgggatcatctggcggcagaggttgtctcgggatggtcgctacctggtatacatttgtttccgaaatggggaggaggaggatgaaaatggtgcaatattcagtttaattgtaatgagactggcagatggcaaaaatatcggtgcttgttccctttacaaaacaccaactttccttgcactctctcagaggcacctgaacatcattgtgggctttgatgatgggagtatagggatatacacggtagtagaccgtgtagatgctgcactgaaaatcaaaattgccacttcaaatagcagacaaattttcaacaatgcaacacacacctccaggccaaagagtaacagttattgtnnnnnnnnnnnnnnnnnnnnnnnnnnnnnnnnnnnnnnnnnnnnnnnnnnnnnnnnnnnnnnnnnnnnnnnnnnnnnnnnnnnnnnnnnnnnnnnnnnnnnnnnnnnnnnnnnnnnnnnnnnnnnnnnnnnnnnnnnnnnnnnnnnnnnnnnnnnnnnnnnnnnnnnnnnnnnnnnnnnnnnnnnnnnnnnnnnnnnnnnnnnnnnnnnnnnnnnnnnnnnnnnnnnnnnnnnnnnnnnnnnnnnnnnnnnnnnnnnnnnnnnnnnnnnnnnnnnnnnnnnnnnnnnnnnnnnnnnnnnnnnnnnnnnnnnnnnnnnnnnnnnnnnnnnnnnnnnnnnnnnnnnnnnnnnnnnnnnnnnnnnnnnnnnnnnnnnnnnnnnnnnnnnnnnnnnnnnnnnnnnnnnnnnnnnnnnnnnnnnnnnnnnnnnnnnnnnnnnnnnnnnnnnnnnnnnnnnnnnnnnnnnnnnnnnnnnnnnnnnnnnnnnnnnnnnnnnnnnnnnnnnnnnnnnnnnnnnnnnnnnnnnnnnnnnnnnnnnnnnnnnnnnnnnnnnnnnnnnnnnnnnnnnnnnnnnnnnnnnnnnnnnnnnnnnnnnnnnnnnnnnnnnnnnnnnnnnnnnnnnnnnnnnnnnnnnnnnnnnnnnnnnnnnnnnnnnnnnnnnnnnnnnnnnnnnnnnnnnnnnnnnnnnnnnnnnnnnnnnnnnnnnnnnnnnnnnnnnnnnnnnnnnnnnnnnnnnnnnnnnnnnnnnnnnnnnnnnnnnnnnnnnnnnnnnnnnnnnnnnnnnnnnnnnnnnnnnnnnnnnnnnnnnnnnnnnnnnnnnnnnnnnnnnnnnnnnnnnnnnnnnnnnnnnnnnnnnnnnnnnnnnnnnnnnnnnnnnnnnnnnnnnnnnnnnnnnnnnnnnnnnnnnnnnnnnnnnnnnnnnnnnnnnnnnnnnnnnnnnnnnnnnnnnnnnnnnnnnnnnnnnnnnnnnnnnnnnnnnnnnnnnnnnnnnnnnnnnnnnnnnnnnnnnnnnnnnnnnnnnnnnnnnnnnnnnnnnnnnnnnnnnnnnnnnnnnnnnnnnnnnnnnnnnnnnnnnnnnnnnnnnnnnnnnnnnnnnnnnnnnnnnnnnnnnnnnnnnnnnnnnnnnnnnnnnnnnnnnnnnnnnnnnnnnnnnnnnnnnnnnnnnnnnnnnnnnnnnnnnnnnnnnnnnnnnnnnnnnnnnnnnnnnnnnnnnnnnnnnnnnnnnnnnnnnnnnnnnnnnnnnnnnnnnnnnnnnnnnnnnnnnnnnnnnnnnnnnnnnnnnnnnnnnnnnnnnnnnnnnnnnnnnnnnnnnnnnnnnnnnnnnnnnnnnnnnnnnnnnnnnnnnnnnnnnnnnnnnnnnnnnnnnnnnnnnnnnnnnnnnnnnnnnnnnnnnnnnnnnnnnnnnnnnnnnnnnnnnnnnnnnnnnnnnnnnnnnnnnnnnnnnnnnnnnnnnnnnnnnnnnnnnnnnnnnnnnnnnnnnnnnnnnnnnnnnnnnnnnnnnnnnnnnnnnnnnnnnnnnnnnnnnnnnngcatgtccttggataacttttcaaaaggcatctcgcttttggtttagtttagttttcttagaaagtggcgatgtaacaatttactagaataatgaactaggaactgatttgctgtaggtccagctctgctataaatgcattgtgtattcctagacaggcctttaacctcatcagtgtgttgtttttgtggagtgcaaaataaaggtagtgatagtttctgctgtagccctcatagggacattgggaagcagtataagaaaaacttcagcaacatcatgattattgatgctaatggggaaaataaattcatgtaacccatagagaatccaagtcaactgtatttccctctggaaagcagtttaacatgtaagctttcaaagatgtgattcagataaaaatacccagctccatagtgaaagacttttttcagtatgttacttctggtttagctactagccagggaggtggtagcccagagaaggcaacccacatacagatcacagatcacctggagttgattatatgcgtctacgcttttgagctctttaggcaacacattctcattcctgtcattatcagttgaacctccatgccacacatttctaagaattaaatgcctagatggattaaatgtagtatgtgaatgttctacgtaaaagccaatagagtatacaagtgacttgaatgatttttcctaacttgtttgcaactgatagctcatactgaatgtttttatgtaaactttgtatcgttgggaagaattacccaatcagagatttatattttcataaatgttacatttagttaaatt

SEQ ID NO: 36482 - DNA, 685 bp, Macaca Mulatta
  misc_feature (1)...(685): n = A,T,C or G
agtatggtggatggggcagggcgaggtgtgaggatgatgggtatggtttgatngtatgttgaattagaagtgtctggtagatttttagatgcaggtatctagtgggcagttgcatatccatgacagaaactctagggagggctgggctggatttccagatttagcagtcttacacactgatgagcttgctcatagaaaatatacagaagaaagagaggagagggtggaagatagaggccctggcaaagaagcaacttgagaatcatgactcaaatgccattttcaatgttaatggattacttgaaggaggtaattattcagtgtatttgagacagcttcctttgagagttccatttctgctgtgtatagacgctggtatccagaagaatatgaatttgcaccaaagaaggctgcttctcataggtaagtttgagttctaccaagcgctttccagtgtgacacgcacttaactcccaaattcctgactgcttgaaataatgtcccttaactcttttttcttggggaaaagataaagttcgactagcataaacataacattctcttcctgttaggaattctggtcagattcgtgttccattctgagagggttatatagcctttattgctgttttaaaactcttagatagcttggtttataggcatgatgaaacaatctgtaatcttt

SEQ ID NO: 36483 - DNA, 790 bp, Macaca Mulatta
  misc_feature (1)...(790): n = A,T,C or G
ggatcttaaataatgggtacagaatgcttggaactgtgcttaacccagtgagtggtcagaacttagccattgttgttgttatggtgggataacagtaaagagtgccgcagagatttgggattaaggaaaataacattgtactctgggagataaggcagaagctcaacatgtggtggatgagaactaggataggtaaatttccctttgagcgactaaatgtctataattacttcaaccttgtggggatgaagtattgaacacttactgcacataaagcaaattgctaggtaataaggattacaacaattgctaggtcgtgatttgtgtccttgaattgcttaaaatatagtgtgaaagttaagatatttaaaaaaaatgactaatacagtaattataagtattataagaattgtacaaagaaggagctagaagaactgagaggaggaaaaaatcatttgtgaatcaaggacgcttcaaaagagctttctgttttatctgaatcttaatagattaatatattagatatatgtcttactgactcgtcnnnnnnnnnnnnnnnnnnnnnnnnnnnnnnnttttccacagtactttacctcgtggggggcctttattcctgaatcttggctaaactctttaggtttaacttatgggcctcaaaagtaagtttaatggattttcttaaccgaggatttatttaatggctatttttgagggaatcaaatccctttttttaaacctattccaaaccttaaaaatttattctccctaaaaattccttccatagccctaa

SEQ ID NO: 36484 - DNA, 401 bp, Macaca Mulatta
  misc_feature (1)...(401): n = A,T,C or G
accggccgncacnnnnngagatngccnttcaagccctntntnnggttctttggagaacacaacgttctggtgacgggtatcaggacagagggtgtttcggtgagaggctggagactgggaaagtgtctataggtggggtgtcgttctgcagctgtaaaagattccaacaaaatttctgtgagtggtcattcgattaacccctattgctgtagcatcattttgtagtttggggaggtagaaatatgcagaggagaatggtctcagagaataggaagtcatctcacgcgtacatgcaatagtcgtgggtgctagaagtgtgattccgtgattttgcagtggacatgttccatttatacagagaatgttgctattggaggatgcttctaagacaggttctattc

SEQ ID NO: 36485 - DNA, 847 bp, Macaca Mulatta
  misc_feature (1)...(847): n = A,T,C or G
ggggtcatctcctcttcttgctctcttgtgtacatagccagtgttgtggatgttggtaagaaggtagggaatttctccactttgccccctgtttttgacataaatattttttaaatagaaatactctcatggctttccttacctggaaatggtatttctgtttctgggaaaattgagtagacaggtttaactaaaagacnnnnnnnnnnnnnnnnnnnnnnnnnnnaaaagtttcatgtgtgagtgtgtgagatttgcaggcattatctatttctccctatgatcttgtgagggtatatactcttgcatatcttctgttttgcgaaaaggagggttaaaagcacagggtaaatttaaaaacttgccaaaggaagccgccggaatagcaaagtagggatttcacccccaaacgtgatgcctattttcagtatttatgtctaataaaagccaaaaacttcttttgagaaaataaatgtgaaattgttaagcccccagtgggtcaaaaatgttttaattctgcctaattttgggacaaaaattaattaattttccaaccaatttatatttaagggagggttagacaaaaaattaattttgggataaacttttaaattttaccgaaaaaagtttgcaaaaaatacgtggcagaacatgtttctcattattccccccctccaaggttttccttacatgtcaatttaacccatcattaataatttggctcctgtctcctgtaagtgattttactctnaaagcgctaaaaatcaaaaactatgcgggtaaataaaatcccaatttatattctcaccaaactcttcacctttcaaaatgtgtataccaaattttt

SEQ ID NO: 36486 - DNA, 769 bp, Macaca Mulatta
  misc_feature (1)...(769): n = A,T,C or G
gggttgatggtgataagaattttgggttccaatttttggtggcttaatgagaacagttttgaactgccgttggcttaatgagaactcttttgaactgacattgtttcaggaagtgacttgacaggcatggactgtgaaagtgaaatctatactgtgaacttttgaattgatgttgtcactgtttaaggagccatggtacggacaacagaggtagtaggtctgctagcagcactgactcttagctgtgaaactgatcttcttcagaaagatcccttttaaagtgaggacttcaatctgtagtttggagctattaagcagtatgtgtcaggtaacaatctaggttctgcatatggcttaatcaataaataaaggggtttgatttttccatcttgtaatggtcaagaagtcaagcagttcccaagcagcagggtgttgggaggctggtagggttgcttgtcatacttccacagatttgactgggaaggaaacaagtccaagggggaattagaaactttattacttgggtcacagcaggaagtatgagctttcctctggttcgcatgtgtccgccgaggtttgcatgtgtccccccagagttcatgtgttgaaaacttaatccccaatgcaacagtgttngggaggtggggccctaataagagatgattagatcgtgnagggctctgttccctcatgaatggatttactggtcattatttacagaaagtggggtttatttgtcaaaaggtgggaaattatttataaaaagggg

SEQ ID NO: 36487 - DNA, 85 bp, Macaca Mulatta
agaggagtgggctttgctgggtcctcacagaagagtctctacagaaatgtcatgcaggaaaccattaggaatctggactgtatag

SEQ ID NO: 36488 - DNA, 754 bp, Macaca Mulatta
  misc_feature (1)...(754): n = A,T,C or G
gggaagcccggaagtaaccgggaactggcaactttgtctctaccaccccaagaggtggctcgtgggcggttttctttcgctgtttccgaaccaagatttgaagagatttcctggatgtggagtgtggcttccgaaaccaccttttccttgtgctgtatttgttgcaacaatgtttaggagattgacactttcacacctgctttttaccactatccttggaattgctggaggagtatatatttttcaaccagtatttgaacagtataccaaagatcagaaggaattaaaggtgcagttggtacaagaatcagaagagaagaaaagttaatactacattgagttaggccannnnnnnnnnnnnnctnnnnnnnnnnnnnnnnnnnnnnnnnnnnnnnngggtggatcacgaggtcgggagttcgagacctgcctgannnnnnnnnnnnnnnnnnnnnnnnnnnnnnnnnntgaaaatcagccgggcttggtggtgtgcacatgtaatcccagctgctcgggcggctgaagcaggagaattacttgaaactgggagacggaggtggcactggagttgagatcacgctgctgcacttcagcctgggcgaccgtagcgaaactccatcttcaccaaaaagaaaaacaaattctttcatgaaagttgaaaccggaaataaattggcttaaaagttcccacttggaaaattatttttaaacctgttaaatcctcgcccaaaaaaccctttgtagttgtatt

SEQ ID NO: 36489 - DNA, 771 bp, Macaca Mulatta
  misc_feature (1)...(771): n = A,T,C or G
ggnnnnnnnnnnnnnnnnnnnnnnnnnnnnnnnnnnnnnnnnnnnnnnnnnnnnnnnnnnnnnnnnnnnnnnnnnnnnnnnnnnnnnnnnnnnnnnnnnnnnnnnnnnnnnnnnnnnnnnnnnnnnnnnnnnnnnnnnnnnnnnnnnnnnnnnnnnnnnnnnnnnnnnnnnnnnnnnnnnnnnnnnnnnnnnnnnnnnnnnnnnnnnnnnnnnnnnnnnnnnnnnnnnnnnnnnnnnnnnnnnnnnnnnnnnnnnnnnnnnnnnnnnnnnnnnnnnnnnnnnnnnnnnnnnnnnnnnnnnnnnnnnnnnnnnnnnnnnnnnnnnnnnnnnnnnnnnnnnnnnnnnnnnnnnnnnnnnnnnnnnnnnnnnnnnnnnnnnnnnnnnnnnnnnnnnnnnnnnnnnnnnnnnnnnnnnnnnnnnnnnnnnnnnnnnnnnnnnnnnnnnnnnnnnnnnnnnnnnnnnnnnnnnnnnnnnnnnnnnnnnnnnnnnnnnnnnnnnnnnnnnnnnnnnnnnnnnnnnnnnnnnnnnnnnnnnnnnnnnnnnnnnnnnnnnnnnnnnnatttgtccgaatcaatccttaatcaacggcaattcccttttacatccctctcctctaaacaagttccaagccccccgggccatttaaccatggttacctaacacaaaattgcgcaacctctcaaaaccaaccttattcctttgaaacccctgttttgggaagggaaaggaaaaccccctattccctaaatgtttaacaacaccctgtatttt

SEQ ID NO: 36490 - DNA, 796 bp, Macaca Mulatta
  misc_feature (1)...(796): n = A,T,C or G
cggttttcaaaatccatgaaccctggtagtttgccctgttttcaaccttccccaaaggggtggggattacacggcggggggcccacccaggccgggttttaagttcatccacacccggccctttgttttttcaacagttggattataaaggtgtcttggtaagagtctcttggatttcatcccggttgggagttgagcttttcagatgtttatgttcaggtctttcatcaaattttgggaaattttgtgccattatatttgaaaatattctctccgctattttatcttctctttcggggactttcacaatgtgtatgttggtctgcttgattgtgtcccctaggtcccttagtctctattcacttctcttcaatctttgtgcttcttttcctcagactggagaatttccattgtccagtctccaagggttcacagattatttcttttgcttgctcaaatctgcctttgaattcctctagtgaattttttatttcagttattgtactttccagctctagaatttttggtttctctttaagatgtctatatctttgttgatatttttatctttttccaaacattgtcttcttcatttttctccatgccttcctttagttctttgaannnnnnnnnnnnnnnnnnnnnnnnnnnnnnnagacggagtctctnnnnnnnnnnnnnnnnnnnnnnnnnnnnncgnnnnnnnnnnnnnnnnnnnnnncnnnnnnnnnnnnnncgcnnnnnnnnnnnnnnnnnnnnnnnnncnnnnnnnnnnnnnnnngcccgccacctcgcc

SEQ ID NO: 36491 - DNA, 789 bp, Macaca Mulatta
  misc_feature (1)...(789): n = A,T,C or G
ggatcagaaagaaagtacctaactnnnnnnnnnnnnnnnnnnnnnnnnnnnnnnnnnnnnnnnnnnnntctgcattcttatgttgtataagcctcataaaataaccctaacaccaacctactcataatattactatgtaattcgtgcattactgctagccaacatgtataatatatagtactatatatgcttaactgtacataacacatatcattacatatcaacccaacattctagacaacatgcttacaagcaagtactctaatataaactctaacagtaatacataacatgaccttttcaaatttaatccgtcctcctcatagataccaaccgaaccagtccatgccagtcgtcnnnnnnnnnnnnnnnnnnnnnnnnnnnnnnnnnnnnnnnnnnnnnnnnnnnnnnnnnnnnnnnnnnnnnnnnnnnnnnnnnnnnnnnnnnnnnnnnnnnnnnnnnnnnnnnnnnnnnnnnnnnnnnnnnnnnnnnnnnnnnnnnnnnnnnnnnnnnnnnnnnnnnnnnnnnnnnnnnnnnnnnnnnnnnnnnnnnnnnnnnnnnnnnnnnnnnnnnnnnnnnnnnnnnnnnnnnnnnnnnnnnnnnnnnnnnnnnnnnnnnnnnnnnnnnnnnnnnnnnnnnnnnnnnnnnnnnnnnnnnnnnnnnnnnnnnnnnnnnnnnnnnnnnnnnnnnnnnnnnnnnnnnnnnnnnnnnnnnnnnnnnnnnnnacaatccgtctgatggctgcttgatctatatgcgtgtgtccnnaaaaanataaaaaaaaaaaaa

SEQ ID NO: 36492 - DNA, 588 bp, Macaca Mulatta
gtctacttgtatattattgtagatcaattccaatacataaaatacaggaagactctaaaaaagcaaatcaaagagtgaaggggaaatgatacatttaaaaagcctattttaaagggggcaatttggaataaatgcacacacaaaatagggtccttttgctgatgcctctgctgccttatcgagctgtatgtcctttaatccaggcacatctcctttctgagtcttgactttgcctgcattaaaggttctatgaggatcagatgaaatttttgaggtaaaaataggttgacatttaaaatatggtacatgtgattattctaccttctctacatacccataaacacacctgcattttgagggaagtccagtttggggctgccttgggaactaggacgcagttatagccaaagggccttttttctcaaccaaggcatgttggcattgccaccactcccttcttggggtcacattcctcacagagttcctgcaacccaaggcttttaatattaggtgagacccaactaatcccttcccttgtgtttttgaaactttgttcttctcctttctggctcactatatcccctttct

SEQ ID NO: 36493 - DNA, 626 bp, Macaca Mulatta
  misc_feature (1)...(626): n = A,T,C or G
gtagaggaaacaaggaagaagtacttacgatataagtccccaggatcctttctctggcccttgtcattaggcccagggacataaccaatagaagtggcagaaaccaggatttgcataccagaagcaaaacccttgcccgttcatctgtatcacatgaggaaattacaaaggttatggcaaggatggcaaactggcagcccataggccttatgtggcccattcatgtatttttgcattggcccacatatttttttccttttctttttgaaagaacttcatttattttcattgatcaatagtgttcaccaggatctgaagtcaaataatgcacttggactgaatattaaggcatcatctagttgtatgaattgaatgattatcatttcctgctgtcgtttaacttgcattattttttaacaagttcgaatttgttgccaacttttaaaaatagagaaatgttgccaaaaagtctctttccagctactgaaatatcagatcctctggcaatactgcttaancccttttggtgaaccacatggtcttcatttattggtctctacagctccatggtgtctccctggcacaatgacgaagtggcacttgtcattcatggtagacatcttcta

SEQ ID NO: 36494 - DNA, 407 bp, Macaca Mulatta
tggagttgttcctttggctatgtatgtgcaaatctataaggtgatattgtagacatcaagggaatgggtactgttcaaaaaggaatgcccacaatgtcaccatggcaaaactgggagagtctacagtgttccccagcatgctgtaacattgttgtaaacaaacaagttaagggtaagattcttgccaagagaattaatgtgcgtattgagcacattaagcactctaagagctgagatagcttcctgaaacgcgtgaaggataatgatcagaaaaagaaagaagccaaatagaaaggtccccgggttcaattgaagcaccagcctgctctacccagagaagcacactgtgtgagaaccaatgggaaggagcctgagctgctggaacctcttctctatgaattcatggc

SEQ ID NO: 36495 - DNA, 328 bp, Macaca Mulatta
cgacagggatcaagcatgaacaagcaaactgctacaaggaggtcaaggaccgtggcacccaggcagagaagctgggagtggcactgtcatctccctggagggcatacctttgtgagtcccctccagccccatgcctggaacatctggcagccccagacctgcccttgggggttgcaggctgcccccttcctgccaaacctgaagtgctgcgggggatcccagcacagggaaggcaatcccttccaaacagcctgccaccccagggccttcccagcacctggattttcttcctgcctccgtccctgatgtttctggccttcccaaacca

SEQ ID NO: 36496 - DNA, 369 bp, Macaca Mulatta
  misc_feature (1)...(369): n = A,T,C or G
ggtcaaggatgcagtgtgcacttcccatttgccttttcccccttcacaccagagactctcttatgacaggacatgtctctactatcagactgcagattcctttagagaagtggggacttgtctttctnaaagagcacaaaattctcagggaagctgctatcagaaagtggctacacggcaagctgcacccaggccactctctggtctctaataccaagcaagcccgggccaccgccctctccaagaccccagagcaacggggatcgcagtgttccagcagcttccacccctctgggaggcgcgcctgcaatgcattccacagcccacggagatgcccaagcccatctacaggaagtccacgatcaagcg

SEQ ID NO: 36497 - DNA, 378 bp, Macaca Mulatta
agctgcagggtgggtacaggggattattacactattctgtttgggttcgggttgaaattttccaaaggagaagttttaaaataataataacagaaaaacctatagaatacacagctaggatatctgaaatagagattttgaaggtggtacaaataatgggtgctgaaaataagtgaaactattcaccataggtttgacaacataggaatcaatgaaagtactgaaaggtttttaagtttggctgtttgggatatggtacaacctcttcctcaggggtctttgactttactactagtctccccctacacaaaagaaaagcaagtgttttagtactatgcctggcacctaataggaagcactaatattatcttctcttta

SEQ ID NO: 36498 - DNA, 792 bp, Macaca Mulatta
agggttaaaaaataaattgcccgtggaaactttgggggctgttctccaacccctgtaaagtcccttaatggtaaagtctccctaaaattttgtaactttaatcagggtataggggccaactgatgtttagtatgtgaaatgtgtataaaaaattatgatatgattcactcagaccccttagatgtcatctagcctacccctttacccaatgcataaaaatactcctccccagttccaagttaatattaagattccctctcagtcagtttattaagtagtaatgattatgttcatatctatttaagccacaatgaattttggggggaagattttacttattactagttcctcatgtcatgatcaccacacactgcacatataagtgttcaaatggtttgctaaatgaatataagtacacgaatgacaatattcatatgtgttcatatattcagtggttaaccaataagaagcatttaggaaaatgtcctcatttgcttgttacgtatgaattttctattttaatccttaggagaacaaagattgtaggtgacccaagaaatggatgctaaaccgaacccttaaaaagggaaagagaatgaagtaggagcaaccccattacatggcctagaatcatagttttagagctgggaggtacctcaaagatgaattaaaccaaaatcaacctttgagtagtacagggaccatattgcatatctggaagctgttaaaaaagctgagtaattgcccaacatgtcacacacagctaacccactgacataaaaccccagtccc

SEQ ID NO: 36499 - DNA, 400 bp, Macaca Mulatta
ccctgtactatcagccatggtcaatcccacggtgttcttcgacatcgccctcgatgagcccttgggctgcatctcctttgagctgtttgcagacaagtttccaaagacagcagaaaactttcatgctctgggcactggagagaaaggatttggttgtaagggttcctgctttcacagaattattccagggtttatgtgtcagggtggtgacttcatatgccataaaggcactggtggcaagtccatctgtggggagaaatttgatgataagaactttatcctaaagcatacgggtcctggcatcttgtctatggcaaatgctggacctaacacaaacggttcccagtttttcatctgcactgccaagagtgagtggttggatggcaagcatgtggtcttt

SEQ ID NO: 36500 - DNA, 738 bp, Macaca Mulatta
  misc_feature (1)...(738): n = A,T,C or G
ggnnnnnnnnnnnnnnnnnnnnnnnnnnnnnnnnnnnnnnnnnnnnnnnnnnnnnnnnnnnnnnnnnnnnnnnnnnnnnnnnnnnnnnnnnnnnnnnnnnnnnnnnnnnnnnnnnnnnnnnnnnnnnnnnnnnnnnnnnnnnnnnnnnnnnnnnnnnnnnnnnnnnnnnnnnnnnnnnnnnnnnnnnnnnnnnnnnnnnnnnnnnnnnnnnnnnnnnnnnnnnnnnnnnnnnnnnnnnnnnnnnnnnnnnnnnnnnnnnnnnnnnnnnnnnnnnnnnnnnnnnnnnnnnnnnnnnnnnnnnnnnnnnnnnnnnnnnnnnnnnnnnnnnnnnnnnnnnnnnnnnnnnnnnnnnnnnnnnnnnnnnnnnnnnnnnnnnnnnnnnnnnnnnnnnnnnnnnnnnnnnnnnnnnnnnnnnnnnnnnnnnnnnnnnnnnnnnnnnnnnnnnnnnnnnnnnnnnnnnnnnnnnnnnnnnnnnnnnnnnnnnnnnnnnnnnnnnnnnnnnnnnnnnnnnnnnnnnnnnnnnnnnnnnnnnnnnnnnnnnnnnnnnnnnnnnnnnnnnnnnnnnnnnnnnnnnnnnnnnnnnnnnnnnnnnnnnnnnnnnctggtccggaaatacccccgaaaggctaacctctgaattaatcccccgaatgccctaccacctaacaattgaaaataaccccctattcactcctaaataggggcttccctttcaatccctcaaccttaagtaagaca

SEQ ID NO: 36501 - DNA, 167 bp, Macaca Mulatta
ctgtagtgtgaatcacaggcgtagccactgtgtcggccccatgtatgttaatagtgaatgtgtggcttttcatttgtttctttcagctagtaaaggatacctgttacagacacatcaaaaatttcactttcaaacgtcattttgtgacacattcagtggctgcatct

SEQ ID NO: 36502 - DNA, 272 bp, Macaca Mulatta
atgtttatgtacatttttaaagtcagtggtttaaactgtatcctttttgggttttggagatggaggtttgctctgcccggctggaatgcaatggcgcgatcttggctcactgcaacctccgcctcccgggttcaagcaattctcctgcctcagcctcctaagtagttggaattacaggtgtgcaccactatactcaggtaattttgtatttttagtagagacagggtttcaccatgttggtcaggctggtctcgaactcctgacctcaagtg

SEQ ID NO: 36503 - DNA, 892 bp, Macaca Mulatta
  misc_feature (1)...(892): n = A,T,C or G
ggctaaattaagactacatcttgactcttacctcataagaaacacacaaattaatttgagaaggatcataattttcagggagtacctcataagaaatacacaagttaatttgagaaggatgataattttcagaaagtagaataataaatgcaataacttactctctggatttaattctgacagaaaaaggaaatagttcccccaagacatatataataaatatgtaaagatttttatattcaccaaaatctcaataaagtgggtagagacataatttcaatagtaggggaaaataataatatgtccagaaaatggttatcaaaaagttattttccaaggctattttgaacaacaataatgaagagtgggagtggggttagtagcaacagtatttttcttttaaaaataattttgagtagattattcactcacatcatgcaagaataaaaattacattaaaaaacaagaaaaaatgagatctttacttcaacataattctatggataatcaaggaaggcatggtatctggccacacttaggtgaacctaaggtaaatttgtttgnnnnnnnnnnnnnnnnnnnnnnnnnnnnactctgtgcacggctgagtgacctcaccctctgactcctcggnnnnnnnnnnnnnnnnnnnnnnnnnnnnnnnnnnnnnnnnnnnnnnnnnnnnnnnnnnnnnnnnnnnnnnnnnnnnnnnnnnnnnnnnnnnnnnnnnnnnnnnnnnnnnnnnnnnnnnnnnnnnnnnnnnnnnnnnnnnnnnnnnnnnnnnnnnnnnnnnnnnnnnnnnnnnnnnnnnnnnnnnnnnnnnnnnnnnnnnnnnnnnnnnnnnnnnnnnnnnnnnnnnnnnnnnnnnnnnnnnnnnnnnnnnnnnnnnnnn

SEQ ID NO: 36504 - DNA, 655 bp, Macaca Mulatta
gtttacctgcttgtcaagcacacatgctggaaaccatgcccaagtcagcaatacccgtaaaaccaattgccacagaaactctcatcaatggtaaaggaaaggaaagaggaggcaaggggcagcctcctttgcgccacagatccgagggtggcttagtggataagggacccttgaagaagttgccccacctgtctttgtctcagtatgacttactagaaacagacatttctttccagccatgggggagtgagaattcagtcctgattccagaacctgtcagttgtccccagggttccgtaagggaacgggtacaaagcaagtcaccccaagacagcctgagcagcagctgccctcagtgtgacaccatcgtggccaagcctgtggaggagccagcagacacatcctgtcaggtggatacctcctgccaggtggacctgcccttgaaccaggaagtggactcctcagatagtgaggtggctattactctcatcgatacttctcaacccggagacccactgagtctacatgaacccataaaaattgttatcacgatgagcagtaccccaaactccatgacagatttggaaagctccctccacctgaaggtggttggcatagagaagaccggtgtaaagtctgacgctgagccaactaa

SEQ ID NO: 36505 - DNA, 752 bp, Macaca Mulatta
  misc_feature (1)...(752): n = A,T,C or G
gaaggagttaattttcccttcaggttaaccccagtaaaggggggggggtagccttccattaggtaaggccctgagccccaaaggagcccttgttcagagtttgctttagatggggaacaggctcggagcatctggcccagcctttaatattcctagtttcaagactcttaaagggataagactggtccagacagcccctaagtatcgggaagatgtggtttgtaatatgtcattagaacatggacattacggtctatgggactgtttcaaatcctagttctatcagttattagctgtgtgaacttttctagagccttaatttcctcctctgtaaaaggagaataataaatattnnnnnnnnnnnnnnnnnnnnnnnnntgtgcctggcccaacttaagagtacttacagaggtgttgatgtgttgataatgcctaaaattttannnnnnnnnnnnnnnnnnnnnnnnnnnnngtcgacggagttttgctcnnnnnnnnnnnnnnnnnnnnnnnnnntgtgatctcggtnnnnnnnnnnnnnnnnnnnnnnnnnnnnnnnnnnnnnnnnnnnnnnnnnnnnnnnnnnnttgggattacagacatgcaccaccacacccagctaatnnnnnnnnnnnnnnnnnnnnnnnnnnnnnntccatgtcagtcaggctggtctggaactcatgatctcaggtgatcttcccnnnnnnnnnnnnnngnnnnnnnnnnnnnnnnnnnnnnnnnnncgtgcc

SEQ ID NO: 36506 - DNA, 502 bp, Macaca Mulatta
  misc_feature (1)...(502): n = A,T,C or G
ggggttcacttgtgagcagaaaagtcaggagtcacagtggtggtcaggactcagagggaggcagggagcccaacaagatgtctgcaatgtttagggaaagatgcaactggagattgggaggaggaggtgctggtagtagtgttagtgaagtggccaccaagatggcaatgaaagaggaggtgtcatggtttagcaattccgggtctgcacagagaaatgttcacgcctcccaccatgcttcagttcattgcttctggcggatttaaccaggactcacatagactcttggtgggagatccagatacagaggccccagggtgcctatcaggtagctgggaagacagaagtctgaacagnnnnnnnnnnnnnnnnncannnnnnnnnnnnnnnnnnnnnncggagattgcaatgagctgagatcgtgtcactgcattgcagcctgagtgatggagtgagactctgtcacaaaanannnannnnnnnnnnnnnnnnnnnnnnnnnn

SEQ ID NO: 36507 - DNA, 647 bp, Macaca Mulatta
  misc_feature (1)...(647): n = A,T,C or G
catcagctccttgagcttctccggagtggacagtatcagctttctcgatggccggggcagcagctatggtggggccagcgtcatgagaggcatcatcaccacagtcgcagtcaaccagagcctgctgagcccccttgtcctggaggtggaccccaacatccaggtggtgagcacccaggagaaggagcagatcaagaccctcaataacaggtttgcctctttcatagacaaggtacggttcctggagtagcagaacaagatgttggagaccaagtggagcctcctgctgcagcagaagaccgctggaagcaacatgcccaacatgttcgagggctacttcaacaaccttaggcgcagctggagactctaggccaggagaagctgaagttggagggggagcttggcaacatgcaagggctggtggaggactttaagaacaaatatgaagatgagatcaataagcgtacagagatggaaagtgaatttgtcctcatcaggaaggatgtggatgaagctaacatgaacaagatagatctggagtctcnnnnnnnnnnnnnnctgatgagatcaacttcctagggcagctgtatgaagaggagatccaggagctgcagtcccagatctcggatacatctgtagtgctgtcc

SEQ ID NO: 36508 - DNA, 819 bp, Macaca Mulatta
  misc_feature (1)...(819): n = A,T,C or G
ggggagagcttcttttgctccactccccctgtgtgtgtgttgtgtttcagtcctgatttcagtgttgcagaacaagcttgttgtgtgtgtgcaccagggggatttttgttttgcttttcttaaattttaatttttgcttttataaaacatacacaggacggtctgtgacatttgatggtccatcttctttaataataaatttgttgaagagattataatttccaaaataaagcggctgcaaccaaacacattcaatgcagttagaaggaaaaggtcaactccatccaatacagaccgtaagtacggttgcgtggtgtgtctctatatagcacttagcggggacttcatgcaggggaatgtgcgagttttatgcatagaaatgaggaactagttacagggtttggcttttgcatttagaacaacaacccaagaagggtgaattttattcagtcagataaaagccagtggcagacttgggacgaattggttgagcatctgcagtttctgttgtccagttatcaacatgttttaagagaacacttaaggagttccgtgatcgaccngaaggacttaataatcaaaaggattaagcccaaaccccaggcaggagatgacatcacagtggtggacgtagagaagcagattgaggccttcccgcagcccgcctgatccagatgctggggggagcctctttgtccctcaactccaagaacaaagtgcactttgttgaaagcttcctgcctctttctatgcctgccggactttgnaaccctggacgccaaaagccctcctcaaaaagggcctgggagccaactccct

SEQ ID NO: 36509 - DNA, 638 bp, Macaca Mulatta
attcatactggtgagaaaccttttaagtgtgatgaatgtaacaaagcattcagtcaaaattcacatcttgtacaacatcgcagaattcatactggagagaaaccttacaaatgtaatgaatgtggcaaagtcttcagtcaaaattcataccttgcatatcatcggagaattcatactggagaaaagccttataaatgtaatgaatgtgggaaagtcttcagtctgaactcatccctagcacatcatcggaaaattcacactggagagaaaccttacaaatgtaaagaatgtggcaaagctttcagtgtacgttcaagccttactaatcatcatgtgacccatactggagagaaacctttcaaatgaatgtggcaaactcttccgcgacagttcatatcttgttggtcatcagagatttcatgccggagaggaatctaacaaatgtaattaatgtggcagatggttcagtcagcattaaagccttgcaacacatacaataatttatactggagaaaaactttgcaagtataatgaatgtagcagagcctttagttttgttcaaggcttatcttcaagagctagtccataggggagagaaactttactaatgtataaaggtggcaaggccttaaggtaaa

SEQ ID NO: 36510 - DNA, 479 bp, Macaca Mulatta
ctgcttcctgagccaatctgtgatggagacgcccccagagaagcctccaggggctggaagtgtgccctaagactggacgcggaaggaggctcatgagatttttttctgctctttcagaaatggctgagcgacacaacaccaagcaagtcctgaagctggcgcgggacctcgtgtacaaggtgcagactctgattgagaacaagtgaggggcacctcacccaggcagcctcagccaagctgccccacctgttcctctgcttatttttcctcctggctggacggtcaccccaggagcggggtcctggtgtctgttcacaagcatggagttcagtgcaaaaagaaactaccgtgactttcacttctgggcagatggggtggagggagtaccccttcaatttagccttacgttttcctgtttgaccaaagattgcccaagtctggcgttcctcccttgcaggaggtaggggatgttggtggat

SEQ ID NO: 36511 - DNA, 742 bp, Macaca Mulatta
cgaggcactcagtctactccatatccagagtggacagttactcaccaattccacatgtgtggtcagtcacctacacagctgctcatctagtattaatggtcattacccagtcctcatttggatcagtattccctcacatagctgtacatctagagtccatggtcactcacctggcttcaaatctaatgtcagtggttattcacccagcctcacatctagggcttatagtcactcacctgggcccacattcataccaatgacctcacatgtggtgtcagcagtcattcatccagctgtacagtcacaggtcacccaccttgccttgcaccatattcccagagcaccagggatgaagctgtcgcaacctcccaagctgccaccatctccgaatctgccaaaccatgaataagaatagtgtcaccagatttcctggactctggaagcagctgctgccgcagtgtctgcaggctagggtatgggtcagttggccccagagaagccccatatcccccttagccctgagcaggtcctccagcagccattccatttcccttagccttgtggcagtttaccctgaggtcatcactgcatcacagaacaaagaactcccatcccccacagaggcctgggcttaacagccttcttcctgaatttagaacgaaaaaaatttcctccatcaggcaattcctgcctcactcagtgaaatgagggtgatccccttttgattgcccagttcagaatt

SEQ ID NO: 36512 - DNA, 791 bp, Macaca Mulatta
  misc_feature (1)...(791): n = A,T,C or G
gggacaggctcctgtcagttccctacatcacnattgagtggcaggtagaatctctagttcgtggaggtctgatggatccatggtccccctcctcatattgtgcaaacctctgcttctgtccctcatccttgccactctcaatagtcttccccaacaacacttacgaagacaagggcttggagaaggagaaggactgagtgtccctggcacgttctgattaatcctattcattgtcaagtacagctttttaatgagctgattcattacagagagtaggtctcatgcaaatccctagtttgtatcccgtggatttgatttctaacaatttcctcatttcagcacaactccattttaccactggctttatgattttctaatgtagagcttgacctcacattttaagactataagatgaatgctaaaaaaacgaaatccttaaaataaaaattccacttaaaagaacatgtaggtggatattcaactcatctctaaaggaagaaaggttgtctacacataaaaattttggaaaaacactgggtttagtggcttaaacctataatctctgcacttttnnnnnnnnnnnnnnnnnnnnnnnnnnnnnnnnccagaagttccaagaacagttctggggaaacataaatggatacccctgttttctannnnnnnnnnnnnnnnnnnncccaggttattggtaagtgccacaccctggtggccaccctgttgttttgggaaaaaatgaaacggaattgccttggaaggctttcagtggaacccatggatttgccactaac

SEQ ID NO: 36513 - DNA, 662 bp, Macaca Mulatta
  misc_feature (1)...(662): n = A,T,C or G
atcggcacgagggctgactgtgtaagatcgtaggtgtgctacgcatcatttgtaatggatgcataataattctatcccagggttatggggaggattaactgagattatacacgagaaacagtccagtgcttgggctataataaatgctcaaatagattagctgttgttacttaaaaattatgacaagtaaagccctttataagctcttcaaagcagtcaaagacatccatttttannnnnnnnnnnnnnnnnnnnnnnnnnnnnnnnnnnnnnnnnnnnnnnnnnnnnnnnnnnnnnnnnnnnnnnnnnnnnnnnnnnnnnnnnnnncnnnnnnnnnnnnnnnnnnnnnnnnnnnnnnnnnnnnnnnnnnnnnnnnnnnnnnnnnnnnnnnnnnnnnnnnnnnnnnnnnnnnnnnnnnnnnnnnnnnnnnnnnnnnnnnnnnnnnnnnnnnnnnnnnnnnnnnnnnnnnnnnnnnnnnnnnnnnnnnnnnnnnnnnnnnnnnnnnnnnnnnnnnnnnnnnnnnnnnnnnnnnnnnnnnnnnnnnnnnnnnnnnnnnnnnnnnnnnnnnnnnnnnnnnnnnnnnnnnnnnnnnnnnnnnnnnnnnnnnnnnnnnnnnnnnnnnnnnnnnnnnnnnnnnnnnnnnnnnnnnnnnnnnnnnnnnn

SEQ ID NO: 36514 - DNA, 141 bp, Macaca Mulatta
cttgtcctgctcctgttctgcctgctgcttcaggtttccaagtttctgaaacaccccctcaagctcctgctgagtccctgtcttacgctccctcacctctgcagaaaaatttgccagatgctgcagatgcttctcctgcca

SEQ ID NO: 36515 - DNA, 1155 bp, Macaca Mulatta
  misc_feature (1)...(1155): n = A,T,C or G
ggacgaactgtaattttaaaatttataaggccacatgattgtaaattttagttgtcttaagttaggaattggtgaaaagctatttatgctggatttgggtcaaaatgacttatttgcaaaaaatataaataaataatgggaagaaagggctgtataatgaaatactgcaagactcacctattggttggaaatttccctctaatcacctacagattacccttgatttccctttgttttcagtttctcaaaacgaatgaaatgaaatatagcagaatgttaacccatataaaaataaagtgtacccaaatattgaataaatacgttgaacctcttcaaaaaaacttgtccggccgcactcggccctcaaaagaagctttcttaaaactattcatctagcgcacgtcgggaccccagtttaggcaaggtgaaacaatggtgtctacaacctggatattccgttagtgaagaatccctagccccccttagtacctcactggactagtgggtaatttcctcctcccccaaatcaaaaaaatatattggatacactggcgttcaggttaattaacccccgatacactggtatttatcctcgctaaactacaaaaaatatttcctctcatcaattatgagcggcgaaagttgcttttttgactcaacgtaagaggaggaggtcaccacataatggtttagcnnnnnnnnnnnnnnnnnnnnncttaaatcacaccccacagataaacaacatgggggggaaaactgcatttgctccacctaatccccactcgcagaaccgcccttcacccgcttcaaatacgaatttcaaagatcaaatattatattcatatcgcccctcacccagaattcccttcagtgggggccacatgatttcgtaacgctttattaggggataaatacgttcaaacccggcctcgtaagagcattacaaaacatctcgcagtctagctacacgagtggtaaatcttcgcctttggcacctcgacagcttctagggatcgataaacgcgccctgactatcattgattaaataactgcgtgcgcccgatattggagtttaagaaacagccccgatgggagaatctaacctacagcagcgactaagagtatctcattacgcacactctatatcccacactc

SEQ ID NO: 36516 - DNA, 455 bp, Macaca Mulatta
atactcttttgcaagaaaagggctccctgggatttccaggtgtactgcacatgcccttgatccagctccggagaagcaagtaaaaagggtgggtccctcataggctagaatgtgcagctctttctccaggtgggatgtagtacccctaagtagagctttctgctctgctcctggaagaggctagggagctggggctggggctcccctcccatgcccaggaagtggtcaccccatgggacaggcacagctacttacgtgaacacagcaggttggtgtggctggctaactaggacctctcgaaagcctctgtgggggcatgagggagaaaaggccactgggagaatcactgcctttactttggaactacttttatgctgataacttgggatttcttgatagtccttcacccccaaaaccccgtatttacttaacgagatttagctcctagttcttca

SEQ ID NO: 36517 - DNA, 589 bp, Macaca Mulatta
tcgcgagccagcagaggcggtctgcggtcgggtacctgcgtccagtggtggcctgtacagcgcgagtgcggccgagagcaacgcgacaacagccgtggcggcgactgcagccccggcccccgcccgtgtgaccatccccgggccaaatggagtcgaccttacctcgcctgcaagcccggattgccccacagcgaggactcagggccatcgggcagcattccgggttcccagccgcccccgcgccgccgccggaaacacagtcattggaagctttttccggtttcccgaccgcccccgcgccgctgtcggaagtgggatcccaactcgctcaatcacacccggttctagatgattgacaagcgcgacgcccaaaccggcctggccccagctctggcctaagagagttcggctggaaggcaggttgaagagttaacaagggtctgggtctggtttgtgtttattggcccattttcaggcatgcggcgttatagaaaatgattttgccggcaggtggagtgccgaggcccactatttgcccccagcgtggcagtcaggtgcctttctgctccaggcgcggcctctgccttga

SEQ ID NO: 36518 - DNA, 543 bp, Macaca Mulatta
cggaagcacactgggggctcgctccatctcggcccattttacttcctgttccagacagcctgaccctggattctggccttctcatgacctctgctgatcctcctctcctctcctgatgagccttccacctctgacctctcactgttcacgctggacctgtggatctcctgggactccgagcaaggcctgcacgagagagggctgaaaggctgctggggctgccacctcgctgtgcccgcataagcatctgcccccgacccccttgaccttcatctgatggacatttttatacagaaaacaataaagatttccctctcagcttcgtgctgtctgcttaacattattagcaggagagggctgttccctcttctctcctcggcccgtgggggctcagcccctcctcggtagttttcaccaccctgcctggagcagcacagccaatattggcagacttgcttccctgtgccaatatttctgtgctgctagagccagggaagctgggtgtgggtaacaaagaccccactttgttctcttgaggcagaa

SEQ ID NO: 36519 - DNA, 2588 bp, Macaca Mulatta
  misc_feature (1)...(2588): n = A,T,C or G
cctacctcacaggggtgttgtgaggatcnnnnnnnnnnnnnnnnnnnnnnnnnnnnnnnnnnnnnnnnnnnnnnnnnnnnnnnnnnnnnnnnnnnnnnnnnnnnnnnnnnnnnnnnnnnnnnnnnnnnnnnnnnnnnnnnnnnnnnnnnnnnnnnnnnnnnnnnnnnnnnnnnnnnnnnnnnnnnnnnnntaacttgactgcttcatgtagtttgaaatcttaatttttaaaatccttgtgtggctcattagactagtataagcacaacctgtatttgtaccttaatctcttacgtttccactactgtgtctctgacatatctactagtaagcactcttgtcaaactgtctttctagccttcattttactggttcttagtctcttatcaatataaggaaataagaagtgccagggagccaccatagtgtgttatggtttatatcgataatcttcaatataaaatattggccattttataaaatattaaatgtatgtaaattctttgcatttcatattatttgggtcccttgatatgcctaaattacatcttgaagtttcggttgccattagaacattgtggaaacaattcagattatatcagtttccaatctgctttttagctgatttcattcttttnnnnnnnnnnnnnnnnnnnnnnnnnnnnnnnnnnnnnnnnnnnnnnnnnnnnnnnnnnnnnnnnnnnnnnnnnnnnnnnnnnnnnnnnnnnnnnnnnnnnnnnnnnnnnnnnnnnnnnnnnnnnnnnnnnnnnnnnnnnnnnnnnnnnnnnnnnnnnnnnnnnnnnnnnnnnnnnnnnnnnnnnnnnnnnnnnnnnnnnnnnnnnnnnnnnnnnnnnnnnnnnnnnnnnnnnnnnnnnnnnnnnnnnnnnnnnnnnnnnnnnnnnnnnnnnnnnnnnnnnnnnnnnnnnnnnnnnnnnnnnnnnnnnnnnnnnnnnnnnnnnnnnnnnnnnnnnnnnnnnnnnnnnnnnnnnnnnnnnnnttacttagtacttttaggaatacaaataggaatccttgggatttaaaaagttttcccataatctagaagttgnnnnnnnnnnnnnnnnnnnnnnnnnnnnnnnnnnnnnnnnnnnnnnnnnnnnnnnnnnnnnnnnnnnnnnnnnnnnnnnnnnnnnnnnnnnnnnnnnnnnnnnnnnnnnnnnnnnnnnnnnnnnnnnnnnnnnnnnnnnnnnnnnnnnnnnnnnnnnnnnnnnnnnnnnnnnnnnnnnnnnnnnnnnnnnnnnnnnnnnnnnnnnnnnnnnnnnnnnnnnnnnnnnnnnnnnnnnnnnnnnnnnnnnnnnnnnnnnnnnnnnnnnnnnnnnnnnnnnnnnnnnnnnnnnnnnnnnnnnnnnnnnnnnnnnnnnnnnnnnnnnnnnnnnnnnnnnnnnnnnnnnnnnnnnnnnnnnnnnnnnnnnnnnnnnnnnnnnnnnnnnnnnnnnnnnnnnnnnnnnnnnnnnnnnnnnnnnnnnnnnnnnnnnnnnnnnnnnnnnnnnnnnnnnnnnnnnnnnnnnnnnnnnnnnnnnnnnnnnnnnnnnnnnnnnnnnnnnnnnncctgcctcagcctcccaagtagccgggattacaggcgtgagccaccgtgcccatctaattcatgcctcaatttcttcatctccagattgagggatttgtactagnnnnnnnnnnnnnnnnnnnnnnnnnnnnnnnnnnnnnnnnnnnnnnnnnnnnnnnnnnnnnnnnnnnnnnnnnnnnnnnnnnnnnnnnnnnnnnnnnnnnnnnnnnnnnnnnnnnnnnnnnnnnnnnnnnnnnnnnnnnnnnnnnnnnnnnnnnnnnnnnnnnnnnnnnnnnnnnnnnnnnnnnnnnnnnnnnnnnnccagacatacagactctgctttaaaagagcatatacttaaggcattgaaatggatacagctatattcattgtctcaattgtcttaggctattatatggaaagatatatgtcaattataggtaggtaggtagattttctgaaaaaacagaagtacttgacggagagttaggcctgtattctataaatctattaatggtagctaagtgcataagacaagaatttctttgagatgaaaggagtgctgaggaagagaagtggaattaatacttggatgtagtattgtgaaattcaatgggtaaagtaaccgtaatgtgggaataaaagtcaagggaaaggttttgaataagtacacaggaaaataggctaaaattattaaggggaggaaaactgcaatacagggagacagtgtgcaagaaagcaagccaggaatctgcctatgtggtagacccaaccattactacctgaacccccttagaaaagcctttccagcattccataactcaggttcctcatttatagagtgggaaactcataactgtcctacctacctcacaggggtgttgtgaggatcaaaggaacagatgaatgtaagagcactttcagatgtgtaatgcactgtcatgtaacaagtgggggaaagactcgagcacattagtgctggtgtgtgccaagcctgtgggctgttgaccataagggatatgtaagaaggaggaggaag

SEQ ID NO: 36520 - DNA, 223 bp, Macaca Mulatta
gagggaaaatgatgactgcgctgtgtctctacttcccgtggttaccgtgtgaggctaaagctgccactcagaacagcgagtcctgtggtgtcgagagcaggaaggggtcggtggccaggtgacgccgtggaaaggcgtctcggtggaaactgccgtggtgggaaggtggcgcgcttgtcacggctgagttgctgcgcctgcagacagaagccctccacaggca

SEQ ID NO: 36521 - DNA, 777 bp, Macaca Mulatta
ggactgtcagtagtattgccttacatagctataaaatgtttcacgtgtaacatacactaagtatacatatgtttaaaatttaaattttagaaggctatttccttttaaattacttggtgtgatagttcaaaatgttatgtaaaaacagaattagcacatattgccagggatcatcgaagtttcaagtccacattattataaatacaaatacacctcagcttttactttaacttacaattatttccccagcccatcaaaattctcctagatgtatttaatctttagagtaggccttatcttccaaggttccaaagaatttgcagccatatattgtgtttgcccatatctatttttataaaatgggattttgaacttcctttcctcttagatcactgagtacttcatagtaagaaagcaccctcgttcgttaagaataaacaagaccatgatacccttgaaacagaatttcttgaaacattttaaaaataatttgctctcttaaatacaattttcacagtccatttctttactgattgttaggttgagtacttcagattcttctcaagttttttaggggaacaactaaatactgaaactttctgaaagtgggaagtggggatgaagtctgccatagtttctgtggtcccttcccagctttaagattttgtgattccaatacatggtgaaaattgtgtgggtttaagaaaaagggtgtaatgggatgcatgattattaccctaagggagtaattgacaccaattagtgctcaacaatgac

SEQ ID NO: 36522 - DNA, 710 bp, Macaca Mulatta
caggaaggtggaacattacttcaggccagacatgggcagcaggataaatacaggtaccccacaggtgttgctggtccttacagatggccagtcccaagacgaggtggcccaggccgcggaagccctgagacgcagaggtatcgacatctactctgtgggcattggggatgtggatgaccagcagctcatgcagatcaccgggactgcagagaaaaaactgacagtgcacaactttgatgaactgaagaaggtcaataaaaggatcgttcgcaacatctgtaccacagggggtgaaagcagtaagtatttagcaagttcatatcgattccctacaccatcttctctgacattttctttaagctccattgtcatcccctggggctagtgggagcatttagaggtgtgcttctggatttcaaattgagctttttgcagttattaaatatttatcttgacctgcggattgagaaacagggtgtctgaaatcctgtgccctttttcctccctgtctcctgggtgagcatgcctcctttgtgagtgggaacgcctgcctttcggtgtgaggaaaaggccattgtttgcaatctggctggtttcagaggttgaagagcatgcctcaaagaaaggaaatatttgactgattttttggttgcttggcaagagggcctatagggctgccaagagctgtggtagcagataggtaggaaacc

SEQ ID NO: 36523 - DNA, 674 bp, Macaca Mulatta
atcatctaggatatttggaaatagaggagggatatgtcaggatgccagcctggtgaagaggagggtcagggcatatcaggcagtgttgcctggaggagatggtatctgaattgatcttaaaagatggagagatgggggtttaccatggaaagataagcaggaatgaatattccaagtgaaaggccctctatacgcgaggcctggaggaaggaaacagcagagcacatgcagggaacagcatgcagcatgaggtacagggtgaggagtggggcaagagaagaccagagaggggatcactacccaggctcccaacttccttgtccacaccatcccctgcccccacctcccactgcgtgttccaaaagcaatcagttaccaatttcagaagtgctgccttgctgttgtgtgtatgatctgttatattcctcccatttcatcgtaattcctgcagttttcctggccttatcacagcccttcatcctccccaacccttctacccctacccatggacctctcagttgatttcagtctcaatgttaacaagagcttgcgtccaggcatatttgcccggctgttaagaatcactcctctgtacctccatctcaccagttgctcactatcaggcaagtagcatgcgctttcagggctctgctgaggtcttcttcccttattcc

SEQ ID NO: 36524 - DNA, 788 bp, Macaca Mulatta
  misc_feature (1)...(788): n = A,T,C or G
ggtcagttcccacctttatgcttccacactctcccttccccagtgccggagccagatgagctgtttcctggtgttcaggtgtgacgtcatctctcattctgctgagcctgggctttcactggtccctggactggaccttccttccctactctacggttctgaaatttgtggtgtatnnnnnnnnnnnnnnnnnnnnnntttttcaaactaaaatagtgacgttaaaactgaaggaagaaaggtaaggaatgtgtgaatgatgaacgttatttgaccaaccagacaaatatatcatttgtgcaggttaaaaaaacatattaataacttcatgaggttaaccaatttaggactcaattagaaatgtgatcccaggaactacatacaaattattataattatggtgacaggaaatggcgctcctaggaaatggtagaaggcagaaatttaaaaggggaatatattatttaaaagtcaggcagcttgtctttgcggccctaagagttgaattgggaaaattaaagatctcagatcataaaactaccagcagaatgaagtactaagctaatccactcagcggaaagcagttcaccaccataattggaaatgcaggattgtggttacttaatagaagtgaacatttaatcatgtcagggccactgtgtgccgtagatttaacataccatctctaacatattttgcaacttggacaattaattccacacctggtactggtcccatattcagncttataaaaacatggtccnnnnnnnnnnnnnnnnnnnnnnnnn

SEQ ID NO: 36525 - DNA, 781 bp, Macaca Mulatta
  misc_feature (1)...(781): n = A,T,C or G
tcatcactgcaaaaggggatgctctcaacagtgatgtctgtggtcactataccattggcaaagagatcaacgacccagtgctggactgtatctggactccgtcggaccagtgcacaggacttcaggacttcctggtgttccacagctttggcagggccactgcctctggctttacctcactcctgatggagcagctttctggtgacaatggcaaaatctaagctgtaattctccatctactcagccctgcaggtgtccacaggcatggtcgagccctacaacttcatcctgaccactcattcacaccaccctagagcactcagattgtgccttcatggtggacgatgaagccatctatgacaattgctgccacaacctggacattgagtgcccaacctacaccaacctcaactgcctcattagcaaagtaatctcctccaccacagcttctctgcactttgacaaggccctcaacatggacctgacagagtttcagatcaacctggtggcctgcactcacatctacatccccctggtcacctatgtgccagtcatctctgcagagaaggtataccacagcagctgtttttggcagggatcgccaatacatgctttgagctggccagccagatggcaaagtgtgatggnnnnnggcttactggtatggcaagtgtatggcttactgcctgttgtaccacagagatgtacccaaggatatcaatgctgccattgccaacatcaataccaagtgcggcattcagtttgtggactgctgccccac

SEQ ID NO: 36526 - DNA, 640 bp, Macaca Mulatta
gggatctctctcgcgggtcggggttacatggcggcgactgcggcaaagcgagagcctcggagacgccgctgctgccagcacagccggagacctgagccgacactgggggctgtccgcgggtcccgcactctctcaatgagtcggagaaatcccgttgtatcagagtaagatggacggtagctttgattgtgattgtggtgagctggagccacctgatcactaacaaaagacatcttctgttaaccaacagccgccagagcttcctgttgaaataaatatatagcaacaaaggaagaaaagaagcaaaacggaaatagtgcttaccagcaccttagaatgatgctgctcaggaccagtccaacactgaatgtatctgcactgtgaggagaatgttcatagaagcctgttgtgtgcatatttattcacatttttgttaaatgttaaatcgtttagcacggtaatctgagtgcacagtatgtcatttcattccgtttgagtttcttgttttctttaaatgtctgcagagttgctgcccctttcttgaactatgagtactgcaatctttttaattctcaatatgagtagagctttttgagctttaaatctaaggggaactcaacaggcctgtttggcatatgca

SEQ ID NO: 36527 - DNA, 232 bp, Macaca Mulatta
gggaacccacaatcttggagtgcccaaatggctttcttggttcatggaagacattactgcaaataactttcaataggggaacatgggttgatgtgaggtgagaagaagggaaaaaaagtaatgcaataaaagaatgtaatttaaatcctagtctctctcctttcttcgcctaaagtcttgatgaaaatttcttgagataaaaaatgtcctgagattaaattagttttttaag

SEQ ID NO: 36528 - DNA, 1662 bp, Macaca Mulatta
  misc_feature (1)...(1662): n = A,T,C or G
gagtcccaggattccggggactggagggcagcgccggcagctaagnnaggattttgacacttcatgacatgtcattatttagagcaataatgaatattgatctgttttggattagttgatgaccttcagaaatgatccaataatatctactatagagaagctgaatatactccatttggagtgaacaactagattgttacagaattttcaagatgacagatccaatgatggacttttttgatgatgccaatcttttcggtgagaccttataaggcttgtcggatgatgcatttgtacaaccaggacctgtttcactagttgatgaattgaatttgggtgcagaatttgaaccattgcacatagattcactgaaccatgttcaaagtactccagcacatcagaagatgactgattttgaacagttaaatcaattggattcaataaaatttcaccacgttaatcaatctagtggtagcccagaagaacaagtattatctccgcactctcagtttgactgttatccaatccacccccaaaaccaacccaatggtttgtttccagatgtatcagatggcagtccaatgtggggccatcagacatctactagcatttcaaatcaaaatgggggtccttttcatcaacaaggacattcacactctatgcatcnnnnnnnnnnnnnnnnnnnnnnnnnnnnnnnnnnnnnnnnnnnnnnnnnnnnnnnnnnnnnnnnnnnnnnnnnnnnnnnnnnnnnnnnnnnnnnnnnnnnnnnnnnnnnnnnnnnnnnnnnnnnnnnnnnnnnnnnnnnnnnnnnnnnnnnnnnnnnnnnnnnnnnnnnnnnnnnnnnnnnnnnnnnnnnnnnnnnnnnnnnnnnnnnnnnnnnnnnnnnnnnnnnnnnnnnnnnnnnnnnnnnnnnnnnnnnnnnnnnnnnnnnnnnnnnnnnnnnnnnnnnnnnnnnnnnnnnnnnnnnnnnnnnnnnnnnnnnnnnnnnnnnnnnnnnnnnnnnnnnnnnnnnnnnnnnnnnnnnnnnnnnnnnnnnnnnnnnnnnnnnnnnnnnnnnnnnnnnnnnnnnnnnnnnnnnnnnnnnnnnnnnnnnnnnnnnnnnnnnnnnnnnnnnnnnnnnnnnnnnnnnnnnnnnnnnnnnnnnnnnnnnnnnnnnnnnnnnnnnnnnnnnnnnnnnnnnnnnnnnnnnnnnnnnnnnnnnnnnnnnnnnnnnnnnnnnnnnnnnnnnnnnnnnnnnnnnnnnnnnnnnnnnnnnnnnnnnnnnnnnaattatctcctgtgcacatgaacttcccagatcctgttgactcaggaactcaaatgggccatttcaatgatcatgtagagactaatggcttttcatctttagaagagaatttacttcatcaagtggaatctcaaactgagccattcacaggacttgaccccgaggacctccttcaggagggacttcttcctcactttgatgagtcaacattcgggcaagataattcaagtcacattttagatcatgaccttgatcggcagtttacttcgcatcttgtaacacggccttctgatatggctcagactcagttgcaaagtcaggctcggagttggcattcatcattttctaatcatcagcatttacatgacagaaatcacctatgtttacagcgacag

SEQ ID NO: 36529 - DNA, 535 bp, Macaca Mulatta
ttccagtactctctgccacacagtctgctctttcttaagctgcttctgttaacaaaaagcaaatgcgggtgcaatatgtactgtgtgtacagatgaacacctaggctgaggtgagcaatgccagctcttttgttcgtcttggagccagtttgtggtgcggatctaagggtggctctgttaaataaaagcacattgtgacacttcaggggagatttcctgttaccagttaattatcacttacatttgtcagtaagggaaaaagtgcctctcacattttattttaaaatatgaaaatcttggagaagttcgaggacaatttgctgttctttcgcttccacaggcagctccagagtcaggcctgaaatgtggcagaagggctgtcagtgggactctgtggtaaggagtcctacagtggatggctgtaggactggtgctttcacactgaacagaatgcaaataatgcagtgagggcctgagaagggaagagaggggatggaaatgaaagaggacctcaaagcaattcactagaggggat

SEQ ID NO: 36530 - DNA, 804 bp, Macaca Mulatta
  misc_feature (1)...(804): n = A,T,C or G
ggcgggagagtcagagctaggatgtacaagaactgattctaaccagaagtctgcaagtactgtggacaagaatgctaaccacactgcttcaaccttgagagacctaggttctcacacacatgcacacacacatgcacgcatgcatgcacaccaatttatgtgtttttttattaagtgccttgaannnnnnnnnnnnnnnnnnnnnnccctctatgtaaaaattagtgaatatcttacgaattaaggcattcctctttccctaatcccgatggctccattcccaagtaccccaactcaccactgatcctactaaaggaatgagccctgctacccaagtggtagtcatagccctagatgactctcaactactcttcaaagggaggcatcaggaatagaatgaaactgtgtgaaggataagattgttcgcatcaaggtccaaatcttgatttcatattaacgcctaaggattgcctgtgtgctggaaatataattgaaactcaatcagtatgcccagcctattgcatatcaatgtcagaccatttttgctgctatggtcacccacaatttcatttgtcttatacccaggtgaaaagggaagggtgaatgggactggctggttccctttaaatgttaacttatgggaaatgcctatttcaaatgggtaatgtcaccagtgttttggtatgcaagagagcaaagttcaacccaacacgctaatttattccagggggggggtggtcctttgccgcctttggaatttctccgggaacccaacggggggaaatgtgaaaatggcccatggtg

SEQ ID NO: 36531 - DNA, 874 bp, Macaca Mulatta
gggatttgtggtgtgaagtgactgtctcatcgaggtgtttaccttttcttaaggactcaaaatttgtttgcagatacaggccttcacttgccattttcttaaggagtcatgctcagagatgtcaggaaaagatacatgggtcttggaagataattactcaaaatatgcaggggaaggaataaaattgaagggtgtttttcttagagaacatcatttgtcatatttatttgatcaagaagttgaagatttatgtaataaggatctagtttgaagcactaagaagaataagacatcagtttgagaagaggctctatcagagcaacacgaattctgctaaaattgaaggaagaacaaacatcaaatatatgtcgacacttgggtggaagaatggtgagctaattgatgctttatgaaaaatttatggggacaatgctccaaagaaatcactttacaaatggataactcgttttaagaaaggataaggtaaatgttgaagaagaagccccacagtgggcagatcatccaacttcaattttgtgagaaaaaaaaattagttccatgggcataaatttgaagaaaaacccatctatttatcagccaggagatggacaagcctatcaccaatagaacatccttcagtttggttccacctttacaacaaatttttgacttggggaaaaagttccaaccaaaacttttttacccacgaataagatacctaaaaaccacctgagacacccaagaatcaggttttctgtaccaaggaaacacagaacctttccaattgggaaaaaattttataatataatagttgggaagatacaggaaaatccgttgaaagacccccatatccaggtggaaaaaaaactagaaa

SEQ ID NO: 36532 - DNA, 143 bp, Macaca Mulatta
ggtcaaaaaccaaatacagtctatggatgatgttgatgacttaactcagtcatctgaaacagcctcagaggattgtgagctgccccgctctagttacaagaattttatgttgctcattgaacaacttggaatggagtgtaaag

SEQ ID NO: 36533 - DNA, 263 bp, Macaca Mulatta
aagcttcagaggtgcaagatgggaataattattgcatactcctacatgtaatacatttatgagatgaaagaacataaaggacctagcaaagcagttaatgccagctaatattacttctgctgctactacagatccaacactattaaagcactatggagatgtgaggccatttaatataatgcaacagtccaagaaagtgatgacactccacatgtggaacttaggtcatattaattctaccagttaaggtaaatctggaattc

SEQ ID NO: 36534 - DNA, 811 bp, Macaca Mulatta
  misc_feature (1)...(811): n = A,T,C or G
ggatcttagaactatttttggataaattatatattttccttcctagtagaagtgttactgcctgtgactagctccaaacacccatgcagtttctgcattctaggnnnnnnnnnnnnnnnnnnnngagttttgctctnnnnnnnnnnnnnnnnnnnnnnnnnnatgatttcagctcactggcaacctctgcctcccgggttcaaatgattctcctggctcagtnnnnnnnnnnnnnnnnnnnnnnnnnncccgccaccacnnnnnnnnnnnnnnnnnngnnnnnnnnnnnnnnnnnnnnnnnnnnnnnnnnnnnnnnnnnnnnngactcctgatctcagttgatccacctgcctcagcctctgcattcagtttattcacacatttttggttactcccatggcagctcctaggatttcagtggtctgtgggccagaaagcaggcattgggtctgatctcaaggctgtatcagagggccaagcagagttcttttggatacctgcttttcatcccacaaggcctcagagtcagaggtaaggtagcaaccgaactagcatgggttaatgcactcttaccctccttctcaacttttaatttaagctgtgccaaatgttttcttccgagggaaccaaatttgggttctttgcaaaaaattttccagtgaaaataaaaacatgtttgtaataaacttgcctttnnnnnnnnnnnnnnnnnntgtttgaaagggcaataccgggaaggcacccnnnnnnnnnnnnnnnnnnnnnggtgccctgggaactgggcctaatgccaaatgtaacctgggaaatg

SEQ ID NO: 36535 - DNA, 807 bp, Macaca Mulatta
  misc_feature (1)...(807): n = A,T,C or G
gggatggcccacccagttcagctaagcctgnnnnnnnnnnnnnnnnnnnnnnnnnnnnnnnnnnnnnnnnnnnnnnnnnnnnnnnnnnnnnnnnnnnnnnnnnnnnnnnnnnnnnnnnnnnnnnnnnnnnnnnnnnnnnnnnnnnnnnnnnnnnnnnnnnnnnnnnnnnnnnnnnnnnnnnnnnnnnnnnnnnnnnnnnnnnnnnnnnnnnnnnnnnnnnnnnnnnnnnnnnnnnnnnnnnnnnnnnnnnnnnnnnnnnnnnnnnnnnnnnnnnnnnnnnnnnnnnnnnnnnnnnnnnnnnnnnnnnnnnnnnnnnnnnnnnnnnnnnnnnnnnnnnnnnnnnnnnnnnnnnnnnnnnnnnnnnnnnnnnnnnnnnnnnnnnnnnnnnnnnnnnnnnnnnnnnnnnnnnnnnnnnnnnnnnnnnnnnnnnnnnnnnnnnnnnnnnnnnnnnnnnnnnnnnnnnnnnnnnnnnnnnnnnnnnnnnnnnnnnnnnnnnnnnnnnnnnnnnnnnnnnnnnnnnnnnnncgtaaccggaacgttctaaatcaaaacggttttcacgggccacaccaaccagggcgttttattaccggaaaaatgcctcaaaaaaatttggtgggcgcaaaaatacatagcctttccaaacccaaaatttgtttggcaaaaacctaaatccccccccttaaaaaaaatccttttggaaaaaataaggaacccgggatattttaactcccataaaaaaaataaaacaccctgtggccacaaattccttctttttccctacctcggtaaaacaacctcacctta

SEQ ID NO: 36536 - DNA, 306 bp, Macaca Mulatta
ccacttggtccataaaggataccatctccttattgatggtcagataacagggttagtgcttaaaaaaattatgccttgggccgggcgcggtgatcacgcctataatcccagtactttgggagaccgaggtgggcagatcacgaggtcaatagatcaagaccatcctggccaaccaacatagtgaaaccccgtctctactaaaaatacaaaaattagctgggcatggtggtgcacgcctgtagtcccagctgctcgagaggctgaggcaagagagttggttgggcctggcaggcggaggttgcagtg

SEQ ID NO: 36537 - DNA, 859 bp, Macaca Mulatta
  misc_feature (1)...(859): n = A,T,C or G
gggaactgtggtcatgccattgcactccagcttatgtgacagaaatnnnnnnnnnnnnnnnnnnnnnnnnnnnnaaatcttttaaaatggaaagactttatcatttatcttccataaaagggaatgtttgctccaaatactaatctgactcaaaactattgaactatttgaaattgacatttaaaatcagaagcagaatggtcatccttatgcaacgaaagtaatttaatgcagattcactcggcagtaccttcactggggattatcctaattataaggcctccatccctaggtatcattctaaactcaagtacattttacattataaaattggtttcctcctttcctccaaagaaaactcaccatgaaggatcattatccaattggaaaaggcagaaacagtttcatttttaaaaatgaatgaattgtaaagcacagaaaaatcacttgacaaattcctgggaactagccatattctctgtcagggaaaattccaggtttctagagggaaatttgcatttcctgtgaaaaaggaaaatgcttatcctcccttgtttttggttattataaccataatgtggtttttatgaaccctgacaaaaattttaatttcaaccatttaaactaggaaaaactgttctttacttccagtaacccccaaatccatggggtgtgccaaatttaaccttaatcccctggcatttaacaagttggccacaacaatacatttagaaagactgcgttgtgaaaggtctttaataaccgcttatagtgggaaagcccctcctaaaaagaggcattggggcaccnccgggggggagcggggagttagccaagggtggggcctacctagggaatt

SEQ ID NO: 36538 - DNA, 846 bp, Macaca Mulatta
  misc_feature (1)...(846): n = A,T,C or G
ggatgccccagttagacacatcgacatgattcaccactattatggcgatgctccctacactatatcttattatacagctaaagctactaaacacgaaccactaccaaccacctcttacaaaaaaccccacccttcaattccacaacatccgnnnnnnnnnnnnnnnnnnnnnnnnnnnnnnnnnnnnnnnnnnnnnnnnnnnnntttaaatcaacccgctacaatccccattatcctattccctaccctactaatcttannnnnnnnnnnnnnnnnnnnnnnnnnnnnnnnnnnnnnnnnnnnnnnnnnnnnnnnnnnnnnnnnnnnnnnnnnnnnnnnnnnnnnnnnnnnnnnnnnnnnnnnnnnnnnnnnnnnnnnnnnnnnnnnnnnnnnnnnnnnnnnnnnnnnnnnnnnnnnnnnnnnnnnnnnnnnnnnnnnnnnnnnnnnnnnnnnnnnnnnnnnnnnnnnnnnnnnnnnnnnnnnnnnnnnnnnnnnnnnnnnnnnnnnnnnnnnnnnnnnnnnnnnnnnnnnnnnnnnnnnnnnnnnnnnnnnnnnnnnnnnnnnnnnnnnnnnngattcccatgttagcagcaatcgtaactctcagtgtaatattcgaccagtaaattatcctttccacttttttttattccacccgggcatttctctgcgccgatagaatattaacccggaaaaaattttcgggcgcgggggcctattcttaaataaatacacccttaaatccggaaaagaccccgtttttacttacccccttatataanaattatataaaaccttcccncacactggaaatgttgtggaaaaaaccacccccacaaaattttt

SEQ ID NO: 36539 - DNA, 830 bp, Macaca Mulatta
  misc_feature (1)...(830): n = A,T,C or G
gggaataaaaggatttttccctaaattgaacaattttcacatttcaaagtgaaatatagccctttgagctcttatcacttaaatattttatttcttcccctgcctttgtaaggatacattttagtatcttcctgtttgcaagttttgtttttggtaatagcaatttgcttttaagtctcaaattgcttactttttaaagtgtcttgaataaagatttctaagtcaagttctaaagtgctctaagacacttaggtttatttgcaaagtagttccaattttgacaggtttttaaattggatcaattttaagcagcaatgaaggaaagcagatagatggttggtaggtaggtagatgatagatgatctccctcacttgtttaaatagcatttttaattatgtagctctgtgaccaagatcaagtatatttctgcctcatggttgtttttcttaaatttattaacattatttgtaccacagaactgttttacaaaaacttgtattcataatattaacagaaaatttatatcttccatggttaaatttttcccgaaatttataatggtattcacaataatatatgttttcacctttgaagaaatgaagtttgcaaagcccttcctttgattcatgttttggataaaaaatataaataaccattgaaaagttatnnaggatggtaaaataaaatattaattacctttgtcgggccgcccttcggcccttgnnnnnnnnnnnnnnnnnnnnttctttttggccccccgggggccccataggttaaattgaaactgggtccaaacctgttttccctaggaaaaacccggggacaatga

SEQ ID NO: 36540 - DNA, 453 bp, Macaca Mulatta
aagaatataagaagaaaaacccagaggtccctgtcaattttgcagaattttccaagaagtactctgggaggtggaagacaatgtccaggaaagagaaatttaaatttgatgaaatggcaaaggcagataaagtgctctatgatcgggaaatgaaggatcatggaccagccaagggaggcaagaggaagaaggaccctaatgcccccaaaaggccaccgtctggattcttcctgttctcttcagaattctgccccaggatcaaatccacaaaccccggcatctctattggagacgtggcaaaaaagctgggtgaaatgtggaagaacttaaatgacagtgaaaagcagccttacatcactaaggcggcaaaactgaaggagaagtatgagaaggatgttgctgactgtaagttgaaaggaaagtttgatggcacaaagggttcagctaaagttg

SEQ ID NO: 36541 - DNA, 100 bp, Macaca Mulatta
caaagatctgacttctggtgcgttaatgttagaagaaatttatagtttacatacattactactttgataagaaattgagtcttttagaacttaaaggtaa

SEQ ID NO: 36542 - DNA, 679 bp, Macaca Mulatta
gagggcaagccaaagagaaccttgcacaaaagaaatatggcgtggacctcatcagattcactcatgaggcaaacactgctgtttacagctctaacaaaatagacgatactattcgttacttgtccttgcatgacaacaaatacatcagatactttcctggacatagcaaaagggtggtggccttgtccatgtcacctgtggatgacattttcatttctgggtctcttgataggaccattcgactctgggatctccgggctcctaactgccagggcctcgtgcatctacaggggaagccagtttgttcttttgatccagaagggttaattttggctgcaggtgtcaactctgagatggtcaaactttacgaccttcgttcttttgataaggggccatttactacctttaagatgcagtgtcatcgaacctgtgagtggacaggacttaaattcagcaacgatggcaaggtcatcctcatttccaccaacggcagcttcatttctctcattgatgcattcaaaggagtggtgatgcacacgtttgagggttatgcaaacagcaaagctgtcacactggaggcttcgtttactccagactctcagtttattatgattggttcggaggatggcaagatccatgtctggaatggagagactggtataaaagtagctgtgttgga

SEQ ID NO: 36543 - DNA, 192 bp, Macaca Mulatta
ccaacagcctcctacttcttaggctaaggccacttaggtgcctgagatttcacattagccaatggtgaagtgctccaaccacacagtagctgacatttaaggatatggaggctatgttcttcttagaatcctaattattctgagttaagtacttaaacaagtgtaccaaatttactagggtaaaataataat

SEQ ID NO: 36544 - DNA, 468 bp, Macaca Mulatta
  misc_feature (1)...(468): n = A,T,C or G
ctttatgataattggatcaaagatgctggtgannnnnnnnnnnnnnnnnnnnnnnnnnnnnnnnnnnnnnnnnnnnnnnnnnnnnnnnnnnnnnnnnnnnnnnnnnnnnnnnnnnnnnnnnnnnnnnnnnnnnnnnnnnnnnnnnnnnnnnnnnnnnnnnnnnnnnnnnnnnnnnnnnnnnnnnnnnnnnnnnnnnnnnnnnnnnnnnnnnnnnnnnnnnnnnnnnnnnnnnnnnnnnnnnnnnnnnnnnnnnnnnnnnnnnnnnnnnnnnnnnnnnnnnnnnnnnnnnnnnnnnnnnnnnnnnnnnnnnnnnnnnnnnnnnnnnnnnnnnnnnnnnnnnnnnnnnnnnnnnnnnnnnnngatcttttttgttctgcgcaagaaaaataaccaagtgactttccttcacgtattccatcataccatcatgccgtggacctggtggtttggagtcaaatttgctgcagg

SEQ ID NO: 36545 - DNA, 646 bp, Macaca Mulatta
  misc_feature (1)...(646): n = A,T,C or G
ggggggccagtctgttgtgcgcacccacctgaggcatcttaggtcagcctgctcttagagaagtagtaaccgccagaaaggagtcggaagaggtcccacgaggctgtcttcaccgctatgcccaaaaataaaggtaaaggaggtaaaaacaggcgcaggggtaaaaatgagaatgaatctgaaaaaagagagctggtgtttaaagaggatggacaagagtatgctcaggtaatcaaaatgttgggaaatggacgattggaagcactgtgttttgatggtgtaaagaggttatgccatatcagagggaaattgagaaaaaaggtttggataaatacttcagacattatattggttggtctacgagactatcaggataacaaagctgatgtaattttaaagtacaatgcagatgaggctagaagccttgaggcatatggcgagcttccgagcatgcctaaatccatgaaacagacccctttgttcctggaaatgatgatgaaatcccatttgatgatatgggaaatgacatgagaccttgtgatatctaattgacggatggttttcaggaaagtttccaagatgttcccagttggaattggccccnnnnnnnnnnnnnnnnnnncggtgttttcaaacaactgttttt

SEQ ID NO: 36546 - DNA, 1171 bp, Macaca Mulatta
  misc_feature (1)...(1171): n = A,T,C or G
ggatattccaaataaattaaatgttaagtnnnnnnnnnnnnnnnnnnactatgagtctcacaccaatagtggtacaaaggaacttcatggcaattgataaggtagatgaactaagagaaaaaattttaaatgtgtagtaaataggaaaaagacaaaacaagatgaaatttaaaagaagctatttgcattacacatgggtgcactcaatttttgtaaaactatatacatatccataagggtttgtacttttaggcacatttataaagagatcatgtatacatgatacaaaaaattctttgaatggtattcaaattttcttaatattaaaaatgcaactttgacttagttcatgctattgtattaacaaaattgtttttaattgcatgtgtccctcataagcaccagcctttgtaataaaagtagcccgcttttaagagcaactaacgttaccacatacctacacataataaagaaaaggggactttttttaaaacccgaaatccataatgacttgtttgtaaccacatactttccatccttttatagaaatatagggtgcaaacttaatcgagccaccacagtagttggaacacaaatattaaatttctttttataactaacaagagagaatccacggacaaactaccaaagacgacaccacaactcttttttatggccttaccccccacacagaaggggggtcattagtaccccctcatagagcccactcttttcttatccctcacctgtattctacatacggactactaacatcctcccgcgggtctatcttaacataataaattgagagtgttctgatggtctgagtcggactttgaatatggtgaacacacaccccatgcaaaagtgcgacattatgaggcgctttgctacgcctgttctcaaacactcaactatgggttacaaaaggaaagaatactgaacaaaattctggagtcgcccgctgtaatattatctntcacactcggtncgaaccacacgatggtgtctaacctcgaatattctgtgtcccccctttaccccagggagggtattccctccccgccgcgcattaatcaattgccgccgtcgtcctatcgtggtacatctcatctttgtaataattttatcccactctgtggatacttattctcctgtggtctccaccccc

SEQ ID NO: 36547 - DNA, 3273 bp, Macaca Mulatta
  misc_feature (1)...(3273): n = A,T,C or G
ccttttggtaggtgtgaaaactgaggcacccaaatatttagtgaagagcctgcgtttttgtaggtggcaggctgcagagccaggactcaggtgcctgtgttccctgtgtgagctctgtgtgtcaccactgtgactcttgcacatacagggcagccactaggattgggggtgctttgctaaaaggaggtactatttatcaacctgctctttgtcccgtagacagtgctgaagtcaccccgcctgtcctctctgtgatgggggaggcgaccccagtgagcatcgagccgtaagtgcagccctgcccctggccgagggtgtgtgggtggccacactggtgcagtgtgtgcaggtgggccctgggagcaacaggagggttccgtggggactgcatagggctgagagggcctccctgagcttctgtatttggccctggactttgctgtccccgccctgcctctgtgtggaagttgcagggaaggacaaggaccggctcagcttgaacttatctctaggagagttggaaggggggtccagaggctctttcccatctgtaaacctggagctgcttctcccttctcctgcctctggaccttgcctttctagtggtgccaggtcagactgtcctcccaatcccctagaagccagactccctccacctagctgaggccttgctctgccggctccccctcatcttcttcccaccctgagggatcatcaagttctctgtccccgcaaggtgaggcctcacctcctgcccttttcattcctctagacggatcaacgtgggctcccggttccaggcagaaatccccttgatcagggaccgtgccctggcagctgcagatccccacaaggccgacttggtgtggcagccatgggagaacctagagagcagccgggagaagcagaggcaagnnnnnnnnnnnnnnnnnnnnnnnnnnnnnnnnnnnnnnnnnnnnnnnnnnnnnnnnnnnnnnnnnnnnnnnnnnnnnnnnnnnnnnnnnnnnnnnnnnnnnnnggaaacgctgaataagctgctactgaagaagccgctgcggccccacaaccatccgctggcaacttatcactacacagnnnnnnnnnnnnnnnnnnnnnnnnnnnnnnnnnnnnnnnnnnnnnnnnnnnnnnnnnnnnnnnnnnnnnnnnnnnnnnnnnnnnnnnnnnnnnnnnnnnnnnnnnnnnnnnnnnnnnnnnnnnnnnnnnnnnnnnnnnnnnnnnnnnnnnnnnnnnnnnnnnnnnnnnnnnnnnnnnnnnnnnnnnnnnnnnnnnnnnnnnnnnnnnnnnnnnnnnnnnnnnnnnnnnnnnnnnnnnnnnnnnnnnnnnnnnnnnnnnnnnnnnnnnnnnnnnnnnnnnnnnnnnnnnnnnnnnnnnnnnnnnnnnnnnnnnnnnnnnnnnnnnnnnnnnnnnnnnnnnnnnnnnnnnnnnnnnnnnnnnnnnnnnnnnnnnnnnnnnnnnnnnnnnnnnnnnnnnnnnnnnnnnnnnnnnnnnnnnnnnnnnnnnnnnnnnnnnnnnnnnnnnnnnnnnnnnnnnnnnnnnnnnnnnnnnnnnnnnnnnnnnnnnnnnnnnnnnnnnnnnnnnnnnnnnnnnnnnnnnnnnnnnnnnnnnnnnnnnnnnnnnnnnnnnnnnnnnnnnnnnnnnnnnnnnnnnnnnnnnnnnnnnnnnnnnnnnnnnnnnnnnnnnnnnnnnnnnnnnnnnnnnnnnnnnnnnnnnnnnnnnnnnnnnnnnnnnnnnnnnnnnnnnnnnnnnnnnnnnnnnnnnnnnnnnnnnnnnnnnnnnnnnnnnnnnnnnnnnnnnnnnnnnnnnnnnnnnnnnnnnnnnnnnnnnnnnnnnnnnnnnnnnnnnnnnnnnnnnnnnnnnnnnnnnnnnnnnnnnnnnnnnnnnnnnnnnnnnnnnnnnnnnnnnnnnnnnnnnnnnnnnnnnnnnnnnnnnnnnnnnnnnnnnnnnnnnnnnnnnnnnnnnnnnnnnnnnnnnnnnnnnnnnnnnnnnnnnnnnnnnnnnnnnnnnnnnnnnnnnnnnnnnnnnnnnnnnnnnnnnnnnnnnnnnnnnnnnnnnnnnnnnnnnnnnnnnnnnnnnnnnnnnnnnnnnnnnnnnnnnnnnnnnnnnnnnnnnnnnnnnnnnnnnnnnnnnnnnnnnnnnnnnnnnnnnnnnnnnnnnnnnnnnnnnnnnnnnnnnnnnnnnnnnnnnnnnnnnnnnnnnnnnnnnnnnnnnnnnnnnnnnnnnnnnnnnnnnnnnnnnnnnnnnnnnnnnnnnnnnnnnnnnnnnnnnnnnnnnnnnnnnnnnnnnnnnnnnnnnnnnnnnnnnnnnnnnnnnnnnnnnnnnnnnnnnnnnnnnnnnnnnnnnnnnnnnnnnnnnnnnnnnnnnnnnnnnnnnnnnnnnnnnnnnnnnnnnnnnnnnnnnnnnnnnnnnnnnnnnnnnnnnnnnnnnnnnnnnnnnnnnnnnnnnnnnnnnnnnnnnnnnnnnnnnnnnnnnnnnnnnnnnnnnnnnnnnnnnnnnnnnnnnnnnnnnnnnnnnnnnnnnnnnnnnnnnnnnatttctgtatgctcacttgtcagccactgctccctggacagtaatgacattttgcctggattaatgaaaagcgtctctgctgtcaggtcagggctggctttggatacagatggtgcccagaccttttccttcaacttttcagtttgaaaaatttcaaacttataggaaaatggaaagaacagtagaatgaacacctgtctaccccgacttcgatttagcaatcgttaacattggctacatttgctttctctttctctatgtctaaacatagacatacacatatacagctctctcgttctctgattcagctaatcattaaaagttacagtcatcctgtcacatgactaaaagctttcagcatgtatctcctaaaaaccaagatattctacaaaaccacagtaccattagcacgcccaagaaatttaacctgataaaataattcaggccaggcgagatggcttacgcctgtaattccagcactttgggaggcagaggatcacttgaggccaggagtttgagatcaggctggccaacatggtgaaaccccatgtctactaaaaatannnnnnnnnnnnnnnnnnnngtggtggcacacacctgtaatcccagcgactcaggaagctgaggcatgagaatcatttgaacctgggaggcggaggttgcagtgagccgagatcgcgtcactgcactccagcctgggtgacagagcgagagactgtctcc

SEQ ID NO: 36548 - DNA, 172 bp, Macaca Mulatta
tccacctgtttcatttcagagtgtcagactcccctgggaatggcttctggacgccttacacattttcagattacagcttcaggacaatatggtaaatactattatttttgctccaagaacctgggctgattatatcttttttaataatctgttggagaatctcagataatga

SEQ ID NO: 36549 - DNA, 647 bp, Macaca Mulatta
tcattacaccaccaccatgacagtaggtgtgtgtgctctccttgctactggttcctatgtctctggcttcctcaatgcctctatccatgcagcaggcaccttcagactctccttctgtggttctaatgagattaatcatttcttctgtgacattcccccactcctggctctctcatgctctgacacgcgcatcagcaagttggtggtcttctttgtggtgggcttcaacgtctttttcaccctcctggtcatcctcatttcttacttcttcatatgcatcaccattcaaaggatgcgttccgctgaagggcggaagaaagtcttctccacctgtgcttcccatctcactgctgtgtccatcttctatggcacaatcatcttcatgtacttacagcccaactccagccagtccatggacacagacaaaatagcctctgtgttttacacagtggtgattcccatgctgaatcccttgatctacagccttaggaacaaagaagtgaaaagtgctctctggaaaatactcaacaaactgtacccccaatattaagtgtgaatgggaagtaggcaagcaattaagggataaactttctctcacacctaaatgccatcatgacttttaatgtttggctggtttcagttctttt

SEQ ID NO: 36550 - DNA, 3412 bp, Macaca Mulatta
  misc_feature (1)...(3412): n = A,T,C or G
cttacaggggcacctggatcctgtggagtacagcatcgtnnnnnnnnnnnnnnnnnnngtggcccaatgatgaagttggtttataagcttcaagccgaagactgtaannnnnnnnnnnnnnnnnnnnnnnnnnnnnnnnnnnnnnnncgtccatccaggagcacgtcctcctcaacagtcccctgtaccacaatgaggtccagttccccctcactgggggctttggcctgaaccnnnnnnnnnnnnnnnngagtattacatattctcctttgcctgagcctcatnnnnnnnnnnnnnnnnnnnnnnnnnnnnnnnnnnnnnnnnnnnnnnnnnnnnnnnnnnnnnnnnnnnnnnnnnnnnnnnnnnnnnnnnnnnnnnnnnnnnnnnnnnnnnnnnnnnnnnnnnnnnnnnnnnnnnnnnnnnnnnnnnnnnnnnnnnnnnaggacaccagccatgccctttgcttcctatggcctccaccacactagcctcctgaagcgacacatctctcatcagacgtctgtgaatgcagaccccgcctcccacgagatctggagnnnnnnnnnnnnnnnnnnnnnnnnnnnnnnnnnnnnnnnnnnnnnnnnnnnnnnnnnnnnnnnnnnnnnnnnnnnnnnnnnnnnnnnnnnnnnnnnnnnnnnnnnnnnnnnnnnnnnnnnnnnnnnnnnnnnnnnnnnnnnnnnnnnnnnnnnnnnnnnnnnnnnnnnnnnnnnnnnnnnnnnnnnnnnnnnnnnnnnnnnnnnnnnnnnnnnnnnnnnnnnnnnnnnnnnnnnnnnnnnnnnnnnnnnnnnnnnnnnnnnnnnnnnnnnnnnnnnnnnnnnnnnnnnnnnnnnnnnnnnnnnnnnnnnnnnnnnnnnnnnnnnnnnnnnnnnnnnnnnnnnnnnnnnnnnnnnnnnnnnnnnnnnnnnnnnnnnnnnnnnnnnnnnnnnnnnnnnnnnnnnnnnnnnnnnnntcctagagatgtggctgagctacctgcagccatggcggtatgcacctgacaagcaggctccgggcagcgactcccagccccggtgtgtgtcggagaaatggnnnnnnnnnnnnnnnnnnnnnnnnnnnnnnnnnnnnnnnnnnnnnnnnnnnnnnnnnnnnnnnnnnnnnnnnnnnnnnnnnnnnnnnnnnnnnnnnnnnnnnnnnnnnnnnnnnnnnnnnnnnnnnnnnnnnnnnnnnnnnnnnnnnnnnnnnnnnnnnnnnnnnnnnnnnnnnnnnnnnnnnnnnnnnnnnnnnnnnnnnnnnnnnnnnnnnnnnnnnnnnnnnnnnnnnnnnnnnnnnnnnnnnnnnnnnnnnnnnnnnnnnnnnnnnnnnnnnnnnnnnnnnnnnnnnnnnnnnnnnnnnnnnnnnnnnnnnnnnnnnnnnnnnnnnnnnnnnnnnnnnnnnnnnnnnnnnnnnnnnnnnnnnnnnnnnnnnnnnnnnnnnnnnnnnnnnnnnnnnnnnnnnnnnnnnnnnnnnnnnnnnnnnnnnnnnnnnnnnnnnnnnnnnnnnnnnnnnnnnnnnnnnnnnnnnnnnnnnnnnnnnnnnnnnnnnnnnnnnnnnnnnnnnnnnnnnnnnnnnnnnnnnnnnnnnnnnnnnnnnnnnnnnnnnnnnnnnnnnnnnnnnnnnnnnnnnnnnnnnnnnnnnnnnnnnnnnnnnnnnnnnnnnnnnnnnnnnnnnnnnnnnnnnnnnnnnnnnnnnnnnnnnnnnnnnnnnnnnnnnnnnnnnnnnnnnnnnnnnnnnnnnnnnnnnnnnnnnnnnnnnnnnnnnnnnnnnnnnnnnnnnnnnnnnnnnnnnnnnnnnnnnnnnnnnnnnnnnnnnnnnnnnnnnnnnnnnnnnnnnnnnnnnnnnnnnnnnnnnnnnnnnnnnnnnnnnnnnnnnnnnnnnnnnnnnnnnnnnnnnnnnnnnnnnnnnnnnnnnnnnnnnnnnnnnnnnnnnnnnnnnnnnnnnnnnnnnnnnnnnnnnnnnnnnnnnnnnnnnnnnnnnnnnnnnnnnnnnnnnnnnnnnnnnnnnnnnnnnnnnnnnnnnnnnnnnnnnnnnnnnnnnnnnnnnnnnnnnnnnnnnnnnnnnnnnnnnnnnnnnnnnnnnnnnnnnnnnnnnnnnnnnnnnnnnnnnnnnnnnnnnnnnnnnnnnnnnnnnnnnnnnnnnnnnnnnnnnnnnnnnnnnnnnnnnnnnnnnnnnnnnnnnnnnnnnnnnnnnnnnnnnnnnnnnnnnnnnnnnnnnnnnnnnnnnnnnnnnnnnnnnnnnnnnnnnnnnnnnnnnnnnnnnnnnnnnnnnnnnnnnnnnnnnnnnnnnnnnnnnnnnnnnnnnnnnnnnnnnnnnnnnnnnnnnnnnnnnnnnnnnnnnnnnnnnnnnnnnnnnnnnnnnnnnnnnnnnnnnnnnnnnnnnnnnnnnnnnnnnnnnnnnnnnnnnnnnnnnnnnnnnnnnnnnnnnnnnnnnnnnnnnnnnnnnnnnnnnnnnnnnnnnnnnnnnnnnnnnnnnnnnnnnnnnnnnnnnnnnnnnnnnnnnnnnnnnnnnnnnnnnnnnnnnnnnnnnnnnnnnnnnnnnnnnnnnnnnnnnnnnnnnnnnnnnnnnnnnnnnnnnnnnnnnnnnnnnnnnnnnnnnnnnnnnnnnnnnnnnnnnnnnnnnnnnnnnnnnnnnnnnnnnnnnnnnnnnnnnnnnnnnnnnnnnnnnnnnnnnnnnnnnnnnnnnnnnnnnnnnnnnnnnnnnnnnnnnnnnnnnnnnnnnnnnnnnnnnnnnnnnnnnnnnnnnnnnnnnnnnnnnnnnnnnnnnnnnnnnnnnnnnnnnnnnnnnnnnnnnnnnnnnnnnnnnnnnnnnnnnnnnnnnnnnnnnnnnnnnnnnnnnnnnnnnnnnnnnnnnnnnnnnnnnnnnnnnnnnnnnnnnnnnnnnnnnnnnnnnnnnnnnnnnnnnnnnnnnnnnnnnnnnnnnnnnnnnnnnnnnnnnnnnnnnnnnnnnnnnnnnnnnnnnnnnnnnnnnnnnnnnnnnnnnnnnnnnnnnnnnnnnnnnnnnnnnnnnnnnnnnnnnnnnnnnnnnnnnnnnnnnnnnnnnnnnnnnnnnnnnnnnnnnnnnnnnnnnnnnnnnnnnnnnnnnnnnnnnnnnnnnnnnnnnnnnnnnnnnnnnnnnnnnnnnnnnnnnnnnnnnnnnnnnnnnnnnnnnnnnnnnnnnnnnnnnnnnnnnnnnnnnnnnnnnnnnnnnnnnnnnnnnnnnnnnnnnnnnnnnnnnnnnnnnnnnnnnnnnnnnnnnnnnnnnnnnnnnnnnnnnnnnnnnnnnnnnnnnnnnnnnnnnnnnnnnnnnnnnnnnnnnnnnnnnnnnnnnnntgagaataatggcattttagggcctgtgaccaaaaatcaagcttgtaactcgaccatggatctcaataaacctgtccttgcttctg

SEQ ID NO: 36551 - DNA, 443 bp, Macaca Mulatta
gagaggcctcatctcagacccgaggctagcatgggctgcaggctgctctgctgtgcggttctctgtctcctgggagcagtccccacagacactggagttacccagacaccaaagcacctggtcatgggaatgacaaataagaagtctttgaaatgtgaacaacatatgggacacaatgctatgtactggtacaagcagaaagctaagaagccgccggagctcatgtttatctacaactatgagaaactctctattaatgaaagtgtgcccagtcgcttctcacctgaatgctccaagagctctctcttataccttcacctacgcgccctgcagccagaagactcagccctgtatctctgcgccagcagccaaccggggtgcagggaaggcaccgcgcgctgtactttggagacggcacccggctcaccgtgctggaggacctg

SEQ ID NO: 36552 - DNA, 125 bp, Macaca Mulatta
aggatttgaaacctcagacatacagaaatgcttatgatattccccgtagaggtcttttagaccagctgaccagaatgagatccaatctgctgaaaacgcacaagtttattgttggacaagatgaa

SEQ ID NO: 36553 - DNA, 653 bp, Macaca Mulatta
  misc_feature (1)...(653): n = A,T,C or G
ggggaagtcgtctacgtctggaccaacggctccaccaagtctgtggtggtggcggaagatggctccagactgaaccagtaccacctgatggggcagacggtgggcactgagaacatcagcaccagcacaggcgaatacacaatcatgacagctcacttccacctgaaaaggaagattggctactttgtcatccagacctaccttccctgcataatgaccgtgatcttatcacaggtgtccttttggctgaaccgggaatcagtcccagccaggacagtttttggggtcaccacggtgctgaccatgacgaccctcagcatcagcgcccggaactctctgcccaaagtggcctacgccaccgccatggactggttcatagccgtgtgctatgccttcgtcttctcggcgctgatagagtttgccacggtcaattacttcaccaagagaggctgggcctgggatggcaaaaaggccttggaagcagctaagatcaagaaaaagcgtgaagtcatgctcaataagtcaacaaatgcttttacagctgggaagatgtctcaccccccaaacattccgaaggaacagactccagcagggacgtcgaatacnacctcggtctcagtaaaaccctccgaagaagagactcctgaangcan

SEQ ID NO: 36554 - DNA, 920 bp, Macaca Mulatta
  misc_feature (1)...(920): n = A,T,C or G
ggaagtggataccagggtggtggctaccagcaggacaatagataccaagatggtgggcaccacggtgatcgtggtggtggtcgtggagggcgagggggtcgtggagggcgagggggtcgtgcaggccagggaggaggctggggaggaagagggagccagaattatcaccaagggggtcaatttgaacagcatttccagcatggaggttatcagtataatcattctggatttgggcagggaagacattatactagttgaggctaccgaaccttacattttgctagagctcaagtaatagaaacttagtttcagaatcctgaattcagcacctattttgaattaatgtgagaccacaggtggcaggcagattcctgcttggcataagcatttgtaggtcttcattcaattctgttggatttttttattggacttacataatgctgtttatttgagaaacacataacatctctcctttctatnnnnnnnnnnnnnnnnnntgattaaaattgcctttaattgaccagtagactaattccacagtcagaacatgcatacttttttgaagcaattacttgaataagtagttttcatgttttcaatatgcagttttgaaaatgaggattcacctagacttttttagatttactactaggaaaccttcctcatatgaataaccatttatatgtgttttgcttaaagtattccaatgcctatttccaagcacagttctgcccccggttgacttttatgccacgtgtgcttcatgatagaacttttaggtcagttcctattaaatgagctccttctgtggattggccattcagtaacccttatttggcgatggatactggttcctatggtcaattctgaaaccttgacacggccaaatcctaagatttaaagcaacaagtgtgaacctc

SEQ ID NO: 36555 - DNA, 742 bp, Macaca Mulatta
  misc_feature (1)...(742): n = A,T,C or G
ggtacagtgggtcatgtnnnnnnnnnnnnnnnnnnnnacgggcggatcatgaggtaaagtgatcgagaccatactggccaacacnnnnnnnnnnnnnnnnnnnnnnnnnnnnnnnnnnnnnncgggcgtggtggcatgcnnnnnnnnnnnnnnnnnnnnnnnnnnnnnnnnnnnnnnnnnnnnnnnnnnnnnnnnnnnggaggttgcagtaagccaagatagtgnnnnnnnnnnnnnnnnnnntcgnnnnnnnnnnnnnnnnnnnnnnnnnnnnnnnnnnnnnagaatttatctatggtgaatgaatagtattaatatcagggactttcagtttcaaggactttacactttacagtcttctgaattgtttatatttgcaatgaggataactcgctaatcagggtacttcccattataaaaactgagatgtttacattgattttagccatccacagtctgattttccaatctcttgagtcccaaagccgataaatcctaaagactttgagcccagttcctgtgtcaattaccaattttattgcctctcagctcctaatacaaacttccacatagcctctatgctatatagcaactctgttaaacatttcttctttagagtgggaagccccataagctagaaggaatttgggccgtaatcttaaacctcctcaaacaaaacaattaccagcccaagaatttttgtattccggtggaaactaagccatcctaataagggagggga

SEQ ID NO: 36556 - DNA, 642 bp, Macaca Mulatta
gggtcactaacacagggaatgattgcaccctagtcctatgtgggccaagaaactttcagaagcattaaaaaaatagttgaagtatatcacttctcacgaagtggatagagtcagttggctgtttgtcccttgttttttatttattccataattaatgtttgtgctttttgtttggtaaacagtaatggaacgtacatttttactttgtttagaagacaactttgattcagtctttcaagaactgttccattcttggtttcttcttagggggaaaaaagttaccagttaatttgttttgaggtatttaagcattctttgagttatagaattgtgatgcagggatttgtgaatgagacatttacatgtgaacggtgacttcactagttacctgcttaagcagagtaaagtgtgtatatgtacataaaatgtaagtaatcttaactccattgtgcagtgccttttcgatgttccgctttctataaagtcttcccatttttgcatatatattatatatatgacgtaatgttataaaatatatgtaaatatactattttttccaggggatctgaaactctgtatttgtatggaattgaaacaaagtatttacctcccatttacgtaattacaaatctttggaataaa

SEQ ID NO: 36557 - DNA, 799 bp, Macaca Mulatta
  misc_feature (1)...(799): n = A,T,C or G
ggacagtagattgtgaaagaaatgtcacatcagaatctggacattgctatgacaacccgggccccatctatcaccactcccatcagcatgtgttgcaaaggaaacccctttgcagtgtttaatctgagaattttaatattaaatatatatttgacattgaaagctcacaccttatttgctattgtcaggcttatttgatagacagctgactcaagtctctttatagtcaatttctgaaatgaaactataaattttgaagctgggcttcatcatcgcagagagcaaagcttttctagcctattgtttgaaataaggagggtttatagaagttatgtggtcctgattcaggaagatcatttgccaagcacttaaagccagttttgctgccctttgcttttctcctccctgcaaatacatatggttacggggggagagcctttagaaaagaaaaattatgaagaaaaaacttacttgattcatcacaaatgtccannnnnnnnnnnnnnnnnnnnctgcccatttagtgtgaaggagcattgacttccgaaagccctggctctttggtgaaaggccatacagttcggctttctgtaaattaagttggaccatccaattttgggttgtgataagtcaaagaaaaaccctctgaatatggtgcaacaccgtttgaatttaaagccttaaaatcccaggaccctcccccaatatgccatccagggaattctttttttaaatttgttatgaaaatgtacgcggcgncgggtggaggtgggcgcgatattttacaatggagaagggg

SEQ ID NO: 36558 - DNA, 845 bp, Macaca Mulatta
  misc_feature (1)...(845): n = A,T,C or G
ggcatggtggttcatgcctgtaataaannnnnntacncaagcccacgctggcaaatagtntgaagtcaggaannnnnnnnnnnnnnnnnnnnnnnnnnnnnnnnnnnnnnnnnnnnnnnnnnnncaattagttgggtgtggtgatgcatgcttgtaattccagctactggggggcnnnnnnnnnnnnnnnnnnnnnnnnnnnttcacttgaacctgggagacggaggttgcaatgagctgagacgcatnnnnnnnnnnnnnnnnnnacaacaagagtgaannnnnnnnnnnnnnnnnnnnnnnnnnnnnnnaaaaatatcaatatgaacttgaaccctttttaagataaatatttcctagttttgtccactagacaaacggcatacaaactacatcattctggtaacatcgagcatctctaaaattcaaagttgaaaccttttacccaaagaaggctccttgagaaaaaaaaaactcattttcgggtctgagggcaaagaaagcacaagggaaaaacccaaacattttttctgtgccaaaaaagcccaggaannnnnnnnnnnnnnnnnnnnnnntcaaggcccaggttgcaagtgggctcatggccctgttaatccccaccaaacctttaaagaaagcccaataatgggctggaaccaataggggtgagggaagaattgccttgaagccccattaaattttcaaaaaacagagcctgggnccaacaaaaagaaagaagcccggttttcttccagagnnnnnnnnnnnnnnnnnnnaacacagggattagtgggccactaaaacctggaagttctcccactccacataggggaaagcccggaaag

SEQ ID NO: 36559 - DNA, 705 bp, Macaca Mulatta
ggcttgtcttcctggttcccaattccccttacagctttaagcagatctctgttggggagcgattccgggggcatctcgggcgactggggacggttaaaagcctgcaagctgaagggaggcctgggcgtgagatttggggcctcttcgaagttctgtttatgttaaatttctaccccacaactttcaacggccatccaactccttcctttgttttacttaattttaatctattgggggttaaggggggggtggagggcatccgacaggaaatacttttcgttgatgaaagggatagacttggggtttttctagctgagactttgggaatgggaatgggaatgtggagaggtgggagagagaaaccacttagctagcgtggatgtgatcacaacctggtgttcgttctttaatgcaagtgatttcaccccccaccttattttctaaacaccatcacaggaattatcggttttaatgaaggaaaaatttctgagtttcatgaacagagcaacttgtaaaaaattagatcgtggttagtatagggaagcccgtaaaaatttgtaatcagtttcttaaaagcacccttcttatcctatggcctcaactgaatatctgtatcctatgaagatttttggccccttacaagtaattaggaggtagtatttataaaaataaaatcttttgaaattggattaatctcctttttgt

SEQ ID NO: 36560 - DNA, 136 bp, Macaca Mulatta
  misc_feature (1)...(136): n = A,T,C or G
ttctcctggtggccctgcaggctcaggcggagtcactccaggcaagagctgcagcncaggagcagcctagagccgatgatcaggaagtggttgactcctttgcatgggacgaaagcgccactcttcaggtttcagg

SEQ ID NO: 36561 - DNA, 789 bp, Macaca Mulatta
  misc_feature (1)...(789): n = A,T,C or G
ggcatgaccgcgatannnnnnnnnnnnnnnnnnnnnnnnnnnnnnnnnnnnnnnnnnnnnnnnnnnnnnnnnnnnnnnnnnnnnnnnnnnnnnnnnnnnnnnnnnnnnnnnnnnnnnnnnnnnnnnnnnnnnnnnnnnnnnnnnnnnnnnnnnnnnnnnnnnnnnnnnnnnnnnnnnnnnnnnnnnnnnnnnnnnnnnnnnnnnnnnnnnnnnnnnnnnnnnnnnnnnnnnnnnnnnnnnnnnnnnnnnnnnnnnnnnnnnnnnnnnnnnnnnnnnnnnnnnnnnnnnnnnnnnnnnnnnnnnnnnnnnnnnnnnnnnnnnnnnnnnnnnnnnnnnnnnnnnnnnnnnnnnnnnnnnnnnnnnnnnnnnnnnnnnnnnnnnnnnnnnnnnnnnnnnnnnnnnnnnnnnnnnnnnnnnnnnnnnnnnnnnnnnnnnnnnnnnnnnnnnnnnnnnnnnnnnnnnnnnnnnnnnnnnnnnnnnnnnnnnnnnnnnnnnnnnnnnnnnnnnnnnnnnnnnnnnnnnnnnnnnnnnnnnnnnnnnnnnnnnnnnnnnnnnnnnnnnnnnnnnnnnncacacctaagccaaaaacaaaacccgaaccccccatttgaatcttcattagaagcgccgaaaatcaaaaatttaagttatcagtggctttttaacaaattggaaataaacgcccgccgggggtctcaatttcggcccctctatatcttttccaagggggccggaaaatatccacccaaatgtatcagattccatnnnnnnnnnnnnnnnnnncttcat

SEQ ID NO: 36562 - DNA, 679 bp, Macaca Mulatta
aattattttaacaaagattaaaatatactgcagggcaaataatattcttcaaaacacaagaactgcttttggtaaagaagcctgactagatgcatcttactttcaagctgttctagtcctcctctagttaacttagctttatgtagaatttctactgtatttaatttctattgaagcccttctatattttaaaatgtaatatactttgtaccatttataaaaattgtgtgatgaatcacatgttcgttgttgtaagtgttaaccttcttttgatacttttgtgggaaagacattctccacggaattttaactttcctagagacttttaagaatgcaggtctcatttgacgagaaaaccgacttcataacccaacgttagtagttagtgacattgtgctgaacttctccttgaactttttaactatatatgtaaaattactttgatcttcatcatttgaaagatcatttccaggtctaaaattccatgattttatatttaattctccctcagaacagaagaggggaaagcaagagaggacggaattgtgtctttatgaactttgttacttaagtactccattggagacataatttttctaaatagtggatctctttacactggaaaggatgatggctcattgcttacttttcattcatagctcattgcttccatttgacc

SEQ ID NO: 36563 - DNA, 570 bp, Macaca Mulatta
gtgggggtacccaagtcctggaccctaggactcagagccaagagtaggtgacctcagagggaccagtttcacttttagcacctaccctacactgatcccttgatatacctgggcaactgtggtctggtttgttctttggtgagatgaccccaaacatctcaccaaacagtgtgaaacagccacttccctaggcacttttattaggttagtaacaagatttcagatacagaaccaatggaaacatctgtttgaatcaacgtccaaatctggggtgagtcccagtcaagagctgtgagaacacccactttgcagattaggattctggagataacatgtggacatattatgggacatgctgtgtacagagtacctgctagtataaaatgtataatgtagctgcttttatttcattttaaatggaggaaaaaagaagtgctggccatttccattgagctgggctttgttgggccagtttcataattcttcttctgtggttatcaccacatttatgttaccaagtccctcacgtctcaccagctaggtcttagaacaaaaagatgttaggttggc

SEQ ID NO: 36564 - DNA, 687 bp, Macaca Mulatta
ctgcaggaagctgccacctctggggtcagaacctgcccaggctgcaggggctccactgcggggtcttcgagagccagacagcctgccttgtgctgcacacctggctttgctctgtgcagaacccagcacacgtgattttgtgtgacatgccaacagcctggctccccggacaggaggcctgccctgggggagtggctgcaggaggagggtagggcgggcacccctgagtctggccagccttgtcacagatgcgtcgcccgccctgcagtcctgatttcagctcacttcagagtaaatcagaataaaccgcacctggactttcacaaatgcatgtcgacgctttcagttcaccccttcctttgctaactttcttcctattttcttctaatgcaagagcttattaattcaatatttatcattttgaataacgttttccctttttcgtaataaaatgtactccactattagtaaaatgtatttactattttagtaacaaaaatagacttgcctaaacatgtttaaaatacagtgatgtgaacaattcagatgtctctattttctttcttctgatgactcaaccccaaatgtctggaattgactccgaggtatccagggcccagagccagcctccaagaggaaaaagaaaccacacccttctttctgggaaactggccaggaaccccagag

SEQ ID NO: 36565 - DNA, 791 bp, Macaca Mulatta
  misc_feature (1)...(791): n = A,T,C or G
gtagcgcgtagattagagctggtttataataagaccctgttttttaaaaaagtgtttcgtcttttcctaaagaggaaatatttctctttggggttaccgctcccgggaggtaaccatggcaggatgtaaataaaccaggttttttttgggtgtttggaagggttttttccataaccctattccctaccttttttcttcttcccatggtatccagttggggttatcctgatggacttcggtagttttgtcagtttttgcccccttgtgagctattgccacacagcattcacaaaatcaaacccagaattgtttataggcttactgcagccagttgaactaacttgtaagtgcaggtggcccatctttggtgggtctatcagtagaaaacagaaaatatataacctcactagacgtaacttctgaaagaaccaccactggatttctagaattctttagtttaccattggtgggaataagaattattttacaataggcaagcggactcttttttttttnnnnnnnnnnnnnnnnnnnnnnnnnnnnnnnnnnnnnnnnnnnnnnnnnnnnnnnnnnnnnnnnnnnnnnnnnnnnnnnnggcagttttccttccccagccannnnnnnnnnnnnnnnnnnnnntgtccgcaaccacacctagctannnnnnnnnnnnnnnnnnnnnnnnnntgtttcgnnnnnnnnnnnnnnnnnnnnnnnnnnntnnnnnnnnnnnnnnnnnnnncnnnnnnnnnnnnnnnnnnnnnnnngnnnnnnnnnnnnnnnnnnnnnnn

SEQ ID NO: 36566 - DNA, 384 bp, Macaca Mulatta
cataatcctttatatcattatagtctcatagcaacacgtttgttctaaaatatcgcgagtttgaactcacagtactgtactaactcatgaaaaatcatgttgttcatgaatcatctgaagaagccatctgttgaggtggactccagcagccgaagaaagcaggcttgtgtgttctgctcttccctgtccataggtaaagtgttgttagggagtctcatgttttaatgcccattttttgtttgtttagttccgtagtcttaagtcatctagatttctaaaatcatgttaacaattggatgttatgattgtactttcttacccagttatgcttcgctcgtggaacaaagtagtaatagtattgacacgaacatctgtgcaagacaa

SEQ ID NO: 36567 - DNA, 684 bp, Macaca Mulatta
ttatatgactgctggacagtaacgctgcttctgagtttcatcttcctcatctgtaacaagaagttatgccatgtgatttctaatgcttcttcagagtctgagttcatatgtgtgaattactggatggtttgttttgatacgtggaatttgagattcaaggtctacaaatggagctatgctgacctctgtttttgagggttaaggtcagagggtttggcctttccaaagaggtgaactaagttcttcgtttattcttttatttgtaagaggtgggggccgagtggatttagggatgagggctggggacttaggaacaaaacttatataggcaggtgttagataactatcctgaaaggacttttgatgtgagctgattaatgaagcccattatcagacttgtacttaggaacactctggtggaaggaactaagataataacagctttccttttgtagcatagcttttatccctttctgtaacttatttctgtggcagagtaaaagatcccactacccctgaatatcaatatacccttaatagttcattgaagaatttttctgtattaaaatggtcctttaaaaatgcagctaatcctgaatcaatgggagcacactttgggctaatgcctctgtaggcatgcattgacagatgatggaaactagaaagacagcctgatttgggaac

SEQ ID NO: 36568 - DNA, 769 bp, Macaca Mulatta
  misc_feature (1)...(769): n = A,T,C or G
ggaccatttgttatcctatgtagacagagctttattgccctggaannnnnnnnnnnnnnnnnnnnnnnnctcatgcagttcagtcttttcatcatttcactttgtgagtcactcacataattgtcaatcatccctctgacctttttaagaatttacatcttaccatctctgattgaagcagccttctcgctttatttcctttatgttcattttcctgtgggctctcccttagagacacacggccgcagccacctcctccacatatgtaatacgccttcccctgcggccttccgtggccacagcaacaggggctgctcaaccgctccagctgggcttttttaacaagcactgtcagaaatgcacaggcccggggtgggggatgaacagaagttgattagtgggcacagaaatacagttagatagaaggaatagttggagcattcgatattacagtagggagactgcatctaacaataattgattgtgtatttgaaaatagctagaagaatcagaatattcccagaacaaagaaaagataagcgaggtgaaggaaatcccagttaccctcattcagtccattacacattccatacaggtctcaaaatatcacagggacctcaaagacatgtacagttgttagtttaacatttttgaaagaaaagaaaacccggccagaagcatttaaacaaaataaaataaggaaacaccnaaggacccagtgtttagggtgaaaggaactccccagtggcctttcagaaaaagaagaata

SEQ ID NO: 36569 - DNA, 569 bp, Macaca Mulatta
  misc_feature (1)...(569): n = A,T,C or G
cttaaggatgtagtcaagttaatnttagatgcagtatcttctgatatgtttaatgaaacagaatctgaagggggaggcattgaaacttatcgatacaggccaacatatggaaaacttcctggaggagctgaatcaaattcatttctagatgatgatacacatacagataaaaaaattattgatgagagatcaccacaaagagaagaaatgagaacacattctcttaaacaatgggctctagaaaaaaccttaaacaaaattgaagtaaaactcaaagaaccacatatatctccaattgctcccattataagaaatattttgaatgaaatttttcaaagtactttaatcaatcaattaaatgtcctttctctctcccactctaattttaatggcatgcctcacaatgttgatgagacaactccccaaacatctgttcaatttatggataaaatgatggatcctttactgtctgaagcagatataaccatagtaacagataatattgttaggacggtatttcacaaactttattcagctgccattacagaaagaaatataagggaaaatag

SEQ ID NO: 36570 - DNA, 381 bp, Macaca Mulatta
atggaaaaccttacaaaacacagcattgagtgttcaagtttcagaggtgattgggaatgtaaaagccagtttgagagaaaacagggatctcaggaaggacatttcagtgaaatgatatttactcctgaagacatgcccactttcagtatccagcatcagagaattcatactgatgagaaactccttgaatgtaaggaatgtgggaaggattttagttttgtatcggtccttattcgacatcagcgaattcatactggtgagaaaccttatgaatgcaaagaatgtggcaaggcctttggtagtggtgcaaaccttgcttaccatcaaagaattcacactggtgagaagccttttgaatgtaaggaatgtgggaaggccttt

SEQ ID NO: 36571 - DNA, 577 bp, Macaca Mulatta
gagtgattgactgctggaaaagaatgagggcaaggactgaaccccggatctgcagtagtaagggatatgatcagaccacacccagagcagactgcacagttctgaccccatgtctagaggacacttagacaaggaacttccgtgtgtacagggatcacccggacgtggtgctgagatccaggaagtctagagtcgagctacagattctgtatttatgacaaggctggagttcatgtcgctgttctccagattacacttggagtatcaagaataccaggatcccacatgtctgagcatcagcctcacctctagggcttgttatataaatgattccttggtcttgtgcataatactctgagacaggggttctgggtagcctgagtattttctaagctcccaccagcaatcctgttgctcagccagattgggaaccactgagatcagagagtgcccagggtgggtggatggggtgggttttcaaacctgtttaaaagaggatttttctcacagaaagaaaagggaggctgtgtatcatccgttatgagatgtgacattccctgttgttctctccactatg

SEQ ID NO: 36572 - DNA, 229 bp, Macaca Mulatta
cagctcaatgggtcggccaccatcaacaacaatgtgcgggtggcccagctgccggcccagggccgccgcgtgggtaacggggtgcagtgcctggccatgggctggggccatctgggcgggaaccgtgggatcgccagtgtcctgcaggagctcaacgtgacggtggtgacgtccctctgccgccgtggcaacgtctgcactctcgtgaggcgtcggcgggccggcgtct

SEQ ID NO: 36573 - DNA, 791 bp, Macaca Mulatta
  misc_feature (1)...(791): n = A,T,C or G
gggacataggggttttgtttgttagtatagctttaggtaactttgttttctctttcttccacctaatatnnnnnnnnnnnnnnnnnnncggttttccttcattccccctcatcactgagaaagccatgtggcacaccatatgcccccatccaactcctcggtggtagagccacctagacaggacccgggttgcagggttgtgaaaagtaatatttagggctacatctgagtagagaggagggttagtttcgtctggtttctactttcttctaaggacagaacccttactggaacttaaactggaaacaattcataacatttgaataaattagttcagtcactgtcacacctgtaattcgggagagtgtcagccatgaaacatgcccctggggctatgagggaactggcctccaccacacacaaaatgggctccagtctaaattttaaatgctccctctacaccctgtgaccaattgtcattgcacttaccgtattgnnnnnnnnnnnnnnnnnnaagatggagtcttgctctgttgcccaaagctagagtgcagtggtggccatctcagctcacggcaacctccgcctcccggggtttaacaattctccctgcctttggcctccccaagtaactggggattacaagccacagggcccccatggcctgggcaaaatttttttggaggttcttaagaaaaaaaaaggggtttcaaccttcttggctccaaggttggtccttgaaaactacggacccctcctgaatccaatggggcgcttcagcattccccaaa

SEQ ID NO: 36574 - DNA, 2268 bp, Macaca Mulatta
  misc_feature (1)...(2268): n = A,T,C or G
cagctattccaatcaagttctctgaaaagcagcaggcttctcactacctctatgtgagggcacttggcatttgacaaggcaccaagtccacctggcctcagaagaggactctttttgtcctcaatgtgcccccatactgcacagnnnnnnnnnnnnnnnnnnnnnnnnnnnnnnnnnnnnnnnnnnnnnnnnnnnnnnnnnnnnnnnnnnnnnnnnnnnnnnnnnnnnnnnnnnnnnnnnnnnnnnnnnnnnnnnnnnnnnnnnnnnnnnnnnnnnnnnnnnnnnnnnnnnnnnnnnnnnnnnnnnnnnnnnnnnnnnnnnnnnnnnnnnnnnnnnnnnnnnnnnnnnnnnnnnnnnnnnnnnnnnnnnnnnnnnnnnnnnnnnnnnnnnnnnnnnnnnnnnnnnnnnnnnnnnnnnnnnnnnnnnnnnnnnnnnnnnnnnnnnnnnnnnnnnnnnnnnnnnnnnnnnnnnnnnnnnnaggaagaagctaaggccaaggaggaggagggggtccctgacgaggaggggtgggtgaaggtgacccgccggggccggcggcctgtgctcccccggactgaagcagccagcctacgggtgctggagagggagagacggaagcgcgcccgaaaggagctgctcaacttctatgcctggcagcaccgggagagcaagatggagnnnnnnnnnnnnnnnnnnnnnnnnnnnnnnnnnnnnnnnnnnnnnnnnnnnnnnnnnnnnnnnnnnnnnnnnnnnnnnnnnnnnnnnnnnnnnnnnnnnnnnnnnnnnnnnnnnnnnnnnnnnnnnnnnnnnnnnnnnnnnnnnnnnnnnnnnnnnnnnnnnnnnnnnnnnnnnnnnnnnnnnnnnnnnnnnnnnnnnnnnnnnnnnnnnnnnnnnnnnnnnnnnnnnnnnnnnnnnnnnnnnnnnnnnnnnnnnnnnnnnnnnnnnnnnnnnnnnnnnnnnnnnnnnnnnnnnnnnnnnnnnnnnnnnnnnnnnnnnnnnnnnnnnnnnnnnnnnnnnnnnnnnnnnnnnnnnnnnnnnnnnnnnnnnnnnnnnnnnnnnnnnnnnnnnnnnnnnnnnnnnnnnnnnnnnnnnnnnnnnnnnnnnnnnnnnnnnnnnnnnnnnnnnnnnnnnnnnnnnnnnnnnnnnnnnnnnnnnnnnnnnnnnnnnnnnnnnnnnnnnnnnnnnnnnnnnnnnnnnnnnnnnnnnnnnnnnnnnnnnnnnnnnnnnnnnnnnnnnnnnnnnnnnnnnnnnnnnnnnnnnnnnnnnnnnnnnnnnnnnnnnnnnnnnnnnnnnnnnnnnnnnnnnnnnnnnnnnnnnnnnnnnnnnnnnnnnnnnnnnnnnnnnnnnnnnnnnnnnnnnnnnnnnnnnnnnnnnnnnnnnnnnnnnnnnnnnnnnnnnnnnnnnnnnnnnnnnnnnnnnnnnnnnnnnnnnnnnnnnnnnnnnnnnnnnnnnnnnnnnnnnnnnnnnnnnnnnnnnnnnnnnnnnnnnnnnnnnnnnnnnnnnnnnnnnnnnnnnnnnnnnnnnnnnnnnnnnnnnnnnnnnnnnnnnnnnnnnnnnnnnnnnnnnnnnnnnnnnnnnnnnnnnnnnnnnnnnnnnnnnnnnnnnnnnnnnnnnnnnnnnnnnnnnnnnnnnnnnnnnnnnnnnnnnnnnnnnnnnnnnnnnnnnnnnnnnnnnnnnnnnnnnnnnnnnnnnnnnnnnnnnnnnnnnnnnnnnnnnnnnnnnnnnnnnnnnnnnnnnnnnnnnnnnnnnnnnnnnnnnnnnnnnnnnnnnnnnnnnnnnnnnnnnnnnnnnnnnnnnnnnnnnnnnnnnnnnnnnnnnnnnnnnnnnnnnnnnnnnnnnnnnnnnnnnnnnnnnnnnnnnnnnnnnnnnnnnnnnnnnnnnnnnnnnnnnnnnnnnnnnnnnnnnnnnnnnnnnnnnnnnnnnnnnnnnnnnnnnnnnnnnnnnnnnnnnnnnnnnnnnnnnnnnnnnnnnnnnnnnnnnnnnnnnnnnnnnnnnnnnnnnnnnnnnnnnnnnnnnnnnnnnnnnnnnnnnnnnnnnnnnnnnnnnnnnnnnnnnnnnnnnnnnnnnnnnnnnnnnnnnnnnnnnnnnnnnnnnnnnnnnnnnnnnnnnnnnnnnnnnnnnnnnnnnnnnnnnnnnnnnnnnnnnnnnnnnnnnnnnnntcggatctcactcacaaaagtctggtgggaatatgggacacctgagctgtaaggggacgagagcccatgacctccgaaatccatggcaacataataaaagtctgaaaca

SEQ ID NO: 36575 - DNA, 649 bp, Macaca Mulatta
tggaggcaggggaagccaccgagagtgactgagggtcagtgggggcagatgccacatggcaaagggcagagaagtccgggaggtgtgaggagcggccgacctggcctccgcacatccgggcactgggcgcaagatgaagcctcgggggacagatgtgactgggcaccacagcagggagggggaggggaagagagaacgcatcacacaaactgcacaaaacaagcagcccatggaaaacaaccgagaaaaagaggtgaaaaatgaacagcaaaccggaccctgcttcctccagcaggaggctcccacctgctgctggtcacatcctgctttctgcacctgccgcttatgggatgcggtgggcctgcagggaatgcggggcttttggttgctgttagcgacttttcttctcactttgtgtagccccccagaaccgtgaggggcatctgagtgggtgagcacaggcgtcccctgaagcgccgcccggaccagggcgttcagcgctgcggggaggccttcgccccactgctccactgtttctcgccagcattcactgtgtcccacagggctccaggctcagagtgacgggagctattctaagtgtttaattgaaggcctagcacttgaccagcccctggagaagctgacaacc

SEQ ID NO: 36576 - DNA, 671 bp, Macaca Mulatta
  misc_feature (1)...(671): n = A,T,C or G
gcatttttacccattagtctaatgtacgttctttattttgtcattttgtcaaccctgtccccaagcacatcttctttccttttactatgtctatgtagnnnnnnnnnnnnnnnnnntgcacttacgttacactcgcaaaatgtgggtaatctgtgtctttcaaaaaacatttcnnnnnnnnnnnnnnnnnnngtcagtccattgcgtaagtggcaagtttgggtgcttgtggcaagtatgtacgaagtgggagggggatgagaattgcctgtccttcagtaggctgtaaaagtaatttacatgtaagtaaaaagggaaaatagaatagatgccaaagtcatttattcagtctttaagttttcttatgtggcattactgcatctgctagttagtgagaaagcaccctaagcttttactgctcccctccctgcctgccaacacacttgatgtgtgcaaacagccctcaagtatctgtcagattacctatagaaggtattgataaggtattcttgtcagtttagaaatggactggataaaacttactttgttgtcattttatctcatttgtcctgttacatgccctatgttaagaaaatcatattgccactaataaccaagatgctaaatgagtattacactggctaatatcatttttatataccaggtatgtg

SEQ ID NO: 36577 - DNA, 396 bp, Macaca Mulatta
ctctcctgaggcctttgaagatttcagccgtattaacagaaaggacactgtgagcacgtggtctcgctttcacttctttccgcaggttcctgccaagccacgtgacagaatgctcatgctcaggcgcctgcctctctcctgccctggagcccttgttacaacagtactcacagctttcattcacttaggtatttgagtgtgagataggagaccaggtcatctgattcccgccaagccacaagtccctgcagcaccacctttggctaggagggaggggtgagagccaaaaggggcttcagggggagtgtttaccctgctccctgcccagctatggggtcctcctttcccctggaggccctcctttcccctgctccctgcccagctatggggccctct

SEQ ID NO: 36578 - DNA, 616 bp, Macaca Mulatta
  misc_feature (1)...(616): n = A,T,C or G
aggcaggaaaatcatttgaacctgggaggcggaggttgcaatgagccgagatcnnnnnnnnnnnnnnnnnnnnnnnnnngaagagctaannnnnnnnnnnnnnnnnnnnnnnnnnnngataatagccttccattcatcaagatttcatcattatgaaactttgagaattaggttttttgttgtttgatcaaggttttgccagatgatacatttttacttgaggaaacgtctgatttcagtgaaaactgtaataccttctgactaccaatccgttgtgtttatccttgaaaaaggtagagaattattagcatgtctatannnnnnnnnnnnnnnnnnnnnaaaagacatttcctttttaattcttaaatagcatacacagcataggaaaatagcatctttattttagggtcaaaacttgttgagttttaagtgacatatcacatttcctaaactttctcaattgaccttacttgactatactttgttaattaccccagtactttttacttgtaaagaactgattttccgtaagtttctgtatcatcttacctcattcagtaggtgctcggtatatgtagagtgtcagagctaacattagtttggttagtgctttcag

SEQ ID NO: 36579 - DNA, 440 bp, Macaca Mulatta
acatacacacacaatttaaaactgagtaaatttaaatgtgtggaagtaccccacaaattgatgtcaacaaataaatttcatttctctagctacttatgtctggacttattttgagcattacaattttattgccttcatttgcctatttagactgatgtattttgatatgatgaagttgtgaataaaagccttgtgttcattatttatatatactacctggtatgctatgtactgtgtctgctctagtgctattccctaatgagcaactaagaagagaagacacaacaataaaccatggaagtctcgagaggccatggaaatgatttagaggtgtaaaatattccccagtttttattataaatttttattcataggttaaaacatatcagcataagtgatagtacaggtgtgactcccttatctaggagaagaaaatagct

SEQ ID NO: 36580 - DNA, 781 bp, Macaca Mulatta
  misc_feature (1)...(781): n = A,T,C or G
gnnnnnnnnnnnnnnnnnnnnnnnnnnnnnnnnnnnnnnnnnnnnnnnnnnnnnnnnnnnnnnnnnnnnnnnnnnnnnnggtggctgggactacaggtgcccaccaccacannnnnnnnnnnnnnnnnnnnnnnnnnnnnnnnnnnnnnnnnnnnnnnnagtcaggatggtctcgctctcctggcctcatgatccacccgccttggccttnnnnnnnnnnnnnnnnnnnnnnnnnnnnnnnnacaccaggccatgtgtaggtgaaatttttgtagggtatgcatgtgaccattcacagaaggcaagaggtttctctttggaatttaattttctgtgtnnnnnnnnnnnnncnnnnnnnnnnnnnnnntgtggaacatttctcatggaataatgggtcatattaagttaagtttaggaaactgatgtttattgagctgtgccacatatctgctaaaggaatttcccttctaaaattaaataagcttattttccctgggtgcccaaaaataatgaaactttcctaaaaacattttttgcccgcctaaaaatcagaatggtattccaaaaatttcctccccaaaaacttattaaaatgcttgtnnnnnnnnnnnnnnnnggnnnnnnnnnnnnnnnnnnnnnnccctgcctccttgaaaaacaagtgtcannnnnnnnnnnnnnnnnnnaaattaacccgttttttctttataaatttcttttgaccatagtcatttaaaattaatcctaaaatgttaacaatttgggaaaattttgaaatttt

SEQ ID NO: 36581 - DNA, 199 bp, Macaca Mulatta
atatgtacctcttccaacttactatgacctgtttcctggttctatgacagctacacaactactggttccaagtagacgatgaaggaaggaatatagtcccttatatatatagcttttcttctttcttgagaatcatctgatcttttatttagataaaaataaagaggcaagaatctattgtcattttgtatacaattcc

SEQ ID NO: 36582 - DNA, 628 bp, Macaca Mulatta
  misc_feature (1)...(628): n = A,T,C or G
ttggggctttgtccagcagatgtattttgaaaacaaccttttattttagggctaatcacattttacgaaattcatgaaactccttaactatttgaactactacttcttagtcctagttaggcttctgggcgtcttttttctgcccttgtgctccatatggagttgccaccactgttctatttcttagnnnnnnnnnnnnnnnnnnnnntcacttacactggttgtgcagtagaagtcattactgacaaccacctctttcactgctgctaactctgaaaatcaatacccaggtgattttgtgtttatgaataatattactgctgattatacagtagtagtaaataataataataaatattaggaagcaatacaggttttacaaagttttcatactaatttcttctggttatatttgttcatactattcttagaagttaggaggaaatttctccagtgatgtgaagtggcttaggtggttctctgagcattttgagttttatctttgtgattaactgtttcccaaccaaggttgtctatgtagcaaatacagccaatccttactatttgcaaattttgtctctcgagaattcacctacttactaatacttaatttgaactccccaaaatc

SEQ ID NO: 36583 - DNA, 822 bp, Macaca Mulatta
  misc_feature (1)...(822): n = A,T,C or G
gggttttttaaagcttacatgtgaagatacgtgtctgtcgcagatgtccttaaagactgcataaaacaatatgtgcctggtgtggatcttaccaaagtactaggcatgaattatagggattgcaaatcccatggatcttaatattgaggtgttagtaaccgaggtctctggtagtaccccttagtagaggaagaggctgctgcccttgggagcttgtgacacgctccagtgtggtaccaggccataaagtgacatagttactttgtttagtgcctttgtttagtgccaagttgtttagtaccttgcatttttccacacaggtagtaactggaaataagcaataagtggtttgtccatttctaagaatcttaaactattagttggctgtagtgtgaagctattacttgtcattggaaagatggagagagtggcctcaatcagaagtggccaacagaagcaggtatcattttaaggtccaaactttcatctgtcagcaatagggaaacaacagttcaaattcgctttgtagatgagtacagtgttnnnnnnnnnnnnnnnnnnnnnnnnnnnnnnnnttcactctnnnnnnnnnnnnnnnnnnnnnnnnnnacaatctctgctcaccacagccgctnnnnnnnnnnnnnnnnnnnnnnnnnnnctnnnnnnnnnnnnnnnnnnnnnnnnnntggcatgcgccaccacnnnnnnnnnnnnnnnnnnnnnnnatagaggagaggtttcttcctgtttggtcaggctgggtcccgaactcctgacttggagtgatctgccccannnnnnnnnnnnnnnnnnnnnnnn

SEQ ID NO: 36584 - DNA, 289 bp, Macaca Mulatta
ttggtctttggcaagatgaaagaagacatgaatattgtcaaggccatggagcccgttgggtccaggaatgtcaagaccagcaaggagatcaccattgctgactgtggacaactctaataagtgtggcttgtgtttgatattttatcttaaccaccagattattccttctgtagctcaggaaagcacctctgcaccccatttgctcgcagtatccttgaatctttgtgctctcgctgcagttccctttgggtgccttgttttccttgttctcttccatgccttgctggat

SEQ ID NO: 36585 - DNA, 3055 bp, Macaca Mulatta
aagagctccagggaggggaggagagggcacagcgctccaggtaggaaggggtgaccctgacctccattcttacatccaattcccttcccagcaacagataattgcggtcaaacccaggcacccccgagtcaagagtggagcccccatacccgtcacagtgagcctggtcccgttcccaaagtagaggggcgaattataggagcacagctgcagaggcttagataaaacccacctggagatctccagccagagggtaagtcttagctccctgacagcaggatggctgcctttctctgcctggattcacggctctggactaaagggattctgttaggaaaaaggcctaagcatactgtgcagcatgaggtgcaagaggaagaggcttaggagaggcagagccatgcacgtaagagggaggacgagccgagaaggtagtgaggaggcagattatggactgaagacttagagaagagaaacagaggagtcagccaagacacaccaaaagggaaggcaggcacagctctgtggaactcccaaggggtaagagatttcactcaatcctcctcaccagtgctggaaggagaagcagagaactgcgcctccaagggacaatggccttaccaccctggttctgcaacttacctaggacggagagtcgagtgccatctccaaaatactggggctgattgctacacagtgcatcatgagtgtggcaaaccccagaggagctggtgcgggcccttccttccagaagctgcttccacacagaactcctggggccccccacacactccactgacccacattttctgagcttttcttggctgtgttctcagtgtctaccctcccgcaaggggtcctcctggaactccgaccttataacacactatcccaaaagaagccttttacatacccaagacagagagctgggttccactgccaaaaaacagtttttcattagttgcacaacattaaagactgggaggaaaaccgccacctgctgccttccactcctgcctccccaagtccacctgccaggtcctctcctgttccctagtagatttttaaccctgctaggtagaggggtggacaatggtacaatccgaaacgcagtggtcagcagacaagaggccccgtgtgatcccccaagttccctcttctgtgactttctcctttctgtgtgagggagagaaatggcaggaccgtggtggtaaggtcagaggctcctttacctgtcatggccatgactggcacccttcaaggagacaggagatgctcaaagtgaccccttccaagctgagtctacccatctctcagtagaggaacataacttggcacaggcagtctacaaaatagtggagagggaggctatcccctcctcatctccttcgtaggtcttcctgataaaaatacgctttaacctaagcactggagacaaggctctgtctggattccagcccctttttgcaagttcccagctgtccagtcgtgacttactcacctacaacagtgagccgacttccctctccaaaatacacggtgtttccagaacacagcctcccagggccacttcaaaaccgcgcagcctctgctgagcacagctgggattcaggcaaaggctgggagttcatggaactcttcccttacagagataccagctctgcttccagcactctgcgttcccttctagagcttgctaagacccgggcaggtgacaaaaagagacacagagtggccttccctataaaatccagcacaagaatatacgaagaatctacagaggacctctgttagtgaagcagatagatggagaggtgttgtgacccattaactacccaccgggctttctctgggcctcccctgtctcagggcactatgaggagaggcaccctccccttcccttttctgccccatcagcctgggctcagctctgactctgctcagagcctctgggaagcctgggtggatttgcccttacagggagcctcctctgaactcactcctgggacatgagatgacgtctcccttaacctggcctcaggagctgggatctccgttctctttgacatttcccaggacagagtcctccctcatcgcacccctcctagagacccccagccttacctacaacagttaacttggtccctgaaccgaaggtgtagtcatagttagcacataaggatacagccactctaaaagggaaacgtggacccacttttccctatgacggatctgcaaaagtacctgaaaaagtcttacctaaaactgtgagtctggtgccttgtccaaagaaagcttcagtgttcacacagtgacaggggtcaaggtgaaaatcacattcaaggcatagagtggggagagggccctggctagggtggaggacagtgagctaagaaatctcctcctgtgctgtatgtgtattgcatattgcacagaagaacactttgacttttgctttttaggaccatggagaatgagagtccatccacagggtcctaggtccctttctcaaaggacaccccattcatgctccctctctgagggtccatcaaaagggaaagggcgtggcctgcagaggacggcaaggccagaacctatgactccatctataggtagccctgacttcttcccaaatcctctggagagccggtcacctccaatgaaccttccacccaactgtctcaattttgtgggtatcaggactatccctgagtcctccacttgagaggttcctgaggcattcttcttatgtctgagctctctctgcttgggaagcttcagttctcatctgggtctgtccttgtccatggtcttggtgtgacctgtgatcaggagtgaggcagaggcattctgaaccaaattgcattaagacctgtgacccaggaggaaagaagagggactctgggagttgggactgccagagaggtttttgtaaaggtttcccatagagttgaatcattgtggcccccctgtccccacaatgttacagctttgtacaaaaagcccctcccatgggtccgccaccagagcctgggagagaccaccagagcagctg

SEQ ID NO: 36586 - DNA, 444 bp, Macaca Mulatta
  misc_feature (1)...(444): n = A,T,C or G
atgttggagtgtgcattcatagtcttgtggcttcagcttggctggttgagtggagaagaccaggtgacgcagagtcctgaggccctgagcctccaggagggagacagtagcagtctcaactgcagttacacagtcagcggcttaagagggctgttctggtataggcaagatcctgggaaaggccctgaattcctcttcagcctgtattcagctggggnnnnnnnnnnnnnnnnnnngctaaaagccacattaacgaagaaggagagcttcctgcacatcacaggccccaaacctgaagactcagccacttatctctgtgctgtttataactatggtcagaattttatcttcggtcccggaaccagattgtccgtgctgccttnnnnnnnnnnnnnnnnnnnnnnnnnnnnccagctgagaggctctaaatccaatgacacgtcg

SEQ ID NO: 36587 - DNA, 1860 bp, Macaca Mulatta
  misc_feature (1)...(1860): n = A,T,C or G
taatcaatccaaagctctcattacctccctgggcctgattttcaaatccaatgttactatagcaaagaattaaaggaggggaagaaaagcaacactgtattaaatacaccctcctcccctttttcccaaaggctgtttgtccccttctcttgataactcttcagttcccagagagcagagactcttgggaaacaggaagtagcaaaatgccagtgagaaaatccccagatgaagagcgcaataagtctcccggcaacagtgtggtcaaaagggggaaattcccccaccagccctgaaaaacagtccctcaggaaagcttagtgaaggttaatttgggaaattccctcagaggccacagaacagaaatggaaaactgctgtgtaagagaaatctgaacagagcaagccagttcatggctgcctggggtgctctctgcataaaccgtgctgctgcccctgcctgacttcccccttttcatcctgatcctgagggtaatcccgaaggggtccagttgccagagccacttgacaccccccttccccaggctcccaacccaggagaattaatgccgcaacacccagcctcttgacatgagctgctgctaaagcagatttgcctccccattaggacctcctgtgacacaccctcactcctgtccccatgttagactagcaagccacagtcatcatactgtgagtgtccctcnnnnnnnnnnnnnnnnnnnnnnnnnnnnnnnnnnnnnnnnnnnnnnnnnnnnnnnnnnnnnnnnnnnnnnnnnnnnnnnnnnnnnnnnnnnnnnnnnnnnnnnnnnnnnnnnnnnnnnnnnnnnnnnnnnnnnnnnnnnnnnnnnnnnnnnnnnnnnnnnnnnnnnnnnnnnnnnnnnnnnnnnnnnnnnnnnnnnnnnnnnnnnnnnnnnnnnnnnnnnnnnnnnnnnnnnnnnnnnnnnnnnnnnnnnnnnnnnnnnnnnnnnnnnnnnnnnnnnnnnnnnnnnnnnnnnnnnnnnnnnnnnnnnnnnnnnnnnnnnnnnnnnnnnnnnnnnnnnnnnnnnnnnnnnnnnnnnnnnnnnnnnnnnnnnnnnnnnacttaaaatgaccatttcaagattatcgacaaaaaggagatttcagtagaagagagaggaaagtagactccatcatgacagcctaaatttgttttactgtatacttatgcaaaataggtatcaaattttggaaaagatattttaaaggagaaagtactctgggtttaaatttctattaaaaaatatgctctactagagcgtgtgtgcctttttatgtaatcaggacccactgctgtatgagtcacaattatagattctactttcaaatattttttgactcatagagaagagccctgacaaaaaccacttttctgatgtcttcaaacaaacagnagctactttcaaagtctcctacacttgaaaattctagatagattgtcaacatactctcaagaagtattctttccatttctcatctgnnnnnnnnnnnnnnnnnnnnnnnnnnnnnnnnnnnnnnnnnnnnnnnnnnnnnnnnnnnnnnnnnnnnnnnnnnnnnnnnnnnnnnnnnnnnnnnnnnnnnnnnnnnnnnnnnnnnnnnnnnnnnnnnnnnnnnnnnnnnnnnnnnnnnnnnnnnnnnnnnnnnnnnnnnnnnnnnnnnnnnnnnnnnnnnnnnnnnnnnnnnnnnnnnnnnnnnnnnnnnnnnnnnnnnnnnnnnnnnnnttagacctcagcaatataaatattgctcatttccaccaaggaggaaaacaactctgccatcaaatttgctgagcacaaagtgaaaggaaatctgcaatccactggctaattacgaccca

SEQ ID NO: 36588 - DNA, 622 bp, Macaca Mulatta
  misc_feature (1)...(622): n = A,T,C or G
gccgtcattccacggagagagacttcgaagcaagtgagaagtcagtgagcgagatgagacgacatcagagacaggagcaggttggtcggtttagagcagaaggggccgcagcgccagctgcacagacgtccttaaaaatcagtgtcccgtgtgggtcaagtgaaaagatgaggatttcattctgtccttggcttatctagttgtgaaaggcaaaaagttacagataagatttcttcctctaggtcttagttttcttcactgtgaaactaaaataaatgattttctcagttctaggactaactctaaatttgaagacccactttataacctagttttatatgtaattttcaaaatgtatgtctatttggcttctattattcttgagatggagtcttgctgtgctgannnnnnnnnnnnnnnnnnactgttcccagaaagagtcgtcaagtggagtgcaccactgcagcctcactgtcctggtcgacagcagtccttgtgccaccaaacctggctctcttgcttagataaagaagcttatcccacagcccttagtgctctttgctatacctagaaacttcttcctatatatgatgcctttgaatctgagaattgatactcaaaa

SEQ ID NO: 36589 - DNA, 408 bp, Macaca Mulatta
gcttcctttagtttttgacgttgctgcagcttttttacgttgtaggaatttgatatacttcttggatgggttgtgtaactaagctgtcgaaaaagaactagccattagactttgcatatttttttcttacattatatcttaagttctctgcagtcaagagacattttagttccatttgaagcaggccgtttattaatctgataaaacaaggaaaaacatgtaatgttactctattacttgaatcacacaaaacaactataaaatttgttactttctcagtttttaaaaattggaatatatcttttgtaatgaagagccaatgtagatttatctgttctgatttataaactgacttttaacatgcctgatttccattgagttaaagaacctgtatattctccccccttc

SEQ ID NO: 36590 - DNA, 829 bp, Macaca Mulatta
ggggaatgaaatggaatggaggatggtatggagaatggaatggaatggagaatggaatggaaaagagattggaaaggaatggaaaatggaatagagaatggaatggaatgcagaatggaatggagaatagaatggaatggaatggagaatgaaatggaatggagatggaatggggagtggaatggaatggggaattgaatggggaatggagtggaaacgggaatgcagtggaatggagaatggtttggaatggaatgcagaatggaatgcagagtggaatgcagagtgcaataaaatggagaatggaatagaatggagaatgctatggaatggagaatggactcgaatggaatggagaatgaactggaatggagaatggaatatagaatggaatggagaatggaatggaatggaatgtagtgatgaatagaatggaatggagtatggaatggaatgcagtggtgaatggaatggagaaaggaaaagaatattgaatgcaatggagaatggagttgaatggggtatggaatggaatggagaatggaatggaatggaatgcagtggtgaataaaatggaatggaggatggtatggcgaatggagtagaaaggaatggaaggaaaatggaataaaatgcaatgccaaatggaatggaatggagaatgggaatggactgcaaaaatggaattgaaattgggaaaagggaatgggagtggaaatataaaaatgggaatgggaattggaattgaagggatgggtattgggaaaaatggaattggtaactggattaatagagaaatgggaattgggaattatgggaaattggaaaa

SEQ ID NO: 36591 - DNA, 808 bp, Macaca Mulatta
  misc_feature (1)...(808): n = A,T,C or G
ggggaaaagctcaaatgatgtttgatggatgatgacagtttgggggtgtgtttgtgtggaccttactggcagagagaatgagtaagcaaaggtatgggagggtaaatggtgtggcctgttcagggaatcctaagccatgcagacaggctggaacccacattgtgaggggatgaggtgttgcccatcattgaagaaaggtagccatgactgcagcatttggaagcactggtcacctcttggaatgcactcctcccttgttttggagtgcactcccctcaatggagcagctcctacctgtctggatgctccccctctgctgtttgtacgagattgtctttctctgcccactctttattaccagtgttcctcagggttccctccatgattttcctccttctagactcctctctaggaatttttccactgcagcaataccccaaatgacatatctcatccagatgagctctatcctgaactccagatgtgtacatggatccagctagtggacatctctacctgataggagtggccatctgctccctaaactttcatgcattctctgcttcccatgctcgtgggaaagcatcgtggcccgggcacgnnnnnnnnnnnnnnnnnnnnnnnnnnattgggaaacccaagccgggtaannnnnnnnnnnnnnnnnnnnntgaaaccgccctgcccaacattggtggaaacctttgtcctctactttaaaataccaaaaaaatttgcctttggccttggtggcctttgttcctggtaattcccagcctacctcaggaaggcttaatcccgggaaaaa

SEQ ID NO: 36592 - DNA, 583 bp, Macaca Mulatta
  misc_feature (1)...(583): n = A,T,C or G
nnnnnnnnnnnnnnnnnnnttctacgtggtgaagnnnnnnnnnnnnnnntnnnnnnnnnnnnnnnnnnntgtggtggtggatgcctgtagcnnnnnnnnnnnnnnnnnnnnnnnnnnnnnnnnnnnnnnnntctgggaagcagctcacttgaatcagtgagctgaggtcgtgccactgccactctaaccctaggtgaacagagtggagactccatttttcnnnnnnnnnnnnnnnnnnnnnnnnnnnnnnnnnnnctattagtaaattggctccaggggaaaatttttgagggaaaatttaccaaggtttttccccctggtaaaaagtaaaattccccacccaaattcaaaatcccctgggtccaaagaaannnnnnnnnnnnnnnnnnnngaaatttattggccggggaatgggcccctccctttaaaggggtttcccggtaatttttccccccttcccaaagaaaaaagggggccccaaaaaatgttcccaaaggggnnnnnnnnnnnnnnnnnnnnnnnnnnnnnnnnnnttgtgttaaaaaaccccttttgaaaaattttttgggggcccttcttcaaa

SEQ ID NO: 36593 - DNA, 961 bp, Macaca Mulatta
  misc_feature (1)...(961): n = A,T,C or G
gggaacatgcaagatggcggcccatcaccggcagaacacagcagggcggaggaaagtgcaggtttcctatgttattcgagatgaagtagagaagtacaaccgaaatggagtcaatgccctgcagctggatccagcactaaatagacttttcacagccggtcgagactctatcataagaatatggagtgtcaatcagcacaagcaagatccatatatagcatctatggaacaccatacggattgggtaaacgacattgtgctctgttgtaatgggaaaacattgatatctgcttcttctgacacgacagtaaaagtatggaatgcacataagggattttgcatgtcaacattaaggacacataaggattacgtaaaggccttagcatatgccaaggataaagaactagtagcatctgctgggttggacagacaaatattcctttgggatgtgaatactctaacagcactgactgcctcaataacactgtccaagtaagtgttaagaactcttgaatgtcagtacaatagatgtaaactttaagtgcaaagtcatagtcagtcgtaaaaggggtgnnnnnnnnnnnnnnnnnnnnnnnnnnnnnnnnnnnnnnnnnnnnnnnnnnnnnnnnnnnnnnnnnnnnnnnnnnnnnnnnnnnnnnnnnnnnnnnnnnnnnnnnnnnnnnnnnnnnnnnnnnnnnnnnnnnnnnnnnnnnnnnnnnnnnnnnnnnnnnnnnnnnnnnnnnnnnnnnnnnnnnnnnnnnnnnnnnnnnnnnnnnnnnnnnnnnnnnnnnnnnnnnnnnnnnnnnnnnnnnnnnnnnnnnnnnnnnnnnnnnnnnnnnnnnnnnnnnnnnnnnnnnnnnnnnnnnnnnnnnnnnnnnnnnnnnnnnnnnnnnnnnnnnnnnnnnnnnnnnnnnnnnnnnnnnnnnnnnnnnnnnnnnnnnnnnnnnnnnnnnnnnnnnnn

SEQ ID NO: 36594 - DNA, 888 bp, Macaca Mulatta
  misc_feature (1)...(888): n = A,T,C or G
nnnnnnnnnnnnnnnnnnnnnnnnnnnnngccccattgccctccagcctgggcgatagaggagtaaannnnnnnnnnnnnnnnnnnnnnnnnnnnnnnnnnnnnnnngtggtgatacacgcctgtagttccagctacttggagggctgangcanaanaattgcttgaaccccgaagtgcangtagcactgagttgagatcgtggcactgaactctcagcctgggacacaaattaggactctgtctcccaatagacatatataaaaaaaaaagagttcttctagccctacgtcccaaacttccactctggggcaatcccaacctgtggatagatactgggtccatggcgtattatgaaagggagcccccccccatcacaagcatggttgtgttgagccagcagtattgcccagatttctccctccttctcacagtnttaagggcctttaatttcctcctgatacagcggcaaccacgttccacaacaggccccttcacaggggtctggggtcgcgcttcaccctcagaaggatcctctacccaaatcatctttgaaacatgtgttcgctctcacacaaacgcaaagcgattcccattgatctaaaaaactatgcagatgggacagtcgccaccacatccgcccggcgccccccaaaatgactgaattcaaataacaaaccgcgcgcatctccattcggaccacccacaccctacttagaccacgaccctccacccgtgcccnnccccattttcgaaatactaattacccaacaccgtgcatncacaaacattattctccccgcaccccgccagacacaccacancgcgccaccacgacaagcacgctcgctcactgtacccggcacgccacttccaaacaccgagcgcc

SEQ ID NO: 36595 - DNA, 749 bp, Macaca Mulatta
gctgcgtcgtggggctggactcgggcgacctgcgggcgacagggagcgaggaaaggagagaggaatgatgagtggccccgcccaccctgaggccccgccccagcccagtgccagccaggcccatgcatgcaagatcctccctgcctgcccgaggcggtcgccggagcttaagccccgccgccagcggcaccaaagtcccagctccaccccgcccggcaggcagagctccacggcaagccccgccctctctaagctccgcctcttgcttcaagtggtagccactctggggaaggggcgcgccactgcctggtctggtacttctcctgtagcccgggctagggggctttggggtcgtgggagccggctgtggtacctgcgtccggccgggacgctctgcacctgcagctaggagtcatctacaaaccccgtgggcgtgctgacggtggtcgtgttaatgtcatcgatgatgctgggcgcctccctcagcacgtggtgcatgcgcagcatctctttgcaccgctgtgcctgctctgaggactcctccatcagctgttctggttcccacgggagtacaggttggccagcagctccgagaagatgaactcgttggtctgagagtgggcaaagagggaaggaggttggaacctgacgcctgtgctgccctggccgccccgccgggctctgctgggactgtttactggacttggaaccccgagtacagcttttcagacactgcttctacactgctt

SEQ ID NO: 36596 - DNA, 1234 bp, Macaca Mulatta
gggggggaggcattgaggcagccagcgcaggggtttctgctgaagtggcaggcgcagcttgaggaacccgcagataagttttctctctttgaaagacagagattaatacaactacttaagaaatgtagtcagtagcttactaagattttgcttagcattaggttcttaacgtaatttgaataagattttaagagaaaatatgaagagttaaaagtgtagcgtgaggaaggaaaaaacgtttctaaaacatgacggaggttgagacgaagcttcttcaagaagtaaaaaaatgtatttaaaagaaaattgagagaagggacgccagagccctgaattaataccagtagaagggcagtgcttttagattaaaatgaaggtgatttaaacagagcttaaacgttgtttgaaaagttgtaggtgattaaaataatttgaaggcgatcatttgaaatgagattaaatcgaaggtcattaaaagaccttgaactccatgacgcagggagagttgcgtcatttaaagcctagttaatcttaacgcgtttgctaaacgcagacgaaaaataggaaagattaattgggagtggtaggatgaaacaatctggagaagattagaagtttgaagtggaaaacgaagacagaagtacagggaaggcgaagaaaagaatagagaagatggggaaattagaaagataaaaacatacccttttggaagaccaaaagataaattttaagccctgaaaagtaggaagcagaagaaaaaaattagacaagctaggaaaagcaactaagggcaaaatgtacaaacttagaagaaaaccggaagatagaaacaagatagaaaatgaaaatattgtgaagagtttcagatagaaaacgaaaaacaagctaatacaagtattggagaagtatagaagatagaaaaatacaaagccaaaaattggataaaatagcactgaaaaaatgaggaaattattggtaatttattttaaaagcctatcaatttaaattctggtggtgcagaagttagaaggtaaagcttgagaagatgagggtcgttacgttatgtagaccagaaccaatttagaagaatatttgaagctagaagggggaagtcggttaaaaatcacatcaaaaagctgctaaaaggactgaagtaattttaaaaaacgaagacagaagtacaggaaagcggaagaaaagaatagagaagattagggaattttagaagattaac

SEQ ID NO: 36597 - DNA, 531 bp, Macaca Mulatta
cactgacaaaggcactgcttatgggtcttttcaaaatggacatggaattaagagagaagattcaagaggtttccttatcccagaaggagcaacaggatttccagatcgggaaacttccagctggtgcaaatacctgacagagttctacaaggagtagcgtatcccagtataactgcctggatcagtatgaaatcagaagcctcttgatgtgctaactgtatatagtaaaagtgatttcggaagatactctcttaacttactggaataaagtatctcctcaggagatcatacacatctttatacttttagaagtatgcttgtttcactttagatatatggggaaaagaaacatagcaaggtgcatgatgcctggctgtcaaaacacttcagaatagaccaaaaatcacaaaccatgcctgccctttgaaatagatcagggataatgcagacccggcttcagcatcttagtagcctagaaagttcatttacacttaatcacagttctagaacaactgaacagacattttccac

SEQ ID NO: 36598 - DNA, 2576 bp, Macaca Mulatta
  misc_feature (1)...(2576): n = A,T,C or G
gcacctggccccctcaaagggggtgacctagaggcccccaggccagttttgccagaccccaagctggaaggaggcgccggaagtgtgggggatgttcaggagacctgcccgtgggcccagactgtcctgagatggcccagcagtggctctggggaggacaagctcccctcggagaggaagaagctgaaagtggaggacctgcacagctgggagcaaccagagcctgtgggcgcagagaccccgggtaggcccgtgcaggctgcctctttgtcatcccagaagcaggacgctgatcccggggaagtgccagggggatcgaaggagagtgccaggcaggggggcgagcttctggagtcctctggagcctccttggctgctgattctgttgccctgaagagggtggggccaagggacaaggctcccccactgcatcctgcagtcccagcccctggggagcaccccccactggccaccccacctcaggctcccagagtcctctctgccctggcagacaatgccttttccccgaagtacctcctcaggttacctcaggcagagaccccctcaccactgcgcattccccggggacccaggcacatccaggactctctctgcagcagtgggtggcctgaggaacgggcatcatctgttgggtcagcactggggacccctctttctcccagcccagcctcaggcccctccccaggtgaggcggacagcatcctggaggacctcagctctttcaggccacgggatgggagaaaaggggcacagttgaggggggacnnnnnnnnnnnnnnnnnnnnnnnnnnnnnnagccagggattcgcctatctcagcacccggggctcccagggaggccacctcctccccgcccactccaatgtgtgaggcacacttagttcaggacatggagggtgacagcgaccgtatccatcgcctctgcatgggcagcactttggcaagggccaggccctctggggatgtcccaaatccctgggtacccaactgggagctgggggagcctcctgagaatgccccagaagatccttcttcagggcccctggtgggccccgacccgtgttcccgcctccagcctggctccttcctcactgccctcactcggcctcagggtgtgtccccaggctggccagagctggccctgtcttcccactcagggacgtcccggagccacagcccccacagcccccacaacccctttccctcactgaaggctgagccgcggctcacgtggtgttgcctgagccgcagcgtccctctgcccgcggagcagaaggcaagggcggcgtctgtgtacttggcggcgcactttcccggtagcagcctccgagatgagggtcccagtggccctcctgggagcagtggaggatggacctggacaagcccnnnnnnnnnnnnnnnnnnnnnnnnnnnnnagttctcctacccaacagtcccaggggtgatgtcccagcaccaggcgtctgagccagaagggaagaaaggcctgcctcggagggcaaagatgtctcatgggaacggcaagcagagaaaactgaggaccaaccctaaaaggtnnnnnnnnnnnnnnnnnnnnnnnnnnnnnnnnnnnnnnnnnnnnnnnnnnnnnnnnnnnnnnnnnnnnnnnnnnnnnnnnnnnnnnnnnnnnnnnnnnnnnnnnnnnnnnnnnnnnnnnnnnnnnnnnnnnnnnnnnnnnnnnnnnnnnnnnnnnnnnnnnnnnnnnnnnnnnnnnnnnnnnnnnnnnnnnnnnnnnnnnnnnnnnnnnnnnnnnnnnnnnnnnnnnnnnnnnnnnnnnnnnnnnnnnnnnnnnnnnnnnnnnnnnnnnnnnnnnnnnnnnnnnnnnnnnnnnnnnnnnnnnnnnnnnnaggatatttctccatctgccagtgagcacagtgactgtactgctcacagcactgctgccacatcaggattctctctgcaatctgacacctacctggcagtggttaatgacgctcttctacccgctggcaaaagtcttgaccttgggttgctggagactcagctgccggccttccaggatccagtctcaacagatcccaaaccatgcattttctcagatgctcaagggccttcttcctttgggtccaaaggaacttttccccgccacgacattgctacctctgtgtctgccatttgtatatctctgccagcgagaacagatcacatagcccaggaaattcacagtgctgaaccacaagaccacagccagactgcagggaggactctgataccaagctccccggacagcaaagccacaggagagggcagagcacagaccctcttgccagggagaccttcatctggacaaagaatttcagattcggttccattggggtcaactgaaaaaactcatcttgaaataccagcttcaagaccaagttcagctagttcacaccaaaaggaagagagacataagacattttttccttccagaggccagtatgggtgtggggaaatggccgtcccctgcccctctttaggaagtgatggtaggaaacgtcaggtatctgaattaatcactcggaaggatt

SEQ ID NO: 36599 - DNA, 775 bp, Macaca Mulatta
  misc_feature (1)...(775): n = A,T,C or G
ccagagaaagtgaaatttcactatttatgtagggaagtaaacattttcaataaaaatatttaccnagtgacagaaatttagtgtgtataattatattcccacacagatagtaattgattacagttatttcacaagtcacattctatctttttttctccttccttcannnnnnnnnnnnnnnnnnnnnnnnnnnnnnnnnngtccttccttctttccttccttccgnnnnnnnnnnnnnnnnnnnnnnnnnnnnnnnnnnnnnnnnnnnnnnnnnnnnnnnnnnnnnnnnnnnnnnnnnnnnnnnnnnnnnnnnnnnnnnnnnnnnnnnnnnnnnnnnnnnnnnnnnnnnnnnnnnnatgtttggtaacagaacatttattattgttgtttgtttcattttctccaatatgttaagcagataaaagcaggaatggttttgatgaagtggacaagagtcccaagtgctgaccactaggactgagtcacatgtcgaaaggaatctatgagtcattgtcatggaatttttgtttacggttttaagccactgagaagatttacctcaaagtaaatataaagtgattgaagataagtgttctatgccatattttttctttcctttggggaaaacaacatttaacacaaaagttagaatgctttcatgctacttgagtttgttttaaaaggtagcctttcaccagactaaaatgaagatttgaaagtttccgtattagaaatatgctcacacatgtgaccttgtatatcctggctcctttcc

SEQ ID NO: 36600 - DNA, 623 bp, Macaca Mulatta
  misc_feature (1)...(623): n = A,T,C or G
tgcttgcttccattttctcccctcccaccatatttgtatctctcatcaatgatatgtacacggttaagaatttagtaattattaaccctatctattcttactttaagaatttgtagacctatctaggtagtcagaatacattttgagtttcaattggatgttttacattcatatgggggaaaactcaggggcaaaagtaattattttaaataatagcacaatttgaaacagttgcgaaaggccaagttattttctggcagatttcttaagttactgccccctaaacttaactgcctatttattggtctattttcataacagtgtctcttatttcctagtcacctcaaattcaaaggaatttgtaaggtacttatcttgacaaggtacttatcttgaagccatgttagtttgagcattaaataaaggtctttcaaatattttttaatctcatgaacctatgcccaaagaccagagtaaggatgtatatgtagcaatgtacttttaaatattacctgaagattttccccagatacctcccttaacctcatgtcctttcttccatttttttcagctcttagtctcatnnnnnnnnnnnnnnnnnnnnatttacttgacttctggat

SEQ ID NO: 36601 - DNA, 752 bp, Macaca Mulatta
  misc_feature (1)...(752): n = A,T,C or G
ggaaatgaatcagggacataattattttgttataaataatcgggatcttttaaagtttaattatggggagttgttgaatagactagttttatgccatgcaaataaaatgtgaatttcagaaatcttagttagtgaaattcaaatttatttttacttagcgataataaaatcacaaatatttcttgagctcttgctgtaggccaagtgctgtgctcagtacttaacatggataaactcgatggagtatcaaaattcaaagaggtaggcactccaggttacccttgactctactgatgacagaaacctcacttgtaataaataattatctttgacaagagaaacataaaacaagacctgtaataaatgatttgttcacagattattcatgtcgtagaaactatatagcattgatttttagctatgattttgattcagttttaaaagtatttaatttttattatatcagcccacactgaacattggtttttcagcagataatgcatcttccaagtgctccaaggcgaagagccacagagaagaatactgcatcttgngtcataccctgaaattactgaatgaattacctgtggccatgtaaactctctgcttcaataggtagagtgcaacagacaatccaatttattcaaaactaagttttttagttagctttttgttaattcactgaagtaatttttgccaattaccagttgttcctctaaggtatcccatgggggggaattggggttttccac

SEQ ID NO: 36602 - DNA, 770 bp, Macaca Mulatta
  misc_feature (1)...(770): n = A,T,C or G
gggacaactttattttttccttgggtacttacatttttattacaaaaacggcccttataaaaaaaagggctgggcagtgacttacttcctagaaactgagattccaaagcaggtgtttcctctccgctagactcagaggtacatttaatccatcttctccatttcctccttcaggaccagctatgagattcagtgcatttctgtcccagcggatgttcattctccgctaaacttcatcttttactaagcaaagggggattattccatgaggcagccaggagcaaggggccatgatattcatgactttgtctgctgagcatttttcaaagtgtccttgaattcactcagcaaacaaagctttctggagaatctctcaaaacaggccctgctccatttggccaaaaacgatggctgctccaaaactctgaacttcttgaaactccatctgctacattatttctggagtttaaacacgactttttctgtctttgagtatagatgtgtttgtttaattaacgaagcacaaatctgttaagcagaaggctccaagctgtattctatacttgggaacccttggtgccatctttattttaccaagtgccaatcaccatggctaaagtgggtgtatattacagcctgtgtcctaagcttagacgctttaatgtactttttttaaatgaaaaatattagagggggttgaacattgtaactaaagcataaagctagaacaattacatngcagagatgtttattttaaatattgtgtgagc

SEQ ID NO: 36603 - DNA, 785 bp, Macaca Mulatta
  misc_feature (1)...(785): n = A,T,C or G
ataaacatttctccacaggcagaggggaaaccattttatttccttttctggagggcccaaggttaagttctgtgtgactcagcagattgacattttatatgaccctaaatcccttctatttcctgatctacttgtcttgacctgtttcatttccacaccaaaatagtttcattaacacagcgatcatgcacaggagatagtggctaactgatgtaattaactgacatgtcaaaggctactggtttattgcatatgcaactgtctgtcctggtgggaagatacactttctgctgacataatagatatgcagacatgccaaattgcccaataatctgccctgtgatggtgaggtgtttgtggccattctacttacaggaacagaatggtgggatctgttactatgttctcctaaaatgcagctggccaaaggtgctaattggtaaacagttaaaatagaaagaagagaaggcaattcagttttgggccttagtnnnnnnnnnnnnnnnnnnnnnnnnnnnnnnnnnnnnnnnnnnnnnnngcttttggcatgctaatgcatgcatttagtctctgcaagaaatttccatttaagaaagaatttaaaaacatgaagtgctcaatccatatctcctaaacaactaaaaagactgcaatttcaaatgagaaattatgttgcaaaaaagaaaaaagttgtttattatggctcaaaattttaatcacccaagggctgtaaagttaaaaatagacaattctgccttctgtttatggtaaacttggctgagtcc

SEQ ID NO: 36604 - DNA, 1668 bp, Macaca Mulatta
  misc_feature (1)...(1668): n = A,T,C or G
tcaagtgcaaaaactgcggggcctttggccacacggccagaagtaccaagtgccccatgaagtgctggaacggagccctggttccccagacctttgggagaaaggaagggaaggaaaacctgaaaccatggaagccccaggttcgagggaaccctgggcccttgaacaaggaaaagggagagaaggaagagagaccaagnnnnnnnnnnnnnnnnnnnnnnnnnnnnnnnnnnnnnnnnnnnnnnnnnnnnnnnnnnnnnnnnnnnnnnnnnnnnnnnnnnnnnnnnnnnnnnnnnnnnnnnnnnnnaaggaacgacagactcgggctgtggccgacatccctcagccgggagtcaggcagcagggcccagagcctctcgtcgtggtgaagccgacacacagcaggcctcagggtggccgccgagaagttccccaggctgcctccaagccccacggcctgatccgggtcatcagcccccaggcacaagacaaacgtcctgcggtgacctcacagccctgcccaccagccgacacacacagcctgggcctcggctccaatctcagtttcaggccaggagccaagagacctgcccaggctccgactcaggcttgcctgaacttccccaagaaaccgagaacgggtcccttccagatgcccgaaaatgccatccagggaggtgagctgggggccccggagactctccaacctccgccagctgcaaccgaactcagaccaagtccgtcgccccagatgagcagggggacacccgcccaggtgcccagcagcgaccggcagcctccgcacagcagaccttacctgcctactgcccaggcctgcaccatgtcccatcacccagcggccagccacgatggggcccagcctctcagaatgctcttccggagactggaaaacggatggtggagctccagcctcctgacagctccctcgtttccctctcctgagaagccgggagccttcctcgctcacagccctcacgtctcagagaagtctgaggctccctgtgttcccgtcccactgagtgtcctctatgaggaccttcaggtttcctcctcctcagaggacagcgataatgccctggagagagactgcaagcggcaggggccccgtggttaccagctcccgtagcttggaggggactgcagaactgaggaacacagagcagagagcagactgtgtgtggtgactcccaagctccccagctgtggtgcttctgtggatgttggagcccaggccaggcagggaccacatgcagagactctgcctcattgaattctggtgagggacattgtagttcgcagggctttccagaaacccgccaagagaagcttctgtgacagtgattcgttgcctcagaaactgggtgacggtgacgcgcaggagtcagacttccgctgtgatatcagcaggaaactggggaattactgtgtgtttgctctctagatgactgaatcagggaacagttagggagccctgagagatgcaggccttcagctgtgtcccgccctgacagcagtgnnnngacgctgtgaagcgttctttgcaaagcgttcttggggtgtttgctcagactcgaaaattgggctctggaatgccattggaaataggtgtgtttaattggttttgaagtgaataaaattctcaaaaag

SEQ ID NO: 36605 - DNA, 700 bp, Macaca Mulatta
gggttattccctgactgtattactacttggtatatgatgttccctctactataatgtttgccctctttcaagtccactcctacttgtcattcaaatatttgctcagaagtcacttttttgaggccccaaactccatatcaccctccaaatgggctcaggcctctcttgtgtactgttatgtataatcctgtgggcatactcctaactagttgcctgtctacttaactgatcccttcattcagccaaactgctgaagccagagactgggactcattcttggtaactctaccataaggcctgatacaaaatcggtgctcaatatatgttcattaaataaggaggagtaagctacatccatgccatattcaactctctggctgagctttacaaacaataaacatggtaccacatgcagagacagggttaagctacactactgagtataccaagcaaaataaatggtctcctgcctcttctggaacttaaatgctaataatgattatcaggaatgtgagcatatttctaattcatttcccagacattttatattacaattttttggaatatttctaaccaacccatagacagaaaacacctataaattttccaagactagccaaaagctgaaagattgcgttttttgtaaagtggttgacagaattacccaaagcaaagctcaagcactatttccaagtggatc

SEQ ID NO: 36606 - DNA, 405 bp, Macaca Mulatta
gtgagtgaccccggcccggggcgcaggtcacgacccctacacatcccccacggacggcccgcgtcgccccgagtctccgggtcccagatacaccccgaagccgcgggaccccgagacccttgacccgggagagtcccaggcctctttgcccggtttcattttcagttgaggccaaaatccccgccggttggtcggggcggggcggggctccggggactgtactgagtctccctgatggcctgtggatctcccgggctggcctcccacaaggaggggagacaactgggaccaacagtagaatatcgccctccctctgttcctgagggagaggaatcctcatgggttttcagatcctgtaccagatagtgactctgagggtccgccctgctctctgacacaattaag

SEQ ID NO: 36607 - DNA, 797 bp, Macaca Mulatta
  misc_feature (1)...(797): n = A,T,C or G
ggggggnnnnnnnnnnnnnnnnnnnnnnnnnnnnnnnnnnnnnnnngaagacagcaataaccacagtacatattactgtagttctctgtagttttacatacattcataccataactctgttctctcctcttttttggtttcaactttaaaaacaaaaataaatgatgataatctttactggtgaaaaggatggaaaaataaatcaacaaatacaaccagtttgtnnnnnnnnnnnnnnnnnnnnnnnnnnnnnnnnnnnnnnnaaaaaaaccatctgaatgcggaagagcttaagctcggctcctgtttagcattttgtacttaaggaaataaaacaccaacaaaggatctcacatttttcttaaaaagtgaagattgctgtatactatttattcaacgtataatttatgttactccttgatctttgtcttttgtcatgacaaagcatttatttaataaagttatgcattcccaaaaaacactattatccaacacactcaagacagaataacttttcctcctagaaaccacatccctcaaatataaccaacatagctccccattatacgacaaaactcaaaaaaactacataaaattgaaaattttgggggccgccccttgccccctctaaaaaatctttttcnnnnnnnnnnnnnnnnnnnnnnncggtggggggcgcccanggtgggttaaggtggaatcaccgggggccaaaataaattgttttcttccacaaaaagaaaaataccttgggatctatattaaacacaaattgcacgccgcgggaaggctttcca

SEQ ID NO: 36608 - DNA, 2033 bp, Macaca Mulatta
  misc_feature (1)...(2033): n = A,T,C or G
agattgaagctatccctaaagatgattctacattatctgagagaaggcgagagcttcacaaggaagttgaagtagctaagaggaatttggcccaacangaaaattatatctgaaatggagtctaagttagtagaacaacnnnnnnnnnnnnnnnnnnnnnnnnnnnnnnnnnnnnnnnnnnnnnnnnnnnnnnnnnnnnnnnnnnnnnnnnnnnnnnnnnnnnnnnnnnnnnnnnnnnnnnnnnnnnnnnnnnnnnnnnnnnnnnntcagcaaaaatataccaacattgttaaagaaatcaaagcaaaggatcttgaaatcaggatacacaagaagaaaaaatgtgaaatttatcggannnnnnagagtttgctaaactgtatgacaccattcgaaatgaaagaaacaaatttgttaacttactccacaaagctcatcagaaagtaaatgaaataaaagaaaggcataaaatgtcattaaatgaacttgaaattctgagaaatagtgctgttagtcaagaaannnnnnnnnnnnnnnnnnnnnnnnnnnnnnnnnnnnnnnnnnnnnnnnnnnnnnnnnnnnnnnnnnnnnnnnnnnnnnnnnnnnnnnnnnnnnnnnnnnnnnnnnnnnnnnnnnnnnnnnnnnnnnnnnnnnnnnnnnnnnnnnnnnnnnnnnnnnnnnnnnnnnnnnnnnnnnnnnnnnnnnnnnnnnnnnnnnnnnnnnnnnnnnnnnnnnnnnnnnnnnnnnnnnnnnnnnnnnnnnnnnnnnnnnnnnnnnnnnnnnnnnnnnnnnnnnnnnnnnnnnnnnnnnnnnnnnnnnnnnnnnnnnnnnnnnnnnnnnnnnnnnnnnnnnnnnnnnnnnnnnnnnnnnnnnnnnnnnnnnnnnnnnnnnnnnnnnnnnnnnnnnnnnnnnnnnnnnnnnnnnnnnnnnnnnnnnnnnnnnnnnnnnnnnnnnnnnnnnnnnnnnnnnnnnnnnnnnnnnnnnnnnnnnnnnnnnnnnnnnnnnnnnnnnnnnnnnnnnnnnnnnnnnnnnnnnnnnnnnnnnnnnnnnnnnnnnnnnnnnnnnnnnnnnnnnnnnnnnnnnnnnnnnnnnnnnnnnnnnnngctggaactacaactggccaagaaggaggagaagctgctggagaaggatttcatctatgaacaggtctcccggctcacagacaggctctgcagcaaaactcaggactgcaagcaggacacgctgctcttagccaagaagnnnnnnnnnnnnnnnnnnnnnnnnnnnnnnnnnnnnnnnnnnnnnnnnnnnnnnnngctgagctgttcacgaaacaagccctaaccattgaactccaaaaggaagtcagggagaaagaagacttcattttcacttgcaattccaggatagaaaaaggtctgccactcaataaggaaattgagaaagaatggttgaaggtccttcgagatgaagaaatgcatgccttggccctcgctgaaaagtctcaggnnnnnnnnnnnnnnnnnnnnnnnnnnnnnnnnnnnnnnnnnnnnnnnnnnnnnnnnnnnnnnnnnnnnnnnnnnnnnnnnnnnnnnnnnnnnnnnnnnnnnnnnnnnnnnnnnnnnnnnnnnnnnnnnnnnnnnnnnnnnnnnnnnnnnnnnnnnnnnnnnnnnnnnnnnnnnnnnnnnnnnnnnnnnnnnnnnnnnnnnnnnnnnnnnnnnnnnnnnnnnnnnnnnnnnnnnnnnnnnnnnnnnnnnnnnnnnnnnnnnnnnnnnnnnnnnnnnnnnnnnnnnnnnnnnnnnnnnnnnnnnnnnnnnnnnnnnnnnnnnnnnnnnnnnnnnnnnnnnnnnnnnnnnnnnnnnnnnnnnnnnnnnnnnnnnnnnnnttcatgacattgaataggacacagaactgtcctacatttatatgtcaaagtatatatttgaattgcttatattttctttttcactctttatgttgagtacattccagaaatttgtagttggcaaggtgctataaaaatgcactaaaaataaatctcttttcaatga

SEQ ID NO: 36609 - DNA, 960 bp, Macaca Mulatta
  misc_feature (1)...(960): n = A,T,C or G
ggcagaaccatacacttttcctcctacttctactaagcagctatccatcccttcaaagttgactgtgggcactcagactgattatcgggatgctgacgttcaaacagatccatactctccagaataaggagtatgtcaggactctatccccgagctcttgaccctggatacgcttacctggggnnnnnnnnnnnnnnnnnnnnnnnnnnnnnnnnnnnnnnnnnnnnnnnnnnnnnnnnnnnnnnnnnnnnnnnnnnnnnnnnnnnnnnnnnnnnnnnnnnnnnnnnnnnnnnnnnnnnnnnnnnnnnnnnnnnnnnnnnnnnnnnnnnnnnnnnnnnnnnnnnnnnnnnnnnnnnnnnnnnnnnnnnnnnnnnnnnnnnnnnnnnnnnnnnnnnnnnnnnnnnnnnnnnnnnnnnnnnnnnnnnnnnnnnnnnnnnnnnnnnnnnnnnnnnnnnnnnnnnnnnnnnnnnnnnnnnnnnnnnnnnnnnnnnnnnnnnnnnnnnnnnnnnnnnnnnnnnnnnnnnnnnnnnnnnnnnnnnnnnnnnnnnnnnnnnnnnnnnnnnnnnnnnnnnnnnnnnnnnnnnnnnnnnnnnnnnnnnnnnnnnnnnnnnnnnnnnnnnnnnnnnnnnnnnnnnnnnnnnnnnnnnnnnnnnnnnnnnnnnnnnnnnnnnnnnnnnnnnnnnnnnnnnnnnnnnnnnnnnnnnnnnnnnnnnnnnnnnnnnnnnnnnnnnnnnnnnnnnnnnnnnnnnnnnnnnnnnnnnnnnnnnnnnnnnnnnnnnnnnnnnnnnnnnnnnnnnnnnnnnnnnnnnnnnnnnnnnnnnnnnnnnnnnnnnnnnnnnnnnnnnnctgttggataagaagaacaaagttcttgaagccaggaaaccccctcgcttccttcagagaaacccaatacctcaacctcggcttccaactccaaccttggaaatgacttccaat

SEQ ID NO: 36610 - DNA, 360 bp, Macaca Mulatta
ctcagttcctgtgcctcagcccgtaggccactgtgataatggtctagcacttctgtatttattgtaagaatgattataatgaagatacacactataaatacaagaaattataaatgtttttcacatcagactgttctgttttcttggaggtgaggttaaagcattactatttgcaaagcactctgtagctccccgttatggggataggtaactaatcagaataataatgtcactcgcatccacgtcttagaacctggtttcaaaggcaagtacgccggtggactcaatcactttcctgaggatggaggcctatggcatgtgtggctgcaggtcacgacactgcttaatggtgctgggaag

SEQ ID NO: 36611 - DNA, 751 bp, Macaca Mulatta
  misc_feature (1)...(751): n = A,T,C or G
ggcattcactacagcagctctgggtcctggtctctggactcatgactggaccaagccctccaggtatcattttgtctcccatctctcattccctgatgaagacaagtctctgtgaggttggtcagtttgttatagttgtgtattagtcatggtttttttttcctgcattttatgatgctttgacaacttgggacctgcccctcccagggttaattaatttctgagatagcaaacaacttgcctgtgagcatgcctttcgtatgcaaactcaccagtccagaactcttacttcaaaccatctctagctggtttttacacttcagaaggcaatattcctctgctctaatcactccagggccatgcagtggacaactgaggaccaccccaataacccagagcccatagaaattattcaaaccatccaatcctacccctgcttgactccttcccctttctctcccgtcctttcccatgacaacacaatcaaagcttctacctgtgctttcccttttctcctttccgcctccaatctggatccaaatttccgaaatccatgtgtcccttgggggggaaatgcaaaccctcctccctcctgaaaaannnnnnnnnnnnnnnnnnccttttttcggggggaactggtccccccccaagggtggtgggcccccccccaaagcnnnnnnnnnnnnnnnnnnnnnnnnnagggggccannnnnnnnnnnnnnnnnnnnnngnnnnnnnnnnnnnnnnnnna

SEQ ID NO: 36612 - DNA, 284 bp, Macaca Mulatta
  misc_feature (1)...(284): n = A,T,C or G
caggtccacaatctgcaggagctccggcgaagcgcctcactggccaccaaggtctttatccagagagactacagcgatgggaccatctgtcagttccagaccaaattccccccagagctggacagccgatcgagcggcagctctttgaagagactgtgaagaccctcaatggcttttatgcagaggctgagaagattgggggcagctcctatcttgagggctgcctggcctgcgccacggcctacttcatcttcctctgcatggagacccactacgagaaggtn

SEQ ID NO: 36613 - DNA, 757 bp, Macaca Mulatta
  misc_feature (1)...(757): n = A,T,C or G
gggggaagcaagggaggggttttagtaccattctcttaggcatggtatttattgttattacgactgcaggtgcagttgaagctgttggatgtcttagcagttgctcctggccttcaaagttctgagaaataggatacaggagacttctcacacttaaataaatttaagcctgtctttaatcctactccaagatgatgattttaaataggaaactaaatgatagcacgaagattctatagttttcaaaatagtcaattcagaaagcactgctagatacatttcttgaattcaccaaaatgagtagtctctcagtcccctctttccagatacaagatgtcctgtagctgttttgcccaaataccaaaaaagatgccacaaaattcttgctttgaggcctacactccttatatcaagaatcatggccagcttcattgataaaatgtcacctgtacagtcacacagggccatgtgtttgcttaatctctgctgctgccaccttgaaattcttaaacttttgagccaaagggtcccacacttttattttgtaaagggtcccacacactgtgtagtcagtcctgtcaggaacctctgatttgctatcacattaactctctctctcttctgtctcttatggtagagatttgtaggtaaacacgtagatgaggagttgtttgcctcttangtatgtctcatggcaaggtcttatgtccagcacccagataaacacagcatcatattccagtcacctacctagggc

SEQ ID NO: 36614 - DNA, 747 bp, Macaca Mulatta
gggccctggccttcagcggcaattacccggagctgggagcggtgtccttagacggctacttccacctgtggaaagccaggagcacactatccaggctcctgtccatcaggctgccctactgccgagagaatgtgtgcctgacctactgcgatgagttgtccctctacgctgtgggctcccagtcccacgtctccttcctggatccgcgccagcgccagcagaacatccggcccctgtgctctcgagaaggtggcacaggcgtgcggtctctgagcttctaccagcacatcatcactgtgggcaccggccatggctccctgctcttctatgacatccgggcccagaagttcctggaggagagagcctctgccagtctggactctacgccggggcccgcagggaggaagctcaagcttgcctgtggcagaggctggctcaaccaggatgacgtctgggtgaactactttggtggcatggaagagttccccaatgcgctctacacccactgctacaactggcccgagatgaagctctttgtggctggggggcctctcccttcaggactccatgggaactacgcaggcctctggagttaaggatgaacgccttgttctcaaagtgcacaggtttacctttcagttccgcctaactttccttcttcaggctgcatttgtgcttttaactttgtgtggcttttgtcttccaggtggaaccagtccaacttacgtgtgcttcgtgtattaggca

SEQ ID NO: 36615 - DNA, 507 bp, Macaca Mulatta
  misc_feature (1)...(507): n = A,T,C or G
gggaagatgaaaagttggggagattcatgtttgaaaaatgaaaaatgaacaaaaaatccaccttatgcaatgagatagctgacaatgatatatcaggaatacttttaacctatttttgctgcaatgtgtagctttaatgtctcttttcagttatggacccatgaaagtattactatatcttgtgaataaagatcattcttatggactagtacgtggatgcattcataggctgtgggaagcagtggtgtgcgtatgtgtgtatatatcaatattttatgtttacgactctgcatattaagtttatatagaaaaaataatgtgtttctttagtgtttgggggactaaattgtattatgaccattccagtgtaatctgactgctcactctagagaatatttctgttatacacaatgcacatacaaacatacacccctaaagcgtagctaactgctcccactagataactgctgcnnnnnnnnnnnnnnnnnnnnnnnnnnnnnnnnnnnc

SEQ ID NO: 36616 - DNA, 795 bp, Macaca Mulatta
  misc_feature (1)...(795): n = A,T,C or G
ggattctagaggtcgaggcggccgacnnnnnnnnnnnnnnnnnnnnnnnnnnnnnnnnnnnnnnnnnnnnnnnnnnnnnnnnnnnnnnnnnnnnnnnnnnnnnnnnnnnnnnnnnnnnnnnnnnnnnnnnnnnnnnnnnnnnnnnnncnnnnnnnnnnnnnnnnnnnnnnnntttattttttcaaatttttaaagttcgttttttgtttctaaacctttttttctatttttatttaggaatgtatttttgnnnnnnnnnnnnnnnnnnnncccaattttttttaggaattcccctctccttaaatcacttttttgaattatttgcttttttttatcccnnnnnnnnnnnnnnnnnnnnnnnnnnnnnnnnnnnnaatttttgccccaaattcatgnnnnnnnnnnnnnnnnnnnnnnnnnnnngaatcctttccccatttttccgggggggaaaaaactaatgcgttttactgccttttttgaattcttaatcattttttttatcagggttggggaacaaatttatttaaattttaacacccttccactcttatttctgcatttaactttgttttttaatatnnnnnnnnnnnnnnnnnnnnnnnnnnnnntggttttccttcataatttttttcccaccacnnnnnnnnnnnnnnnnnnnnnncttatacatgggaaaaaccccgnnnnnnnnnnnnnnnnnnnnnngggtaaaaaatccctgtttattggccccaatgttttgttctttttttttgcccctccttttgttgggcatttttggcttacactacc

SEQ ID NO: 36617 - DNA, 653 bp, Macaca Mulatta
ctccctaaagaggaaagtccatactgcagctttgaaagtgagtactaatcatcaccctttagctctttctgtctcttgtaacacctttcatattgtttctattgtttttctgagtgcctttattatatcacttacttttgttttcttgttggaccttgtacctcatttaaaaagcaaaagtgtgtgtaaatattttttttctaaaaaatggaatcaaatttgaaccaccaccatagtcagggttttgtatgtgtgtatgcatgtctacttcctgatggaaaaaacaaaacttaggaagtgcatcattatattaggattactcacatcctcttaaaattttgctggggagagtttgtctccaaagtatacattaacacagtttcttttactatttacacttgccacttgaacaaatagacacgtctcataaaatttggttggttgaagttcatattaaattgttcattaatttaatgtcaggagaaaaggaaaataatgaaactgtatgctgtgtcttaggaaattatcaggtcagtatccctttgggtctatttacttaaaaggactagttatttacgaataaagagagattctatcatgagttaggactgtcacttaaatgacactatgtttaaatttctgcttctatgtgt

SEQ ID NO: 36618 - DNA, 805 bp, Macaca Mulatta
  misc_feature (1)...(805): n = A,T,C or G
ggatgataaagacttagtagaagctttggaaagagatataatttcccagaatcccaatgttcgatgggatgatatcgctgatttagtagaagctaagaagttgcttaaggaagctgtagtgttaccaatgtggatgcctgaattctttaagggcattagaagaccatggaagggagtactgatggtcggcccacctggcacggggaagacgctccttgctaaagcagtagctacagaatgcaaatttcctnnnnnnnnnnnnnnnnnnnnnnnnnnnnnnnnnnnnnnnnnnnnnnnnnnnnnnnnnnnnnnnnnnnnnnnnnnnnnnnnnnnnnnnnnnnnnnnnnnnnnnnnnnnnnnnnnnnnnnnnnnnnnnnnnnnnnnnnnnnnnnnnnnnnnnnnnnnnnnnnnnnnnnnnnnnnnnnnnnnnnnnnnnnnnnnnnnnnnnnnnnnnnnnnnnnnnnnnnnnnnnnnnnnnnnnnnnnnnnnnnnnnnnnnnnnnnnnnnnnnnnnnnnnnnnnnnnnnnnnnnnnnnnnnnnnnnnnnnnnnnnnnnnnnnnnnnnnnnnnnnnnnnnnnnnnnnnnnnnnnnnnnnnnnnnnnnnnnnnnnnnnnnnnnnnnnnnnnnnnnnnnnnnnnnnnnnnnnnnnnnnnnnnnnnnnnnnnnnnnnnnnnnnnnnnnnnnnnnnnnnnnnnnnnnnnnnnnnnnnnnnnnnnnnnnnnnnnnnnnnnnnnnnnnnnnnnnnnnnnnnnnnnnnnnnnnnnnnnnnnnnnnnnnnnnnnnnnnnnnnnnnnnnnnnnnnnnn

SEQ ID NO: 36619 - DNA, 2889 bp, Macaca Mulatta
  misc_feature (1)...(2889): n = A,T,C or G
gggcctcatgcatctgcaggggaagccagtttgttcttttgatccagaagggttaattttcgctgcaggtgtcaactctgaaatggtcaaactttatgaccttcgttcttttgacaaggnaggggccatttgctacctttaagatgcaatatgatcgaacttgtgagtggacaggacttaaattcagcaatgatggcaagctcatcctcatttccaccaacggcagcttcattcgtctcattgatgcattcaaaggagtggtgatgcacacgtttggggnnnnnnnnnnnnnnnnnnnnnnnnnnnnnnnnnnnnnnnnnnnnnnnnnnnnnnnnnnnnnnnnnnnnggttcagaggatggcaagatccatgtctggaatggagagagcggtataaaagtagctgtgttggatggtaaacacacaggcccgattacctgtttgcaattcaaccccaagttcatgacttttgccagcgcatgttccaacatgnnnnnnnnnnnnnnnnnnnnnnnnnnnnnnnnnnnnnnnnnnnnnnnnnnnnnnnnnnnnnnnnnnnnnnnnnnnnnnnnnnnnnnnnnnnnnnnnnnnnnnnnnnnnnnnnnnnnnnnnnnnnnnnnnnnnnnnnnnnnnnnnnnnnnnnnnnnnnnnnnnnnnnnnnnnnnnnnnnnnnnnnnnnnnnnnnnnnnnnnnnnnnnnnnnnnnnnnnnnnnnnnnnnnnnnnnnnnnnnnnnnnnnnnnnnnnnnnnnnnnnnnnnnnnnnnnnnnnnnnnnnnnnnnnnnnnnnnnnnnnnnnnnnnnnnnnnnnnnnnnnnnnnnnnnnnnnnnnnnnnnnnnnnnnnnnnnnnnnnnnnnnnnnnnnnnnnnnnnnnnnnnnnnnnnnnnnnnnnnnnnnnnnnnnnnnnnnnnnnnnnnnnnnnnnnnnnnnnnnnnnnnnnnnnnnnnnnnnnnnnnnnnnnnnnnnnnnnnnnnnnnnnnnnnnnnnnnnnnnnnnnnnnnnnnnnnnnnnnnnnnnnnnnnnnnnnnnnnnnnnnnnnnnnnnnnnnnnnnnnnnnnnnnnnnnnnnnnnnnnnnnnnnnnnnnnnnnnnnnnnnnnnnnnnnnnggaagtcatgcagttagtttctgcagttagtcgtgtgaggctaggtggtcgggcaggcctcaggctgtcggtgttgggtgggaaaagacccaagggcctgaaagggacggaaaggggagggtagcgggagggtagcaggtgagttcctagggctggaaggtttagcagcagcctggtgcagtgccctgtctcaacacaaacccacagtcctcctgggtgcctaccaagcttggtttgtacaaaagcaaggtgggagtctatttttgtacatgagatacatcacactttcctgtgggccagtattgtgaagtgagtctgagttgtttacactgatgccttccctgcccaccacaaattgtgtacatagtcttcagatgataccacccctttccccggctcccaactaagagctggttctaggtctgtgttatatgtcttatttagcctttttatatatgacctttgatttctgttgtttgtattttagcacnnnnnnnnnnnnnnnnnnnnnnnnnnnnnnnnnnnnnnnnnnnnnnnnnnnnnnnnntgcgtatgcatatatctttcctttgtagtttctgagagttcagctgaggcagatggagtcccgttgcccaggagacacattgcatccctgctaatagtgtttgccacaagtattagtgaatcttccttattaatgtttttatttcagaagactgaagcaaagcttatagtgcttgctgtttccatggcagctaagtgagggtcttgggatgactcactgtgttcctcaagctgcactttggggccatctctgcagtattagccccctttttgcttggtggtactcttgtctgtgccnnnnnnnnnnnnnntagtcactcttgcatggcttccatgtctgggttgtggcatttggggataaggtgctggagccagagcattttcagtttgtttgaggcctcgttgccaatgatagatcactcccgttgacctggtatgcctgcttgcttgctgcttttccttgctttctcttggatgaggaagggactctggtcaggcccaggctgagtgagatgagctgcagctggctcatggccttcttagagcggagagagtggtctctcattttactaagttcctaaacaaacatttatacaggcaacactccttgcagatccagaaactgaggcacagtagggttatgacttgctcaagaatacgtagcttctagggaataaatcaaggcatcacaacttctgttcagcgggcaggaataggctgtgaattgctagcacnnnnnnnnnnnagcaattactttttgacttgttcctccaacggaaagtgcaagaggcgtacacctttcccaannnnnnnnnnnnnnnnnnnnnnnnnnnnnnnnnnnnnnnnnnnnnnnnnnnnnnnnnnnnnnnnnnnnnnnnnnnnnnnnnnnnnnnnnnnnnnnnnnnnnnnnnnnnnnnnnnnnnnnnnnnnnnnnnnnnnnnnnnnnnnnnnnnnnnnnnnnnnnnnnnnnnnnnnnnnnnnnnnnnnnnnnnnnnnnnnnnnnnnnnnnnnnnnnnnnnnnnnnnnnnnnnnnnnnnnnnnnnnnnnnnnnnnnnnnnnnnnnnnnnnnnnnnnnnnnnnnnnnnnnnnnnnnnnnnnnnnnnnnnnnnnnnnnnnnnnnnnnggcgtggtggctcgcgcctgtaatcccagcactttgggaggctgaggtgggtggatcaccagaggtgaggagtttgagagcagcctgaccaacatggtgaaaccccgtctctactaa

SEQ ID NO: 36620 - DNA, 1029 bp, Macaca Mulatta
ggcatgtatttgttctctgtgttactaaaaatttgggtggagatggggatatttatgtgaacatcttctcagcccaaaagcttcttaagctgataagcaacttcagcaaagtctcgagatacaaaatcaatgtgcaaaaattgctagcattcttatacaccaacaacagtcaagctgagaaccaaatcacaagcaaactcccattcaaaattgccacaaaaagaataaaatacctaggaatctagctaacaagggaggcgaaagatcactacaagaaaaactacaaactattgctctgaaatcacatatgtttttgtagtgtgtatgcaaactgtagaataggaagcaggtagaggatttctaggtaaatgcatagcgtgacctaatgctttttttgtcaggactttttcgttgtcattattaggtttgaattgttagctaaaggtctaataaattgcagtttgtttaataagaaaaattgtaatgagcccctactcatagaagccagggctctatttttgatttatttggaaagtgaaatttatttcggccaatcttttttaaaaataactttgtattatgggaaatttcaaacatttacaaacgtacccatcatccagtttcaacagtttatcaactctttgctcatcttgttttgtctttattttaaaacaaatctcagacataatttaataaatatttcagtgcttgtcctaaaatgtaagaattgttttaaaagtcatagtcataaccccaattttatcatcacacataaattattggtaatactagtaatggtaatattttgatatatacattatatgtgataatttaaacttttttttattctttaactgttggtgttccttttggaaaattactgtgtgtatgtttaaaataattgtaggaggatcttctcagcccaaaagcttcttaagctgataagcaacttcagcaaagtctcgagatacaaaatcaatgtgcaaaaattgctagcattcttacaatatacacacatctatcaatctc

SEQ ID NO: 36621 - DNA, 221 bp, Macaca Mulatta
tctttggagagctataactcgacatgcctatatatgtagcagtaatttagaataggcatctatttagcttatgtaaaaatttctcacatttataaacgttaacagaaaccatacttttgcttttttataagataaaaccaccaccttaatgctgctcagatatggaaaccttaggtagtattacaggaaaatgtaagcatatgatagcaactaacttcttg

SEQ ID NO: 36622 - DNA, 810 bp, Macaca Mulatta
  misc_feature (1)...(810): n = A,T,C or G
ggatttttattgtgtttggttttttcccgcatagtaaaatttctcctcctttaactcctcctaccccccaaggnnnnnnnnnnnnnnnnnnnnnnnnnnntagaagacgaaagaaagacatatgaaaggaattgtaattggcttaacagaaacagtctgtgaagactaacagtggtgcaatcatgttgtctgtgttgtgttatgtgagaattttctcctaagtcaggcaggtaatgacaatatactgtaaataccacatgtgagtttacctgaatctgtgcattttgtgccttattcatgagaatgatagaagtactaaaatatgtcaagtgttttcagtatagcacattatttactgagtgccagttgtaaatgttttttcaccagcacctgaaaaagactcttttcaaaaaatcacagaaacaatctagaacaattaattggtaacataatccaacctcagagcagcattacattctttgccatgaaaaacattccactcctgcttttcctaaagatgaaacagtgataatggtgaaatcaaatggaggtttcctggggtaatgtgaaacctggcagaaacttatagagcgtcattttatacctaattttggcaaaaacccctttacagttgatgaagccccaacccctgcctgactagtttcaatttaaaaatgctcgcaaacacacaagtttgttttagtggaaccaaaatctagaaaagttcccaaagccaaaaagaaagcccccctgcttggaaatcacgggaaaaggaaatttcaacatggaatttcctttttgaaaaaaaaa

SEQ ID NO: 36623 - DNA, 809 bp, Macaca Mulatta
  misc_feature (1)...(809): n = A,T,C or G
ggaaactatttacaatttgcagccacacttggtagtgattaccgtactacacagtgcagaaaaggaacgttttcaccttatgtcaagtgctcatttactgagcacaagaccagtatataatgtactgttccctacttgctttttttctcttgcacagtgtatgaccataccctcctttcccctccagccatgtttcgcctttaaatattgaagacctcaaaatcatctttggagaaaggcataggccacagactgtttctgtgcttctgggttcttttcttctaggcatgtcctaaaccttggcaaaataaatttctaacttgattgagacctgtctctgatacttttggtttacagaattcccctgtgtcctggaatgttcccttgagttatcccacctttccagacttaaccaatgtacactttacatttattgattgatgtctgcttgtaacttcagccccccctaaaatgtgtaaagtcagtctgtcacacagccaccttgggcacatgttctcaggaccgcctaaagctatgtcatcagcatgtccttaaggctggcaaaataaactctaaattgaggggaataaaaaagaacatttggccgggcgcgggtgannnnnnnnnnnnnnnnnnnnnnnnnnnngaggccaagctggggcaaatcgcaaagtccaggagatcgaagacatcctgggctaacattggtggaaactcccatcctctccttaaaaataccaaaaaaaaaatttcccccgggccattggttggccagggcccccgtgtaaattcccaaactgtgcttcggg

SEQ ID NO: 36624 - DNA, 803 bp, Macaca Mulatta
ggtgatactagcatacttatactggcacagcaagaagggtaaaatacgagtgtactgtatcatatcttgctgaccttgttgagaaagactgattctgcaaataacaaataaaacgatgtaaaattgcaatttttctcaagtcaagacatcatccatcaagggaaaagtttaaacaccattaaatctaaaaaataagaaaagaatctcttttagggtatttgagacaccaagttgtcaaagttctgcatggtatagcctcaagactagagcattactaagtacttactcaaaagcatttactaagttgaaaccaaaagatgtccagttacttatctacccaaagtgtttccagtcagctgctccactgattttagtcctccccttccaattgttttaatataagtatttaaagtttgctaattttgttaatttggatacatttaaaaattttaaatctgtttttcctgaggccctatgtaatattcctaaagactttaagattctatagttctttaacaaaatttcccagagaaattcatctccttctggtaactgtgcaagccaataagctacacttccttcttcaccttctctgaaatcctcccagtcaagcccttgttggactctatagacatttcaccaacctgttcatcattttcaagggagtgtcatggggcccttattgaaagaatgtggggaccaagattgttctccagaacttgcactgtcgggggctagtaaatcctagcccttttgagaggcccaaacaggaaaaattccctaacagccccaggaatcctgaa

SEQ ID NO: 36625 - DNA, 763 bp, Macaca Mulatta
gtacaggccagttccagcacaggcgctttcaaccaagcaactgcaatatgtgtcctcaaaaggctgtccccaaagcgcctgggcgggggctgatgtctcagccactgtagggttcatcagaggaggagtcccaggttcgaggcctggccagtgccagagtctgtgagaagtgggtccgtagggctccctaactgaggtctctggtgtcttttaggctgggatggcagggtgagggctctggggctgctagtcagttgtccctccacctgtccagggatgatgttcatcactcgccagcaggggcctctcggctctgaggcctccgtccctggctgaggccactggctagtgggactctgcgggagagtcccaggcaggaagagctatcggcaagggtccagtctgcaaagccctggagtgagccttcagcccaggcagccgcaggcggtggccgagagacggtccacggttctccaggtgctattgacgtccatgaaggagactgcttcgtagcgcgtgggtcggcagcagggctggctgatgggccgggagcccgggggcggtcggagggccccagcgcccagtaggctggccaggctgaggtcgtgcggagatcgcgcgcggcggcaggagccgctgcagaagcggaaacgcaccagctcgtcggaacggtggcccaggccgagcgcgcgcactggcaccagctgcgagcgcaggcggcaccctaaaggccccgcggcccgagggcggctgcccgggcccc

SEQ ID NO: 36626 - DNA, 485 bp, Macaca Mulatta
gcaaaacaagttcttaatactgcgccttcccgaggggccctgaggcccagcttgccaagcgcccacaacgcacctccggccaaggtttcaacagatctcacgagcaaccccggcccaatggaacacaccatggaaaccgtgttgtttatgtttcacagatttgctggggataaaggctacttaatgaaggagggcctgaaagtactcatgggaaaggagttccctggatctttggagaaccaaaaagcccctctggctgcggacataacaatgaaggacgcggaccagcgccaagacagcacactgaacttccagaacttgttttcactccctgcggggctcaccgctgtggacaacaactattttgtagtacctatgaagcagaaggggacgaagcaggcagaactaagcaattactcggccccgtaagagttctcccaaagagtcgctataggaacctgcccacagcttcccccgtagaaggc

SEQ ID NO: 36627 - DNA, 840 bp, Macaca Mulatta
gggtattcggctgcctgcctgcctgcttgctctctggctgtgctcctgcttaaagaaatcagtccttcctttccgacttagtcctcgggaagaagtttcagcctacgaggtatcattggaacatttcaagatcatcaaatcaaattccacagggattggtgatctaccagaaggctcagacatctgattgctgacctgtccagacgtcatctggtctccctgaacctgaaatcacaccatggatgattttgaacgtcgcagagaacttagaaggcaaaagagggaggagatgcgactcgaagcagaaagaatcgcctaccagaggaatgatgatgatgaagaggaggcagcccgggaacggcgccgccgagcccgacaggaacggctgcggcagaagcaggaggaagaatccttgggacaggtgaccgaccaggtggaggtgaatgcccagaacagtgtgcctgacgaggaggccaagacaaccaccacaaacactcaagtggaaagggatgatgaggccgcgttcctggagcgcctggctcggcgagaggaaagacgccaaaaacgccttcaagaggctctggagcggcagaaggagttcgacccaacagtaacagatgcaagtctgtcgctccccagcaaaagaatgccaaatgacacagcagaaaacgaaactgccgagaaagaagaaaaacctggaaattcccccagaaaagatcccagatagaaggaaaccgaaaaccgtcccccaagttcctacccaaaaaaattgattgggagggaatccttcaacaaaaaccctaaaagaaagactggggaaaagggaggaaggaggaaaac

SEQ ID NO: 36628 - DNA, 279 bp, Macaca Mulatta
ggcgtgctctggggaacgcaactaccaggagctgctggtcaaccagaaccccatggtacagcctctggcttctcgctgcctcacgcagaagctctacaaatgcatcaaaaaagccgtgaagcagcagattcggcgcggagtgaaagaggttcagaaatctgtcaacgaaggagaaaaagggatcatggttttggcaggagaaacactgcccattgaggtatactgccattttccagtcgtgtgaggaccgaaatctggcctatgtctctatccctctaa

SEQ ID NO: 36629 - DNA, 760 bp, Macaca Mulatta
  misc_feature (1)...(760): n = A,T,C or G
tccagggggtgnnnnnnnnnnnnnngcnnnnnnnnnnnnngtttaaaaggcgccccaaannnnnnnnnnnnnnnnnnnnnnggtataaagagttgggctgggaaacttttcccctttaaaacaaaatttttccccttgcgtaatctttttttctgggggctgtaaaggggggggctcttcaatggggaaaattccaattttttgttttaaacccacccaaccaaattttagtttgtttttcaaccaacccccgtgtgtttaagccccagaaagagggcatgcttttcggggttttgccccattctttggagataccaagctttcaaatttaccaaacaccagcagcaacaatcaggacagcacagtcagcctgagatgtccctgtaatcatgtttttgatgaagtctctgtgtcctggggcatcaatgatagtcacataatacttgctggtctcaaatttccacaaggagatatcaatggtgataccacgttcccgctcagctttcagtttatccaagacccaggcatacttgaaggagccctttcccatctcagcagcctccttctcaaatttttcaatggttcttttgtcgatgccaccgcatttgtagatcagatggccagtagtggtggacttgcccgaatctacgtgtccaatgacgacaatgttgatatgagtcttttcctttcccattttggcttttaggggtagttttcacgacacctgtgttctggcggcaaacccgttgcgaaaaagccc

SEQ ID NO: 36630 - DNA, 800 bp, Macaca Mulatta
  misc_feature (1)...(800): n = A,T,C or G
gggtttagtgtgttcccctttgtgggtgggttcctatgatacttactatagaacacagtggatcctttttgaatgttcgtggaagggccaggagttcctgtgaaaccaggatactgcagctttattaaagttaaagaaactgtaacatatctcttatatattaaaaacatttaaaagttttaaagagaaattgcattaatacagattgaagtattttattcttttttgacttgaaaaattatatttcatattgcaaagatgtttacaagtattttaatttaagttcagtgaacttttttgtagctgggttaaatctttttattttagtatggccttatggcaaagaacactgtattattttaataatcacacaattgtgacggaattacaaaccataaaatgtgtaatgttttgaacagtattctgttgggatggagattttataggttcagacaaatcttctagatctgcttcacccagcatattttctattcagtgatataaagcatattttattctatattattacaaaaacaaatgtataaacatgtcaaanagaactgttgatgctttctaacatttgtataaatagaattcagtgcaagttacaaaaattctgttgcaccactatagttttagtatttctattttaatacatttgtttaccacttgtttatgtatatgtaggtgacgtttacttgagcttaatgtacttttactgagcaaagtttaaaaaaacaaagtataattttattttattgataaaggggcccttttaccntcactgggtcaaataactn

SEQ ID NO: 36631 - DNA, 631 bp, Macaca Mulatta
  misc_feature (1)...(631): n = A,T,C or G
gggnnnnnnnnnnnnnnnnnnntcccgcctcggcctcagaaagtgcannnnnnnnnnnnnnnnnnnnnngtgcacaacagcctgtaatttcttatattgtttacatgttgcaataatgttttggatgtacaggttgagtatcaccggtccaaaaatctaaaatctgaaatgttctaaaacctgaaatttttttagtgccaacatgatgccacaagtggaaaatcccacagctgccctcatgtgatggatcacatatattattaaaaatattgtggctgggtgcagtgatnnnnnnnnnnnnnnnnnncgcttcgggaggccaaggccatgggcnnnnnnnnnnnnnnnnnnnnnnnnggaccagcctgaccaacatggcgaaacctggtctctactagaaatacaaaaattagccgggtgtggtggtggnnnnnnnnnnnnnngannnnnnnnnnnnnnnnnnngggataatcgttnnnnnnnnnnnnnnnnnnnnnnnnnnnnnnnnggatcacaccattgcaccnnnnnnnnnnnnnnnnnnnnnnnnnnnnnnnnnnnnnnnnnnnnnaacaaaaaaccaggaatcaagttcttcggccatgttatatgtgttatagaaacaatgatn

SEQ ID NO: 36632 - DNA, 768 bp, Macaca Mulatta
  misc_feature (1)...(768): n = A,T,C or G
gggccnnnnnnnnnnnnnnnnnnnnnnnnnnnnnnnnnnnnnnnnnnnnnnnnnnnnnnnnnnnnnnnnnnnnnnnnnnnnnnnnnnnnnnnnnnnnnnnnnnnnnnnnnnnnnnnnnnnnnnnnnnnnnnnnnnnnnnnnnnnnnnnnnnnnnnnnnnnnnnnnnnnnnnnnnnnnnnnnnnnnnnnnnnnnnnnnnnnnnnnnnnnnnnnnnnnnnnnnnnnnnnnnnnnnnnnnnnnnnnnnnnnnnnnnnnnnnnnnnnnnnnnnnnnnnnnnnnnnnnnnnnnnnnnnnnnnnnnnnnnnnnnnnnnnnnnnnnnnnnnnnnnnnnnnnnnnnnnnnnnnnnnnnnnnnnnnnnnnnnnnnnnnnnnnnnnnnnnnnnnnnnnnnnnnnnnnnnnnnnnnnnnnnnnnnnnnnnnnnnnnnnnnnnnnnnnnnnnnnnnnnnnnnnnnnnnnnnnnnnnnnnnnnnnnnnnnnnnnnnnnnnnnnnnnnnnnnnnnnnnnnnnnnnnnnnnnnnnnnnnnnnnnnnnnnnnnnnnnnnnnnnnnnnnnnnnnnnnnnnnnnnnnnnnnnnnnnnnnnnnnnnnnnnnnnnnnnnnnnnnnnnnnnnnnnnnnnnnnnnnnnnnnnnnnnnnnnnnnnnnnnnnnnnnnnnnnnnnnnnnnnnnnnnccaatcggatcgaaaacctcaccgatacctaacaggccaggcatagcaagcacaaacaagcccatgctacccttcactggttaacccaaaaccaagc

SEQ ID NO: 36633 - DNA, 925 bp, Macaca Mulatta
gcaaccccaagtcaccacaaaaacctattgttagagtcttcctgcccaacaaacaggacagtggtgtctgcaaggtatggagttacagtcggagacagtctaaagaaagcactgatgatgagaggtctaatcccagagtgctgtgctgtttacataattcaggatggagacaagaagccaattggctaggacactggtatttcctggcttactggagaagaattgaatgtggaagtgttggagaatgttccacttacaacacccaactttatacgaaaaacatttttcaccttagcattttgtgacttttgtcaaaagctgcttttccagggtttctactgtcaaacatgtggttataaatttcaccagcattgtagtacagaggttccccgatatgtgttaattatgaccaacttgatttattgtttttctccaagttctttgaacgccattcaataccacaggaagagtcctccttagcagagactgcccttacatctggatcatccccttccgcaccccgctgagactctactgggccccaaattctcaccaatctgtctcctttaaaatccattccatttctacagcccttccgaccagcagatgaagatcatcgaaatcaatttgggcgaaaccggtcctcatcagctcccaatatgcatataagcacagtagaacctgtcgatattgatgacttgattagagaccaagcatttcgtggtgatggaggatcaaccacaggtttgtctgccacaccccctgcctgggtcactcactaacgtgaaagccttacagaaatctccaggacctcagtgagaaaggaagtcatctgcatcctcagaagacaggaatcaaatgaaaatgcttggtagacaggactggaacgatgattgggagattcctgatgggcaaattacagtgg

SEQ ID NO: 36634 - DNA, 759 bp, Macaca Mulatta
  misc_feature (1)...(759): n = A,T,C or G
gatatacctttggagtccaactcttctgaccatccaaaggcaagcacaatattcctgagaaaatctcaaacagatggtgagacaacattnnnnnnnnnnnnnnnnnnnnnnnnnnnnnnnnnnnnnnnnnnnnnnnnnnnnnnnnnnnnnnnnnnnnnnnnnnnnnnnnnnnnnnnnnnnnnnnnnnnnnnnnnnnnnnnnnnnnnnnnnnnnnnnnnnnnnnnnnnnnnnnnnnnnnnnnnnnnnnnnnnnagagatgcagatagatctttgggcatatttgatgaacggttacacccacttacannnnaagaggttttggaggaatattttaagtatgatcctgaacacaaattgattttcagatttgtttgtactctgtttaaagccataaggctnnnnnnnnnnnnnnnnnnnnnnnnnnngatttacatagaaagacttgtaagttatgctgatattgacatttgtccaactaactggaagaggattgtcttgggagccattcttcttgcctccaaggtttggagtgatatggctgtgtggaatgaggactactgcaagctctttgagaacattacagttgaagaaatgngaatgagttggaaaggcaattcttgaagctaattaattataatattggcgttactggcagcgtttatagcagattctactttgatcttcgcagcttggcacatgacaatggcctgtattcgccagtttatcttcttgacagagaaagagcatggaagctggagg

SEQ ID NO: 36635 - DNA, 796 bp, Macaca Mulatta
  misc_feature (1)...(796): n = A,T,C or G
cgaggcttgcacgttatcccagactggagtgagtgctgcgatctttgctcactgcaagctccgccccctgggttcacgccnnnnnnnnnnnnnnnnnnnnnnnnnnnnnnnnnnnnnnnnngcctgccaccacacccggnnnnnnnnnnnnnnnnnnnnnnnnnnnnnnnnnatttcaccatgttagctaggatggnnnnnnnnnnnnnnnnnnntgatccacccnnnnnnnnnnnnnnnnnnnnnnnnnnnnnnnnnnnnnnnnnntgtgcccgtccaaaaatttattctttttatatcttatttaagaaagtctttttctattcttgggtcttaaagatgctttactttcatctgaagttctgaagctttgctttgtacatttaagtctttatctggaattcacttttgtgtatggcatgaagtagaactcaaattctattttctcttttcaggtaaccagttgtctcagtaccacccttttgtcattgacttataatcacctctgtgatatactaagattattctatgtacatgggtctgtttctgtactctgatctcttctgttggtttagttgtctgtcagacccacattgtcttattatcacgttacacaaataatatctggtaagacatatcatcttattctgacctttttcaaaactattgtgttcttactcgtcactcttcacgctaattacgtcattggctgtccattcctgaaatttcggcccaattcaatggcttccttgctgtttgtacttggagattaccttcattctacctgtttctcttt

SEQ ID NO: 36636 - DNA, 825 bp, Macaca Mulatta
gggggagcttgagacccagggaaccggcctgggcaacctggtgaaatcccgtgtctactgaaaacacacaaattagttgggcgtgatgactgcacacctgtaatcctggctactccagaggctgaagagagtcgcttgagcctgggaggtggaccttgcagtgagtggagatcacgcccttactgtcaagccttgttgacagagtttggaccctggctgataaacagcaacgttcataacgtatgggtgaactgcccggctgctctgtctagagtagaataaatccaattacgtttttgtcttttattagcattgaaattttcttaatcatccctctcttttcattacattgtagcaatatattgctgcttagagtctggaacaagtaggcttctctggatcaggttctgactggattgctaaaacttagaatgatttttcccctctttgggatgtgacttatagaactttgccttttggggtgatgtcgttcattttgatagcggaaccaggaacgcccaaacaattcacttccgggggcttaaaaatggacctacctttgaagtggttcccctccgaaaatgaaaacgggcgccgcctcatttcggggggccataaatgctatttcacccaaacccctttgtcaatttaccccaacttccaaccttccgggagaccgaagccctcggttcgcgacccccgcatgcctagaagttcgcgatggcgtcccgacacccaggttcacgcgtccaaaaccccctcccccagcaaccctatcccccgcccggttcggtcctgccactgcagccccaccccaagattcct

SEQ ID NO: 36637 - DNA, 770 bp, Macaca Mulatta
  misc_feature (1)...(770): n = A,T,C or G
ggtctttccaaagggttagtttctgtctaaccctttaggaaaaaattaagtctaatggtggttagcaggggaggaggtataaagaggcatgtccagcgtcccatctggtcatggccaggaactcagtttacaaggtttgtctaacagggggtccattattttggttggcagcttaggattttatttttatttctcatttcttatacataatatgtttttttcttatggtggctggagactagacatggaaaacaaaaatagtcatatagaaataactcaataaatatttatttgttgagtgatctaaagaatgaaccattggctgggaatnnnnnnnnnnnnnnnngnnnnnnnnnnnnnnnnnnnnnngggtgtgtggatcacctggggtcgnnnnnnnnnnnnnnnnnnnnnnggnnnnnnnnnnnnnnnnnnnnnnnngaaatgcggaatttagccgggtgtggtggctggcgcttgtagtcccagctgtagtcccggctgctccagaggctgaggcaggagagtcgctnnnnnnnnnnnnnnnnnnnnnnnnnnnnnnnnnnnnnacannnnnnnnnnnnnnnnnnnnggacaagagtgagactttgtctcaaagaanaannnnnannnnanaaaaagaatgaaccatgaatcattagatggacaaaacactgaaactgaactgacatactctaagacaaaatatttccaaatcattttgaaaatgccagtttttaccccattcaggcaaaaaattccgattaatc

SEQ ID NO: 36638 - DNA, 127 bp, Macaca Mulatta
  misc_feature (1)...(127): n = A,T,C or G
atgttctttgatgttgttggggatttgattgcggnataaggtgggcttacttaattggtcatttctgaaaggttttagggactaaggctcaactcagcaccccagggctgtgtgctctactctgggg

SEQ ID NO: 36639 - DNA, 780 bp, Macaca Mulatta
  misc_feature (1)...(780): n = A,T,C or G
gggatttattgatttgtgtatgcttcttatgcatcacaaggtgcattttactcttgaagtccctatcacctcaatcaccgccatttaactgcaaaagcatgcttcctaatgggagggttttcttcccccttccctgcaggggttctgaaccttcaaggagtttgacaatcttacgaatctcttgaactccccagaaaaatgtacatataacacaagtctacaaataatttcatggggttcatggactccaaggcccacaatggtttctaaggccccaagttaaggaacctctgtgttagtgatttgagcaacgcagttgccctcaggaaacactgacacagggcaggtgaaggactgggttaaccaaagtgacaggagggaataatctcataatttctttctatttttattttggggcaaaaattagttctcagggcctccctacatttaagagcagaactactcaagaacctaaacagctatcagcatagtttaggcgatttagaatagggctgttcaaggaaatgtacagggttcctcgttcagctgaagacctcatttagctccttaactggaagctttacatttgatctgcagtgaggggacatttctaattttagtttgacccacatggaaaggtggatagctcctannnnnnnnnnnnnnnnnnnnntacagagcacgtagtattggacnattaagggtaaagtccttgggaatccccccaaacagccatttttcttttataaatcccagttatttcccccaccctctgaaatg

SEQ ID NO: 36640 - DNA, 168 bp, Macaca Mulatta
cttggaagcggagttcaccagtgagctctagtgtctctaagaagggtggaagttctaatgtctgttagctacccataagaatgtttgctgcagttctgtgtcctgtgcttggatgctttttataagaattgccattgttggaaattcttaaataaaactgatttaaat

SEQ ID NO: 36641 - DNA, 816 bp, Macaca Mulatta
  misc_feature (1)...(816): n = A,T,C or G
ggtacctctgggaattatagaagtgattttagaaataaatgtcaaataacgattactcctgctctatttccctctaattagccaagtgtttacaactaataggcatagctaaagatttttatatttttgtttaggcttcgcaagaagactcactctgctatttttctcttgcagcaccacctgtttcgccctaaaacacagatttatgacttaattctctgtcatgtaggacacctattacctccatttggatcttgtgcttccagtttctcacttgtttaatgaattctgtatgcttagaaggtacacaaagcctgggctggggtacacatatggggatcacactgcaggctgtaaatgtatacaaaaatcctttgttgtgggtgtgatcactttaacaattagtgaataaaaatctcttgtattcacaataagcaattgcatatttaaaaagtttttatctccatttaaaaatgcagccctcatgtatttagactttaccatataaattttaattaagttcaggttccactctcaaggtccctagaattatggcaaaatgctctcaaagataccagaacttcttaataaattaaccaaccctcccttaatgaaatatgtaatccgcaatttctttatctgcaaattcaagattccaaaaatggtcttnnnnnnnnnnnnnnnnnnnnnntaccacccctttttaaatgcaaaaactggcccttaaaannnnnnnnnnnnnnnnnnnnnccctgcaatggaaactccccttgaaaaccttttttacacggtttttatatttatccgcacccttag

SEQ ID NO: 36642 - DNA, 850 bp, Macaca Mulatta
  misc_feature (1)...(850): n = A,T,C or G
agcattacatgtagtactcgtgtgatgttttgaaaatgccagatcggtggctgtcttcattctactacatagtcaaacataggtttatgtgaagatttgctttgaaagggaatttcagtaattgttgagagcagtcataattccacataagcctgagactctataatttgtccagtgtcttacttatcttcatatatgnnnnnnnnnnnnnnnnnnnnnnnnnnnnnnnnnnnnnnnnnnnnnnggtgatgtttgagtattgactgtcagttaaggacatagctattccaaataaactaaatataatatggagttgcatttctcaaagaatgacaaaagcatccttatttaagaactgatgagttcttaaaattttgtcagagccttcttnnnnnnnnnnnnnnnnnnnnnnnnnnnnnnnnnnnnnnnnnnnnnnnnnnnnnnnnnnnnnnnnnnnnnnnnnnnnnnnnnnnnagttgcaatatactgttttgttcatggaacaaatgtaggccgaattcaaacatgcaattaaagtatgagaagagcttctaagggcatcttaacaggatgctacatgaaaataaggaaataaattaatacatgtaacttttagtttagatttttattttatctcaagtatgtccagtgtgtttggtttgttacatgttccatgaaatatctgagnnnnnnnnnnnnattggtattgtggtaggcttattgggggaacaagaaaaatataaaaagtgatctctgcccacagaggatttaatccaaatggtccacaaaaggaatgtgcttaattcttatagtgagtttatatttatgaaaataaaggctagtaaatatt

SEQ ID NO: 36643 - DNA, 864 bp, Macaca Mulatta
  misc_feature (1)...(864): n = A,T,C or G
ggcaacnnnnnnnnnnnnnnnnnnnnnnnnnnnnnnnnnnnnnnnnnnnnnnnnnnnnnnnnnnnnnnnnnnnnnnnnnnnnnnnnnnnnnnnnnnnnnnnnnnnnnnnnnnnnnnnnnnnnnnnnnnnnnnnnnnnnnnnnnnnnnnnnnnnnnnnnnnnnnnnnnnnnnnnnnnnnnnnnnnnnnnnnnnnnnnnnnnnnnnnnnnnnnnnnnnnnnnnnnnnnnnnnnnnnnnnnnnnnnnnnnnnnnnnnnnnnnnnnnnnnnnnnnnnnnnnnnnnnnnnnnnnnnnnnnnnnnnnnnnnnnnnnnnnnnnnnnnnnnnnnnnnnnnnnnnnnnnnnnnnnnnnnnnnnnnnnnnnnnnnnnnnnnnnnnnnnnnnnnnnntgcaaaattcggctaaactctacacttctggtattacaaactaactctacaaattgcatgtagccctcatttcaacccctatgttcttcgcacactttaataagccgttaatccgcaaaaactctaccatgaaatgaaagcaagatagacatcataagtaaaaacacttgtcgggccggcattagggtcactacagaaaagctgtttttaatacaattttccgtttgtgacgcacgggggccctaaaaagggcaactgagaataaggggaccctaaataagactataacaagaaagaaattctcgtaccagaaaaaaagttggcagtggggatttcttcgagtaataagaaagcaattacatggtacgacaaacttcatacgatttttggtcccacaaattcacaatacatggttacctgcaaaaagataccttgcaatgagaacacatccccacccgagatgtgcaaataagaaaac

SEQ ID NO: 36644 - DNA, 574 bp, Macaca Mulatta
  misc_feature (1)...(574): n = A,T,C or G
ggagctgccggagcccaacctgctcccggggcagctgtcccacggggccgtgggcgtcagggagggccgcgtgcagtggatctccatggctttcgagtcgnnnnnnnnnnnnnnnnnnnnnnnnnnnnnnnnnnnnnnnnnnnnnnnnnnnnnnnnnnnnnnnnnnnnnnnnnnnnnnnnnnnnnnnnnnnnnnnnnnnnnnnnnnnnnnnnnnnnnnnnnnnnnnnnnnnnnnnnnnnnnnnnnnnnnnnnnnnnnnnnnnnnnnnnnnnnnnnnnnnnnnnnnnnnngggtgcagagcgccctgtgcggcctggtgctatccctgctcatctgcgtggctgcggtggccgtgttcaccacccacatcctgctcctgctgcccgtgctcctcagcatcttgggnggcatcgtatgcctggtggtgaccatcatgtactggagtggctgggagatgggcgccgtggaagccatctccctgtccatcctcgttggctcctccgtggactactgcgtccacctggtggagggctacctgctggctggagagaaccttcccccgcaccaggccgagg

SEQ ID NO: 36645 - DNA, 140 bp, Macaca Mulatta
gaactttgcagaaaacaccatgaatgaactccttggctggtatggctatgataaggttgaattaaaagatggtgaagatattgaattcaggagctaccctacagatggggagagccggcagcacatttctgttctcaaag

SEQ ID NO: 36646 - DNA, 1421 bp, Macaca Mulatta
  misc_feature (1)...(1421): n = A,T,C or G
acagtctcgtgctgcctccaacccagtcctcttcagattcctcacccccagaggtgtctggcccttcctcatcccaaatgagcatgaaaactcgccgactcagctctgcctcaacaggaaagcccccactctctgtggaggatgattttgagaaagtaatatgggagatttcaggaggcaaattggaagctgagattgacctggatcctgggaaagactgaagatnnnnnnnnnnnnnnnnnnnnnnnnnnnnnnnnnnnnnnnnnnnnnnnnnnnnnnnnnnnnnnnnnnnnnnnnnnnnnnnnnnnnnnnnnnnnnnnnnnnnnnnnnnnnnnnnnnnnnnnnnnnnnnnnnnnnnnnnnnnnnnnnnnnnnnnnnnnnnnnnnnnnnnnnnnnnnnnnnnnnnnnnnnnnnnnnnnnnnnnnnnnnnnnnnnnnnnnnnnnnnnnnnnnnnnnnnnnnnnnnnnnnnnnnnnnnnnnnnnnnnnnnnnnnnnnnnnnnnnnnnnnnnnnnnnnnnnnnnnnnnnnnnnnnnnnnnnnnnnnnnnnnnnnnnnnnnnnnnnnnnnnnnnnnnnnnnnnnnnnnnnnnnnnnnnnnnnnnnnnnnnnnnnnnnnnnnnnnnnnnnnnnnnnnnnnnnnnnnnnnnnnnnnnnnnnnnnnnnnnnatggatgaagacagtctgctaccattaaggaccaaattttgtgctaccactaaacaaaaatacccagtctgtgttaaattgtatgtctttttaaaggtatttagagattcagctgagctttaaagagggctgagcagctcaggaagcctgtaatgtgggcataactctttggacctgattttgatgcttctgctgctccattagcctctgaagagcaatatctaatttattattactgtaattttttaaaaggctttaaagtgcctcagggggtcccctgaaactaattttctatttctgggattccctggattcattatatgaaatggtgacatgattagaggaaattcttttgtagtatgaaaattgtcccttttcttcttcagtacttgcctccttactggcattgaattatcacagggacaaaatctggtaaattttttatttctaactctcccatcaaacccctgttgcccagtatttatttggtggccttcacccaccggagggaaaaaatgagcttattcaagctgccaatgtttatctatgggctgtagcagtacatggaactgtactgtgccagggatattgagatgctctgggggtgtattgtatacctgccagttttcttcatttctgaattgagttttcttttcttgatgttggtttccttcatatcacctcaaggtttagatttgtgaaggaataagcatgatgggaataatagtcttgaaaggagatacgttgtatataatc

SEQ ID NO: 36647 - DNA, 87 bp, Macaca Mulatta
gcacaaagtctgttccttaccttcaatccaatgacattctgtccattgatttcacagatgttatgttctgtgagaagaccatttctg

SEQ ID NO: 36648 - DNA, 723 bp, Macaca Mulatta
  misc_feature (1)...(723): n = A,T,C or G
ggtgagattttcaacataagtcaaagtagcattctggatcagtgttaaggatgtttctagtgatcagactggcctaaataatatataggcctacatgtacttacacatttaatgtcagcagttactgagacagcatttctaactacccctggtaaatccttcccgccctctggaggttcacttagacagattgttgactttgctcagaaggaatttcacctaatttaaagaggaagtatcttcaagcattggatgcatggttttatcttgtggaaatggggttataatgcaaattgttagggtgaggtctatgattttccatttttagaagcgctctgatggttccgatacagatgtcctcccatcatgtttcagaaatgtggaattggactgtataactcattagaagattagaacacagaccacagtcacacagcatggtaatacacattaataagaagctagacactgtggtgtgcacctgtagtcccactgctctaaaggctgaggtgggaggatcctaggggtttgagaccagccttggcaacagagcaagactttgtctcttaaaaaagaaaggaaggcaagaaggcaggaatgcaggaaggaaggaaggcaggaatgcaggaaaggaagggaaggaagaaaagaaaccgaaaggaggtaaaaaaaggaacctaaaggnnnnnnnnnnnnnnnnnnnnnnnnnngaaagggaaggga

SEQ ID NO: 36649 - DNA, 665 bp, Macaca Mulatta
  misc_feature (1)...(665): n = A,T,C or G
cggcacgagggcctatgttgttgctgtttttgtcttctgtttgtttgttggttttattttaagagtctggccactcttgcatagggctggtgtgatttgctggtggtctgatggtctgtggtttgctggtggtcagaccttaattgacctggtttttcccatagctggaagtatcaccagtgaaggctgggctatgaaagagcaaagatggcagcctgccccttcttctggaagctctatcccaggtgggtactgacctgttgctggcctgaacttgcctgtagaaggtggctggagaacccagttgggaggtctcacctagacaggaggaatggaatcaaggaccctcttaaagaagcagtctggctgttttttggtagagcagctgtgttgtttcggaaatcctttcagcccctgataagtttgagctgtccatggcccagaggctggactggctgagaagccccatcagctaaggtggcagcctgctccacccccagcactcctcccgagggaggaattagagctctgtcagctacagaacgctagtgggggtggctggaagacctggcttggaggacccancccacgaagatgaagatgagtagattggggtcctgcttaaagaagcagtctggccgcaccttgacaacgttaccatgttg

SEQ ID NO: 36650 - DNA, 771 bp, Macaca Mulatta
cgtttatgatttggacagtgagaaatttgtaccatctgttttgagtacatgcacattttaaaaatatcatatagtaaatgcaaacatgccaagacattttataaagaattaataacagaactactcttaaactgagcagtttggttgaacttactgttttgagttctaaacattagaagttattaatgcttatatataatctaaccaaagagttacccagtagggttttagtttttgaacttttattttcatgttgattataaatcctgattttaaaatctgttgagcaaaagaagtttcattttggttacttagacctaagatcacttattaaaaatccttattttctccaagcccagcaaatgttgacttctgggcaaacctgaaaacctgaaaataccactttcatgcagtttgtttgaagttaagcgaaatcttttcaaatgacagagctgcagagaactcagcaccaagggctgcctatctgtagatagctgtaaaatggaatatttttaaatgaaggcaagtaagtacttaaaagtgagctgagcaataaaatggtctaataataggtaaatgcaacagaaacagaaggagacctggttgccttatgcctttactcttacatggaataaattcccaatgcatatcctatgtacaccataagtgaagggaaataaacctcgtcatgctccatgctgtgaggtgtcctttgaatattctgtgatgatggagaagctatttagtttagtttcagcatcttctctgatg

SEQ ID NO: 36651 - DNA, 716 bp, Macaca Mulatta
  misc_feature (1)...(716): n = A,T,C or G
cagtgtgtttcctgtaacaaatcgttnnnnnnnnnnnnnnnnnnnnnnnnnnnnnnnnnnnnnnnnnnnnnnnnnnnnnnnnnnnnnnnnnnnnnnnnnnnnnnnnnnnnnnnnnnnnnnnnnnnnnnnnnnnnnnnnnnnnnnnnnnnngcacacacaaaagacatgccatttacatgtgaaacctgtggaaaatcattcaaacgcagtatgtcactcaaggtgcactccttgcagcattctggagagaagcccttcagatgcgannnnnnnnnnnnnnnnnnnnnnnnnnnnnnnnnnnnnnnnnnnnnnnnnnnnnnnnnnnnnnnnnnnnnnnnnnnnnnnnnnnnnnnnnnnnnnnnnnnnnnnnnnnnnnnnnnnnnnnnnnnnnnnnnnnnnnnnnnnnnnnnggagagaaaccctttatctgtgaaatctgtggcaaaagcttcaccagccgccccaacatgaagagacaccgcagaactcacacaggcgagaagccctatccatgtgatgtgtgtggccagcggttccgcttctcgaatatgcttaaggcccacaaggagaagtgctttcgggtgaccagccccgtgaatgtgccacctgctgtccagatcccacttacaacttccccagccaccccagttccttctgtggtgaacacacccacaaccccaacccctccaatcaatatgaatcctgtaagcactctt

SEQ ID NO: 36652 - DNA, 236 bp, Macaca Mulatta
caagttcgccagcatcgctcgcaatcaggtgcgcaagaagcggcagatggcggcccgggagcgcaaagtgacacgaacgatctttgccattctgctagccttcatcctcacctggacgccctacaacgtcatggtcctggtgaataccttctgccagagctgcatccctgacacagtgtggtccattggctactggctctgctacgtcaacagcaccatcaaccctgcctgctatg

SEQ ID NO: 36653 - DNA, 609 bp, Macaca Mulatta
agcttgaagaaatccgcaaatgtgggatgaaaaacttccataacatccaggttgatgaagctaatttattgacttggcaagggcttattgttcctggcaaccctccatatgataagggggccttcagaatcgaaatcaactttccagcagagtacccattcaaaccaccgaagatcacatttaaaacaaagatctatcacccgaacatcgacgaaaaggggcaggtctgtctgccagtaattagcgctgaaaactggaagccagcaaccaaaaccgaccaagtaatccagtccctcatagcactggtgaatgacccccagcccgagcacccgcttcgggctgacctagctgaagaataatctaaggaccgtaaaaaattctgtaagaatgctgaagagtttacaaagaaatatggggaaaagcgacctgtggactaaaatctgccacgattggttccagcaagtgtgagcagaggccccgtgcagtgcattcagacaccccgcaaagcaggactctgtggaaattgacacgtgccaccgcctggcattcgcttgtggcagttactaactttctacagttttcttaatcaaaagtggtctaggtaacctg

SEQ ID NO: 36654 - DNA, 647 bp, Macaca Mulatta
ggaatggtcagtttcccgggaagatgcatttggatcgatgactaaacctggccctttctctgggctgtagtgaagccgcattttcatgctggctggctgtgtgctgagagagcctcgaatgctctgccgcatagtgcccttctgccctgcctgaggatgtgtggaaaagatgagagtggaggagcctttgtgcagcaggaggaggctaggtgaggtgtcgggccgttgtggggaacttctgagagtattacagactggtagaatcagcaagaactccgatttggatgtcgctttggtggaactgtgtgtctgtatctgcctgtgtacgtgcaagtgtgcaggttcctttgtgtgcatgtgtacgcgtgggaacctgtacttgtcatatttttcttcatttcacgaaggctttttttgaagcagtggcagtaataatgcctttgtttcaagaacacatgaaattcttttaacaccagattagcatgttacccaaaatgaaccgttctagccctctgttaagaaataaagggaccataagcattttggctgcttatggttgtgtgttactacttacaagtgtcttgaaaattatgcagaactttgccttctttttttaatgtcttccacaatgtcgtgacttattataa

SEQ ID NO: 36655 - DNA, 581 bp, Macaca Mulatta
agacgcatcactaatttgtctgttttaaaacaaagatacacattttcttgatacctctagcttatagaacattaaacaaattaaaaggtttctttggaccgtttccatgaaagcctccttcttcggtaggatttaatattttgccagaagaattatgtttggggatttatgtttcacatatttttaaaaagctgttttcactaagttttgggatgggaaccatattaagccgtctctctgactaagcacatcaggcatcatcatgtcaagaatgagaaacagtgtgtttcctttaacagcggtgtatgtcatagagatgtttgacccatgatttttcatgaaaaggtccgttttcagtaaactcttgtgcttacctagtgtcttcagtgtgataactggcctcccactgatcaggggtgaggtgcatcacagagagtttgaaactatatattttatctttcatttccttgttctttttactctttcagccttcagtagccatggagattttttattttacatgacaattttacatatctaatttacaaactgtgacttttaaaataactgttgtactcttt

SEQ ID NO: 36656 - DNA, 673 bp, Macaca Mulatta
actacaaatgtgaagaatgtggcaaagcatttaaccactactcaacccttactaaccataagagagttcatactggagagaaaccatacaaatgtaaagaatgtggcaaagcctttagcaggtactcaacccttactacacataaaaggattcattctggagagaagccctacaaatgtgatgaatgtggcaaaacctttagcatatcctcaacctttactaaacataagataattcatactgaagagaaaccctacacatgtaaagaatgtggcaaagcctttaaccggtcctcaacccttactagccataagagaatacatactggtgagaaaccctacaaatgtgaagaatgtggcaaagcctttaactggtcttcaactcttactaaacataaggcaattcatactggagagaagccctacaaatgtgaagaatgtggcaaagcttttaaccagtcctcaagacttactcgacataaacaaattcatactggagagaaaccctacaaatttgaagaatgtggcagagtttttacctgttcctcaacacttactcaagacaagaaaattcatactggagagaaaccctacaactgtgaagaatgtggcaaagtttttacctgttcctctacacttactagacataagagaattcatactgaagagaaacc

SEQ ID NO: 36657 - DNA, 699 bp, Macaca Mulatta
gtcagtcatcaaaaatttgagattgtgacatcacagaagtaattttaaggccttttaagggaacaatttagaaagagaacagtgctctttttatatcaatgcctttacatttatttaaaaatagtcctaatgctttatactgaaatgtcatatgcaaatatgttcaggttctaacatataaagttctaacatataaagttcaggaaaccgctgaagattgtgtacagcttaaaaataataaaatagggtaactatagtgttgattttatgtataaatgctatcatactatattttgccatcagacatatttctactcttttctttgaaatatgcaaagtttctccaacagcagcatgcaactcattcatttgtaatcaagatgatagtttgaaacatccaattgtaatcagagcaacagttgacttacttttgatagcagagttgaaaatcattgcaagtaataaaatggggctattagaaatggaaaatgactaggatctagaatgtaacttcatcatataactgacgagtgtctttattatcaacacgtgttattaagaatgggcaagatgtccttatatactagaagcttttgtaaagtcatgtatctatcggtaatacagatttctgaactgaaaaaataaaaacaagggggtgccgtaccaattcgccatatagtgagcgtataacattcactg

SEQ ID NO: 36658 - DNA, 317 bp, Macaca Mulatta
acaagcgcatgtgcgaggagatcgttatcatccccagcaagaagctccgcaagaagatagcaggctgtatcacccatctgatgaagcggattcagagaggccctgtaagaggtatctccatcaagctgcaggaggaggagagagaaaggagagacaattacgttcccgaggtctcagccctggatcaggagataattgaagtagatcctgacactaaggaaatgctgaagcttttggacttcggcagtctgtccaacctgcaggtcactcagcctacagttgggatgaatttcaaaacacctcggggacctgtttga

SEQ ID NO: 36659 - DNA, 806 bp, Macaca Mulatta
ggaggccattatgcaggaagaggtgaactcaggcagagactggtagtcttttttagttgaaggtacagatatgagtgtctgaaaaagccaagacagctctagttcgcagaacaaagaggaaagagatctgtatagaaaggaaactttagaggcctacacagtgttcctctcaagtattcagttgaacacaaatcagcgcatgcataagcacattatccctggccaggaaaaaaagatgtagagagagtaatgcccctagcttacaaaggtccagagaaagaattagttctcattagccaaaggggaaaaacttacaattcatggacaatccattagactcagagaagtcttgcctctatagtggggaaacactaagctcaaaataaaaatcccaaggggaataaaactggtttctaagttacttaacttttctggtttttacagacaacatgatttttatacctagcccattccacagtctctgccctaaaactgcagatctgaaaacaacttccgcaaaatttcagggtacaaaatcaatgtacaaaaatcagtgacattttcttacaccaacaatataacagccgaatagcccaatcaaggaacccattaacctttgcaatagacacacccccaccctttccccccttcaaacacccccactcccacgaagatccgccttatcagggaatctcttcaaagttattaccaaaccctgccggaagggaaccggggtctggaacaaacaaattggaaaaccctttcatgccccattggataggaaaaattccttagttcttaaaaag

SEQ ID NO: 36660 - DNA, 1253 bp, Macaca Mulatta
  misc_feature (1)...(1253): n = A,T,C or G
ccaaggcctgcatcgggaataaagtccagagaatttctttccgcaggatgccgcctgcttaggagggccctgggggtgcgcagggcgtgcgggcgtgcggcctgagcccacagtggcggcagaaggcgggagccggaggcctgggaggtggccatcatgggcaccagcgttcctggaggggtggctggcctagggcagaggaggcccatagcggggccccatccgctgggcacggagcaaacgttttctagtcaagtactaggtgtggagatgcgggctgaccttagagaacgcgtcgtgggacagaacacagcccggggtgcaggggagtcctgccgggcccgggaggtcacagactgggccttccgggtcgacacaggtgagaccaggagtttgcagaccttgctttcgttacttttgctctggaaaagagaagaattgatgaaggcaccaggagcttttttctgagcaacaacgaagaagatcctctcacccctttagcctaaaaaaccctaggggatgggtttggnnnnnnnnnnnnnnnnnnnnnnnnnnnnnnnnnnnnnnnnnnnnnnnnnnnnnnnnnnnnnnnnnnnnnnnnnnnnnnnnnnnnnnnnnnnnnnnnnnnnnnnnnnnnnnnnnnnnnnnnnnnnnnnnnnnnnnnnnnnnnnnnnnnnnnnnnnnnnnnnnnnnnnnnnnnnnnnnnnnnnnnnnnnnnnnnnnnnnnnnnnnnnnnnnnnnnnnnnnnnnnnnnnnnnnnnnnnnnnnnnnnnnnnnnnnnnnnnnnnnnnnnnnnnnnnnnnnnnnnnnnnnnnnnnnnnnnnnnnnnnnnnnnnnnnnnnnnnnnnnnnnnnnnnnnnnnnnnnnnnnnnnnnnnnnnnnnnnnnnnnnnnnnnnnnnnnnnnnnnnnnnnnnnnnnnnnnnnnnnnnnnnnnnnnnnnnnnnnnnnnnnnnnnnnnnnnnnnnnnnnnnnnnnnnnnnnnnnnnnnnnnnnnnnnnnnnnnnnnnnnnnnnnnnnnnnnnnnnnnnnnnnnnnnnnnnnnnnnnnnnnnnnnnnnnnnnnnnnnnnnnncccagtttgcgttcaagcctgctgggacgatcctgtagctcctgggccacaagagtagccaaggccctctgatttttggtcaggacacagaaagatagcaggggacaggggggaactgagggaccccaggcatgacctgcagtcagacaaggtaggtcagagaatttatttatggctatct

SEQ ID NO: 36661 - DNA, 551 bp, Macaca Mulatta
ccaaattatcaaaccattaaaaactcattactggttctcagcctcccccagtactagcctcagtgtggctgctgcgtaagtatctgtagcctgtctacctcctgcagcggggctgcccgccgcttccctgtctactgctcaggctctcccacttcgtggcatccatgtaaagtagctggcagaagagagatgtcaccctcattcaacagacgggatgtgtgttgctcagagaggttatcctgaggggctgggtgattccctggcctacattcttcccgaggctccaggccactgtcttcgggagtaaaagagccttgtctgaccttaatgcaggcagtctgtttgaacccctgtaggctgcattcaggagacagaaggtgtctgggccatcctggatggccggtcagcattgctaggcaggctcggctatgtggctgggactcaggcctgggtggcttttgagaccagtgaagggagagccggcctcctgcccatgcaggcttgtgacacggctgggatatgagggaggactcagatctacacacagaaat

SEQ ID NO: 36662 - DNA, 688 bp, Macaca Mulatta
  misc_feature (1)...(688): n = A,T,C or G
gctagagcgggggctttggagcccacagcctgggctgagccctgctagacacccactgtgccgctaaggccatctctgaacatcccgtatgcctctgcttgctcgtctgtaaaatatgagaacccagttctttgagtctttgagacctgtccagcctcttgtgagcccaagagaaatgtttgtcgattctactgccaccaacgccgccatccaagtccacagtacagttcttagccnnnnnnnnnnnnnnnnnnnnnnnnnnnnnnnnnnnnnnnnnnnnnnnnnnnnnnnnnnnnnnnnnnnnnnnnnnnnnnnnnnnnnnnnnnnnnnnnnnnnnnnnnnnnnnnnnnnnnnnnnnnnnnnnnnnnnnnnnnnnnnnnnnnnnnnnnnnnnnnnnnnnnnnnnnnnnnnnnnnnnnnnnnnnnnnnnnnnnnnnnnnnnnnnnnnnnnnnnnnnnnnnnnnnnnnnnnnnnnnnnnnnnnnnnnnnnnnnnnnnnnnnnnnnnnnnnnnnnnnnnnnnnnnnnnnnnnnnnnnnnnnnnnnnnnnnnnnnnnnnnnnnnnnnnnnnnnnnnnnnnnnnnnnnnnnnnnnnnnnnnnnnnnnnnnnnnnnnnnnnnnnnnnnnnnnnnnnnnnnnnnnnnnnnnnnnnnnnnnnnnnnnnnnnnnnnnnnnnnnnnnnnnnnnnnnn

SEQ ID NO: 36663 - DNA, 873 bp, Macaca Mulatta
ggatcacaaatcccagaagactgagaacaggttatccttggaggcgtgtaatacagtatttaaccacctttctacccgagtgtgcatacctgcaaagggtaatgtcgatattaaccaggaatgatcatggctgtcatatttaagctaataataataaagtacacaatgtattatgtagaaagaatcatgccttcataatcagtcttcacaaagattcctttaactctctgttattcctaatcctagaaaattatttctctttgctttttgctcatccataggtcctttgacaaacgtctctggaaaactactgaactacatacatcaacaatacagaagtcctaatgtccaaaaccttgcttgtcacctttttgcgtgtataaattagccccaaacccggctaccccgtctgataaaacctaaaaaaacaacacagagataagttaaataagaggaaaccataaaatcgcctcttgccaatcgtacaaacatctatacacatagctcccttatatactctaaagcaatctaatatgccatctcaattaggaatagttaaagaaaaaaccgaaattacgacaaatattacattgtgcatttacactacgaattagatcggccgggtattgagtgtctattccgcctcgattatataaatatctccgcacattctttttactcttccctgtcccaaatatttcaaaaacaactttaagtcgataagactctgccaataaacccgcacacttccgaaactacatctgcaaacgaagaaagaatcataacaaatatcaccttatcgtcaatacacacgtctaccgcatggctaaacacagaaaaaatgaagcggtgggaatatccgattctaaaacg

SEQ ID NO: 36664 - DNA, 608 bp, Macaca Mulatta
gggggactcctgacgtcgccctgccggcgcgcagttcagttttgcggttccggtcccgctctcatattggggcgggatgtgggagcgactgaattgcgcggttgaggagttttattctcgtctccttcaggcatttaatgaagaaaagaaaggagtccataaagacccatttctctatgaggctgatgtccaagtgcagttgatcagcaaaggccaaccaaatcctttgaaaaatattctaaatgaaaatgacctagtattcatagtggaaaaagtgcctttagaaaaggaagaaacaagtcatattgaagaacttcaatctgaagaaactgccatatctgatttctctactggcgaaaatgttggaccacttgctttaccagttgggaaggcaaggcagttaattggactttacaccatggctcacaatcctaatatgacccatttgaagattaatctgccagttactgcccttcctcccctttgggtaagatgtgacagttcagatcctgaaagtacttgttggctaggagctgagctaatcccacaaacgacagcattacaggaattgtcttatattggtccgtgtaaagctgataaaattatcc

SEQ ID NO: 36665 - DNA, 319 bp, Macaca Mulatta
cattgctttgcatatttcaaaaaagtgaatatattcaatgcgcatttttatcaagcacttatatatgcatagatacatacacacattctctttggcaaaatcttatttcctgcatgttttaagaatttcttatcttaaagtccttgctctgctcttttaaaaaatggtctcattcaaagttgtgaactatggggtggtgatatggaggaaatctcctaagtttggttcgtcagtgaactctctctggactttctgagacttatactccaaagttgtaacgctgctagtttggttatatagtattttgaaatcaaaatct

SEQ ID NO: 36666 - DNA, 776 bp, Macaca Mulatta
  misc_feature (1)...(776): n = A,T,C or G
ggggccctccggaagtgcggggattgtcagctgcgtttccgcggtctcggttgaagagctcaagctcgggaaaatggtgtgcattccttgtatcgtcattccagttctgctctggatctacaaaaaattcctggagccatacatataccctctgatttcccccttcgttagtcgtatatggcctaagaaagcaatacaagaatccaacgatccaaacaaaggcaaagtggactgtaagggtgcagacatgaatggattaccaacaaaaggaccaacagaaatctctgataaaaagaaagactaaagcagttttcctaaaggacctcatcatttaaaaaatggacctgataatatgaaacatcttccttgtaactgtctctgacctttttatctgagaccggaattcaggataggagtctagatatttacctgatactaatcaggaaatacatgatatctgtatttaaaatgtagttagttatatttaatgacctcattcctaagttcctttttcattcatgtagctttcatttgttattgctgtttgaataatatgattaaatagaaggtttgtgccagtagacattatgttactaaatcagcactttaaaatacttggttttctatctaattcataggaatttgactgctgtttgctctactttctttgggctcttctaatttgagtagagtacaattttattggtgaaacagtccagtgaaactgcaggggaaatgcanggtagaatcttggggaggtaaataaatgatgtgaa

SEQ ID NO: 36667 - DNA, 765 bp, Macaca Mulatta
  misc_feature (1)...(765): n = A,T,C or G
gggtttagtcaaagacactctactgtacaacattgccttgggatctttccaggcccttctgtgcttactctcctatttatcttgtctattttcttttatcagcctttcaccataaatcctttgttctgagccatcttttcagacatttttgcaagtcctagtcctgagtccttctgccctggataccagttagttctcctttattccttgccagtttgctggctggttccccttgctcttgctgtgagccatgtgcgttagctctcacatatggcatagctgctgattcccaggtcagagttctagccctcctccttacccaccagggaagatcaggcatttaggactttgtattcagcacatgatactggttctagagactggttctcatctgctggacttgtattcagcagatgagatttgttcaaatgccacgtccactaaaaacttcactgattccagcagtgaaaagttacttagaagttctagggaatttagaggtttgggatcatatctatctgctggaatcagtgaagcttttggtggacaangcatttgaacaagacttttgaaggttagtgaggtttcgagtttttgttacaaattgatatatacggtaagtaccaccaaacttggttagcaacatatgtttggaaaaaggcagatgtaaaaattaaaggcctaacttttttatttaggaaaaatattaagcttactgtatttaatttcttccattcaagtgattttgaaagttaaatatgaacc

SEQ ID NO: 36668 - DNA, 427 bp, Macaca Mulatta
  misc_feature (1)...(427): n = A,T,C or G
gggggaaagtaatagggaaaatcctcttccagtatggctataggaaatgaatacatttccacaaaaaaatagtagattaatttgtgaattacattgattcgtcaaaatatgagttcctcttttttgcagggtggaggacttgtggagttggtatctctgttatctagatgtctgagtttaatactgaattttagaagataggacttggcatctcctagatatgctcatatgtgattgtttactgaataatttgaattattgaaataatgtgacatgtttattgtctgaaactgatagttttgctttttctattgaggtatacaatgtaagtgccttttaattttattctcttaaataaacattctgtttgagtgattttgctggatcctccaannnannnnnnnnnnnnnnnnnnnnnnnnnnnnnn

SEQ ID NO: 36669 - DNA, 693 bp, Macaca Mulatta
  misc_feature (1)...(693): n = A,T,C or G
atggtgactgaggtacggaatccgaggacaanctggccaacgtggtgaaatcccatctctactgnnnnnnnnnnnnnnnnnnnncctatgggaggctgatgccggagaatctcttgaacctgagaggtnnnnnnnnnnnnnnnnnncaatcgcaccactgtactccagccttggcgacagagtgagaccctgactcagtcaatcaataaatagctattggataccgtttctttttttacggacagggtctgtctgttgcccaggcaggagtaccatggcatgatccctgccgactgcagcctcaagccatcctccccagtagccggaactagaggcactcgccaccacgctggctgaaatagcttgatatttctgtgtgtgtgtgagacagggtctcattctgtcgcccaggctgaagtgctgcagtggctgcaacctcgcctgtagttgggaactacaggcgcaccacttcacgcccggctagttggtgtaatttttttgtgtacagggggttatgctgcgttgcccaaggatctggtaagttgctcacgggatccgtctgccttgacctgccaaagtannnnnnnnnnnnnnnnnnnnnnnnaggcccggtccttactgctgacttttcatgtcgattatatgtcgaagtggtactttgaacctatcgcgttaccgaaattccttatcggc

SEQ ID NO: 36670 - DNA, 303 bp, Macaca Mulatta
accactcccagctatgtcacctttacggacactgaacaattgattggtgatgccgcaaagaatcaagttgcaatgaacccgaccaacatggttttggatgccaaacgtctgattgcacacagatttgatgatgctattatccagtctgagatgaagcattggcccttcgtggtggtgaatgatgctggcaggcccaaggtccaagtggaacacaagggagagaccaaaagcttctatccagagaagttatcctctatggtctgacaaatatgatggaaattgcagaagcctactttgggaaga

SEQ ID NO: 36671 - DNA, 632 bp, Macaca Mulatta
  misc_feature (1)...(632): n = A,T,C or G
gggattctaagttcctcaggagagaccttgacttaaagttgtagcaagggtgtgctaggctggggatttggagcaaaaccatcaagtaggcatgatactggtacggtgtgggcctggcaaatcagacagaaatggcttgaaaagctgcagggggagcatgcctgtctctcagtgatagagtatgggagggacccccttagcttggaaaaggagagttgaagaggttatggacaaataggatgcctagttgagggtgtttccaaggtgttgtccaatcttatcatcagtagattttataagccacagagacaaaccaggaacagaatgatgttactttggttactttcttttttattctaggtgtggcttcgtacatgcagaagagtgctatatgctgtacatcttacctttaaagtcttaccactttccccattttagtctaatgggaagatagagctgtgcaagtctnnnnnnnnnnnnnnnnnnnnnnnnnnnnnnnnnngttatggacattttcagacatgcatagaagtggagaggaggatggtccttggaccccatgtgtccatcacctagccgcatcatttatagttttggtccacctgggttcatctggtatctgcctcctttta

SEQ ID NO: 36672 - DNA, 799 bp, Macaca Mulatta
ccagaaggggttttctaccggaaggggtggggtttcctggcccatacagtttaattactttattggttttacttttaacccaggaattcttatttttccaggagagggtaaatgagttttttctaggagattgaatgtaactggggggtttggaatattttaaaggcttgtaattaaggaccttaactttccatttaaggagtaccttcctacatactgggcaatatttgtatcatttttgcaagttttctttttcacaacagacctgctatgggtagaaatactcactaaggctaagaacaacttttgatgcctctgcagctacagatttaagagtctgaagctttgtgtggctgtaggaggatccatcagccctggggtgactgaggactggaaacacatcactaaattgaacatctatgaaggctatggcaagacagcaactgtaggttgatgctgattcaccattcagccagaaaccaaacttgcccattcactatgtacacacattctcagagcactagcacacactagaaatgcagaactggatctgacgcacgggaaaaggaattgttttaatctaaagggacccctccccgcctttcattgcaagacaaagaattacaagtacagataacttataaacttacagttttcacagcaggtagttgagctagtttccacctgacaattcctgtttactctgtgaagtatgaggcaatgtcacctgatgagaatgagaaaatgatgtgatagaattctgagtggaagatgtttaaaatgatcattgctgaatacc

SEQ ID NO: 36673 - DNA, 820 bp, Macaca Mulatta
  misc_feature (1)...(820): n = A,T,C or G
ggggcctcttttcctttctccgccatcgtggtgtgttcttgcctccacttctcgccatgtcttctcacaagactttcaggattaagcgattcctggccaagaaacaaaagcaaaatcgtcccattccccagtggattcggatgaaaactggaaataaaataaggtacaactccaaaaggagacactggagaagaaccaagctgggtctataaggaattgcacatgagatggcacatatatttgtgctgtctgaaggtcacgatcacattaccgtatcaaactgaaaatgtcaccactctctggagagttcgacgtattttcctctctgaatctattatgaatgcgttggttggctgggttcagtaataaatatgtgaggcctttcatttcnnannnnnnnnnnnnnnnnnnnnnnnnnnnnnnnnnnnnnnnnnnnnnnnnnnnnnnnnnnnnnnnnnnnnnnnnnnnnnnnnnnnnnnnnnnnnnnnnnnnnnnnnnnnnnnnnnnnnnnnnnnnnccttgttccnnnnnnnnnnnnnnnnnnnnnnnnnnnnnnnnnntttctttggggccgccgcccnnnnnnnnnnnnnnnnnnnnnctaatttttttccaagaaaaaccgggaaaaaaacgggggggtgtttnnnnnnnnnnnnnnnnnnggggggaaaacatnnnnnnnnnnnnnnnnnnnnggggtttgggagttttttctgggtttctaaaagggggttccccggcgcctttattaataattttccccccgccccgggatttccgggggaaagttggtatttttaaaaaactttcccgccaa

SEQ ID NO: 36674 - DNA, 741 bp, Macaca Mulatta
  misc_feature (1)...(741): n = A,T,C or G
ggatctcaaatttggaatgactgttaggggaatatacaggagaggacaacttattctacctgataaaatctggggaagtcttataggccttttggagaattaatatacatctatttgaaagtttaattggtcagatcttggcttactcataagctcaaaaattgtgttcctctcaggccagaagatagggtaaatcagcaggtatgggcagtagagaccaggcctggcagaccgcaccttatgcaaggtacaagtcaggaaagacaaccaagagttctgttgaccctttaagcgccggataccttcatccatgtaactctcaatagcaaagatttttactaagatgtacttctttgtctagagaaaatgaaaatagcaggcttatgaccctcaattgtatagcggattctctttgttttatgattctccagtggggcaggcttctcccttaccaagagtctggaattgtttttatattctgggtttagtttcttgttttcttttgtgccagtttcctccattgtctctaagaatgtcaacctttatgttaagctgatggtaaaagaagtttcattcttaccttcctctaaaacagtaagaccattggccannnnnnnnnnnnnnnnnnnnnnnnnnnnnnnnnnnnnnnnnnnnnagcggggcagatcacaaggtcaggagattgagaccatcctggctaacatgttggaaaccccgtcttnnnnnnnnnnnnnnnnnnnt

SEQ ID NO: 36675 - DNA, 467 bp, Macaca Mulatta
tctccttacctgttgcgaggtttcccaggataacctccctggcctcggaaggcatcgtagttccctcgaccagcaccatatggggcgtgggggtatggagggcctcctgtggggactgcagggcggacagcaccagctatgacagagattagtgttgagttgcaaaactatgtcctcaactccatcctgtttccttctcccaacgccacacactcaccaagccccttcatctccctcctgtacttacctccgtagcccaagatcgggggccggggctgaccgtagggcataaggccctggggagtctggtgtgggtaggggagtcccggggtcaaacctggggggagtacaacacggacagggacatgaattactgcgggggtgggagggggatgggtacaattgacttctagggctatggcctgaggatggggcagaaacttttcggggtgacatgttaaagagaa

SEQ ID NO: 36676 - DNA, 635 bp, Macaca Mulatta
gaggcaagggctcccaaacctgatctcactcccaacaggggatggtgctgatattgtaagagttgtgttttataaaacagttctcagcatagtccacttttcacatagtgccttacccgtgggtatcatcatatcagggtcccagttcagtttgtctgcacagcagccaccctgcctggcaacaggagaccccaagacctacacagtgaaccccagtgccccacaggggttctccaggtgacttgtgaaaacaggcctccaagggaagggatttatttgggggcatatactaggggcaatatggtttagcactgaattcaatttgtctttaggtctatgagtgcagtctttccttgtgaaaggttttgggcattgtacaacccactctgcctagaaggtgtggaggactcaccacgggcagggtcgccctggcccgcagcacgtgagcctgcactcactgtggcctttgtaacaaaaccagttgtggtcctcagcatttgaagcagctgcatacttcagagtaaactatttttcaatatttagttttgtcacaagaaatcgatcattgtactactctcacttatagcagttaaacagcatagaactaaaaacctgtctgtatttccattttttct

SEQ ID NO: 36677 - DNA, 148 bp, Macaca Mulatta
tgataccatctatggcactgaatgcacattcttcccagaaagcccaagactgtgttctcatctgaaattaggctgctggatagctgtcactctagagtaagacatccttttggataactgtcactctagaatgagacatcctaagtaa

SEQ ID NO: 36678 - DNA, 797 bp, Macaca Mulatta
  misc_feature (1)...(797): n = A,T,C or G
gggagatagtatgacatgataagtgctgaaatgaagagatgaaatacaggggtgaaaaaaggtggtatatgatcataaaggtgggagaaagctgcctttctatttgattccctcaatttaggaatgatttgttaaacaagcatcatttcgacaggcagacttttaaaaaattttaagaggtcatgggctttgttggggaaaactaaaacaaaaatcaaggtagaatcagcagttgccaatttgagacattaattaattctgttgttgctggttttaatgatttttgtgatccctctccatgttatttttcaaaatgataaccagaaagtgggagaaaaatatttctttttggcatagtaaagagacaaatttaaggttatcaaaagaatacatctcactacagtttattgtatatttttgaaaagctataaacgtaatatgcatctaaaaacagaggcttttgactttatgatgaagaaatgataaatgtttgaagtgatgaatatgctaattatcctgatttgattattacacatatacatatcaaaatatcactctatcctataaatacatacaattattacataccaactaaaaacaaaaggaaaaatgcattgattcaaaattaatagtcagtatattcaaacttgaagataaaaaatttaaaaacattctcccacaccagtatttcctccttctgggtctttttgtatgcccnnnnnnnnnnnnnnnnnnnnnnnnnnnnnnntnnnnnnnnnnnnncgcccctcgaagaagcttttctaaaccatttcgtt

SEQ ID NO: 36679 - DNA, 738 bp, Macaca Mulatta
  misc_feature (1)...(738): n = A,T,C or G
ggatgtcatatacaccttaaagttcatctattcactcacttaaaatattatgcaattcctcagtcctcaacttcaacttacagaaaatctattaaaaatatcaactagtttaagataaaatatatgctaattactctatcatacctctaggtagcaggataacaaaaaaaaagagaatgtcaatgaatatgatctaaactaattccatcattgctaacagttgaaataatttaatctaattatagaactaaatccagtaaactgaagcttaacacaaaaataaagcattatttaaaaatatcttacagttttatatatggccacaaaaattcttgtggaaagagtgtttcttttaaacatgcaaatattgaataatgtgactttctctttaagaatagctaaattggccaggtgtgnnnnnnnnnnnnnnnnnnnnnnnnnnnnnnnnnnnnnnnncaggtcaaaagattgagaccatcctggccaacatagtgaaaccctnnnnnnnnnnnnnnnnnnnnnnnnnnnnnnnnnnnnnnnnnnntattgtgatacgcacctatagtcccaannnnnnnnnnnnnnnnnnnnnnnnnnnnnnnnnnnnnnnnnnagcggaannnnnnnnnnnnnnnnnnnacaccacannnnnnnnnnnnnnnnnnnnnnnnnnnnnnccatcgcaaannnnnnnnnnnnnnnnnnnnnnnnnnncatggtcggcccgccttcgggcca

SEQ ID NO: 36680 - DNA, 483 bp, Macaca Mulatta
aaggagaagaccccgccagtgatccaaagaggctgctctcttctacctggcccaggccctgtggggcagcggagcttccctgtggcgtgaacctcacagggtattaaactaagttatgaatcagctgaacctgtgcatgctcatttcaaagggaaattcagattatccaggacgaccctggagagaccagatggggcctgaggcttcactgcataggcctccacccacctattccctttcctggtcaccttcatggtccaggacactctctggaagttctggggctccccaataagaggaagaccagactctgcctcggggaggggcagttctcatggctgggcccaagcaggcagggtattaatagaagctgctctggatgtctggtagaccacgcgtgtgtcttgcccccactggtggagtgtcatcgcacctggaccgatggtggtcagaatctgtgcagtcccgctccctcacccagct

SEQ ID NO: 36681 - DNA, 774 bp, Macaca Mulatta
ggagtctttcatgctacattatacctccatcagagtaagacagcttaggcactcctaagaggaaaggtctgtggagatgacacctgaagattgcatgaatccgaattctacacttccaaatcaaataggtaaaagggtagtatacatcacagaaaatgcttgctgtcaccaacttgaaaagcaaatgagtaggagtttgtcacactgccacgtaccagactgaaaatgcatttcctaccagttatacatttggtgtgggggaatggtgatgtcattttttgacagcattttatttgtgtgcatgcattctgctccaagtgtcacaattctggttacaataattataatatttggagttactactaagactttcctgaaagaggtgtactgtaccaaattttgtaacgtaaaaaaaatactaaatgatcttaagcttactaaattgtgaaaaggatacgtgctaacatctcagaactttaggcctgcttattgtcatctttaccgatctctgatcataaatgcagaagggatctgagagttttttaagcaagtagagtcaatcagtgttttgaacattatagtaatacttctgtgattcagagttagatcatataaatcaaagtaacaatttggattttttttaaacaacagtatcataactgtcataaaacagatggtccaacccccaggagcagaacataactttggggcagctctgttgggggaataaagatggggaaaaaacaactggtttctaaactggcccaactagaa

SEQ ID NO: 36682 - DNA, 432 bp, Macaca Mulatta
  misc_feature (1)...(432): n = A,T,C or G
gggacagcggccatcttggtaaaggaaaaggaacaaggaagaaggtggaactaatgaccaagctaagacagggtctttcagtgccacccaggctggcacaggagtgcagtggcgtgatcatagcccactgtggtctccaacttatggactcaagcgatcttcctgcctccgcctcccaaagtaccgggattactggcgtgtaccaccgcacccagatgagactaacgttttaatgtcaaaaaacctataaaatattcggaaaaaaaagagtttaatctctaagagccattgtgcaaaagcagtgaagacccaaagatctgtatgacactgttcctgccctgagaccgggacaaggtggttttatgcatcaaatacagaatggcacgttctgcacgtagaaaanncnnncnncnnntcccccncctccctgtc

SEQ ID NO: 36683 - DNA, 780 bp, Macaca Mulatta
  misc_feature (1)...(780): n = A,T,C or G
ggnnnnnnnnnnnnnnnnnnnnnnnnnnnnnnnnnnnnnnnnnnnnnnnnnnnnnnnnnnnnnnnnnnnnnnnnnnnnnnnnnnnnnnnnnnnnnnnnnnnnnnnnnnnnnnnnnnnnnnnnnnnnnnnnnnnnnnnnnnnnnnnnnnnnnnnnnnnnnnnnnnnnnnnnnnnnnnnnnnnnnnnnnnnnnnnnnnnnnnnnnnnnnnnnnnnnnnnnnnnnnnnnnnnnnnnnnnnnnnnnnnnnnnnnnnnnnnnnnnnnnnnnnnnnnnnnnnnnnnnnnnnnnnnnnnnnnnnnnnnnnnnnnnnnnnnnnnnnnnnnnnnnnnnnnnnnnnnnnnnnnnnnnnnnnnnnnnnnnnnnnnnnnnnnnnnnnnnnnnnnnnnnnnnnnnnnnnnnnnnnnnnnnnnnnnnnnnnnnnnnnnnnnnnnnnnnnnnnnnnnnnnnnnnnnnnnnnnnnnnnnnnnnnnnnnnnnnnnnnnnnnnnnnnnnnnnnnnnnnnnnnnnnnnnnnnnnnnnnnattccccctaataaaaatatctcaataaatttgaaagcaccctttaccattctccaatgggattctacgggttcaaacatttctttcatttacccacgggtctttccgggggaacccccacggtttattttttggggatccccacctctccctcctttttgttctgggccttccatttccggccccaacttaactaaacanccaaccttttgccanntcggnaaacccattccacctttttcggggcctttctccaaaaa

SEQ ID NO: 36684 - DNA, 803 bp, Macaca Mulatta
  misc_feature (1)...(803): n = A,T,C or G
nnnnnnnnnnnnnnnnnnnnnnnnnnnnnnnnnnnnnnnnnnnnnnnnnnnnnnnnnnnnnnnnnnnnnnnnnnnnnnnnnnnnnnnnnntttgagctaatatctaaacttataaataactttgagacatttgatttgagttagggttagaacaatgctgcgtaattatggccatatatataataatttaaattcttctagataaaaaaaaaaagttgcagaatgctacagagctgcaaatgaagactagtatcctgttaaaaccatttgatctttaaactggcttccttaatttcataatggatcgaaaacaatggacacaaagtgtataggcagtaaaataatgataaaataagtgttggtactccaaaatagaaataaattagaaagttaagaacaaggaaaacaaaacacaaatgcacacacatagcaactaagctggctcataccttagggcctttggacctgttgttccctattcttggactcgttgcttccttagatcttttattttgtttcggtttttgagacggaattttgctcnnnnnnnnnnnnnnnnnnnnnnnnnncatgatcttggctcaccacaacctcacccgctcaggttcaagcgatcnnnnnnnnnnnnnnnnnnnnnnnnnnnnnnnnnnnnnnnnntgccacgatgcccagctaattttgtgnnnnnnnnnnnnnnnnnnnnnntccgtgttcgtnnnnnnnnnnnnnnnnnnncannnnnnnnnnnnnntcccgcctcggtnnnnnnnnnnnnnnnnnnnnnnnncatgggccactgcacc

SEQ ID NO: 36685 - DNA, 675 bp, Macaca Mulatta
gggggcagtcctgacagcaggctgtccctgatagatacagaagtggggaagggtgggagttatcgatcttctctgttttatagactacttcaacttctactgctgccaatgcctcagcaaccactgaaagttcagctatcacccttcctgtaactaatcaagtcaaggaagagatctacgaaatagtggtggtggttccagctagaaattttcactcacaatggtgcatgtttcaaatagaagtatccagggtatgaacatacttttgtcctcctgggtcgtagtcttaacggtgataggagtcaccttagacgaatgggttgaattgatttcagaagatgaaggaatcaagataaaccacagtccatggatgacatgttgccctgctgtttggccagaagatgacctgcaagtggtcaggattatgatgatgtcgatccttggcctttccttcctccttaacttaatcctgggtatgaaattcacctatctgattcctgaaaataaatctctacaactcttcactgccatcctcagtttcttctcaggtatccttctgctctgggcactcatgctatatcacaataaactgaagcatggccaatccgtgcacttctctagttataggatcacctggatcatgaatactgcttactttaacgttttcctcctgtc

SEQ ID NO: 36686 - DNA, 848 bp, Macaca Mulatta
  misc_feature (1)...(848): n = A,T,C or G
ggnnnnnnnnnnnnnnnnnnnnnnnnnnnnnnnnnnnnnnnnnnnnnnnnnnnnnnnnnnnnnnnnnnnnnnnnnnnnnnnnnnnnnnnnnnnnnnnnnnnnnnnnnnnnnnnnnnnnnnnnnnnnnnnnnnnnnnnnnnnnnnnnnnnnnnnnnnnnnnnnnnnnnnnnnnnnnnnnnnnnnnnnnnnnnnnnnnnnnnnnnnnnnnnnnnnnnnnnnnnnnnnnnnnnnnnnnnnnnnnnnnnnnnnnnnnnnnnnnnnnnnnnnnnnnnnnnnnnnnnnnnnnnnnnnnnnnnnnnnnnnnnnnnnnnnnnnnnnnnnnnnnnnnnnnnnnnnnnnnnnnnnnnnnnnnnnnnnnnnnnnnnnnnnnnnnnnnnnnnnnnnnnnnnnnnnnnnnnnnnnnnnnnnnnnnnnnnnnnnnnnnnnnnnnnnnnnnnnnnnnnnnnnnnnnnnnnnnnnnnnnnnnnnnnnnnnnnnnnnnnnnnnnnnnnnnnnnnnnnnnnncctactcgggcacctattttcacccctactaacaaatttcaagaatacttttgaaagcacccctttcaaccattctccgaagggcattctaagggtttcaacattttcttcaattaccacaagggctttccatgggactcccccgtttaattattgggatcccccattccctcttttgttctgcccctcatcccgcccaacttacatacaacccactttcccaattcaaaaaccatcccctttcgggctttctgaaacccccccgcccttgggaaaattgaaccctttccgtgggaatggttattcctggaaaaacgccctcacaaaatttctctgggacaaac

SEQ ID NO: 36687 - DNA, 404 bp, Macaca Mulatta
aatgctgtggttaaggtttcaatattgctcacagcagaggcagagtcgtaaaagtttctgctcaggcaaatacatcaaaagctcagttaagtactaaaaaagttctccagagtaagaacatggatcatgtgaaagctcgggaagtgttaaaaattgccaaagaaaaggcacaaaagaagcaaaatgaaacctctacttccaaaaatgcacattcaaaagtccatttcacacgtcgatatcagaatcctagctcaggttcccttccaccccgggttcgtttaaaaccacagaggtacaggaatgaagaaaatgactcttctctgaagacaggacttgagaaaatgcggagtggcaagatggcacccaagccccagtctcgctgcacctctacccgctcagcaggt

SEQ ID NO: 36688 - DNA, 200 bp, Macaca Mulatta
aggcggaggcgcgggccgcgctggtccgggccgccgacaccctggaggatgtctacaaccgcacccagagcctgctggccgagcgcggcctgctccagctgacctaggacagcggctgcggggaccggcgggaacgcagcggatcgcccggggtagggccgcgcagcccgaggtcagctccgcagccggcgccgcggccg

SEQ ID NO: 36689 - DNA, 790 bp, Macaca Mulatta
  misc_feature (1)...(790): n = A,T,C or G
gggccaatannnnnnnnnnnnnnnnnnnnnnnnnnnnnnnnnnnnnnnnnnnnnnnnnnnnnnnnnnnnnnnnnnnnnnnnnnnnnnnnnnnnnnnnnnnnnnnnnnnnnnnnnnnnnnnnnnnnnnnnnnnnnnnnnnnnnnnnnnnnnnnnnnnnnnnnnnnnnnnnnnnnnnnnnnnnnnnnnnnnnnnnnnnnnnnnnnnnnnnnnnnnnnnnnnnnnnnnnnnnnnnnnnnnnnnnnnnnnnnnnnnnnnnnnnnnnnnnnnnnnnnnnnnnnnnnnnnnnnnnnnnnnnnnnnnnnnnnnnnnnnnnnnnnnnnnnnnnnnnnnnnnnnnnnnnnnnnnnnnnnnnnnnnnnnnnnnnnnnnnnnnnnnnnnnnnnnnnnnnnnnnnnnnnnnnnnnnnnnnnnnnnnnnnnnnnnnnnnnnnnnnnnnnnnnnnnnnnnnnnnnnnnnnnnnnnnnnnnnnnnnnnnnnnnnnnnnnnnnnnnnnnnnnnnnnnnnnnnnnnnnnnnnnnnnnnnnnnnnnnnnnnnnnnnnnnnnnnnnnnnnnnnnnnnnnnnnnnnnnnnnnnnnnnnnnnnnnnnnnnnnnnnnnnnnnnnnnnnnnnnnnnnnnnnnnnnnnnnnnnnnnnnnnnnnnnnnnnnnnnnnnnnnnnnnnnnnnnnnnnnccaaatcnggatccgaaaacctcaacgaataccctaacagcccagggcataggcaaagcacaaaacaaagccccatggctacctttcaactggttaaaccccaaacaacagggcaatgcc

SEQ ID NO: 36690 - DNA, 742 bp, Macaca Mulatta
  misc_feature (1)...(742): n = A,T,C or G
gggagcctgtgacacaattccctgtgaccaaccagggggtcttctgctggacagatcacatgcacccataagtaggtcatatgcccaggagtgttttgcctcagatatggagcaaaattagcctgacactaaatgcagctctggtcctacctactggagcttaaagcaagactcggaagaatcaaacggtttcagagtaacttaacagcatctcagaacaaagctccagaatatttacagattgcaaaaatatccaacatcaacaagataaaattcacatgggcaaccaattaacgcttacccaacaagcagagaagcaggaaaatacaacctgcaatgaagggggaagaaatccatcaataggagctgacccagaaacgatacagatggtaagattcgtagataggacattgaaacagttgttacacctttatgtgttcaagaagctagtagagagattcagcctgttaagtagaaaaatgagagatacaaaaactccaggctaggccaggcacgcaannnnnnnnnnnnnnnnnnnnnnnnnattgngaggctgggngtgggcagacnnnnnnnnnnnnnnnnnnnnnnnnnnnnnnnnnnnnnnnnncaaaacctnnnnnnnnnnnnnnnnnnnnnnnnnnnncaagcgtggtggcacatacctgtaatcctagctcctcagaaagctgaagcattgaaaatcacctgnaacctggggaagtggaaagtttgcanntgc

SEQ ID NO: 36691 - DNA, 769 bp, Macaca Mulatta
  misc_feature (1)...(769): n = A,T,C or G
ggattctagaaagagaaagagagcaccctggcatagttcctgcacactgctgctctccatggaatcctaattatagtcaccgaagaagtttctttcttgtctctccaggtcctgtgtgacagctcctcattctggtggcgtctttgtcgggaaaaccacatttctattcttgttatgaagactgcttgtctttaccagctcttcgtacatagatcaagacattatgaagacctgtactttcctcgggcaaatgagaatcactaattttctctctctattaagtactgtgctaactccattggcttcacctatatttatgtcacattctgggaccatgaggatcctggaacaaacttaacctcttttgtgccacacatccttacgctcccaaagtttctatcatgcaatgcctgcactcgtgttcaatgaggaaagtggttacgtagcttcatcctgacctatttaagcagtgtcttctttaaagtatgaagtgcagggccaggcatggtaannnnnnnnnnnnnnnnnnnnnngttgggagactgaggcaggtagatcatctgaggtcaggcnnnnnnnnnnnnnnnnnnnnnngtggctnnnnnnnnnnnnnnnnnnnnnnnnnnnnncnnnnnnnnnnnnnttatagtggtgggcacctgtagtcccagccactcagggagctaaggtgggagaatggcatgaacccggggaggtggagcttgcantgagcccaagatcatttctactggactccagccctggggta

SEQ ID NO: 36692 - DNA, 461 bp, Macaca Mulatta
  misc_feature (1)...(461): n = A,T,C or G
taaacaaactagggcaaaagtgaaagaagcttctaattaatgagatgtctgaattagatattagttaaaatgtttaagtgcagaactcaaatgattttatcagaagattatgttgcagagatgttaaaggatctgttntaatatataaggatattttataccgctagatccttgtattaaaattaatgcttctaaattacataggaatttaaaagtctattctttgtaaatattctaaccctgcccctgttatttggtgtacgtagtgaatttgcttacaaacaccttccccagaaacaagaaatagtctatttattcttattccctgttgaaattacagacacctggagtcatgaggtttgacactctacctatggggcaagagctcctgagaccatttgtatatccctattttcaaataaaattatagcctagtaacgtatagtatttttaaaaggaac

SEQ ID NO: 36693 - DNA, 664 bp, Macaca Mulatta
  misc_feature (1)...(664): n = A,T,C or G
aggcagactgttcaacagagcaagaccttatctctacgaataatttaaaaattagtgcgcacacgtgcatgcgcgcgcgcgcgnnnnnnnnnnnnnnnnnnnnnnnnnnnnnnnnnnnggccaaagtaaaaaaaacctctattaagggcctctgaatagttatctctgttccttcggttcctctgaagaattattttatactaggattctcaagttatttcctctcaatctgtattgggatcactccactctgacttgcatactcattttcccactgatgtagctgttgtcaagttagaagttaagttctcagtcttcattttatcagtcatctcagcagcattcattatggttaagtcactcccccctgttttcttcattagtttctatgacaccagcctcctcatttttctcctactctattagctgtttcttcttagtgtctttttctgactccttcatttcgaccagattttgcagtactgaagtatgtctggactctcagctgtcttccatctatagtaaataaacttactaggtgatcttatctagtctcatgaattttaagtaccatctcttcattgatgagtcccaaatttatgtctcattacttggccagtcttctcttaactacaggctaatatatccagctgncttcttgata

SEQ ID NO: 36694 - DNA, 723 bp, Macaca Mulatta
  misc_feature (1)...(723): n = A,T,C or G
gcagccaaactggagggagatcaaccagcatcaattctgtaggcacaaataaagagggaccgggaagacacaaggtcccagcacaggcacgaggattcacggagttgctgtatgagtgtcacgttctcaccatgtgcccctgaagtgactcctgacctcactgctgccctgccatccatcccgatcaccatcattactgaatcacagtccctccccaggcggggaatcttctagacaatgtccatgggaaagcacccctagcacccctatccagggtgcaggacagtacagcatcatcctgtgcgatgaaatgctgcctctcagacccgattaggtcccagaaagtcacaggcannnnnnnnnnnnnnncctcttctcccgggttgtggactataccgtcatcaacagttaatattcatctctgggagatgtnnnnnnnnnnnnnnnnnnnnnnnnnnnnnnnnntgtgtgtgtgcgtgtatccaaagctggataaacaagcttgtgatgcagacctggggcgatagctggggcgtcactctcacacgcactgtggtgggagacacaggcacagcccttctcggggcttggggtcccatggctgttgctggcacacccactgcacaagttactgcacatggaaggactctgctcatggtgctccctctgtgcagtgggcgagcttcctgacaggcaggtagagatgtgaaggcagtggtctga

SEQ ID NO: 36695 - DNA, 745 bp, Macaca Mulatta
  misc_feature (1)...(745): n = A,T,C or G
gttgggannnnnnnnnnnnnnnnnnnnnnntgagactttaggaggcccaggtgggtggatcgctgnnnnnnnnnnnnnnnnnnnnnnnnnnnnnnnnnnggtaatacgccctctctataaaaaataacaaaaagtagctgggtgtggtgacgggtnnnnnnnnnnnnnnnnnnnnnnnnnnnnnnnnnngacgatctacccaactcaggaggtcaaggctgcagtgagctgtgatgannnnnnnnnnnnnnnnnnnnnnnnnnnnnnnnnnnnactgtcttaaaaaaatagaaaaagagtgagagagaacttgaataaaagctaaattcttgtaatgtagataaagtggataaaaatccattgtagataattataaattgaattatgaattgattttggattaaccactcagtctagaccatttttccctcactgatacataaaagtcttcagtcctttgttctcattttcctcattccctgcttatcttctttcattcacaattcagctaaacaaggcacttccttaggtttccccaaatttctattaatagatgcattcactgtgaagttgtaaacaatattatatttgaagccttaaaagctggccctctcggctcgctagtatgaaggctggcctttcttcatgttcccttggagaggggcttgcgccagttggctctgaactgggttcatggctttaaactgtctttctccaagaacaagaagtatgctgatgtgatcat

SEQ ID NO: 36696 - DNA, 624 bp, Macaca Mulatta
cctagagtacaatcttggtgaagactttgctcgtcttaccacttacattagtctgcatgggctgccataacaaaaccccatagactgggtggcttaaaaaacagaagtttattttctcactgttctggaagccagaagtccaagatcaacattctggcctgttcagtttctgatgaggactcttctcttggcatgtaaatagccatgtcttcacatagtctttccgtggtgagtatgcacagagagagggagcatgcacatatgagatagcaaactgtttggtgtctcttcttacaaggacactaatcttattgaatcgaggccccatccttatgatcccagttaacgttagttacttctgtagaggtctcatctccaaatatagctacctttggggttagggcttcaacataggaatttgggaagggacacaaacattcagtccataaccccattgtatcctcagtacctacagttgcttaccatataggaggtgcctgataaataactgaattactgagtgatttttctaatgcattacttctaatggttgcatggttcagtgttctcactatatgtgtgatctaaccgttacttagccacctctctgatgtgctgtgatga

SEQ ID NO: 36697 - DNA, 809 bp, Macaca Mulatta
  misc_feature (1)...(809): n = A,T,C or G
gggcagtaatatgtacttgtccatttgattagacggtgatcagnnnnnnnnnnnnnnnnnnntcactttatttggattacatctcatcctagagtctttttgcctttgttcttcaaccttctttaatctcacttatcagaaacagcctttcatttttaaaaggtatttcctaaaattcacttttccaagcaatttcagcactagatagaatatggtacaattagtaataatatattcatcaaagccagatagttttcagtgttgtttttgtatggtatagcactgtgccatttgcatagctgtttacttacatacattatgtgattttctgccaggagtcaagccctaaacaataaaccctagagaattgtgatctagcagaaatctctctcgtgttggtgtgggtttgtgggggtggggngtgtgntgtgtgattttttttanttttaattgatnctgatttatgtaatcttgggtatgaattatataatcaattaaactctgcccagatagattagaagataaaaatatggcgtatttctacccagcactgggaaatttaagaaaaataagctctttcagataccttgagcatctttaaaggaaagataccaaatcactaccggcacctaaaattttaaacatctttagccccnnnnnnnnnnnnnnnnnnnnaagaaacctgacagtacttttttttaggccctgcctcccaaatagcattggaaacattctagtcccggaaaaaaattcaggaatttaaggaattccaggaagggttaaggcctgggaactatggaactttttaa

SEQ ID NO: 36698 - DNA, 900 bp, Macaca Mulatta
  misc_feature (1)...(900): n = A,T,C or G
ggcagggtggctcatcnnnnnnnnnnnnnnnnnnnnnnnnnnnngggcgggcagactgtttgagatcacgagtttgagaccagtctgggaaacataacaagaccannnnnnnnnnnnnnnnnnncnnnnnnnnnnnnnnnnnnnnnnntaaataattaaaaaataagaagactataaaatatgaccaactagggtttattcctggactacaaggatggttctacatataaacatcaatcaatgtaatataccacactaacagaagagaaacaagagaaacaaaccacatgatcatctaattgatnnnnnnnnnnnnnnnnnnngatggtcaggtgtggggggcctcacnnnnnnnnnnnnnnnnnnnnnnnnnnnnnnnagtgggtggatcaccaaaagcccagagtttgagaaccnnnnnnnnnnnnnnnnnnnnacccgtttccatttaaaatacaaaaaattacccaggcgtggcaaaacaaatgcctgcaattccaacctaactcaaaaagcttaacgcacgaaaaatacccctgatcctggccaaaatggtagcgctcccattacccttcaaatccccctcaaaaacaacgcgcacccccccaagaaccccctcccactgctccatgtcatccctcttccccccttcatataacctttttcatcgcccattcctccccgccgctcatcaggggcccccctctcaggtgacaatgtggaaacatgggtctattaactcttccactccccccgcgacaaataccgggcgtccccgtacccacattgcgctgcctccccgttactaccttaatttaaccttccccccgatcttggtggatccccgcataaccatactcaaatttctgaacacacgcccgacaggcgcaattttccttt

SEQ ID NO: 36699 - DNA, 876 bp, Macaca Mulatta
  misc_feature (1)...(876): n = A,T,C or G
ggagatttctttacatccttagctttctgatggaagttgnnnnnnnnnnnnnnnnnnnnnnnnactatgatttttgtagcttatccagcttgttgcagtttatagagtgaggcttggtgtcttgcaactttgagcattctagtcagaagtggaaatcctgagccttttgttagaattacaaaatttgagagctggaagagaccatagaaatcatatagtttaagccaggtggggtggtgtgtgcctgtattcctaactactgcctggctctacctgggtgacagggcaaggccttgtctcttaagaaggaagaaatcctgtagtttagccactttgttttcctgatgaggaactgagacataaaaatgtgaaattctttgactaaccagctggtttagccacagatctggagtagacaccagatctttaaacttacggtttatttcttttaatataagctgtcccaccttagttctgtgtttgttagaaacagaacaccttgagactggggtaatttnnnnnnnnnnnnnnnnnnnnttttctttacagttctgggaggcttgggaaagtcctgatacccatgggtgctgggccttctggggggaggggtctccttttccggcatcctccccatgggtnnnnnnnnnnnnnnnnnnnnggccaaactttgccttttggtaataaggccctattcccccccattaattaaaactttaaccccaatctggccttctttccccggtggggtttgggagagaaccgcaattatattatagtagatgaagagtaccccccgccacccccacttttttcgggatagggaggtatctattgaccccctgcgaatatcaatacgagataaaaaagagtaaaaac

SEQ ID NO: 36700 - DNA, 142 bp, Macaca Mulatta
ttccatctcatggattgccacagctcaactcggggggcctggagggatgcccccaggcagccatcagtggacctagcctggatggcccctccttgcaaccaggcagctgagaccagggtcttacctctctgggacctagggg

SEQ ID NO: 36701 - DNA, 759 bp, Macaca Mulatta
gggaggcacaaacgcctttaggaaggtcgggttcgggagctgtcagtgggagttctgactcgctcgttttttaggttttcatctcactttagctctgttaactctggagagtttttgcagaacaagaaaagcaacaggagtgttttgcctttgctccttcaatgcttcgtcaagtaacaggtgtccagattttcactgtctactatatacttcagctgtgaggacatgtcgttcagatttggccaacatctcatcaagccctctgtggtgtttctcaaaacagaactgtccttcgctcttgtgaataggaaacctgtggtaccaggacatgtcctcgtgtgcccactgcggccagtggagcgcttccgtgacctgcgacctgatgaagtggctgatttgtttcaggtgacccagagagttgggacagtggtggaaaaacatttccatgggacctctctcaccttttccatgcaggatggccccgaagctggacagactgtgaagcacgttcacgtccatgttcttcccaggaaggctggagactttcacaggaatgacagcatctatgagaagctccaaaaacatgacaaggaagaggaggactccccagtctcttggagatcagaggaggaaatggcaaaaagaagctgcagcttctgcgggtctactttcagtgacacagatcctgaaattccaccaaaagagctaatgcccaccagtttgaagaacccccctccccagtgaggaaattgaataacc

SEQ ID NO: 36702 - DNA, 586 bp, Macaca Mulatta
  misc_feature (1)...(586): n = A,T,C or G
gggattcgttaaaagttttatgccctatttcgagtgggaagcttgaagagagggtctaagtctgggaataattgattgtactaattttgttgcagttttagatcatctccttgggatgggaaattaaaagccatctagtccaaacactcaggaagcaggccagccattgttatttttaagaaaaaggctgaaatggaaaatcttagatggaagctgcagctttcagtttgtctatgcagctcttcaatttgaacagagattcacttgaacaaaaggcatcattgcaaggcagaatggtccccagtaccctccttacgaaataatggtggtcctcctttggtaaagtatcctccccctcccttgaccccaaagggaattttccgggatttccattttcaaaccggggacaaatttggtttaacttttcccccaaaaggccccaaaggatttccccttgccccccaagaaaggaaaattttcccnnnnnnnnnnnnnnnnnnngacccggaaaaaaaaagagaggggtttttttannnnnnnnnnnnnnnnnnnnnnnnnnnnnnnnnnnnntcttttagggaaggcg

SEQ ID NO: 36703 - DNA, 1860 bp, Macaca Mulatta
  misc_feature (1)...(1860): n = A,T,C or G
ttccagggacctgtgacattaaaggatgttattgtggaattcactaaggaggaatggaagttactgacccctgctcagaggactctgtataaggatgtgatgctggaaaactatagtcacctggtctcagtgggnnnnnnnnnnnnnnnnnnnnnnnnnnnnnnnnnnnnnnnnnnnnnnnnnnnnnnnnnnnnnnnnnnnnnnnnnnnnnnnnnnnnnnnnnnnnnnnnnnnnnnnnnnnnnnnnnnnnnnnnnnnnnnnnnnnnnnnnnnnnnnnnnnnnnnnnnnnnnnnnnnnnnnnnnnnnnnnnnnnnnnnnnnnnnnnnnnaatggagaactcacaaaacatcagaaaactcgtaccacagagaaagcctatgaatgtaaggaatgtgggaagttcttctgtcagaagtctgccctcatagtacatcagcatactcactcaaagggcaaatcctatgactgtgataaatgtgggaactctttctccaaaaatgaagacctcacaagacatcagaaaattcacacgagagataagacctatgagtgtaaagaatgtaagaaaatattttaccacctatcatctctcagtagacatctgagaacccatgcaggagagaaaccctacgaatgtaatcagtgtgagaaatccttctaccagaaaccacatctcatagaacatcagaaaacacacacaggggagaaaccttttgaatgtactgaatgtgggaagttcttctatgtgaaggcataccttatggtacatcagaaaacacacacaggggagaaaccctatgagtgtaaggagtgtnnnnnnnnnnnnnnnnnnnnnnnnnnnnnnnnnnnnnnnnnnnnnnnnnnnnnnnnnnnnnnnnnnnnnnnnnnnnnnnnnnnnnnnnnnnnnnnnnnnnnnnnnnnnnnnnnnnnnnnnnnnnnnnnnnnnnnnnnnnnnnnnnnnnnnnnnnnnnnnnnnnnnnnnnnnnnnnnnnnnnnnnnnnnnnnnnnnnnnnnnnnnnnnnnnnnnnnnnnnnnnnnnnnnnnnnnnnnnnnnnnnnnnnnnnnnnnnnnnnnnnnnnnnnnnnnnnnnnnnnnnnnnnnnnnnnnnnnnnnnnnnnnnnnnnnnnnnnnnnnnnnnnnnnnnnnnnnnnnnnnnnnnnnnnnnnnnnnnnnnnnnnnnnnnnnnnnnnnnnnnnnnnnnnnnnnnnnnnnnnnnnnnnnnnnnnnnnnnnnnnnnnnnnnnnnnnnnnnnnnnnnnnnnnnnnnnnnnnnnnnnnnnnnnnnnnnnnnnnnnnnnnnnnnnnnnnnnnnnnnnnnnnnnnnnnnnnnnnnnnnnnnnnnnnnnnnnnnnnnnnnnnnnnnnnnnnnnnnnnnnnnnnnnnnnnnnnnnnnnnnnnnnnnnnnnnnnnnnnnnnnnnnnnnnnnnnnnnnnnnnnnnnnnnnnnnnnnnnnnnnnnnnnnnnnnnnnnnnnnnnnnnnnnnnnnnnnnnnnnnnnnnnnnnnnnnnnnnnnnnnnnnnnnnnnnnnnnnnnnnnnnnnnnaaaggaaacctgcaaatgtctacatatatgaagcttttaaaaagcacaattaggcaacatcattaaacatacattaaatgtcttttggtatataggactgtgtgtatgtgagtgtgctataacatgtaacttgtggatgttcaatgtgcatgtggaatccatccataattgtacatagggaaatacgtaacctttgttcgttcagtaactattatgcctatgaagatatcgcacattaagtctcagtagtgactcttgttgttaatatttgtattgtaagtgtaatatttcttttaaactataaggcatctttttatcc

SEQ ID NO: 36704 - DNA, 627 bp, Macaca Mulatta
  misc_feature (1)...(627): n = A,T,C or G
gggcaaatgggcaggtctggaatggggcacctttggccgttcggaaggggcctgaacagaatgctggaacccaggctggactcggacacactaaggttttgattttgaatttcagccttactagatgatctaacctaagagtgagctaaccacagggattcttttgtagaacactttttatgcagaggaagctattttttccagcatgtagattcttcccgtttttccgaggggtaatttccccgaattggcataccacagcgtggacagctgatatttcacccagctgcaggcttgtgggtgtggctctttgcnnnnnnnnnnnnnnnnnnnntgtgagtctggctgggctggtattttgtttgatcttcctggaaatgagcaatgactaacgctcacataactggttttttttggtttttgtttctttaaatctgagctgatgaatacatttacctgaggaactcatttcattttccttagaggggaagtgcagtttttctttcagcagttcggaatccaagcacttgatttgctgggtttggaaactccttttttggcctctgtgtgcttagccataacanttccattagcaaagaaggtaacaaagaaccaaaaaaaacttgc

SEQ ID NO: 36705 - DNA, 1325 bp, Macaca Mulatta
  misc_feature (1)...(1325): n = A,T,C or G
gtgatcaatggaggaagtgtttcacagtagacatgggaaactggccagatcaactgctgtcaccttctaagnnnnnnnnnnnnnnnnnnnnnnnnnnnnnnnnnnnnnnnnnnnnnnnnnnnnnnnnnnnnnnnnnnnnnnnnnnnnnnnnnnnnnnnnnnnnnnnnnnnnnnnnnnnnnnnnnnnnnnnnnnnnnnnnnnnnnnnnnnnnnnnnnnnnnnnnnnnnnnnnnnnnnnnnnnnnnnnnnnnnnnnnnnnnnnnnnnnnnnnnnnnnnnnnnnnnnnnnnnnnnnnnnnnnnnnnnnnnnnnnnnnnnnnnnnnnnnnnnnnnnnnnnnnnnnnnnnnnnnnnnnnnnnnnnnnnnnnnnnnnnnnnnnnnnnnnnnnnnnnnnnnnnnnnnnnnnnnnnnnnnnnnnnnnnnnnnnnnnnnnnnnnnnnnnnnnnnnnnnnnnnnnnnnnnnnnnnnnnnnnnnnnnnnnnnnnnnnnnnnnnnnnnnnnnnnnnnnnnnnnnnnnnnnnnnnnnnnnnnnnnnnnnnnnnnnnnnnnnnnnnnnnnnnnnnnnnnnnnnnnnnnnnnnnnnnnnnnnnnnnnnnnnnnnnnnnnnnnnnnnnnnnnnnnnnnnnnnnnnnnnnnnnnnnnnnnnnnnnnnnnnnnnnnnnnnnnnnnnnnnnnnnnnnnnnnnnnnnnnnnnnnnnnnnnnnnnnnnnnnnnnnnnnnnctcactctgttgcccaggctggagtgtagtggtgcaatcatggctcacagctgcctcgaccttctggggtcaagtgatcctcccaatccagcctccaaatttctttaaagaaaaaaatgcaagaaaggcaaaacaagatatttgtctgggctgagagggtaaagagaagctcaatctttgagctgagacacaaaatggaaagaagagnnnnnnnnnnnnnnnnnnnnnntctgcctttccaaaccttccccatctaagcgctttcaagatacgctgaaagtcacaaatcgaagtgtggttcccacggctttggtccttgtatgaaggtccctttgccagaacttacttcctttccagcccacatggttaacctgggggtccaggcagttctcaagggaaccataggattccatgtgatgtgggatcccagtttatgatctctcttctggtcacaagctgaattggacccaaatctgcgccctgaacttccctcttgccagatcctgcctagtcagtgccctcccctcgggctgggtgggcagcctgggcttcctgctgggacaggaccccttctcttcttgatctcactcccagaaaagacactga

SEQ ID NO: 36706 - DNA, 1087 bp, Macaca Mulatta
  misc_feature (1)...(1087): n = A,T,C or G
ggnnnnnnnnnnnnnnnnnnnnnnnnnnnnnnnnnnnnnnnnnnnnnnnnnnnnnnnnnnnnnnnnnnnnnnnnnnnnnnnnnnnnnnnnnnnnnnnnnnnnnnnnnnnnnnnnnnnnnnnnnnnnnnnnnnnnnnnnnnnnnnnnnnnnnnnnnnnnnnnnnnnnnnnnnnnnnnnnnnnnnnnnnnnnnnnnnnnnnnnnnnnnnnnnnnnnnnnnnnnnnnnnnnnnnnnnnnnnnnnnnnnnnnnnnnnnnnnnnnnnnnnnnnnnnnnnnnnnnnnnnnnnnnnnnnnnnnnnnnnnnnnnnnnnnnnnnnnnnnnnnnnnnnnnnnnnnnnnnnnnnnnnnnnnnnnnnnnnnnnnnnnnnnnnnnnnnaacaagctgggacaagagaccccgccgctaagcagggaaaaattctccaccaaccacaggaaaccttcctgtaaaaattttaagttcattccatacaaccactgtccacccatgggcaagggcgaaaattacggtgccaagtggggataaacggaggcgccaaattcaaggccgctttcctaaaattagcgcctatacccaattaggtgggtatttagggccggcgctttaaaaaaaactaccccccctcccccctccattcgcctaggaagataaaatccccgcgcccaaaaatttaaacagccccacaaaaaatcataaccgcccggtgtagtaaaaaaaaaccgggcgcgccccacaaaaaaataaatcgggagatacataatataaaagggggggacaaaaaaactactgggggcccccaaatttacctcgaggggcccacaataaaaaagaggtcggaaaacaacaaaaacatgtggggggagagggcccacccccaaaaaaccactttttaacacaaattgtgtcgttaacaaaaaaaaacggantgagtacacaacacaaagccggtttgcgagaaaccaccggagcgtttgtttaacaaaaaagaaaccaccatgttttgggggaagggtaaaacaaaataatcctctataaaacctgtaaatatttgaagaaacgctgaacaccctgtgatataccattttag

SEQ ID NO: 36707 - DNA, 145 bp, Macaca Mulatta
cagcaaaattgaaggcatagaaaatatgtgtaatctgcaaaagcttaaccttgcaggaaatgaaattgagcatattccagtatggttagggaagaagttaaaatctttgcgagtcctcaatttgaaaggcaacaagatatcatcg

SEQ ID NO: 36708 - DNA, 616 bp, Macaca Mulatta
catttggatatcattctaactggaatctaaaacaaatgggagctattaaatagaaaagagttaggatctgatttgtaatgtaatcctcattctggcagctttatagaagctagactccagagggccacactggcagaagggagaccagttaggaggctgttagaatagtctggacacaaggacagtgtgccttggattagaggacatggtaagaaggcggctggatgtgtgggatttgctacaggatagaacttaaggagacgaacttttcaatgggggagttttatatgcaactaatggtgaacttaggcagaggatggggaatagtagcatttaaaaccaaagaacatacaactctgagtggaatgtttcagctttgcaactatccactgataatttggctttaaccaagttatgctgtatcttcaaaactttcatttgtaaaatggtgttattaacattcacctttgggattgctgagagaattaaatgagaaaaactctgttaaagggtttaggacaataaccagcagacagcaaaatgctcaataaaggtcataattatttttctttgtaaaactttagatgtaaaaaaattcaatattagaaaaagttct

SEQ ID NO: 36709 - DNA, 629 bp, Macaca Mulatta
ccgcgcagccgcctcctggcctcgggcaccgcgcatccaggaaggaagcagccgccctcgccatggcctccccgcccgtctgcccctcggaggaggatgagagcctgaagggctgtgagctgtacgtgcaactgcacgggatccagcaggtcctcaaagactgcatcgtgcacctctgcatctccaagcccgagcgccccatgaagttcctccgggagcacttcgagaagctggagaaggaagaaaacaggcagattttggcgcggcagaagtcgaactcacagtcggactcccatgatgaggaggtgtcgcccacgcccccgaaccccgtggtgaaggcccgccgccggcgaggaggcgtgagcgctgaggtgtacaccgaggaggacgccgtgtcctatgtcaggaaggtgattcccaaggactacaagaccatgactgcactggccaaggccatctccaagaatgtgctcttcgctcacctggatgacaacgagaggagtgacatattcgatgctatgttccctgtcactcacatcgctggggagaccgttatacagcaagggaatgaaggagacaacttctatgtcattgatcaaggggaagtggatgtgtacgtgaacggagag

SEQ ID NO: 36710 - DNA, 872 bp, Macaca Mulatta
  misc_feature (1)...(872): n = A,T,C or G
agggtactactacgacctcgatgactcttacgatgagagcgatgaggaggaggtcagggcccacctccgctgcgtggccgagcagccgcccctcaaattggacacgtcctcnnagaagctagagtttttgcaactttttggcttgaccacccaacagcagagggaggaactgggtgcccagaagcgcaggaagcggcggcggatgttgagagagagaagcccgtcgccccaacgattcaaaggcagcggcagacgccttcnnnnnnnnnnnnnnnnnnnnnnnnnnnnnnnnnnnnnnnnnnnnnnnnnnnnnnnnnnnnnnnnnnnnnnnnnnnnnnnnnnnnnnnnnnnnnnnnnnnnnnnnnnnnnnnnnnnnnnnnnnnnnnnnnnnnnnnnnnnnnnnnnnnnnnnnnnnnnnnnnnnnnnnnnnnnnnnnnnnnnnnnnnnnnnnnnnnnnnnnnnnnnnnnnnnnnnnnnnnnnnnnnnnnnnnnnnnnnngaaccggccactcagcaagcctctctggatgtggagaagccggtgggggttgctgcttccttgtctgacatcccaaaggccacggagcctgggaagctggaacaggttcggccccaggagctgtcgagagtccaggagctagctcctgccagcggggagaaggccaggctgagcgaggcccctggaggcaagaagagcctgagcatgcttcactacatccggggcgctgcatccaaggacattcctgtgccgctgtcccacagcaccaatgggaagagcaagccgtgggagccctttgtggcagaagagtttgcacatcagttccacgagtcagtgctgcagtccacccagaaggccctgcagaagcataaagg

SEQ ID NO: 36711 - DNA, 442 bp, Macaca Mulatta
cccaagccctggcagtcctccacttccacaggcgaaagcagcaaggaggcacagaaggtgaagttccagctggagagggacccgtgcccacgtctggggcaaattctggggcagaccccgcaaaatctatccaggggcatggaaagcttcccagggaaggttctgggggcgacctctgaggagtcagaaagggacttgaggaagcccttgaggagtgactcgggaagtgatttattaagacgcacagagaggaatcgtatagaaaacgtcctgaaagcccacgtcggcaggaagttgggccagatcaacgagggcttgatccccgtgagtgtgcgtcgatcctggcttgctgtcaaccaggcttttcccgtgtctaacacccacgtgaagaccagcaatctagcacccccgaaaagtgggaaagcctgtgtgaacacagccc

SEQ ID NO: 36712 - DNA, 1165 bp, Macaca Mulatta
  misc_feature (1)...(1165): n = A,T,C or G
gggggttttgcaaaagctttgaaagaggatttggttgaaggcagccaaattctcttgtctggagcctgagaacaaagggcagataacaatggaatgtaaagaaacttatcagataaatttgtttactcctgtctccaaaaaccaacctttgatcattcactctacttgggggtcgacaatgtttattacccacagattgagtttgctccaagcttttgtcattaaatctgtgctaaataaatgtgaacatcgctggcttaaggggactgctatcactcttcggcccctagtgctggcaaaccccaaagcccagctctttcactaggataaatgtgacctaaaatacacacttacctatacatccagaaaatcaattcaaatctagcaagggaacagacattgagcaaagtaggacgcccacctatggtgatagtaactgcccctctattagtgatttcacataataagaaatccaccccaaattaaaagagaagggagaaaacagatagaatcagcggtccatatccaagggtagatgaatacacagtcagcgtaggaacacgataccatatggaggtggaacaataatacccatcaagttgcttttctgtaaggtgtgccacaacaatattagggcctattataacaagacaaggactaaaataaaagagagcaatattctccacaaacaatacacacatacggagggggtgcctttaaaaataacaagaagctttatatgttagggaaaagcgcctcatgcctaagatgactataagctaaacgctaaatggggttatgggtcatctatcgacgactcgagatattaattgtgaacgtaaaaacccattgttgtgtgggatctcgttttataataggtacttctcggtgtgtggtgggaaagacacaccttatacgacagatttttaagttaaatacaaagtgagatagatcagtaagattattagaagagggctagaatcttcacaaaatggaaatgcgtcaagagtgcgcgtgaggtgtcgtnccgccctgatctaaataacctcgcatgctgcggttgtgctcgttgccacagacataaaaaagttgtgggcgacgcccgctcggtgtctctctgacttagaccacattgtcgagagaaaggatgaagagagcgcgtaag

SEQ ID NO: 36713 - DNA, 137 bp, Macaca Mulatta
aaggcttatatgagtccagaaagtttgaagatcatgattccaaggatacctcttcaaaagcaacccagagcaggaggaggtaattttcccattttccctgtctttgtcatttaggagtgtaatttgcacttgtttga

SEQ ID NO: 36714 - DNA, 1327 bp, Macaca Mulatta
cccaggctgctccagaaacatgagcacaaacgcctcagcctcctcccccggcggcaccggcaccggcactggcaccactaccggcactggcacgactaccggcactggcaccactaccggcactggcaccactaccggcactggcacaactaccggcactggcaccactaccggcactggcaccggcaccgggcgcgaggcggagggcccgcccgaagccgggggcacaacttcccaggtcccgaacccggcctccaacttggacgacacctcgtacaacgcgtccgaatggagcatccgttctgagtggcggtcggtctcggatccgctagccagttcccagtggagcacgtcctcaacggccgaggccgcctcctggacctccagcataccctcccgaatcagcacccccggtcttagcgaaagtatggactccaactccaagagtggcctccgggatttcagcgcttacaacccgagcaatcggatccccgagtctaccacccgctcgaactcctccgatgtggccgccacagactccaaccaggacaccggcattccctgggtattagtaacaggacctaccccgcccgtaaactcccccaacgagtcattgcaagggtctgtcttctcctcagggttcagccccccacagggttcggtaaaagtacccaacctgcccccggattccgtcctgagctcagtgcccggctacacttggatatttgtacggggacctcctatacccaatgacctttcgcaagtgtcaatacaagcacctcctacacccagtaacaccccccgagtgtcagtacaagggtctgccacatcctcagtgcccaacttcccctgggatttggtaccaggaccacctctgccggataacatctccccagtgtcgccacaagcacctcctgcaccccataacatcccccaagtgtcaaggcaggcgtctacccccacctcagtgcctcacactccgcagggttcaatacaagaacctcctgcacccagtaatcctttccaactgccgacacaaggacattctaaacctaataactctcgcagagtgtcagtacaagagtccgccccgctctcagtgcccagctccccccgggtatcagctgaaagatcagctccgcccctgggcgctcccggagtatcagcaaaagggttcgccccgcccacagtgcccggctccccccgggtatcaaaagaaggatcggctccgcccccgggctccccgggggagttggtagaagggtccttcccaccctttgccgtccgcactcctgtgcctccgacccaggagcgtgtcagccaaagc

SEQ ID NO: 36715 - DNA, 71 bp, Macaca Mulatta
tggattaaaaaacctgatcacttaccttggtagcaccaagaaccaatttatcaactgctttctttcgacag

SEQ ID NO: 36716 - DNA, 934 bp, Macaca Mulatta
gcgcaacttccccttcaccatcgcctgcgatgcggccctcctgtgcctctcggcctccatcatctaccccatcacctacgtgcagttcctatcccacggcccttcccgcgaccacgctgtcgccgccactgtcttctctggcatcgcgtgtctggcttacgccaccgaagtagcctggacccgggcccggcccggcgagatcactggctacatggcctctgagccggggctgctgaaggtgctggagaccttcgtggcctgcctcatcttcgtgttcatcagcagcccctacctgtaccacaactggctggccctggagtggtgcgtggcggtgtacgccctctgcttcgtcctggcagccctcactatcctgctgaacctgggacactgcaccaacatgctgcccatccccttccacagtttcctgttggggctggccttgctgtccgtcctcctctatgccactgcccttgtcctctggcccctctaccagttcaacgagaattatggtgtccagtcctggcaggcgagagatgtgagctgcagcgacagaaacccctaccttgtgtgtatctgggaccgccgactggctgtgaccatcctgacagccgtcaacttgctggcctatgtgggcgacctggtgtactctgcccacctggtttttgtcaaggtctaagactcccaaggggccccatttgcctctccaacctcttcatccttctttcccgagttttcttactgagtattcatttcctgtgttttcttcttccctatctcccctccctcccctttttctttccttcccaattcatcgcactctttcccagttctctgatgtatgttcttccctttcctctgctgtttccttgctattttgttctgttgcccacaacctgttttcacccctaagctgtttctctttttccactctctt

SEQ ID NO: 36717 - DNA, 138 bp, Macaca Mulatta
tatgaggcagggcagattaggcggcacctgccatagtcctgatgaatggaaataagggctagaacctggggtgtactgagaatggaatggcttgggcaggtgctgagtcatttcaaagacaactagaggatgatgatg

SEQ ID NO: 36718 - DNA, 182 bp, Macaca Mulatta
agctctttgtggtgggaatataactgcaaatgaatggcaccatttattctcctgggtatcccgatgaatatccaaattttcaagattgtttttggcttgtaagagtaccccctgggaatggcatctacatcaattttactgtccttcaaacagaaccaatatatgatttcattactgtatgg

SEQ ID NO: 36719 - DNA, 757 bp, Macaca Mulatta
ggggagcagggtgatcatacatcccagtttgtctgggacagtcctgatttacatctgttgtcctggtgaaattattactaatgctcccttttcatctcaatgtcctggtttggatgaaaaaaattacatggtcaccttagtagtaagggcgatgaaaataagtgtgttatcaaaaaacaaagagcatctatatttaaaaagaattgatcatttctaggctcagataaaaaacaaaatcccaacgttagtgggaacgtatacatgcaggttaaattactaccagtaattgtgaaaaacaagaaaatagaaaatgttccagaacactgagcttgggcaaaaggctaaatttaaggggtaaaagctgaattccagaagccacacaccaggaaatttacctttgaatcctggaaaatttctgaatggacacttgtgttttaaatcagaaagccatgctcattttgaagtcagaattgatcactcagaattgatgacctgttctattttccttgctgtgtgcatagccaggaatgccatgttcgattccgcttcctgggcagtagtcggggcaggaaaacaaggcgtcagaattctaagattgatataatcctatgtaagcaagttttatacagggcaccaagacagtaagcatgtggattccttccctggtagccgtggccaataagttaaacacatggggacatggttgttatttaccctgaaaaaactagaagctgtgaaggaaaaaaacaggtccacc

SEQ ID NO: 36720 - DNA, 699 bp, Macaca Mulatta
gataactagtggaaattaaagaaataagggttttatataataggccccacctctcaaaatatttttagaagtctttttgtaaactaatttcttttgatcactattttgcatcagtaaaatgatttttttaaaaccaataaatcatcaattattagaaatagttgtctcacagtgatactggtttttcttttgtgctgttatgatttaacattgacaggaacacttttaaatccttatgttcaggtgtttgtaacttggccttataattaggctgaattatggcttcaaggtctagaatttatgtgtatgattcacagcctagcttctattttcatttgaaaatacagatttttaccaactttggattcttttttagctatatgtttgtctttcctttttaaattgttcaaaatattttttaatggtcaagttactaacacttgaaaatcagatactgcaccaaatacagtattttttcatagtgtttttaatgagtgcatctattattactactgtgcgagaattcatgttaccagtcattgttatattacaaacagacttgcatgattaaccagttacacttttttttttcaaattggagtatatatgactcagttcagactggtctctcttatgtgaatgcacacatgccgaaatgcagagtccattttacatgcccataaagacctttgtaaagaa

SEQ ID NO: 36721 - DNA, 766 bp, Macaca Mulatta
ggggaaggtgctgtgtaatcattaaggagaggaggcatttggagctgctaaaatgccggattacctcggtgccgatcagcggaagaccaaagaggatgagaaggacgacaagcccatccgagtgaaagaatacaaagcaaaatcagcaaagagaaaagacacatggggccaagtccaggagaaaccaggcacaagcttccaaggatcctcttccagtggagtcacacaggatgcgcttaattcccccagcaacagctctggatgagggggatattgccttgctaaaaacttatggtcagagcacttactctaggcagatcaagcaagttgaagatgacattcagcaacttctcaagaaaattaatgagctcactggtattaaagaatctgacactggcctggccccaccagcactctgggatttggctgcagataagcagacactccagagtgaacagcctttacaggttgccaggtgtacaaagataatcaatgctgattcggaggacccaaaatacattatcaacgtaaagcagtttgccaagtttgtggtggaccttagtgatcaagtggcacctactgacattgaaaaaggatgagagtgggtgtggacagaaataaatatcaaattcacattccattgcctcctaagattgacccacagttaccatgatgcaggtggaaagagaaacctgatgtcccatacagtgatgttggtggcctgtaagaaacaaaattgagaaattggccagaagtatttgaaacc

SEQ ID NO: 36722 - DNA, 3509 bp, Macaca Mulatta
  misc_feature (1)...(3509): n = A,T,C or G
tgggccattataagtgactgtggccccactgaaatgagtgagttccctgatcctctcacagagcatgcgacaggggtctggctcacctgttcagttgccccactgctcaaacccttagggggagaatacagacagtcaggtgcagaggctggggcaagtgctttggccccttagccctgcagtagtgtctaggggtggggtgcccgcaaccccagtgttacaaagttctttcagctttgcagtccacagacagctggagtgttaatcagctcaatggaccctctgccttatagcaagggcagaaggccagagtgacagctttctgtattccaagctcttgcccagtgtcctagaaaaataagatcatacaggggctcgaaggacgagtgcagggttttactgagtagtggaggtggctctcagcaagatggatggggagtgggaaatggggatggattaggaaggtgaacttcctctgaagtccagccacccagtggctggactcttcaacctcccccagccaagctcctctcagcncccagatggtcctcnnnnnnnnnnnnnnnnnnnngccacatcatttcaccatctgtctgctggtcagctggcttgctggtgtgctggtctgttggtctgctggtctgcttctggaacctgggcttcagagtttatatgggtgcaggatagggggtgttttgggccaaaaggcagctttttggacatgaaaacggaaatgcctgttccatttagggttgcaggtcttcaggcttgagggtgggacctttgcgcaggaactaccctcttctacccagtgtttccctgtctcctgtccatatcaccagtatacacagtctcaaggagtnctgagaaagtgtgcccaaggccgtcagattcagtttggttctgcatgtttcagggaggcaggagttacaggcaaaaacataaatcagtacatggaaggtatacattggttcagcctgaaaaggcaggatatcttcaagtggggacttgcagggcatagtttggttcanagattctttaatctgcagttggntaaaggaacaaanctttgtacaaaagcttagagttagcaaaaagaaatatttaaattaagataaggatgctatgtcagagtcagccacaaaatgacctgtttagcaagattaatggcctacaggtgtgacttaacctttgccttgcatggcctaaggtcttgtttataatttagtatcttattgcccaaagagtctattttgtcggtcttatgatctctattttaacattaatgctggtcacttgtgactaaactccaaaggggaggcatatctgacttgccttcccattgtggccaggaacccaagttttcaagtttctctggagtccccttggccaagaaggggtccattcagttggtttggggagctgaggatttnatttttagtttatacagggtcgtatgagattgttaggacaggaatgactaatgttttcttctctttctgtttcagccacagcagctatccttagcagagcatcctggagtctgcaaagtgttaatccagncctaaagacaagtaagaatttcagttctttttcttccttcantgatattttccatgttttagtgtaattaagctactatccttctctgttttatttgggatgttagtaactggaatagcgactgagatgaaattctataggcaagcaaaacattttttaaggatttgtttcttaacttctgatatagtttggatgtctgcccttccaaatctcatgtcatccccaatgttggaagtggagcctaggagatgtttgggtcatgtgggcagattcctcatnaatggtttagcaccctcttcttcgtgctgtcctcaccatagtgagtgagttctcatgagatctggttgtttaaaagtgtgtggcacccccctcttcaatctcttgctcccactcttgccctatgacagacctgttccacttcaccatgattataggcttcccgaggctgtcaccagaagcagatgctaatacagcctgcagaactgtgagccgttgaaatcatttttctttataaatcacccagcctcaggtacttttttacagcaatgaaaacaaactaatacaacttctctgcaaggctgctttttctatttttgcttatgcttagaggttaagtaaggccaaattaatgaaggaggaaaaaagaggaaatgatacatcatggatcaacaattatttattgaatttaggaaactgcctctttttacaaattctttttaaaattattatcattattatcttgaagtatttatctaaggattacattgatagaaagttaaacttgtctctccaaccagattgccttaagcttcaggattatgccttcttgtaagctccttcttactcttaaaatgactttacacatttccccctggtcctttgacaatctcctcttcagtcacaggacagaaccccaacatcaactctgtggggaagcttctccaaattctctaggcctgaacaattntctgccttctctgcttccgtggaactttgtccttcactacatgatagcgtttacctcctgacattttagtgtgtttgttagccctgcatatagaactcaccagattgtgtggactgcatgaatgaattaattctattgaactttaaggcaaagcctaaattttatgcttcttctaaatcccttacatctcctaaaaaaattctgatccatagtagtaggtacttgtttaattaaattttagggatggatgtttttcatcagtggaagtatatgctagagtccatattatgcaataagggaagggaagacagagtacctaattcagttaagatattgctattcttgttagtaattctggagtcatgaaatcataatttgaattttatgactaaattgcagaataaatttccaatgtgagatttaaacattatttccttggaggtgaccaaaaaggagagttggtactgtttttaagaactgtcattcaattgtcagttgtgccagagcacaaatcctttatagccctcctgtttaagaagcatctgacatgttaagctgcttcctaattaacacaaaggttgtaaaagaagtggctgtttggttgtgtttgggttatcccagccagtatattccaaagcttccttcattcaacagatgagtgatctcctttatattctgtaaggaaatgagaagtcatcagttaaacatgcattactaatgctacatgcttcacattgaaaccatcctcctgacacataatactttaccctctgctgtcccccaaagtggcagtaggatttctgtaagtcattttctttattaggtcacaaggtctaagaagcctaaacattgtgccttgttgaaaataacctctaggtatggaggacgtggtgacaacttcctaccagtcatttggcatatgtggaattctggcttctgatacattagacaactagctaatatccttcatatgtggtaa

SEQ ID NO: 36723 - DNA, 810 bp, Macaca Mulatta
  misc_feature (1)...(810): n = A,T,C or G
ggcattttgtttatgtattaatctgtaaatggtatttgggttgttttcaccttttggttattgtgaataatgctgctataaacattggtctgcacatctctcatcaagtccctgctttaagttcctttgggtgtatacccagaagtggaattgctggatcatatggtaattcgaagtataatttttggaggaatttccatactgctttccatagtggctgcactattttacattcccaaaggcattgcagaggtgttccattttttccacatcctcatcaacacttgttatttcnnnnnnnnnnnnnnnnnnnctatttttatgggtgtgaggtggtatcttactgtgttttcggtttgcatttctctaatgattagtgatgtgttgagcatgttatgtgtttatcggccatttgtatgttgtttttggagaaatgaccgttgaagtcttttgcccatttttttaattggttgatagggtgtttagagtttgaagtcagcatttccctttactagtattatgattttaaaccaagccatttaacctcctttgtaccctcaaattctctactcccaaaatggggataacatttttttctgtaaccttccttaaaacaaaatgctagaaaataaggtttgaatgtgggaactgccctaaatctagccaaactaatggaatttgttgctggttaaaaccagctaatcctttaatcttttaanccagggccnnnnnnnnnnnnnnnnnnnnnnnnnnnntgaattaaatttcnccaacatttaattttgagnnnnnnnnnnnnnnnnnnnnnna

SEQ ID NO: 36724 - DNA, 161 bp, Macaca Mulatta
gaggggagcactgtgtctctgtgtaatatgaagtctgagaccttccggtgctgggaacacacaagagttgttggaagttgacaagcagactgcgcatgtctctgatgctttgtatcattcttgagcaatcgctcggtccgtggacaataaacagtattatc

SEQ ID NO: 36725 - DNA, 414 bp, Macaca Mulatta
ctacaccttgccaggagccatcagccgaaggatcgttgtgggctcatagaggatcatggcggacccagatcctccccatatactaatcctctcttcctcatctgggagcttctaagaacatgtcaaacgcatggcactgtgctgagtgctaaggggacagatcaacccttcttggaagagatggaaaagaaacattttctccctgctccaacccccgcctccaggtttcaaacttatgagacataaggcatgttttatcccttgggcagcatgaaataaggcactttcacctcatggtaatcaacagtgacctcaaattaacttagatcaatgttatctttatgtaattgcttatatcctgagaggtttagttctgggtcagagattttattagaagtactttattttaaataa

SEQ ID NO: 36726 - DNA, 460 bp, Macaca Mulatta
  misc_feature (1)...(460): n = A,T,C or G
gccaggatatctacctgagcctgttggtcaagctgtacaggtttctgacaaaggaaccaactctacattcaaccaggttgtgctgaataggttgtttatgagtgacaacaaccggccacctctgtccctttcccggatgatccagaagatgaggcttcctggccgggaaaacaaaacagccatggttgtggaggtcataacggatgatatgagggttcaggaggtgcccaaactaaaggtgtgtgtgctgcacgtgacagccaggcccgcagccatatcttctnnnnnnnnnnnnnnnnnnnnnnnnnnnnnnnnnnnnnnnnnnnnnnnnnnnnnnnnnnnnnnnnnnnnnnnnnnnnnnnnnnnnnnnnnnnnnnnnnnnnnnnnnaccctacatccgttccaaggccggaagttcgagtgcgctagagactgaagggtcagccgaagatacaaaaac

SEQ ID NO: 36727 - DNA, 806 bp, Macaca Mulatta
  misc_feature (1)...(806): n = A,T,C or G
ggggggtaacacagtaaaaccctgtctctacaaaaaatataaaaattggccgggcatggtggtgtgtnnnnnnnnnnnnnnnnnnnntggagtctgaggggagaatcacttgaacctgagaagttgaggctgcagtaagctgtgttcctgccactgccctcaagcttgggtgacagagtgagactttgtctcaataccaaaaaaacccaaaaaaacttaaaaagatattttgttggccgggcccagtgtnnnnnnnnnnnnnnnnnnnnnnnnnnnnnnnnnnnnnngggcacatcatgagatcaggagatcgagactatcctggctaacacagtgaaaccctatctccgctgggtgtgggtggtggcaggcnnnnnnnnnnnnnnnnnnnnnnnnnnnnnnnnnnnnncaaggcgcgagattggtgtgaacctgggaggaggagcttgtaatgagccgagatcgcctcaatgcactaaaacctgggcgacagagtaagactctgtcccctaaaatttaataaatatataataaaaaacttgttggccgccttggtccttcaaaaagttttctaaaccttttcttttggacccgcgggccccatttaggtaagtgaaaaatgggtcaaaaactttttcctaaggaaaaccggggtcaatgactaaggggctggagattctccaccaataaaaaaaaaccccggggtggaaaaacaaaacggtttctaaaacaattccctaaaaggaaatttccgaaggttcatttactgggaattcatcccaattggtattactaggccaagcttg

SEQ ID NO: 36728 - DNA, 2121 bp, Macaca Mulatta
  misc_feature (1)...(2121): n = A,T,C or G
agcagcccggtgacgtggccagtttctgttttgagacgaacggcgaagactcgcgttgggctttcgttctagggctagatttggtctctgatcgccgagaggtagagcaggggctctgggaccccggcaggggtcctgtcggaagccggccgcgcttctctttgcgttcccaggaccctggcgttgtctctagttgctgcttgtcctctgtttgcttttggtttgtttcgtttgccccctggggccttggtaaaaccaggcaccgaatcgcttgcacacagtaggagttccagtccgtgcctgctgtctcctcagcagctggggttccgaggagaatgccctgcaagatggctccatcggccatggcgctcctgagaggctgtcagtactgagtcaccgatctacctcattcgggtgggcagaacttgtgtgtgccatgcgagtggctcctgaccgcnnnnnnnnnnnnnnnnnntcctgtagccattgcgtctcctcacacgcagggagcagagtagaaagaggctctgaccccttcccttgtgcccgccgggcctgccgcagtnnnnnnnnnnnnnnnnagtagcccgcctgagaaccggtgccagaggcannnnnnnnnnnnnnnnnnnnnnnngaggcatgctccggctcctctgtttgagggctgttgttttgatggatcgtgtgcttttccctaaccacttatcacttgctgtcatctgttgacttaggcccagtctgcagatgtgtgtagtgctcctttttgggttagctttggcagtattgagttttacttcctcctctttctagtggaagacagaccataatcccagtgtgagtgactttgattgttacatttattaccgttttggctgggggttagatctgacaccttcacctttgaagagnnnnnnnnnnnnnnnnnnnnnnnnnnnnnnnnnnnnnnnnnnnnnnnnnnnnnnnnnnnnnnnnnnnnnnnnnnnnnnnnnnnnnnnnnnnnnnnnnnnnnnnnnnnnnnnnnnnnnnnnnnnnnnnnnnnnnnnnnnnnnnnnnnnnnnnnnnnnnnnnnnnnnnnnnnnnnnnnnnnnnnnnnnnnnnnnnnnnnnnnnnnnnnnnnnnnnnnnnnnnnnnnnnnnnnnnnnnnnnnnnnnnnnnnnnnnnnnnnnnnnnnnnnnnnnnnnnnnnnnnnnnnnnnnnnnnnnnnnnnnnnnnnnnnnnnnnnnnnnnnnnnnnnnnnnnnnnnnnnnnnnnnnnnnnnnnnnnnnnnnnnnnnnnnnnnnnnnnnnnnnnnnnnnnnnnnnnnnnnnnnnnnnnnnnnnnnnnnnnnnnnnnnnnnnnnnnnnnnnnnnnnnnnnnnnnnnnnnnnnnnnnnnnnnnnnnnnnnnnnnnnnnnnnnnnnnnnnnnnnnnnnnnnnnnnnnnnnnnnctgacctcccgagatacactgtccactttggccgtggctgtgaaccgtacagtggcccatcacttccctcggttactctacttcactgggcagcggggggcccgggctccagcagggatgcaggtggtgtctcatggggatgagagaaccgcctggctcatgtcagagaccctgcgccaccttcacacacactttggggctgactacgactggttcttcatcatgcaggatgacacatatgtgcaggccccccgcctggcagcccttgctggccaccttagcatcaaccaagacctgtacttaggccgggcggaggagttcattggcgcaggcgagcaggcccggaactgtcatgggggctttggctacctgttgtcacggagtctcctgctnnnnnnnnnnnnnnnnnnnnnnnnnnnnnnnnnnnnnnnnnnnnnnnnnnnnnnnnnnnnnnnnnnnnnnnnnnnnnnnnnnnnnnnnnnnnnnnnnnnnnnnnnnnnnnnnnnnaggggcagcagtatcgctcatttgaactggccaaaaatagggaccctgaaaaggaagggagctcggctttcctgagtgccttcgccgtgcaccctgtctccgaaggtaccctcatgtaccggctccacaaacgcttcagcgctctggagttggagcgggcttacagtgaaatagaacaactgcag

SEQ ID NO: 36729 - DNA, 892 bp, Macaca Mulatta
  misc_feature (1)...(892): n = A,T,C or G
ggggccatcatagctcactgcagcctcgaccttccgggatcaagcaatcccacttcagcctcttgaatagctgggactagaagcatgcannnnnnnnnnnnnnnnnnnnnnnnnnnnnnnnnnnnnnnaggatctccctatgttgtccaggctgggtctcaaacacctgggttcaagcgatcctnnnnnnnnnnnnnnnnnnnnnnnnntnnnnnnnnnnnnnnnnnnnngtgcccagcctnnnnnnnnnnnnnnnnnnnnnnngagaaaataattcttctgtcaaaggaggttaaattttagttgatagaggacttaagtgcattactttattagggtttatgtaagtggtccagtgtattccggttatgggtcaaaaccatgtacttcatattcgtcggaataaaatgaaactgttgataacacctgagaattttttttatgtaaatgggtcaattgtgagtggtaatccttgagtatacttaaattttagttttgtatgtgagaatgatttggtatttgattgtttgggacataatattaatcacttttggccgtgtgtcttggaaagcaaagtttgagagctggttaagcgtgctggagattaaatttctgctgggccgagaaacgttgataatttggtcttcgttgtgcggggttgtctttgggggtgggcaaatgagccggcattctccacgtgtaaggggccgtgaggagaaatggtgtgcatgacctgggttttaggcctgcnctttagggaagaggaaaggaagcgttnagatagaggactttggccctaaatgagataaattgcgaactgnggtgggggtagatggcggacgacaagagattggtttatgtgttaagcacgcgttgcgaagagtgagagttn

SEQ ID NO: 36730 - DNA, 469 bp, Macaca Mulatta
agtgtccagagaggaggcatgtgtcaccctccctgttccagtagctcaggccaagctggacagaagaaacagcccgttgctccagagccccagagcctcaaggacaggcgggcatcatcctccttggtcttgaaccttaagccaggttggggagggacacggtcagagcctgcccagtttcagggccactgtgccactggaatctggttgaacctactaattggagggctcagcccagaactcagacagctgttcctcacttaacctgactctgctcaagaaggtgcatttcctggagagctgggagaaggggggaggctggacggggtctgacacctacagcccatacttcctttgccattctgggttgaggtcaccgagacccggaacgtaggggatgactctgggtaatactccttcttttctaggagagctgcttcttagaattggacaaagtctggttttgtgg

SEQ ID NO: 36731 - DNA, 706 bp, Macaca Mulatta
atcaacatcagtgggctccaagctgagactgagggcctcaaagtccaaggggcttccctggaagctgtcatcacggatgctatgcagcatgtggagctggctgttaaggccaccaagctgttggagctggaggccatcctgcagtgagccaagcagaacatggtgcgacagctgcatgagcaccaggagatgatgaatgtcaagctggccctggacattgcgattgccacctacaggtagctgctggagggagaggagaaccagctgaagtctgggatgcagaacatgagtatccatacgaagatcaccagtgtctgctcaggtgggctgaacttggcttacagaggcctcacaagccctggccttacctatggcctgggctccagctttggctctggcatgggctccaacttcttcaggagtaccagctcctgtaggactgtggttatgaagattgagacccacgatgggaagctggcctctgagtcatctgatctcctgcccaagagaatggccatggcagcccctcccagcctaccccatcctgtggctgccccatggcctgtggcagaggctcttgttcagtggagcagagggaacaggagacccacctgaggcagacactggtggtcactcccaccaagagtgggttgagggctaaggtcttcactgttgtcagccctaacgttcggcctacccatcaggg

SEQ ID NO: 36732 - DNA, 513 bp, Macaca Mulatta
agctctgttctgtatctttgaggggatgaggggaggagggtgggcacggttcccccgatgtgggtgtctgaggcgaagaagaggatggcggaggttgcagccaccaaccacaagagttccttagaggggtcacagtctctaggaagtttataggaagccagtcagcagtagagagggtgaacgcggtggggcacatcccgcggctgggcttgagtgggctgcttgggggttatggagagaagataaaagtgcctgtgggaccacagactctcgctgtggtggagctgggccctcttaccctcccaagcctcgctcttcatcccatccctgggggccaggggtgagggcggcaggaacctcaaggctctgagagagtgcgtggtgtgtgttgccattttggtctcatctctttctcagtctctctttgcctcactttggatctatgctctgtgcatctgtcttgcttctcagaatttcttcttttcctctttttttgtactaccctgcgctttg

SEQ ID NO: 36733 - DNA, 787 bp, Macaca Mulatta
  misc_feature (1)...(787): n = A,T,C or G
ggataattgtcttctatgtagaagttctcatcttttattagccttctttctaggcacttgttgttagtatatgaaagatgtggccaatataaggaaatatataatgggaataaattggacttatctggaaaatttcttattttggattatatatatatgaaatcagatcatttgtggataatgatagtttcgttccttcctttctaattcttctatctttggtatcttctgtgccttactgaactgttgatgctaccaggataataaaagcagtgataacaggccttgttgtctgattcctcactgcgcagggaaagctttcattattcaatatgatcaattttgggagataagctttattattctattccttttagtttgcaagagcttttgttgttgtttttttaatcatgcaagggtattgtatttcatcagatgatttttcctacatcttttgagatgatataatttttctctgtgactctgttagtggagtgaattacaagattttaaaatgttaaaccaatcttgctttgttggaacaaacacatttgaggatatattattgttgtgtattgctatagagaagttagtttcattctaactgttggttcctttggatgtaaatcatgtgtttttccctggctgctcatgaaattttcctgttttgaggttttttgcacatccactttggatctggtgtgtgaagtttcccaatttagtttggcttngaattcattggaactttcttaaatcccgtgggaatggatattttgccgggggcccc

SEQ ID NO: 36734 - DNA, 498 bp, Macaca Mulatta
  misc_feature (1)...(498): n = A,T,C or G
agacaactctgccctgaagcagcaggagttacccgcccaccggctgtatntcacggccaggagagtcctcttcgtctttttcacaacaggaatattctgcctttgtatgggcatcatccttatattgtctgcaaggagcactcaggaaatagannnnnnnnnnnnnnnnnnnnnnnnnnnnnnnnnnnnnnnnnnnnnnnnnnnnnnnnnnnnnnnnnnnnnnnnnnnnnnnnnnnnnnnnnnnnnnnnnnnnnnnnnnnnnnnnnnnnnnnnnnnnnnnnnnnnnnnnnnnnnnnnnnnnnnnnnnnnnnnnnnnnnnnnnnnnnnnnnnnnnnnnnnnnnnnnnnnnnnnnnnnnnnnnnnnnnagtttaccaaaagcatgtctcattgctgtatcctcttgcatccaggctgttgaggactgtgccccatttaaaatgtcctgcaataagacaaaaatagttccttgtggtgctattgccaacagcatgttcaat

SEQ ID NO: 36735 - DNA, 673 bp, Macaca Mulatta
  misc_feature (1)...(673): n = A,T,C or G
ggacaccaaagtgacatgtgagtgagaggaagccctaatttttttagttcacctcttccatcccaagaggcttttgaaaataaaacttccagttatatatagattatctctaaaaaaattcctgtaagacaatctcttctatctcaacatatttctactgtcattttatgcctcttcttagcatttaacacacccactcgtcactaatgcactggaagggcatctaattttcgaaaagggaccaattttttaaaaaaatgtcaaaagggttnnnnnnnnnnnnnnnnnnnnnnnnnnnnnnnnnnnnnnnnnnnnnnnnnnnnnnnnnnnnnnnnttttcannnnnnnnnnnnnnnnnnnnnnnggagaagaaannnnatagaagggccccgcnnnnaaannnnnnnnnnnnnnnnnnnnnnnnnnngannnnnnnnnnnnnnnncggggcggggtgcccccccccaaagaaannnnnnnnnnnnnnnnnnnnnnnnnnnnnnnnnnncacggagnnnnnnnnnnnnnnnnnnnnnnnnnnnnnacccgcgnccccctttccctccacaataaaagaattttttgcgacttcgagaaaaattttantaagggaaggcccccccgccgcccnnnnnnnnnnnnnnnnnnnataaaaacacacagtatatttttt

SEQ ID NO: 36736 - DNA, 711 bp, Macaca Mulatta
  misc_feature (1)...(711): n = A,T,C or G
gggcagggagtgtgcagaggccaggttgtgcagggaaggggtgggcgtgcagagggttttcaggcttggcgtagggcatgcaccagggctgcgggaagccatgggagggctttaagcctgaaagaagagacatgatcaggtttgcattttagaaggaccccattgggccgggtgtgnnnnnnnnnnnnnnnnnnnnnnnnnnnnnnnnnnnnnnnnnngggcacatcatctgaggtcaggatnnnnnnnnnnnnnnnnnnnnnnnnnnnnntccccaannnnnnnnnnnnnnnnnnnnnnnngccgnnnnnnnnnnnnnnnnnnnnnnnnnnnnnnnnnnnnnnnnnnnnnnatgggtgnnnnnnnnnnnnnnnnnnnnnnnnnnnnnnnnnntagcacgnnnnnnnnnnnnnnnnnnnnnnnnnnnnnnnnnnctacccgggccaagtggcgggcgcctgtaagtccctgctactccggaagcttgaggcaaggaaaatgggcttgaacccccagaaggcggaaggtttgcaaggaattgttgctaatttggcatttcccaaccctgggggcccaccaaaaagtgggaaacctccttgttcttcccggaaannnnnnnnnnnnnnnnnnnnntataaaaagaaaataataaaaaacattttgtccggggcgccgccccttctggggcccccnnnnnnnnnnnnnnnnnnn

SEQ ID NO: 36737 - DNA, 264 bp, Macaca Mulatta
ctctactccacgactaggaatcaaaagggcaagttaagtggtcgctctcacccatgcttatgtttatacagctggtttgcaggatccgtgtgcagtggctgacggttttgtctgtcctattttatcttgtaaaactaagcccagtgctaccacctgaagaaagtttcttatgtttggtactattgcacaataaactatcctgcccatctgtgtcccatcaaaaatgggactgcaaggccaatctctgtcactccgtccatccaa

SEQ ID NO: 36738 - DNA, 1300 bp, Macaca Mulatta
  misc_feature (1)...(1300): n = A,T,C or G
ncagagagaacgaggtgctcaaagtccagctgaagaaatatgtaggagctgtccagatgctgaaaagagaaggtcaaacagctgaagnnnnnnnnnnnnnnnnnnnnnnnnnnnnnnnnnnnnnnnnnnnnnnnnnnnnnnnnnnnnnnnnnnnnnnnnnnnnnnnnnnnnnnnnnnnnnnnnnnnnnnaggtggcagagatgcatggtgagctgattgagttcaacgagcgcctgcacagggccctggtggccaaggaagccctcgtgtcccagatgaggcaggagctcatcgatctccggggaccggtgnggtgcctggagatttgagtcaaacgtccgaagaccagagtttgtcggattttgaaatnatcaaaccgggcgctgatcaatgtctggatcccctccgtgtttctccggggcaaggcagcaaatgcattccacgtgtatcaggtncaggtctacatccggataaaagacgatgaatggaacatctatcgccggtatacagagttcaggagtttgcaccacaagttacaaaacaagtaccctcaagtgagggcctacaacttcccacccaaaaaggccatcggaaacaaggnaggatgccaagtttgtggaggaacgaagaaagcagctccagaattacctgcgcagcgtcatgaacaaagtcatccagatggtccccgagttcgccgccagccccaagaaggagaccctcatccagctgatgcccttcttnnnnnnnnngatctcagtatttggaaatggccgcgatagttcacttgaggagttctcattctcttagaggcatccnnnnnnnnnnnnnnnnnnnnnnnnnnnnnnnnnnnnnnnnnnnnnnnnncatcggctgaattccccggtgaaagcggagttagcaagttgctcctaagatgctcctgatgttgacagtgtgagcaggaggcactgccccatctgcaagtcagtgtcccccatcccccacagggctccacagcccaggcctctctggtccagtgtttcccaaacattcgtgtgctgaattgtaaaaacagcacgttaatgccagcctctcggcgtgatgtgaatctcagccacgctggttgccatcagtcagcgctgagagagaaacctnnnnnnnnnnnnnnnnnnnnnnnacagaacacaaggttcaatgtatggactttacagaacaagaatttcagtgggagactgtggcaaaagacacagtgtcgatgctggaattttcactacatgttggtctagaccccagttgaaattaaacagctcttttaataaaa

SEQ ID NO: 36739 - DNA, 193 bp, Macaca Mulatta
  misc_feature (1)...(193): n = A,T,C or G
gtctagacatgaagaaaagcatntttatttgtttttttcctcatctgagcctttgccaactgtgcaactctctcctttggttatcttgcttttgccagtatatagctaagtttttgtttcattttaattgtttttttttttcgccaaccaccttgtcaggaaaggatgaaccacacattaaaatgctcattct

SEQ ID NO: 36740 - DNA, 770 bp, Macaca Mulatta
  misc_feature (1)...(770): n = A,T,C or G
gggagaggctaccatttccacccactggctggagcagtaactcagagagtttgacagtgggagagagagtccacaaaaacagggaaagggaaatctgaatcttcccccacaagaaactgactttatttggagcaaagtgcaaggaagttcaagcctaatggagattttggtagcaagtaacaaaaaggttagtagctctattatagctatatgctaaaccataggccagctagtttaccatagagaaccaggaaaacagccagccaacaagagcacttctggggtcagaacaaacctcaaatactagactcaaaaaagtatccctgactaaatttaattggaccagagtgctgagcaacttatcctcagggcattgccaaaaagaacagagcaatcaagaattagagcctaccagctgagtatgacaccaaacagcgcagatagcttaacagagatcaaggagagagtcaaggaaaggttggttaaaattatcatcccaacagtgactgtacacatgtaaaggctgttgcctctgaggagtaacaccagagacttcaaactgtgaggagacacagacttcaagaacctagccaagttactaaacaaacaagcaaacaacaattaaaaaaaggacagaaaacaaggcctgggagaaggaggagaatnntatataaagaactgggtacataccctaaattaaaatatccagttttttaacaaagaagtgtaaaatgtgcaaagaaacaggaaaaatgtggcccacccacagg

SEQ ID NO: 36741 - DNA, 757 bp, Macaca Mulatta
  misc_feature (1)...(757): n = A,T,C or G
gggacttacataaggggcaacaaacactcctctttttttttccttatccttaactcttcttttgtacacatctaannnnnnnnnnnnnnnnnnnngtgaagccttgggatggggaaaaggaattttattattttatgtgtttattcaagaagtaatttaaaacccaaattcaattttaactagcagaattctagagatactttggtctcagtcaccctatccaagttgatcaatggcagacagctttgatttttgccccctactcctgcctgtagtttcagcttgtactccccacattatttctgtgtgcctgaagatttgctctaccttgtcctttgtctcctattttcttgcatttgccctgcaaagtgctgggatcacangtgctgaaccgcttttaccaacttataaaaaaactaacgcccgactctagataaaaatgtaacaaaacgcgtaggacatatcatgcaacaatatagtaacatctcaataaaattgacattttacacaaaaacaaaattttatgatacattatactcgaatttgcaacaaaacnnnnnnnnnnnnnnnnnnnnnatagtgttaaatgataacacctttattatcaaacaccaaaaaatttccaaaaaatttcattatcagccagcatttctaaaggggacatccaagtacacaaataagcaatagaaaccacggtagtagaggaatacatagaaactaccatttgcaagacacacaacatcaaattttaattcac

SEQ ID NO: 36742 - DNA, 650 bp, Macaca Mulatta
tagtgaggtcacgaatgcaatcagccccttcttccccactcccattgccatcttctcagtccttctccctttctttccaagtagtttacccacccctcctccttcctcccctgtccctaaaataatccatgtgtcttcctaaaatctctctttgatcctgtcctttgataacaccgtcagtgcctactactgggtctagacagacctctgttgagcagtcagagtcttccctgactccacaatgcccctttccttggctgaccagtatgactactggtccccacctttcccttgcctatccctacctccctcctactaggttgtcccctccctctcttcacccattcattcatgaccatttttcactaccaagctccccccctctcctgaaggaggctgaggtttttgtgactctctagactctattgtgggatggaatgaacattgctaaagaatcttgtgtttgctttactttaaaaaggtatttttttcctaattataaaattgatgtgtcagttatggaaaaattagaaatgcagcacaaatacatgagtattttactgcaaaattgccagataatatcttgtcttttttgggggtgtgaattttttgcattgttgtggtcatattgtgttctttatcatgcaatt

SEQ ID NO: 36743 - DNA, 557 bp, Macaca Mulatta
ctaattatagatcttttcatgtccatcttctccattgctaaaatattcttttaaaaaagtagaattattttttaaattgcagaagtcatatcacagtggcaccatttgacctttgtttttccttctgaatcagtctttaggttgctccctacaaatcatacttcaagtgacattttctttggatttgtggttgaaaacccaaacatgagaccagcatcctacaagcagtgcggaagtccatggcagaagttctcaggctgtgtgctgtgtgtggaactcttgttcatacatcccagtgtcagaggccatttcctctttgtatagggaggcttgggagaaaggcgggtggcaacactgtctcattgatgagtcatgttcctgtgtctgtgagcgtcagggagaatgacagagctctctggaacagcgtcctcagggcccacagcactactcagtggggtctgattccttctgctttttatagtgaggcgttcatagagtgtcacagccttcatgaggaaacgggaaatgagatgggggcccaagcagacggaccagac

SEQ ID NO: 36744 - DNA, 1124 bp, Macaca Mulatta
ttttatttatgtatttttctgtactgaataataaaatataaatttaagaaatatgagtggaagtatcaatttacatataaacctggcagattgaatatatgttcatttctgctactttctctaatccactaaaactacagatatacacacagagacattgtgaagaaaataatagcagtgtatgtataaacaaattgataaataatacatttaaatatggttttttaagaaacagagcaggatagattaatctgaaatctatacatctacagaaaaggataccaatgagaaaaaacattatctgcaaataatagtttctggaaaaacacaggaattacttataaagcatttgtgaggggtagggctgaaaatggtagaaaaggtaaacacctgtttaaggttacctaaaagatagccaggtactaatttctctttagttctggcaaaatgattagtgtctgtagtaacgaaatcaatgatgatccagacattgggaaattcggtgcaaaggatgctaggaataagatgtttatatatgaaacagagagattatgcaaaagaatacatattgaatgcctgataaactgtctcaagagaaaggaataatagatattggcatttgagtattcgcttactggattagctaggcttctttctgatcagccttcaaagtaactggccaggtacctaatgttcatggccagataccacgttcatagaaattgccactatattcttagttcttcatgatgaaatatggaaggacagccaaagatgatcaggaatgcaattaagtccaccaacacaaaaattacatacctagaatcaattttaatagagaaaacttacttgaaggagcacagcttattcagggcagaaaataaaacttaataataaaataagtatgtaatacattttcttaatgaaataactactcattttagatccttgatataagaacagaatagtactaataataaatagaggacatgataaatattggtaaattaaacaaaaatatgagagatgaagtagccaataagggacaggaggtagatgtaagaatgcagaaaaaaaggacaaaggaataaatatgggggacatggaggaaaaaatagggtgaa

SEQ ID NO: 36745 - DNA, 1604 bp, Macaca Mulatta
  misc_feature (1)...(1604): n = A,T,C or G
gggatctaaagttggtaagatgtcataatggaccagtccatgtgatttcagtatatacaactccaccagacccctccaacccatgtaacaccccacccccgttcgcttcctgtacggtgatatcatatgtaacatttactcctgtttctgccgattgtttttttaatgttttggtttgtttttgacatcaactgtaatcattcctgtgctgtgttttttattacccttggtaggtgttagacttgcactttttttaaaagaggtttctgcatcgtggaagcatttgacccggagcggaacgcgtggcctatgcaggtggattccttcaggtctttccttgggttctttgagcatctttgctttcattcgtctcccgtctttggttctccggttcaaattattacaaagtaaaggatctttgagtaggttcggtctgaaaggtgtggcctttatagtcgatccacacacgttggtcttttaaccatgctgagtagaaaacaaaacaggttaagaagagcctggtggcagctgagagaggaagccgctcaaataccttcacagtaaataatggcaatatatatatagtttaagaaggctctccatttggcatcgtttaatttatatgttatgttctaagcacagctcttttctcctattttcatcctgcaagcaactcaaaatatttaaaataaagtttacattgtagttattttcaaatcctttgcttgaataagtattaagaaatattggacttgctgccgtaatttaaagctctgttgattttgttttcgtttggagttttgggggaggggagcactgtgtttctgctggaatatgaagtctgagaccttccggtgctgggaacacacaagagttgttggaagttgacaagcagactgcgcatgtctctgatgctttgtatcattcttgagcaatcgctcggtccgtggacaataaacagtattatccggccacaataatcttactaaaaaataaattctttgttcgcccggcttcgggcacttagagaaaactttttcaaaccatcttctttttgggcgcgcggggcccccatttaggtacagtggaaccatgggtccaaactctgtttttcgcctaagaagaatcaccgggatcctaggaaaaaagggcccggggccccaaaggaaaagaaaaaggggcaaaacnnnnnnnnnnnnnncgnnnggcaagaaaaagggttggatnnnnnnnnnnnnnnnnnnnnnggggggaaccaaggtttttaaaaaaatccaaagggggtttcgggggcttttcggggtttttcaaagggggtccaagggggccccattttnnnnnnnnnnnnnnnnnnnccctttttggaataatggtgtaattttttaaaccttccgcccaagggggaccccccccaaaaggggttgagaaacttaattcccgggggggttgaccccttgggcgggggggcggatagaaaaaaaaatttgcccccgggggagaaaaaaggggggnnnnnnnnnnnnnnnnnnaatattgggccccnnnnnnnnnnnnnnnnnnnngggggggaaaacctcccccccgggggatttgggcctataaaa

SEQ ID NO: 36746 - DNA, 2819 bp, Macaca Mulatta
  misc_feature (1)...(2819): n = A,T,C or G
attgcataaatattggcctgtagctgctgctggttttaaaaatcaggtattcctaggaaataatgtttttattgtgactttgttactttgcttttctttttgatagatgtttctttgggcaggagagatctgttttcaacacaactatatgtggaactcctatatgagattgataaaagtagtatttttaaatttatttttgctttgttttctttaaagtcaggtcagttgaggaataaattacataaagttaaagttcttctgttttaggtgtacagtttgatgaattttgacaaacttagtcataaaatcatcaccgcaatcaagatacagaatttcccttttttgtagttttatttcattgtagtttgatttttctagaatgtcacataaatggaatcaaactgtgtgtagcaatttgtatcttgctgctttcaggtggcataatacttttgagactcatttgagttgtgtttatcagtggttctttttattactcagtaatactctatcatccatttgtttatccatttactcagtgatggacatgtggggtatttccagattttagcaattataaagctgttataaacattcatgaacaggtcttgtgtaaacatgtgttttgatttctctttcataaatatgtaatccctctcccctagcaatgggattgcttggtcatatggtaagtgtacatttaacttcagaagaaactgccagactattttccaaagtgactgtacaattttgcattcccaccaccaatgtatgagggttccaaatgttccatatcttcatcagcactcaatattgctgtttagacattctagtatgttttgcagtgatgtctataattttactttgcatttccctgatgcctaattatgttaacattttttcatgtgctggaaaaatgtgtcttcttattgagttgtgagagttctttatatattctggatacaagtccctcatccaataatgtgttttacaaatatattctcccactctgtggcttgtcttttcattttcttaattgtgtctgtcagagagttaagtttttcattttagttaagtgcagtttatcaattaaagactatttcttcaaagtatttttaggttcacagcaaaactgagaggaaggtactaagatttaccccctgacctacaaatgcatagtcttccccattatcagcatcccccagcaaggtggtacctttgttgtgatcgagaacatatattgacgtaatcattcaagtccatagtttacattagggctcactcttgccattgtatattctgtcagtttagacaaatgtatagtgacatgtgtctgccattatagtaccacacagagtagttttgttactcaaaaatcctctgtgcttggtcaatttatctatttttaaatagtttctatcttgtctaagatatctttgcctaatggaagatcacaaatattttatcctgtattttttcttctagaagttttattgttttagcttttacatacaggtcatgatatgtattgtttcacacatatgtgtgtatatgacatatatccaccaacgtatatatttatgcatgtatgttggtctatagtttgtttatttgtttcttataacatcttaatttggtttcggtgtcaggttaatggtggcgttataaaatgagttgatctgtggtcactagtctgataccatgttttgctttctagtatctccctttgtttctgctctttgctaaaattgcttgtgtgttgtctccctttccactagatcttttaacatgctggttatagtttttgaaagtccctttcttttagtccccgtatctggatcgtttctaaacctatttctgttgattgctttatctctcgacagtgggttgggtcttcttcttgcttttctgggtgtctcctcttcattttccttctccccgccacccacccaccaagacagtctctctctgtctcccaggctggagtacagcgctgcnnnnnnnnnnnnnnnnnnnnnnnacctcctgcgttcaagccattctcctgcctcatcctccctagcagctgggattacaggcacacgcccccacannnnnnnnnnnnnnnnnnnnnnnnnnnnnnnnntnnnnnnnnnnnnnnnnnnnnnnnnnnnnnnnnnnnnaacctcgtgatctgcccacctcanannnnnnnnnnnnnnnnnnngnnnnnnnnnnnnntcgcacccagcctatttttcnnnnnnnnnnnnnnnnnnctgaatgctggatttgtgggtattagaaaaaactgaggttaatagtatttacgtccaggaatcccccgtattaatgtgaaggttgtttacatgttattattaacagttgaggtaagtttgnnnnnnnnnnnnnnnnnnnnnagcattagactttctttattagcttattcactggaacgatgcttggagaaatctgaaaatgcttggcaagtttgttagagatcttgctttcatataatgtttagactttctggcnnnnnnnnnnnnnnnnnnctaatttttttatttcaataggtgtttggggaataggtggtgtttggttacacaaataagttctttaggtggtgtttggttacacaagtaagttctttagtggtgatttctgagattttggtgcacccatcacccaagcagtgtacactgtacccaatgtgtagtcttttaccccacttttatcccagtttggtttcgtgtctgtcaggaccttcaatgtaccgcaggcttcattttctactggtgctactttgtgcttagaatggcacttgggggtccaggaggatt

SEQ ID NO: 36747 - DNA, 795 bp, Macaca Mulatta
  misc_feature (1)...(795): n = A,T,C or G
gggtaagggaagatttgaacttgcttcactttaatagttcaaatcactgagaacacacactaagtttaaaaatacaacggccaccactaatccaggaacnnnnnnnnnnnnnnnnnnnntaactaaccattttcaatagatattttcagaagtctgtactttccatttctggctctggcaaagatctctttaacatcttcactcgctgtggaaaaagataaagaaagtaaactttttatacttacatataaatactttcctatctatattgaaaaaattaattagaacacaaagaaaaaatctggagcatgtagcatccttattatcagtattataaaactttaccgcataaaataatgaagactgtatacaattaagaaatataaatattagcattttaaaagtatgttaataattctaatctgttttagctatataattctgtgcagaaataacactggggtgaatatactgaagttactcaaacccaataatgagcaaattacaattttgaaaaaacttttattgctcctttgaaaaaatattgaaaacctgcttttcattctctaatttcaatttcaaagcttaatgaccatcccttcatcaaaattcacttttctgatattttccccggttaaaagaccaacagttaaaatatcccaaatattccctacaccttggattttaatggaatacaagaacagggtcaaaaatggcaattgggtcctttaaatcacctcgggttnnnnnnnnnnnnnnnnnnnaaacctttgtgccattttttcactccaaaat

SEQ ID NO: 36748 - DNA, 870 bp, Macaca Mulatta
  misc_feature (1)...(870): n = A,T,C or G
ggcaagcatggtggcacatnnnnnnnnnnnnnnnnnnnnnnnnnnnnnnnacaggagaatcccttgaacccgggaggcaaagtttnnnnnnnnnnnnnnnannnnnnnnnnnnnnnnnnnnnnnnnnncagcgnnnnnnnnnnnnnnnnnnnnnnnnnnnnnnnnnnnnngagttacatcatttcaaaattattttccttataggactaaagcagaggtgacttccttatcatgttgactcaagttagctgggacccttctgattggctgctatgaatccctggtgttttggaaaactggcctattttaaagtttcgtatgattatgtggcaccctccatgagacaccactctcatctaaggctgtttgggcctagtgcagacgcttagtccaaaacaatggcctcccataaattgtatttaaccatacatacaatgagattttggtaataactccactaggattgaaaacagagtctcaaagaaaactcatggggcgtggaacaacgattggttggaatcatatattaaatggagaggataccggttgccgcagatgtatggccaattttatcggtgctagacctcctccgagatagacatgaatacatatatggagaatttctaaaaagtagtgacattggatatccatgcaaggatgacgcattatgagaaacgaccaaagtatacccacccgtgatatgcgaactcggtattgtgtaatataacagacagcgtcaagatacacaaaaaattgtatgcttaataacgaccagatccacagtaactgcgttataagtgtcattttatttatttaataggtagactgccaactgcacaaataagaataatcacgcaagagacgttatan

SEQ ID NO: 36749 - DNA, 604 bp, Macaca Mulatta
tatgaatataacgtaacagcatatttttgccatggtaatgaattgtcctataaactatttatatatttttgttcttcataattgtcactaataagcatcagtttgttgtttttaaaaggatatttaagtgagcattttctagttcacatgaaaataaccatagtacaggatgatttctgtccactcaaaggtaagttagattgcacagttaattttcacttatatttatggcactattatgttggtgatgcctttatcttttaagcccagtattatgcctgcctaagttctgaactggggctatattttagtagttgtagaattattgatatttagttttgatagttaatgtttaattgtttggatctgcacaatttggtttttgcacaaaagtcatttttaaaaaatctgagtaattgccaaatattagacgaaagatattcttcctgtaaggaatacagtttttagtcaaagtggccattacatcctctttttactttacatggtatagatacttgagaaggttgttctggtgttgtatgccaagaaaattctttttattggtgcctatattgtaacaattatttttaatgcattgtatttt

SEQ ID NO: 36750 - DNA, 316 bp, Macaca Mulatta
  misc_feature (1)...(316): n = A,T,C or G
tgaaccccagcccccggagtttccagcagtgccccctgaggaggagctgcagcacctgaggaaggaactagagagggtgtcagcagagctccaggcccacgtggaaaaccatcaacacgtaagtctcctgaaccagccacaaaaggagaggcttgggaggcaggaggagaggcttcnnnncaggaggagaggcttcagcagctggccgagccacagagcggcatcgaggagctgngaacaatgagaacaagtgcgcactgcacttggagatgcaagtcgaagagctgcaggagaagctgggccaggtgaatgagac

SEQ ID NO: 36751 - DNA, 394 bp, Macaca Mulatta
aatgcctcctggtcggggtgggcgtcccatgcctccatctagaagagatatgagccctcgtcgaggatcacctcctcctcctcctggatgagatggccggggtggtagcagagcttggaatcttcctcttcctccaccaccaccacctagagtggggagacctaatggcctgtgacagaagagggagacctaaagactgttacgatggcatggttggtttcagtcctgatgaaacttggaactgtacaatagatacatggagcccatcagaatggcagatgcttatgaaccacaggatggctccagatatgattattcccatgcagggggtcgtggttaaaatggtgatcttggtggacctattattactatacaagtaaatgttcccaaagat

SEQ ID NO: 36752 - DNA, 1218 bp, Macaca Mulatta
  misc_feature (1)...(1218): n = A,T,C or G
gatgtccacagttacagtaaatgtatgaaaaacggaacattcttggtccagtttactttaaataaatgtttgaaggataaaaatacatgtgtttcaggatatgtcttatgtaaactttttaagttatgaaaatcatccatatgaaaaatcgaatgttttttattttgaaactgttttgcattgtcagttactcaagcagccattttacatttcagtgtttgagaacataacacggacctgtatactccttgtggggccacatgttaagaatcttaacagctcatcctgcaaaattaaaatccaaaatctaaatcacaaaattctcttttctctttcctcagttatttacttagactatagaacagatatcctcctagagttttttgtaactatcaattatcattaacatcatattcctattctaaatccttccactgaaacactacttgttggggaaaacaaggcttttactttgtttcaccactgtacagagggtaaatgaaaaatctttcactgaatatttggtctataatactgttacatttcctctattattttaccatcttttgaaaaatttctataaagagatggggacaattcatgtcaggagataggaactgttcaatttaaatgcctgaaaagactatcgcatattccttatatagtctgactgaacttaacctcaactttcttccctccaagatgacggcaccagtacccgcttattaacacttcgtgaacgatccttcaagttctgtctaggtgtgtatgatgtgtcttatgacattaattagctcagctaccagggctatctgtcgccaatatctagcaacaacagatatatgacagtacagaacaaactgcagcaacccagttctgtctttttctttcttctttctttctccaaacgttccatatttgtngtnnnnnnnnnnnnnnnnnnnnaagaagagcacaagagaacgagaacgacacaaaagacaacaagaacgagaaaaaaaaacagcaacaacaggaagcaagcagaaaacagaaacnnnnnnnnnnnnnnnnnnnnnnnnnnnnnnnnnnnnnnnnnnnnnnnnncattaaccaaataaaagaaataagaagaatacgaacagcgagaaaaaaagaaatacgnnnnnnnnnnnnnnnnnnnnnnnnnnnnnnnnnnnnnnnnnnnnnnnnnnnnnnnnnnnnntagccagaatgaac

SEQ ID NO: 36753 - DNA, 793 bp, Macaca Mulatta
  misc_feature (1)...(793): n = A,T,C or G
gggaaacctttctgagtctcaactttctcatctttaatatggggatgctcttttctcctttatgtggttattatgggagtaagtataaacatgccaagttttaaatactaaaaatgttgtatccatagtcagtgagctgagcaggagtgcaaactctgccactttctagccatacactagagaggtcatacggtagagttgttgccagtctgggttttggaatcatattggcctacgttggaatcctggctcccctcttggaccttgggtaaatgtcttcacttttaagtcttcattttccttgttgataaaatacacatttttatcctataggcttcataggaggattaacttacacaatgcatttagcgtttaggttgaacaatgtaaaattacctttcctgataggttaaatgataaaatatcagcagtttcatttgttcttcacatgagtcttcaaaaatgtgaaaagtcttcataagtcttcaaaaatgttagtagtaatggctgttattattattaatcagtatgaccttgatggagttactttacttcagagggtctcagtttccccaaccatataaagggcacattgaaattctgcctctttcggccaattgctacaaaatttaagtgagttgatgtttgtgtaatgactttgaggattataaaatatgagaaaatcatgataatttagaaaaaaatctttctanaagcccgggtgcagcgggctcatgccctgtaaatcacaancacttttggggaggccaaagggtttgggtgggatcacccc

SEQ ID NO: 36754 - DNA, 469 bp, Macaca Mulatta
  misc_feature (1)...(469): n = A,T,C or G
gggggagactgggctctccccagaccaagggagatgaaagcagagactgggctctccccagaccaagtgagagcgggttgatcctgaactttccagcctccagaactcaggttctgagagctggaacatgtgcaatgtatacatgatgaagtaaagtagaaccccagattctgaaggatgttcacatacttgagctactcatccatggaatcatgaattcagaaactctagtccagaatataaggaggctgcctattatcaggctttacacaaggacttcattatgttatcaagttaagatgagttcatactggattacagtgggccctgggtcaatgactgatgttcttaaaagaaaagagaaatttggacatcgattcagacagagggatgatggctatgtaaagatgaaggcagagattggagggatgctgccacaagccaacaatatcaacgactgacaggcacn

SEQ ID NO: 36755 - DNA, 354 bp, Macaca Mulatta
tactttatgttaaatgatgttttccaaaatagaggccccacttacccatttccaatttagcaaaatccattttccttatttccctgtgtgtctcatttcaggtaagagaaggaacagaaatcagatgtcctgacaaggacccgtccgatacggttcccacctcaggtacacagcttgcacccagggatttttaaattcattcgaggcctgaaatcatccaagtaagggctttccacataacctgaaatactcccgagtggtttctcaggggcaatggaaataactctatgtgtatttggaaggccatgcctgtgtctgattattctttaactaaaatgtgatatcattatcaga

SEQ ID NO: 36756 - DNA, 647 bp, Macaca Mulatta
  misc_feature (1)...(647): n = A,T,C or G
tgaatccacgattccatttccctatccaggtaagtttcccgaaataacgtctaaacaagctgctcttacacctctagccatcgtctgccctttcaaatatctggtctacatggaaagacaaagaggaaaggcnnnnnnnnnnnnnnnnnnnnnnnnnnnnnnnnacagccctctcaggaaccaaacaaaaacccccaaatccttttttttactacacaaggcatgaggtcaaaagcttaagagtacagtgtcccctttagatcatgggagaaaggcgtccacacagagccttagcaggaatttccactccgaggctccggaacatgctgaagatgggggctctgggggtgccactaccatcctggaggccaccaactggggtagagacagtgaagagcaggtctcacgtgcccgaagaccaccagccagatatacactggtggccctggtggagcatggcagggcaacagcgtccatctccaacaccaagccactcctgtcctggatgacttcctgcttaggtccgtcacatttcagaagagagctggctttctggaagcctgtttcccattcatcacagaatatgacagagcacacacactctggtatccttggtcttcaaaggccatttccagcagaccctctaa

SEQ ID NO: 36757 - DNA, 742 bp, Macaca Mulatta
  misc_feature (1)...(742): n = A,T,C or G
atgcagaacaacaagatcaccaccatcgaatggaatgacgtgactctctaccaagctttcaatggcctgaaaaacaaatagtcaactgaaaactctcttggctattggtggctggaactttggcactgctccntttcactgccatggtttccactcctgcgaaccgccagactttcatcaactcagtcatcgaattcctgcgccagtatgagtttgatgggctggacttcgactgggagtaccccggctctcgtgggagcccttctcaagacaagcatctcttcactgtcctggtgcaggnnnnnnnnnnnnnnnnnnnnnnnnnnnnnnnnnnnnnnnnnnnnnnnnnnnnnnnnnnnnnnnnnnnnnnnnnnnnnnnnnnnnnnnnnnnnnnnnnnnnnnnnnnnnnnnnnnnnnnnnnnnnnnnnnnnnnnnnnnnnnnnnnnnnnnnnnnnnnnnnnnnnnnnnnnnnnnnnnnnnnnnnnnnnnnnnnnnnnnnnnnnnnnnnnnnnnnnnnnnnnnnnnnnnnnnnnnnnnnnnnnnnnnnggattatgccatcaactactggaagaacaacggggccccagctgagaagctcatcgttggattcccagcctatggacataccttccttctgagcaatccctccgatcatggaattggcgcccctaccactggtcctggccctgctgggccctataccagggagtctgggttctgggcctactatgaggtatacac

SEQ ID NO: 36758 - DNA, 280 bp, Macaca Mulatta
aaactgctgctgcagactcctcctttctatgtccgtacataatgtttcagcattttaagaaaaggctctgtactgtccagtgggaacttgacgtcttagtggccacttccgcaatcctttaggaacccttagtagcttagcttcgccaggactgcaagaatggaggcgtgctgtgggtggtgtttcgatgacttttcacttggttcgtgtttaatactaatgtgaagtaaatcactagtctcagtgtgttttttcattgctcttttcacgtttgtatcat

SEQ ID NO: 36759 - DNA, 192 bp, Macaca Mulatta
tcattttgccctgaactgtttatcaaatcttatttcttcccactcccccatttgtttcccacgctgtggccattcagaactacttagagctctgtcaactctacatgttactttataataacactaatgaaaagggactttatagcagaggcagaactcattattttctaaaaaatacatgcatatctccca

SEQ ID NO: 36760 - DNA, 1261 bp, Macaca Mulatta
  misc_feature (1)...(1261): n = A,T,C or G
catggtctttagctccctccgaagtcgtaatcgccacagtgcaaaccccaatcctcgccttcacatgcctatgctaaggaataaccgagataaagatttaattcgggccacctcaggagctgccacccctgtcatagcaagtacaaaatcaaatctggcactcacaagccctggccggcccccaatgggttttaccactccccctctagaccctgtcttgcaaaatcctctccctagccagctggtgttttctgggctaaagactgtacaaccagttcctccattttatagaagtttactcactccaggggaaatggtgagtcctccaacctccctcccaaccagtcccatcattccaaccagtggtaccatagagcagcaccccccgccaccctctgagccagtagtgccagcagtgatgatggccacccatgagcccagtgctgacctggcacccaagaaaaagcccaggaagtcaagcatgcctgtgaagattgagaaggaaattattgataccgccgatgagtttgatgatgaagatgatgaccccaatgatggtggagctgtggtcaatgacatgagccatgacaatcattgtcactcccaagaggagatgagcccaggcatgtctgtgaaggacttttctaagcataacaggacccggtgcatttcaaggactgaannnnnnnnnnnnnnnnnnnnnnnnnnnnnnnnnnnnnnnnnnnnnnnnnnnnnnnnnnnnnnnnnnnnnnnnnnnnnnnnnnnnnnnnnnnnnnnnnnnnnnnnnnnnnnnnnnnnnnnnnnnnnnnnnnnnnnnnnnnnnnnnnnnnnnnnnnnnnnnnnnnnnnnnnnnnnnnnnnnnnnnnnnnnnnnnnnnnnnnnnnnnnnnnnnnnnnnnnnnnnnnnnnnnnnnnnnnnnnnnnnnnnnnnnnnnnnnnnnnnnnnnnnnnnnnnnnnnnnnnnnnnnnnnnnnnnnnnnnnnnnnnnnnnnnnnnnnnnnnnnnnnnnnnnnnnnnnnnnnnnnnnnnnnnnnnnnnnnnnnnnnnnnnnnnnnnnnnnnnnnnnnnnnnnnnnnnnnnnnnnnnnnnnnnnnnnnnnnnnnnnnnnnnnnnnnnnnnnnnnnnnnnnnnnnnnnnnnnnnnnnnnnnnnnnnnnnnnnnnnnnnnnnnnnnnnnnnnnnnnnnnnnnnnnnnnnnnnnnnnnnnnngatactgggagaagagcagtgagcaaaacgggctccttgtatcatggagagaga

SEQ ID NO: 36761 - DNA, 815 bp, Macaca Mulatta
  misc_feature (1)...(815): n = A,T,C or G
gggccnnnnnnnnnnnnnnnnnnnnnnnnnnnnnnnnnnnnnnnnnnnnnnnnnnnnnnnnnnnnnnnnnnnnnnnnnnnnnnnnnnnnnnnnnnnnnnnnnnnnnnnnnnnnnnnnnnnnnnnnnnnnnnnnnnnnnnnnnnnnnnnnnnnnnnnnnnnnnnnnnnnnnnnnnnnnnnnnnnnnnnnnnnnnnnnnnnnnnnnnnnnnnnnnnnnnnnnnnnnnnnnnnnnnnnnnnnnnnnnnnnnnnnnnnnnnnnnnnnnnnnnnnnnnnnnnnnnnnnnnnnnnnnnnnnnnnnnnnnnnnnnnnnnnnnnnnnnnnnnnnnnnnnnnnnnnnnnnnnnnnnnnnnnnnnnnnnnnnnnnnnnnnnnnnnnnnnnnnnnnnnnnnnnnnnnnnnnnnnnnnnnnnnnnnnnnnnnnnnnnnnnnnnnnnnnnnnnnnnnnnnnnnnnnnnnnnnnnnnnnnnnnnnnnnnnnnnnnnnnnnnnnnnnnnnnnnnnnnnnnnnnnnnnnnnnnnnnnnnnnnnnnnnnnnnnnnnnnnnnnnnnnnnnnccannnnnnnnnnnnnnnnnnnnntataaaaatgtaccctgttgggccgcctgggccctcgaaaaaactttcaaagaccattcctttgggcgcgcgggcccccattaggtaaatggaacatgggcctaaactggtttccctaaggaaattccggggcaggaactaagggcttgggaatcctccccaataaaaaaaagccccggggggcaaaccgaagcgttcttgaaaaaaatccaaaaatggaagtttccgaagagtctta

SEQ ID NO: 36762 - DNA, 654 bp, Macaca Mulatta
  misc_feature (1)...(654): n = A,T,C or G
aatgtagcccaaaaaatgtaaattggacgatttttttgccaattagtttatagaaaatatatgaaccaaagtgatttgagtttgtaaaaatgtaaaatagtatgaacaaaatttgcactatgccagatttgaacatctagtgagattcacattcatactaagttttcaacattgtgttctttttgcattcattttttacttttattaaaggttcnnnnnnnnnnnnnnnnnnnnnnnnnnnnnnnnnnnnnnnnnnnnnnnnnnnnnnnnnnnnnnnnnnnnnnnnnnnnnnnnnnnnnnnnnnnnnnnnnnnnnnnnnnnnnnnnnnnnnnnnnnnnnnnnnnnnnnnnnnnnnnnnnnnnnnnnnnnnnnnnnnnnnnnnnnnnnnnnnnnnnnnnnnnnnnnnnnnnnnnnnnnnnnnnnnnnnnnnnnnnnnnnnnnnnnnnnnnnnnnnnnnnnnnnnnnnnnnnnnnnnnnnnnnnnnnnnnnnnnnnnnnnnnnnnnnnnnnnnnnnnnnnnnnnnnnnnnnnnnnnnnnnnnnnnnnnnnnnnnnnnnnnnnnnnnnnnnnnnnnnnnnnnnnnnnnnnnnnnnnnnnnnnnnnnnnnnnnnnnnnnnnnnnnnnnnnnnnnnnnnnnnnnnnnnnnnnnnnnnnn

SEQ ID NO: 36763 - DNA, 672 bp, Macaca Mulatta
gtcatgaagtcaggctagggacttctcccgcagcgacgcggccggccggcgagactgtttgtgttgcgggggctggacttcaaggtgattttacgacgagatgctgctctcaatagggatgctcatgctgtcagccacacaagtctacaccatcttgaccgttcagctctttgcattcttaaacctactgcctgtagaagcagacattttagcatataactttgaaaatgcatctcagacatttgatgacctccctgcaagatttggttatagacttccagctgaaggtttaaagggttttttgattaactcaaaaccagagaatgcctgtgaacccatagtgcctccaccagtaaaagacaattcatctggcgctttcatcgtgctaattagaagacttgattgtaatttcgatataaaggttttaaatgcacagagagcaggatacaaggcagccatagttcacaatgttgattctgatgacctcattagcatgggatccaacgacagtaagtacaggggccaccttatcttagttccagaatttagtcttcctttggaatactacctaattcccttccttatcatagtgggcatctgtctcatcttaatagtcattttcatgatcacaaaatttgttcaggatagacatagagctagaagaaacagact

SEQ ID NO: 36764 - DNA, 782 bp, Macaca Mulatta
  misc_feature (1)...(782): n = A,T,C or G
aagttttttttataataaaaagatatttttttaaaagaattgggtgtgtggccaaaaatatttttgattttcaattccgtaaaacaaactttagccattcaatttttttaaaggtaaatgggggtaggcaaaccaaaacaaagtaaaaagaaaccaccctttaaaaagtgaaacccaagtcatttggcaaaagcaatttaaaaccacgacatctgtaacttgacatatagggattgtcaaaatacaagctgccaatcctaaagacatcaagttgggcactttcatggggtatgacatagaaaagttccatttctgcctgatatgaacaaacacttctttttttcaggtaaaatgtatatatatctcctttaaaaaacttgattcactcagcaattaaaacttttaagggcttgataaaactactaatttagcaaaatacctgaaatgtttagtgcattctatgtatctttccagattataaaaatttaagaggtttggggtggaaacattagctgcaatgnnnnnnnnnnnnnnnnnnnnntctaaacaaaatattaatgcatttgatgtgatataagcagtgtagtattcaccctttggacacttagtgctttcccataattcatttaagactgcatttttccacttttaaacacctgttaatggctcagccaggcacagtggcttacacctgtaatcctagaactctgggagggccaaggtgggcaaaacacttgagccccaggagtttgagagcatcctgggcaacatggcaaagcccc

SEQ ID NO: 36765 - DNA, 685 bp, Macaca Mulatta
  misc_feature (1)...(685): n = A,T,C or G
atgcaggtgagacccaagggagacctggttgagcccagtcccgggagtgagttggcccattgtctgcacaggccgggctctgtgcacagtgcatgacaatggcttttagatttgttctcatgtttaagttttgaccagtcaagtcctttcctctttctcaacctgttccatccactctctgtgaccctggggttgctgaacacctctgttgaacatgcatattaggttggtgcaaaagtactttcaatggcaaagcctgcaattatttttgcacccacctcacaggaagccagtttgaaagccaaccaatactcacaggaagccagtttggaagcccctgggatagaaggcatttcagccttggctgggtggaaggtgagtgatggcagggcttctcattgtcagtgttggggaagaggccaacacctggcagaggtggccgtgggcttcaccaagtgccccaccgctggccgagagttccacctaggcagcactcacacctccacgctgttctacctgtggttttgctgcatcatcacnattgtacagggcagcatttgtcgtgggatcccttgtgaggagggtctgagaccagggcttgagtgcaggcagtttgtctgggaggccattgctgaagcaggtgtgaaggagggagcagggagagtgagacgggaagctgacaagc

SEQ ID NO: 36766 - DNA, 660 bp, Macaca Mulatta
ctcatcaaatgtaggagaagaagtttctccaaatatattgggtggagaattgccgacactctttccaaactattctttccccccattgaggcccgtgttcttcctttgaagaaaccatcaataaaaaaggatcaaacaaaatatccgaataaaaagctggagtccatgaaaaagaaagttctacatttcactgtaaggtaaagagaagtactattggttttattattctaatacattacaattcaaaatcacagaaattatagataattatttgccacattagttaactcagtttctcttcttcaattcaaattttggttcgatcacctcctaggtggtctatcattgagcaagttcctcccttctccgaaactcttcatgtttgtaataggcattattacataatacaaatcaatattaatgtaattcttgtgagataaatactaacttaaaacagaaaccaaatcattcaatattcaaaattttaagactttattttatgtgtgtatacatacatatatatacatacttgatatgtatcttacatatctaagttagagtcttgaacatagtaagtcttccaaaactggtagttatgagactaattagattttatgtttcaactcctcataaatttatttcaaaggactccaggaaaca

SEQ ID NO: 36767 - DNA, 919 bp, Macaca Mulatta
  misc_feature (1)...(919): n = A,T,C or G
ggaatctcacacttcatcctaccgagtcagccaccacagataggaattcctnnnnnnnnnnnnnnnnnnnnnnnngacagagtctcactctgttgctnnnnnnnnnnnnnnnnnnnntgatctcatctcactgcgacnnnnnnnnnnnnnnnnnnnncggttcttgtgcctcagtnnnnnnnnnnnnnnnnnnngcacatgcccgccatcatgcccggctagtatttgtatttttggtagagatatggtttcaccatgctggccacgctggtctccnnnnnnnnnnnnnnnnnnnnntgcccgccttggcctcccagggtgctgggattgcagacgtggaccaccacgcctggctggaatacttactattgttggtagaacgatccactaaaatgtccagaacagaattccttatggggataggtggctttggtctgaaaaccaaaatacaattttagtcattcaccttatggggccttttagctactgtggatccaaaacaataaggaaatggggaaaagtttttacctcccattccttatttttttctgtttttggaaaaagaaaacaacttaccgattttccctttttttggagaaaaggaaactacattcctacaaaagtatctcggtggcccacttattataaaaaaataatttctattaccacccttaaactgggagagaataaacccgaaccccctaaacaagatttgtttcttcctgcagtgcatcgcacggcgttctggcatataatcaatcaggcaaccactattggagacccctactaagattcaagattccccaaaccatgtaccccactttacctcacaaaaaacgccgctccttatatggaggatgagaaaaatataggaaacggaatacttataacatggaccattgtgactaaataagccccn

SEQ ID NO: 36768 - DNA, 250 bp, Macaca Mulatta
  misc_feature (1)...(250): n = A,T,C or G
ggtaatattgtcgaagctatatggcccgcaagggacattctattttacttcacattcacctggtgaacacatcatttgcttagaatctaattctacgaggcttnnnnnnnnnnnnnnnnnnnnnnnnnnnnnnnnnnnnnnnnnnnnnnnnnnnnnnnnnnnnnnnnnnnnnnnnnnnnnnnnnnnnnnnnnnnnnnnnnatctaattgaacaaattgggcaaatagtcaaagaacaaaactatcaaagg

SEQ ID NO: 36769 - DNA, 501 bp, Macaca Mulatta
ggggaacctcctatatacttccgtttgcggcgcggcttggggctttcttcccgtgccggtatcgctctcgcaagcatggttaacgtccctaaaacccgccggactttctgtaagaagtgtggcaagcaccaaccccacaaagtgacacagtacaagaagggcaaggattctctgtatgcccagggaaagcggcgttatgacaggaagcagagtggctatggtgggcaaactaagccgattttccggaaaaaggctaaaactacaaagaagattgtgctaaggcttgagtgcgttgagcccaactgcagatctaagagaatgctggctattaaaagatgcaagcattttgaactgggaggagataagaagagaaagggccaagtgatccagttctaagtgtcatcttttattatgaagacaataaaatcttgagtttatgttcaaaaaaacagaaacccaacgctcttgtaggtggacctaacaccctacagtaagcttgtc

SEQ ID NO: 36770 - DNA, 180 bp, Macaca Mulatta
agaaataagttattaacttgagaagaaataattgtgagaatataaaatggaccgatttacttgtgtccatagagcacaacagagaagtgacacttcggaaaagtaattcagtaacatggaagacaaatttgagaagccatcccagaaagcagaggacaaagacagagccacaatgtgaaa

SEQ ID NO: 36771 - DNA, 921 bp, Macaca Mulatta
  misc_feature (1)...(921): n = A,T,C or G
ggctttacagttggtacaatatttcctgctttttgaagactgagtaatatttcagaatttttatatttcaaattatgtctactgaatgatttggtgaaagaaatttgcattgcttttacctattggcttgcagtaacaatgctgcagtaattatgagtatgtaaatgactccttatatgaccatatatgtgaatgtttatatatgtgctgcattctattttattagtctactttttcacctttatacttataccaaattgttttaattctgtagctttgtagtgtgttttaatcaagaactttaatgcctgcagcattgttccttttattttttgaagattgttgggtactttattgtctcttgcgattctgtatactggtgcgttagataannnnnnnnnnnnnnnnnnnnnnnnnnnnnnnnnnnnnnnnnnnnnnnnnnnnnnnnnnnnnnnnnnnnnnnnnnnnnnnnnnnnnnnnnnnnnnnnnnnnnnnnnnnnnnnnnnnnnnnnnnnnnnnnnnnnnnnnnnnnnnnnnnnnnnnnnnnnnnnnnnnnnnnnnnnnnnnnnnnnnnnnnnnnnnnnnnnnnnnnnnnnnnnnnnnnnnnnnnnnnnnnnnnnnnnnnnnnnnnnnnnnnnnnnnnnnnnnnnnnnnnnnnnnnnnnnnnnnnnnnnnnnnnnnnnnnnnnnnnnnnnnnnnnnnnnnnnnnnnnnnnnnnnnnnnnnnnnnnnnnnnnnnnnnnnnnnnnnnnnnnnnnnnnnnannnnnnnnnnnnnnnnnnnnnnnnnnnnnnnnnnnnnnnnngggggggttnaananaannncnaaagnnannnagaaaaaaggaaggannnnnnnnnnnnnnnnnnnnnnnnnnnnnnnnnnngttttttttattaacacccccccccctataaagaa

SEQ ID NO: 36772 - DNA, 316 bp, Macaca Mulatta
gagcccgtggagccgcccaacttcgcagagattaaagcttgagtctgagactcagcaggtcgcacctcagtgcctgcgcgcgcgggtccccgagggggcgtcagggagcgaggggtgggtgggggcgcccctaccaggcccgcggcgcacgactgctcccattggctggggctcgggcgtccgagccaatctggccgcgggtgcgtttctcctgagcctgggggcaccgcaccccgcggactcagaagccagcggcacccggggaccgtcctacagcagatccagtggccgccgacgtcagaatggtgagggcacg

SEQ ID NO: 36773 - DNA, 893 bp, Macaca Mulatta
ggggctcccaagatggcggagacagagtgaagaaactgtgttcccccacttgggttgctatcgatcaagggtagaattccattctgatatcaaaatgcagtattcgcaccactgtgagcaccttttagagagactgaacaaacagcgggaagcaggttttctttgtgactgcaccatagtgattggggaattccagtttaaagctcataggaatgtgctggcctcctttagtgagtattttggtgcgatctacagaagcacttctgagaataatgtctttcttgatcagagtcaggtgaaggctgatggatttcagaaactgttggagtttatatacacaggaactttaaatcttgacagttggaatgttaaagaaattcatcaggctgctgactatctcaaagtggaagaggtggtcactaaatgcaaaataaagatggaagattttgcttttattgctaatccttcttctacagagatatgtagtattactggaaacgttgaattgaatcaacagacttgtcttcttactctgcgagattataataatcgagagaaatcagaagtatctacagattcagttcaggcaaatccttaaacaaggggcgttagcaaaaaagtcatctcaacaataaagaagaagaagctttcaactccccgaaaacagggcagaataaaacagtgcaatatcccagtgacatcttagagaatgcgtctgttgaattattcctagatgcaaataaactgtccacacctgtagtagaacaagttgcacaaataaatgataattcagaactcgagttgacatcagttgtctggatcagaggtattccaaggccaagccaatgtgtaacacatgtgggaaagtattttcagaagccagcagtttgaga

SEQ ID NO: 36774 - DNA, 644 bp, Macaca Mulatta
ccaggatgctgagctgtcctgagcccagcctgagactaccttgcagaggaaactgtgacctgtccactactgacttagctgtgtactctaatggtcatggcttggcagagagaatgagctctccaccatgggaggcgtgtaagcagggatgcgtgaattcatcccaagggctcagagagcacacagtgctctctcagggacaggctgtcccccactccccacagcctgggctgctcccttgggtgtagccatcctttcccacgcatatctacaagtgtgggtgggcagcagccatgggtgcttatgaacctcctccaatgctggcaggtactttgcccacacactgccagtgtggcctgttgggagcaggaggaggccagataggtgtgtgctggtctcagaacatgcttagctctatcccatcctggttttcccttggataggcttgaacacacccaccatgaacaggtctgtggacatggtgcccttcctagactgactgaatccacaaggaattggtagccttttaaggtgggcaagcaggatgaccagcccgctctgcagggctggatactggggctcaggaaggatcaggacttgcccaagttcactcagctggttaggggcaacgttagggggtcttt

SEQ ID NO: 36775 - DNA, 1956 bp, Macaca Mulatta
  misc_feature (1)...(1956): n = A,T,C or G
tggccaatgacttgtacccagtgcagcagaaccaaaagcaatctagttccaaagcagtaccccatggttctgcccactgggtctccaggatttcacaacccagtggggacatgacagaggcccacatgctttgtattcgggtggaggccagtgtgaacaagcccagcatggaggaaccctggggccctgagcctcaaagccctggcaagagcaaggacccagctcgtgtgcccatgctagcaggaaagagagaggacccagaggaaaccaaagcatccagggaccatggagaaggggatgaggggtttgggcactcctcaaccagaggagaaagatgccctgctgaagaccagaggccagcacggatgcttccaaaccagacaccccgaggcttctggcgatggagccgtagctttcatcttgctgatccctgtcaacacagctcccagcatcaccctcagcttaagctcccacagctacctccacgattccctgggggtaaagagtctgagaatgacctgcaagacagtcaaaccaagtaaaatgtcatccttgaaccagtgacaattcctgagaatgcccagactgtggtgccccaggcttcacagagtcagactttcctgagccaaccaactcagggtaagccttttctgggccaaactttgcaaggccaggttttgcatgggcaggtgatgccagcccatacacaaaannnnnnnnnnnnnnnnnnnnnnnnnnnnnnnnnnnnnnnnnnnnnnnnnnnnnnnnnnnnnnnnnnnnnnnnnnnnnnnnnnnnnnnnnnnnnnnnnnnnnnnnnnnnnnnnnnnnnnnnnnnnnnnnnnnnnnnnnnnnnnnnnnnnnnnnnnnnnnnnnnnnnnnnnnnnnnnnnnnnnnnnnnnnnnnnnnnnnnnnnnnnnnnnnnnnnnnnnnnnnnnnnnnnnnnnnnnnnnnnnnnnnnnnnnnnnnnnnnnnnnnnnnnnnnnnnnnnnnnnnnnnnnnnnnnnnnnnnnnnnnnnnnnnnnnnnnnnnnnnnnnnnnnnnnnnnnnnnnnnnnnnnnnnnnnnnnnnnnnnnnnnnnnnnnnnnnnnnnnnnnnnnnnnnnnnnnnnnnnnnnnnnnnnnnnnnnnnnnnnnnnnnnnnnnnnnnnnnnnnnnnnnnnnnnnnnnnnnnnnnnnnnnnnnnnnnnnnnnnnnnnnnnnnnnnnnnnnnnnnnnnnnnnnnnnnnnnnnnnnnnnnnnnnnnnnnnnnnnnnnnnnnnnnnnnnnnnnnnnnnnnnnnnnnnnnnnnntcagcaatacgttgcctgtctgctccttacctccactgtattgtgttaagggaaggtgtgagggagggtaaaaagaccttcctgtctacggaaggagctttaacccaccattcagatggttcattttagaggggtgccacagtattccctccttgaggagatgcttttgtgtttatcaaaacacaatatctaatatgacagatgtcagatccagatgacagactctcctctgacttctccctgtttttactgggaagatctttttagaaaagccatcttggagccggctgtaatcctgctgcctgtttactacctccactgcctctcagttgcatgaaatggaagcctcttggaatgagatcacagtagaaaatggagaagggcttgtcccacaggcccagggttaggtagggagcaggggcatgtagttggaggtctgagtacctgtgacaaaagctgattctcatgcctgaccagggcataagaatggagaaaagacagtttgcttggtgctaaaatgagcctagagccaggaggcaaacccaaggcccaagtgctttggggagggatcactgagcttggttctgcttgcccttagtgggatgaagggcagggacttgagcactgaagtttctgggaaagaaccacaaatataagagattttgtaa

SEQ ID NO: 36776 - DNA, 629 bp, Macaca Mulatta
  misc_feature (1)...(629): n = A,T,C or G
gtataatgaaccaatacgtacctggagatcctccatgaactcatgcttatttttaacaacatcagtatctttagggaaagtaaaaatgtgagcaaccagatgggtaggttagagactgagagtaggggaggacgtggaatccgcgctcctcaccctcagacgctctcgtggcttcagcagtgtggctctggcagtgacagcctgtcacactgaccacgctgcttctccaaggtgtggagtgacagctcagtgtgaccagaccacccaggttaaatggcctgtgggctgaggcatggtgttctggactatggtcagcctttgttatactcctgaaagannnnnnnnnnnnnnnnnnngcttaaaaagctgtatgaaattattttttgcatcatgtctaaaaatgacatttttctcagttaaccccaaatgtactgacttattcagagagtgctggtttgtggactcttctcatgttttttgggtggtatctatattttaaccatttctcaaatcattagcacctttatttttagcattttgggcaggccaaaaaatgtacaggaggtacaaattgaactcatccgtttagatgcattttaatagttctagcaaaagaccctttggaaatt

SEQ ID NO: 36777 - DNA, 788 bp, Macaca Mulatta
  misc_feature (1)...(788): n = A,T,C or G
aggccctgtgataggcccattttctagaagttcccacagggcttcaaggaatttggggggcaagataaatttggaccacattaacatagaaaaaagggtctaagaataagctattcttctcatccgatcattgaaactcatattctgagtagattctctaagtctgaatatagagtctatacagctacccagaagtagaggtgtcagtgtaggggagtcagtgatagctgccaggttgcctgtatggggactggaaaatttctgatcatatagtagtgacttctcagtttctattgcaaaatacgagatgagagtggttttaagtgatagtttcagtagtggttagcacacataaaaataagtttcacagaagattaaggactttttatgatgtagacagatcagaaaataaactcaacttcagatctctatttccttttcctttgacactgaggtagtactttagtattaatgacatgtttgattttggaggaaatgcttgttcagagggagtagtataaattctcagttagattttagagttatatgttgaatggtttgaaaattaattcactctagaccactatttgacgttcaaaatgaaaccaacnnnnnnnnnnnnnnnnnnnnnnnnnnnnnnnnnnnnnnnnnnnnnnnnnnnnnnnncgcccaggttggagtgcagtggccagattnnnnnnnnnnnnnnnnnncnnnnnnnnnnnnnncgcnnnnnnnnnnnnnnnnnnnnnnnnnnnnnnnnnnnnnnnnnngcccgctacctcgcc

SEQ ID NO: 36778 - DNA, 793 bp, Macaca Mulatta
  misc_feature (1)...(793): n = A,T,C or G
ggnnnnnnnnnnnnnnnnnnnnnnnnnnnnnnnnnnnnnnnnnnnnnnnnnnnnnnnnnnnnnnnnnnnnnnnnnnnnnnnnnnnnnnnnnnnnnnnnnnnnnnnnnnnnnnnnnnnnnnnnnnnnnnnnnnnnnnnnnnnnnnnnnnnnnnnnnnnnnnnnnnnnnnnnnnnnnnnnnnnnnnnnnnnnnnnnnnnnnnnnnnnnnnnnnnnnnnnnnnnnnnnnnnnnnnnnnnnnnnnnnnnnnnnnnnnnnnnnnnnnnnnnnnnnnnnnnnnnnnnnnnnnnnnnnnnnnnnnnnnnnnnnnnnnnnnnnnnnnnnnnnnnnnnnnnnnnnnnnnnnnnnnnnnnnnnnnnnnnnnnnnnnnnnnnnnnnnnnnnnnnnnnnnnnnnnnnnnnnnnnnnnnnnnnnnnnnnnnnnnnnnnnnnnnnnnnnnnnnnnnnnnnnnnnnnnnnnnnnnnnnnnnnnnnnnnnnnnnnnnnnnnttggtgcacagcaaaaattagttatatatgggggatggtagttttttcatcttcagttgtctctgatgccgcttatacaaaataattgttgtttcggtaactgaatacccactccgtaatnnnnnnnnnnnnnnnnnnnnnngcaacagtttttgttgaactttccggatggcttcctaggtaaannnnnnnnnnnnnnnnnngaaatggttggtccttttcataagggccggaaatttttcttccttgaaggggaagacaagtccttttgccctttggccccatttttaaaatcccccgggatttag

SEQ ID NO: 36779 - DNA, 526 bp, Macaca Mulatta
  misc_feature (1)...(526): n = A,T,C or G
aggaccagcagagagaagagattccatcttccagannnnnnnnnnnnnnnnnnnnnnnnnnnnnnnnnnnnnnnnnnnnnnnnnnnnnnnnnnnnnnnnnnnnnnnnnnnnnnnnnnnnnnnnnnnnnnnnnnnnnnnnnnnnnnnnnnnnnnnnnnnnnnnnnnnnnnnnnnnnnnnnnnnnnnnnnnnnnnnnnnnnnnnnnnnnnnnnnnnnnnaggtatttacagtgagctcattctaaaaccgaaggatgtttctcaggaagagcttttggacataactgatcaattgaatatggacccaagagtcagtggtatattagttcagttaccactaccagncagaagctgtgcaactttgttcaggatttgaaatactcgggatataacagtacacagccttgctgtttgtccagtagctaaccctaaagctaaggagaaataaaaatgaccaaatgcagatgctttcctactcctgtcctgactgtgcatagattcttatcggtaagtgatcactttgtcgag

SEQ ID NO: 36780 - DNA, 184 bp, Macaca Mulatta
gaactgtttttaaatcatctctgtcaattctgaaggacctcggctctgccttatcacccctgagatgtgtgtgtttgggggtaggtggtagagagggattgccagccttacaaggaggctgaggtggggatagtgacaataaaacttaaagaagcagttgatttaagaaaaagaacagactcag

SEQ ID NO: 36781 - DNA, 191 bp, Macaca Mulatta
gctgtcagaagaagtgactgtgcacagccaagaggccaccacttcggcttggagcccgtcctctcttcatgctttggagatgggagagctgaccatgccctctaggaagagaaattcctcaggaccagatctctcctggatgcatttctataggacagcagcttcctctcctctctcagaccattcctcat

SEQ ID NO: 36782 - DNA, 617 bp, Macaca Mulatta
  misc_feature (1)...(617): n = A,T,C or G
gcaggcctgtaaccccagcttannnnnnnnnnnnnnnnnnnnnnnnnnnngacctgggaggcagaggtggcaatgagccgagattgcaccactgccctccagcctgagnnnnnnnnnnnnnnnnnnnnnnnnnngaaaacagttttaaaatgtatcaatttaaatgctgtctcctgtcctgagacagccactatttgtggtgttgtctaggcttttagaattcttcctgtgtttataaactatgtacatggccaggtgcagtaactagtgactccttcctataatcccagcacaatgggaggccaaccaaggcaggaggattgnnnnnnnnnnnnnnnnnnnnnnnnnnnnnnnnnnnnnatactccatctctacaaaataaaaataaaatgtgtgtacatctaaacttcagtgtcttgtaaatagtacatgtggtttctctttgcagtgtcactattaaaatctcagttgcacgtgaagtgtacaccttgctgtgtattacgtcacatgatttaccacataagctgtgggggtgtaggaagtggtccctgttttcagggtgagatgaatgtcagctgacccatgcttctgttttccaggatgtgtactctggcaca

SEQ ID NO: 36783 - DNA, 609 bp, Macaca Mulatta
  misc_feature (1)...(609): n = A,T,C or G
aatcaggtatgtcaaatgaagagttggccagttcaaccatgctataacatataaatcatcaataaccaaaggactgattgatctccttagtatatgtattgatactatatattgatactttgtatatacatagatactatattgatgtaatgactgctctccttagtatatatattggacccaagaaaacaatttttttaatcaatggtttcaaattagtgtttcagtgtcgttgcaggattagtatattattaatgcaactttatggataaataccaaattactcttctgtcatttnnnnnnnnnnnnnnnnnnntaaaaacattctccttaatttaggaaatacggaaaaatatagtatttattttcatgtcataccttttgtaggtacttggaaaataacttttctcaaagttgcatttaacaactttgttatagtttataacatgaacaactttggaaatatgggttaacagtcagatggttccctgtggtcttggcagaaaagccctttcagcagttgatcttatcttgggcaagtcatttaacctggctgggtcaaggtaactttctctttaaaatgaaaatattaagtaaattgtgaagcag

SEQ ID NO: 36784 - DNA, 835 bp, Macaca Mulatta
  misc_feature (1)...(835): n = A,T,C or G
agaattcatgctggagagaatccttctcatgcgaagaatgtggcaatgtctttactacatcctcagactttgctaaacataagagaattcatacaggagagaaaccccacaaatgtgaagaatgtggcaaatcctttaataggtccacaacccttatgacacataagagaatccatactggagagaaaccctacacgtggagaatgtggtaaagcctttaattggtcctcaacccttaatgtacacaagagaattcactctggaaaaaatccctacaaatgtgaagattgtggcaaagcctttaannnnnnnnnnnnnnnnnnnnnnnnnnnnnnnnnnnnnnnnnnnnnnnnnnagagaattcatgctggagagaatccttctcatgcgaagaatgtggcaatgtctttactacatcctcagactttgctaaacataagagaattcatacaggagagaaaccccacaaatgtgaagaatgtggcaaatcctttaataggtccacaacccttatgacacataagagaatccatactggagagaaaccctacacgtggagaatgtggtaaagcctttaattggtcctcaacccttaatgtacacaagagaattcactctggaaaaaatccctacaaatgtgaagattgtggcaaagcctttaaagtgtttgcaaacctgcgtaataataaaaaaattcatactggagagaaaccctatgtatgtacacaatgtggcaaagcctttaaatagtcctcacacctgaataaacataagaaaattcgcactgtagataaaccctacaaatgtaaagaatgtgggagtacttttaagcagt

SEQ ID NO: 36785 - DNA, 3720 bp, Macaca Mulatta
  misc_feature (1)...(3720): n = A,T,C or G
agagtgtctggaccttcttcattgagaacaatgtttcccatagtacactggtggcattgttctatcattttgttcaaatagttcataagacaaatgtcagtgtacagtatcgagaatatggccttcacgctgctgggctttactttttgctgctagaagtaccagnnnnnnnnnnnnnnnnnnnnnnnnnnnnnnnnnnnnnnnnnnnnnnnnnnnnnnnnnnnnnnnnnnnnnnnnnnnnnnnnnnnnnnnnnnnnnnnnnnnnnnnnnnnnnnnnnnnnnnnnnnnnnnnnnnnnnnnnnnnnnnnnnnnnnnnnnnnnnnnnnnnnnnnnnnnnnnnnnnnnnnnnnnnnnnnnnnnnnnnnnnnnnnnnnnnnnnnnnnnnnnnnnnnnnnnnnnnnnnnnnnnnnnnnnnnnnnnnnnnnnnnnnnnnnnnnnnnnnnnnnnnnnnnnnnnnnnnnnnnnnnnnnnnnnnnnnnnnnnnnnnnnnnnnnnnnnnnnnnnnnnnnnnnnnnnnnnnnnnnnnnnnnnnnnnnnnnnnnnnnnnnnnnnnnnnnnnnnnnnnnnnnnnnnnnnnnnnnnnnnnnnnnnnnnnnnnnnnnnnnnnnnnnnnnnnnnnnnnnnnnnnnnnnnnnnnnnnnnnnnnnnnnnnnnnnnnnnnnnnnnnnnnnnnnnnnnnnnnnnnnnnnnnnnnnnnnnnnnnnnnnnnnnnnnnnnnnnnnnnnnnnnnnnnnnnnnnnnnnnnnnnnnnnnnnnnnnnnnnnnnnnnnnnnnnnnnnnnnnnnnnnnnnnnnnnnnnnnnnnnnnnnnnnnnnnnnnnnnnnnnnnnnnnnnnnnnnnnnnnnnnnnnnnnnnnnnnnnnnnnnnnnnnnnnnnnnnnnnnnnnnnnnnnnnnnnnnnnnnnnnnnnnnnnnnnnnnnnnnnnnnnnnnnnnnnnnnnnnnnnnnnnnnnnnnnnnnnnnnnnnnnnnnnnnnnnnnnnnnnnnnnnnnnnnnnnnnnnnnnnnnnnnnnnnnnnnnnnnnnnnnnnnnnnnnnnnnnnnnnnnnnnnnnnnnnnnnnnnnnnnnnnnnnnnnnnnnnnnnnnnnnnnnnnnnnnnnnnnnnnnnnnnnnnnnnnnnnnnnnnnnnnnnnnnnnnnnnnnnnnnnnnnnnnnnnnnnnnnnnnnnnnnnnnnnnnnnnnnnnnnnnnnnnnnnnnnnnnnnnnnnnnnnnnnnnnnnnnnnnnnnnnnnnnnnnnnnnnnnnnnnnnnnnnnnnnnnnnnnnnnnnnnnnnnnnnnnnnnnnnnnnnnnnnnnnnnnnnnnnnnnnnnnnnnnnnnnnnnnnnnnnnnnnnnnnnnnnnnnnnnnnnnnnnnnnnnnnnnnnnnnnnnnnnnnnnnnnnnnnnnnnnnnnnnnnnnnnnnnnnnnnnnnnnnnnnnnnnnnnnnnnnnnnnnnnnnnnnnnnnnnnnnnnnnnnnnnnnnnnnnnnnnnnnnnnnnnnnnnnnnnnnnnnnnnnnnnnnnnnnnnnnnnnnnnnnnnnnnnnnnnnnnnnnnnnnnnnnnnnnnnnnnnnnnnnnnnnnnnnnnnnnnnnnnnnnnnnnnnnnnnnnnnnnnnnnnnnnnnnnnnnnnnnnnnnnnnnnnnnnnnnnnnnnnnnnnnnnnnnnnnnnnnnnnnnnnnnnnnnnnnnnnnnnnnnnnnnnnnnnnnnnnnnnnnnnnnnnnnnnnnnnnnnnnnnnnnnnnnnnnnnnnnnnnnnnnnnnnnnnnnnnnnnnnnnnnnnnnnnnnnnnnnnnnnnnnnnnnnnnnnnnnnnnnnnnnnnnnnnnnnnnnnnnnnnnnnnnnnnnnnnnnnnnnnnnnnnnnnnnnnnnnnnnnnnnnnnnnnnnnnnnnnnnnnnnnnnnnnnnnnnnnnnnnnnnnnnnnnnnnnnnnnnnnnnnnnnnnnnnnnnnnnnnnnnnnnnnnnnnnnnnnnnnnnnnnnnnnnnnnnnnnnnnnnnnnnnnnnnnnnnnnnnnnnnnnnnnnnnnnnnnnnnnnnnngtcagcagaatcccaattcaaacaccttaggacatattctgtgtgtgattgggcatattgcaaagcatcttcctaagagcacccgggacaaagtgactgnnnnnnnnnnnnnnnnnnnnnnnnnnnnnnnnnnnnnnnnnnnnnnnnnnnnnnnnnnnnnnnnnnnnnnnnnnnnnnnnnnnnnnnnnnnnnnnnnnnnnnnnnnnnnnnnnnnnnnnnnnnnnnnnnnnnnnnnnnnnnnnnnnnnnnnnnnnnnnnnnnnnnnnnnnnnnnnnnnnnnnnnnnnnnnnnnnnnnnnnnnnnnnnnnnnnnnnnnnnnnnnnnnnnnnnnnnnnnnnnnnnnnnnnnnnnnnnnnnnnnnnnnnnnnnnnnnnnnnnnnnnnnnnnnnnnnnnnnnnnnnnnnnnnnnnnnnnnnnnnnnnnnnnnnnnnnnnnnnnnnnnnnnnnnnnnnnnnnnnnnnnnnnnnnnnnnnnnnnnnnnnnnnnnnnnnnnnnnnnnnnnnnnnnnnnnnnnnnnnnnnnnnnnnnnnnnnnnnnnnnnnnnnnnnnnnnnnnnnnnnnnnnnnnnnnnnnnnnnnnnnnnnnnnnnnnnnnnnnnnnnnnnnnnnnnnnnnnnnnnnnnnnnnnnnnnnnnnnnnnnnnnnnnnnnnnnnnnnnnnnnnnnnnnnnnnnnnnnnnnnnnnnnnnnnnnnnnnnnnnnnnnnnnnnnnnnnnnnnnnnnnnnnnnnnnnnnnnnnnnnnnnnnnnnnnnnnnnnnnnnnnnnnnnnnnnnnnnnnnnnnnnnnnnnnnnnnnnnnnnnnnnnnnnnnnnnnnnnnnnnnnnnnnnnnnnnnnnnnnnnnnnnnnnnnnnnnnnnnnnnnnnnnnnnnnnnnnnnnnnnnnnnnnnnnnnnnnnnnnnnnnnnnnnnnnnnnnnnnnnnnnnnnnnnnnnnnnnnnnnnnnnnnnnnnnnnnnnnnnnnnnnnnnnnnnnnnnnnnnnnnnnnnnnnnnnnnnnnnnnnnnnnnnnnnnnnnnnnnnnnnnnnnnnnnnnnnnnnnnnnnnnnnnnnnnnnnnnnnnnnnnnnnnnnnnnnnnnnnnnnnnnnnnnnnnnnnnnnnnnnnnnnnnnnnnnnnnnnnnnnnnnnnnnnnnnnnnnnnnnnnnnnnnnnnnnnnnnnnnnnnnnnnnnnnnnnnnnnnnnnnnnnnnnnnnnnnnnnnnnnnnnnnnnnnnnnnnnnnnnnnnnnnnnnnnnnnnnnnnnnnnnnnnnnnnnnnnnnnnnnnnnnnnnnnnnnnnnnnnnnnnnnnnnnnnnnnnnnnnnnnnnnnnnnnnnnnnnnnnnnnnnnnnnnnnnnnnnnnnnnnnnnnnnnnnnnnnnnnnnnnnnnnnnnnnnnnnnnnnnnnnnnnnnnnnnnnnnnnnnnnnnnnnnnnnnnnnnnnnnnnnnnnnnnnnnnnnnnnnnnnnnnnnnnnnnnnnnnnnnnnnnnnnnnnnnnnnnnnnnnnnnnnnnnnnnnnnnnnnnnnnnnnnnnnnnnnnnnnnnnnnnnnnnnnnnnnnnnnnnnnnnnnnnnnnnnnnnnnnnnnnnnnnnnnnnnnnnnnnnnnnnnnnnnnnnnnnnnnnnnnnnnnnnnnnnnnnnnnnnnnnnnnnnncaggttgctccgtgtttagaaacagcgccagttcctgctggccaagaaaaccccgccctgtcacctgccgtgagc

SEQ ID NO: 36786 - DNA, 619 bp, Macaca Mulatta
atatgaagggaggcacaggatgcaacatatatagtcaagttacctctctgtacatttagaaattactttctcctccaaggtatttgcaacataaagctcagtctgtcctgcttaataatcagtagtacaggtttgaatcatcagaagcttggcaagaccttaatacttcagaattatcaacaactacctctaggggcaagtccatgttactgagttatgacaaatgtattatcgtgagggaaaacaagagtagccagccatcttaaaaaatgccccaaccactgcttctcaatacagaaagactaaaaactacatacagtttatcatacaacaaatcccatctctgtcccctgaaattcccctagtttcattcattagaaggggattaaaaacgaaaaaaagacttaaagagcactttacagcagcattcagctttcctatgaaatactcagcatcttaaatattatgtacaactctttttttagtaagctagacactggcttcagagtttgtgggactgggggaaatcaacccattcaaaactactctagaaattgtgttttggcagaatagcagatatccaagttaaaataggatatcattgagccagcctgccaac

SEQ ID NO: 36787 - DNA, 810 bp, Macaca Mulatta
  misc_feature (1)...(810): n = A,T,C or G
ggnnnnnnnnnnnnnnnnnnnnnnnnnnnnnnnnnnnnnnnnnnnnnnnnnnnnnnnnnnnnnnnnnnnnnnnnnnnnnnnnnnnnnnnnnnnnnnnnnnnnnnnnnnnnnnnnnnnnnnnnnnnnnnnnnnnnnnnnnnnnnnnnnnnnnnnnnnnnnnnnnnnnnnnnnnnnnnnnnnnnnnnnnnnnnnnnnnnnnnnnnnnnnnnnnnnnnnnnnnnnnnnnnnnnnnnnnnnnnnnnnnnnnnnnnnnnnnnnnnnnnnnnnnnnnnnnnnnnnnnnnnnnnnnnnnnnnnnnnnnnnnnnnnnnnnnnnnnnnnnnnnnnnnnnnnnnnnnnnnnnnnnnnnnnnnnnnnnnnnnnnnnnnnnnnnnnnnnnnnnnnnnnnnnnnnnnnnnnnnnnnnnnnnnnnnnnnnnnnnnnnnnnnnnnnnnnnnnnnnnnnnnnnnnnnnnnnnnnnnnnnnnnnnnnnnnnnnnnnnnnnnnnnnnnnnnnnnnnnnnnnnnnnnnnnnnnnnnnnnnnnnnnnnnnnnnnnnnnnnnnnnnnnnnnnnnnnnnnnnnnnnnnnnnnnnnnnnnnnnnnnnnnnnnnnnnnnnnnnnnnnnnnnnnnnnnnnnnnnnnnnnnnnnnnnnnnnnnnnnnnnnnnnnnnnnnacaccctatttcctgaattcttttgggttcacccccggaaagttccttacaatccttttatattcccccccggggcctttccggaaaataatttcctccccagcatttggtaaaacccttaacaattatctcnnnnnnnnnnnnnnnnnnnnnnnnn

SEQ ID NO: 36788 - DNA, 147 bp, Macaca Mulatta
cattgtctgtctaggtttgctaaattttctgtggaacactgtgacctctgttttccttctggttggtagttttagctgaaagtggggagagttgttattatgattgctggagatcatttctaccccaaagctagacctgttgcagat

SEQ ID NO: 36789 - DNA, 754 bp, Macaca Mulatta
gggctctccctcgtccaccgctgccgcgtgcttcttctgccgctcctggtgctgcttgtgtgctcgtttggtgcggacctggtacctcttttgtgaagcggcagctgaggagactccggcgctcgccatggccgacgaaaagcccaaggaaggagtcaagactgagaacaacgatcatattaatttgaaggtggcggggcaggatggttctgtggtgcagtttaagattaagaggcatacaccacttagtaaactaatgaaaagcctattgtgaacgacagggatttgtcaatgaggcagatcagattccgattcgacgggcaaccaatcaatggaaacaagacacacctgcacagtttggaattggaggatgaagatcacatttgatgtgtttccaacagcagaagggaggtgtcttctggaaaaggggaacctggctttctttactccagaaactctgtttctttaaagaaccaagaattaccctttctcaatttagaaaaacattggcatttttgggttcccaccaacattccttggaaaatatatacccggtaataggttttctcccccaattccttttcattttccccccctttcccccatttcccttttattggtaccttaaaaggtaaacttgggtatatatttgggcccccaaaagacaattttttggccaaccccgggccgtttccgtcttcgttataacccaaaaaccgccccaaaagggggtgagtgtttgttataaatatag

SEQ ID NO: 36790 - DNA, 739 bp, Macaca Mulatta
  misc_feature (1)...(739): n = A,T,C or G
ggggacagcaagcccacagggccaagaacaaggcctgggatcaggaggcctgtaaagccttcaagagtcaccacagctttctaaagcctcctatgcccacattgcctgacttcccactatttctgttgttttgagaggatagttggaaaggggcaggatttgagttgggggcatggagaactgcttagtcattttaattgggaactccagctaaataaatgcacagaagtgttatttaggactaaatgtatatttaatgatgaggctacactgttccttcccttccagtccaacctttggaaaagcataaggcattgattgaatatgccatttaatgcatttttttctgataccatgattacactttagaattttatgggactaaacttttaattcagatttaatttaattaaaatattatagcacacatgtgcaaaaaaagccttttcttctatcaccgaagcattacctccaaaatgtaccgtangtgtattatttctatagatgtctggagaatatgcattaatataaaatgctaatggagatttaaattaattcgtctttgacctctggaaacatggttttattttgatgcaaaaaaaataaaattggttaattcagagaaatacttcatatgtctacctcattaatanaaaagggtagtgggaaacttggccaggtagaatgnnnnnnnnnnnnnnnnnnnnnccggaaattnnnnnnnnnnnnnnnnnnnnnn

SEQ ID NO: 36791 - DNA, 793 bp, Macaca Mulatta
  misc_feature (1)...(793): n = A,T,C or G
ggctttatccactcatctgctgttgagcacctagtttgattccatatctcagccattgtgaatagtactacaataaacacggaaaacaaatttttcccactaaatttctccaagctgttgcaataataatctgtaaagagaaaccacatgtagctttgcctgaactcttttcaacatctgtgttatgtggaatagtaaaaaacacttctttagcactttttttgtgccagtcttctagacacttttctctattaacacatttaatcttcacagtcactctattaggataagatctatatatgatcccattttcaagatgaggaaatgaaggcaaagaaccaagcaagctggctttcctccctgtactcttaagttctatatcgtgctaaacatttttgagaaaataatgttttaaacatagaagaatcaaatactgatcacagagtgcaatgttcaggcttttctgtgatctggcctcaacccatctgtgcaatcacaggtccctttccccttatacactgcatttactaaaacctgtcacccactgaccaagccacatgccttataccattgcccatattccatattcagggactcaacatcctcttcttcaacatttcagctcccacttttgcattgaaagcctaagctgactcttccaaaaagatatggaagaaaaacaaaactggagtctgacttgttatgattgcagtttggagaatggtttaaagagagggtgcagtacattttagatgtttttgaattcggggatttggtttatgaaattggaatn

SEQ ID NO: 36792 - DNA, 810 bp, Macaca Mulatta
ttctatctgcctctccaggatgtctacaaaattggtggtactgatatcatccctgtgggctgagtggagacatgttctcaagcccagcatggtggtcatctttgctccagtcaatgttacaactcaagtaaagtctgctaaactgcaacatgaagttttgagtgaagctctttctggggaaaatatgggcttcaatgtcaagaatgtgtctgtcaaatatatttgttgtgacaatgttgctggtggcagcaaaaatgacccacaaatggaagcagctgcattcactgctcaggtgattatcctgaaccagccaaatcaaatcgttggtggctatgtccctgtactggattgccacacagctcacattgcttgcaagtctgctgagctgaacgaaaagattgcatattattctggtaataagctggaagatggccttaaattcttgaaatctgatggtgctgccattgttgatgtggtttctgacaagtccacatgtgttgagagactctctgactattctcctctgggtcgtttttctgttcatgatatgagatagacagttactactggtgtcatcaaagcagtggacaagaaagctgctgaaaccggcaaagtcaccaagtctactcagaagcctcagaaggctaaatgaatattatccctaatacctactactccaatattaatcagtggtaaaagaatgacctcagaactttttgtttcaattggccatttaagtttaacagtacaagattggttaatggtagcaatgcgtcataaaatcttcagaaggaaaggagaatgttttgt

SEQ ID NO: 36793 - DNA, 218 bp, Macaca Mulatta
tgtttaaaattaatatgctaattggcttataaagtgagacctgaagattgtatgctatgcataaaatgtactatggagtaatgttttttctatgaacaaattccccttttgcatacctcagataaaaacctagggggaactcacagatttttctacaaaataaatttagaagtttaacaggttacaggatattttcaaagcagcaagcttaacagtaa

SEQ ID NO: 36794 - DNA, 791 bp, Macaca Mulatta
cgcgggaatatctgccgggttttgggagacagaagaagatctggataaatccaccaggtcattcaaagaattgaacttcaccccccagaggaagtacttgccgggctccgtctcggagcaccttgaagtgctgcacatcgtttccaaacttgacagagagggagaagtccccaggagcgctctcactcttctcggaataagaaaggcccccatcgtgccgctgtttgctaagcatttcttctgccttggctctggggattttgccaaaaaaaccacggatgtggtttcatttctatgtagttcttgggaatgaagccgtcttttccattaagctctgccttgtaccagttctgatcacattcttcattcaaaaccttgaggatgtccccccttttgaagctcagctcgtcgtctgcagtagctttgaagtcatatttggcgatggcttccattctgagcgctgctcagtgcttcagcagcctgaagcagggggaagggagtcttccctgctggaagcaacccagcgctctgggcttagcctcgcctctcttctgggactcgctccggcactctgggacacacaatgccacccgtggcgcagctgctccgctcagcgtccggcccgcccctccacaacccccgcgagcggcctgcgacccagaggctgctccgcgagggcagcgcttgctcccgccgccgtcaccgccacagacacaggcacagccacagcctctgacacagacgccgcagccgcccggtcgccgaagcactagtgcctcctcgcttccccc

SEQ ID NO: 36795 - DNA, 651 bp, Macaca Mulatta
  misc_feature (1)...(651): n = A,T,C or G
ctcttctccctgatttcattggccctcgtagtgtctactaccagctatgtgatgtttactctcagatctccatttctggcttttacttcgcacccgagctttaannnnnnnnnnnnnnnnnnnnnnnnnnnnnnnnnnnnnnnnngggggaggtacccagttagctggacgaaactgagctttataattttatgtttaactgtacacctcacacgcaataggcccaacacaacttttccttcaatccattttctcctcctgtaaatggagtattatcatttggtgataatactaatgacctaatcacccatacctgggagtcatcactgactcctccctcaccaatcttttttttagcttcttcaacaatcactgacggtggtgtcatgtaccatttcttgtatctgctcccaagccattttgtgcctataactatcattatactaaccttattgttttataattgtcactttagatatttggatctctagcacctaccatagtacctgtcccaaagcagatatgcagtaatatataatgacaaactgaatagattaatgaatggatgaattacctatgttctgtcattttatttctgattccaaactaaaccctaaattcagtgcttttattaaattctttaattaccca

SEQ ID NO: 36796 - DNA, 604 bp, Macaca Mulatta
ggaatttcaccactataagggggagagacctggatactggcaaaattctgaggaactaaagccatcagatgcagaaacggttctgccatatagctccaaactgcaccaaggcagtactgagctgctctgcattgcaagagatgagcacacagcctctgcttctgatatgtcgaggctgtctctctggggaattcaaaagcttattcaaccaggagctgatggcacttttcagggcagatgcatccatgacacgacccagcagggcagctctgaagcatcccacaattctagtgtatcaaacgtgctgtctgcctctgccaccacattgactcatgtaggcggcacccacgaaagggactggtcagccattcagcaaaagtacctccttgaactctcttgccctgttttggaggccataggagtgcccaggccagctttcccctaccttgaggaagactctggttccctggcccaagcttctggtgaaggaggagatacttcattgccagttggccctaaggtatctagcaatctgaatctcaacaactttccaatccatgtttacagaatcaggcgtttgagggcagagaaagaacaggacagt

SEQ ID NO: 36797 - DNA, 783 bp, Macaca Mulatta
ggactgctttgggaggactattggcatatattaaaatacaaatatatctgtatttttctcacttttattagatgagtgcatgcttgctcaaaacaacactggattgtctagtccctgaacagccattcatatttttgttatgcttgtggtttttaaatcatcctcatttccttgattgcattttgctgggatgtgtaggaggtgggtcaggggagactttgcccatttgacagatgtgactgtggacagaggctgcagctggttagaccagggctgtgcaaccctagaggcggtgccccgaccacagagccacactctcctagtcctaatattgagaggtaggaggtggataaagattggtcggctgagccacggtccgttgttcatattttgtgacccactggagtagggatgattctttgccgtcatggcccggggcgcctggatcgagcgtctccgggtgccaatgtagtggctggctccggaaagagacagggggaggggaaaggggtcagcaactggggagagatggtttccgcgggggaaaagggcttcgtgggcccagcgcggggaagaggacagggcgcgagaacagggcgggccaagggagccgaaaacggagaagaacagtggaaaaaggggaaagggggagaaccgcgagaggggagaggggcagggcagccgggggggcgcccgccgagagagagcaggcggagagcggagcgcgcggagagagcggcagagaagcggagcagagagagtgggggaagatccgagaaagag

SEQ ID NO: 36798 - DNA, 935 bp, Macaca Mulatta
  misc_feature (1)...(935): n = A,T,C or G
ggggccgcagcattcagcagttaccatcatcctgtgtacggcaggcagcgtgtcccatttttggtttgtagaaggtggtcaccttatctattatgtggcaatgaggcatccacactcttattaaatggcctgcaaaagttatgtgcccatttccatttgttattagacattgtgctctttgcatgggtgatttaaatgttaaaaaggcattaaagcatttgttgtaataattaacaaagagattgctaggttacaaatgaatgataatgccgtattttaaaaatacagcatttcatatctgtggaaggtgatatatgttatgaaacattaatatccaaatgagatatttgaactgaaggatctccaaaaacccttctaataagtctttttctggctatctaaaatatggagctcctacaactaattaatatattttttgtgagatgttcaactgtgccacaagattttcggcatacctcaaagccagaaggccagaaacaccaatcaattagatcttaatgccccagtaaaattaaacttgaaaactttggtaaaagagggaactaaaaaagttggcgagaaaaaggccaaccaaataattttccgccataaacgataaaacaccacgattttttccaaaggaggggacccctattaacttggcgaagggagtttaacaaacaaaataccagcgaatccttaccccaagggataggttagaaagaggggggttataaaggatgatgccaaccccttcataggggagtggtatttcccgtcaatgtgggaaaaaaatagttctaaatgtccccatttagggntgaggtgtgtcggtaaaaaacccattggtataaacaatgtggagagtggagacaataattacattacgactctatgcggattactttaggaggcgatccacaatgttaagtggg

SEQ ID NO: 36799 - DNA, 127 bp, Macaca Mulatta
aagtcgaccaggccgtccccattgaggtccacgtcctggaggatctcctccacctcccgctggctgaggcgctcccccagcagggccttgagggccgcccggagctcgcccacgctgatgcggccgt

SEQ ID NO: 36800 - DNA, 3014 bp, Macaca Mulatta
  misc_feature (1)...(3014): n = A,T,C or G
gtggccctgctgctgcactacagcattgacgaagccgagtgcttcgagaaggcctgccgcatcctggcctgcaacgaccccggcaggaggctgatcgaccagagcttcctggcctttgagtcgtcctgcatgacgtttggggacctggtgaacaagtactgccaggcggcccacaagctgatggtggccgtgtcagaggacgtcctgcaggtctatgcggactggcagcactggctgtttggggagctgcccctctgctacttcgcccgggtctttgacgtctttctggtggagggctacaaggtgctgtaccgcgtggcgctggccatcctcaagttcttccacaaggtgagggccgggcagcccctggagtcggacagcgtgaagcaggacatccgcacgttcgtcaaacacatcgccaagannnnnnnnnnnnnnnnnnnnnnnnnnnnnnnnnnnnnnnnnnnnnnnnnnnnnnnnnnnnnnnnnnnnnnnnnnnnnnnnnnnnnnnnnnnnnnnnnnnnnnnnnnnnnnnnnnnnnnnnnnnnnnnnnnnnnnnnnnnnnnnnnnnnnnnnnnnnnnnnnnnnnnnnnnnnnnnnnnnnnnnnnnnnnnnnnnnnnnnnnnnnnnnnnnnnnnnnnnnnnnnnnnnnnnnnnnnnnnnnnnnnnnnnnnnnnnnnnnnnnnnnnnnnnnnnnnnnnnnnnnnnnnnnnnnnnnnnnnnnngccaggttctacttccagtggaaggaaagggcctaccctcttgctcatcannnnnnnnnnnnnnnnnnnnnnnnnnnnnnnnnnnnnnnnnnnnnnnnnnnnnnnnnnnnnnnnnnnnnnnnnnnnnnnnnnnnnnnnnnnnnnnnnnnnnnnnnnnnnnnnnnnnnnnnnnnnnnnnnnnnnnnnnnnnnnnnnnnnnnnnnnnnnnnnnnnnnnnnnnnnnnnnnnnnnnnnnnnnnnnnnnnnnnnnnnnnnnnnnnnnnnnnnnnnnnnnnnnnnnnnnnnnnnnnnnnnnnnnnnnnnnnnnnnnnnnnnnnnnnnnnnnnnnnnnnnnnnnnnnnnnnnnnnnnnnnnnnnnnnnnnnnnnnnnnnnnnnnnnnnnnnnnnnnnnnnnnnnnnnnnnnnnnnnnnnnnnnnnnnnnnnnnnnnnnnnnnnnnnnnnnnnnnnnnnnnnnnnnnnnnnnnnnnnnnnnnnnnnnnnnnnnnnnnnnnnnnnnnnnnnnnnnnnnnnnnnnnnnnnnnnnnnnnnnnnnnnnnnnnnnnnnnnnnnnnnnnnnnnnnnnnnnnnnnnnnnnnnnnnnnnnnnnnnnnnnnnnnnnnnnnnnnnnnnnnnnnnnnnnnnnnnnnnnnnnnnnnnnnnnnnnnnnnnnnnnnnnnnnnnnnnnnnnnnnnnnnnnnnnnnnnnnnnnnnnnnnnnnnnnnnnnnnnnnnnnnnnnnnnnnnnnnnnnnnnnnnnnnnnnnnnnnnnnnnnnnnnnnnnnnnnnnnnnnnnnnnnnnnnnnnnnnnnnnnnnnnnnnnnnnnnnnnnnnnnnnnnnnnnnnnnnnnnnnnnnnnnnnnnnnnnnnnnnnnnnnnnnnnnnnnnnnnnnnnnnnnnnnnnnnnnnnnnnnnnnnnnnnnnnnnnnnnnnnnnnnnnnnnnnnnnnnnnnnnnnnnnnnnnnnnnnnnnnnnnnnnnnnnnnnnnnnnnnnnnnnnnnnnnnnnnnnnnnnnnnnnnnnnnnnnnnnnnnnnnnnnnnnnnnnnnnnnnnnnnnnnnnnnnnnnnnnnnnnnnnnnnnnnnnnnnnnnnnnnnnnnnnnnnnnnnnnnnnnnnnnnnnnnnnnnnnnnnnnnnnnnnnnnnnnnnnnnnnnnnnnnnnnnnnnnnnnnnnnnnnnnnnnnnnnnnnnnnnnnnnnnnnnnnnnnnnnnnnnnnnnnnnnnnnnnnnnnnnnnnnnnnnnnnnnnnnnnnnnnnnnnnnnnnnnnnnnnnnnnnnnnnnnnnnnnnnnnnnnnnnnnnnnnnnnnnnnnnnnnnnnnnnnnnnnnnnnnnnnnnnnnnnnnnnnnnnnnnnnnnnnnnnnnnnnnnnnnnnnnnnnnnnnnnnnnnnnnnnnnnnnnnnnnnnnnnnnnnnnnnnnnnnnnnnnnnnnnnnnnnnnnnnnnnnnnnnnnnnnnnnnnnnnnnnnnnnnnnnnnnnnnnnnnnnnnnnnnnnnnnnnnnnnnnnnnnnnnnnnnnnnnnnnnnnnnnnnnnnnnnnnnnnnnnnnnnnnnnnnnnnnnnnnnnnnnnnnnnnnnnnnnnnnnnnnnnnnnnnnnnnnnnnnnnnnnnnnnnnnnnnnnnnnnnnnnnnnnnnnnnnnnnnnnnnnnnnnnnnnnnnnnnnnnnnnnnnnnnnnnnnnnnnnnnnnnnnnnnnnnnnnnnnnnnnnnnnnnnnnnnnnnnnnnnnnnnnnnnnnnnnnnnnnnnnnnnnnnnnnnnnnntttgggcccctgggcccctgccctgcctaagccctgcactggccagacacaggtaggtgccaagggaggccttgcctctgggcactgtagggggcagccccctgccttgtgacctccctccgtgccctgtgacctccttcagctggtattgagggtctggccaccacggaggggagaagggagaagtggaggcccgagtggctgttctgggaccatggaggcctgggtcacagatacaggtaccagcagtcctgcccctacttccgtccctgctggtctccagccagtgccacttggagtcccctgcactgtgccactgtccatccccacaccgttgcctgctcctcccatgaggcttcagcctcccctgaccatctgctcacgtagcctctgactgggcccatagtggtgcaggaggaaggaccgggaaccctgcgtggctttgggcaagctgacaaacccatctggaactcagtttccccaactgtgaaatggggccagtccccatgccctgctgtcctcctcacaggactgttgagaggctcgcaggggga

SEQ ID NO: 36801 - DNA, 644 bp, Macaca Mulatta
actccttcctccccaggctagttatgagccctactgtgtgttcaaactagcaaagagtttctttccataacatcacctaagactgtctgtgtgtgtggctaaataatcttcccccacccccaacacgcgcatatacacacatacacactcacactcgcacacactcacacactgtacatcttaagagtagtggcgaagcccatcttctccacagttgatttcaaaacttatcacagtacctggtacataatcagttctagaggaatatttgttggacaaacatgaggttaactaaatatttacttttcttttaatttttacaatatattttgttgttttatgtaatctctctaatccatgtggatttactttggtaatgggagaataaatccctttctcattgatacatgattcatcctttgtcacactttaaattcttacatattctcaaatgtgctttgtggctgtttttctcaagaaatctgtctttagtttcttacaataaaaacaaactacttttattattgtgtttttctgatacatacatttttaatatctagtagcacagcacccttcattaatttcctttttagaaattctatcagctattctcatttattcatttctttaagataactttaaat

SEQ ID NO: 36802 - DNA, 121 bp, Macaca Mulatta
caggctgcagaagatcctggcagagtctcccccacccgcccgtctggacatccagctgccaatcatctcagatgacttcaaattccaggtgtggaggaagatgttccgggctctgatgcca

SEQ ID NO: 36803 - DNA, 750 bp, Macaca Mulatta
agactgcggctctcagtcggaacaaagtcgaagaggctagggctgccgcgttgcgaggaatctctggaccagagcactcttccggcgtcgcccaggagatcaggggtgtggcggggcctgcgcgatcaatccgcaggcgccgtgtgatggagaatgggaaggcagttcccggcccaagtcaccaacctgttctggccagtttaaaccccactgcgaactgggaaagtggccttattcctgtgacacgggtgagagctgaagtaggtctcggtccctggccgccaggaggcgcaggcgagctacccctactccaggcccgcccgctgtgggtgggattggggagcggactccatctcggccttggcaccttctactacaacgcagacaggaacagacaactgcctcaccctgctctgggcctctcctgagctagactctgtgagattctgggacgttgcaagtcgatctgttatggggaacagaattctgaaaatggccacctccaagattccgtgcctaaatctccagaacctgtaaatatgataatctcacctatgaatagttacactacatggtgaaagggtttttgcagacataacctaaggttactcattagctgatcttaaaatagaatatgattctggattatttcggtaggtccaaggtaatcataaggggtctttaaggcagaagaggaaggttggagaaacttgaaggtagagaagagttctgtccatgagagggacaagt

SEQ ID NO: 36804 - DNA, 571 bp, Macaca Mulatta
agaccagtaactttgtttttcaaaattagtctttgtaacatagaacttacatgtgtttacttgattagattctctatttccgtcctacagctcctacactgtctatatcctgtaacctttctgctccctctcttgctcactctttttaatcagatgctatatggaaatcaaaacaattgaatgcccaacattttgtgtattacattgttgtcttaagacgtacttgttttgtgggacttggtataatactctatagtcatctgcagttgggcaatcatagctaacttttggtcatagaaaatctgcatcaaatcagtttccatgcatcagtaatattgaaggtcataatcagtgatttttgttatatgaaaataatagtgtttcacagtatttctatttaaggcagctataaatataggataaaaatatttttggagaactgtgaatgccaacttcagagggaatgatgattgaggggtgaaagagatggatggcattttaatttggcaatcacggaaataatatttccctgcaagtacccagtacatggtaaggtacaactgtgttaaaa

SEQ ID NO: 36805 - DNA, 544 bp, Macaca Mulatta
  misc_feature (1)...(544): n = A,T,C or G
ttaaaaactctcagtaagctaggttttgcaggaacatacttcaaaataataacagccatctatgacaaatccacagcaacatcatactgaatgagcaaaagctggaagcattccccttaaaaactggcacaagacaaggatgctgtctcttaccattcctatttaatatagtattggaagtcctagccagagcaattaggcaagtgaatgaaataaagggcatccacataggaagagaggaagtcaaactatcccnnnnnnngaggaagtcaaactatccctgtttacagacaacatgatcctacatctagaaaaacccactgtcttagcccaaaagcttcttaggctgataaacaacttcagcaaagtcttaggatacgcaatccacgtgcaaaaaacactagcattcttatacaccagcaacaatcaagccgagatccaaatcaggaacaaactcctattcacaattgccacataaagaataaaatatgtagaaaaaacagttaactaggaaggtgaaagatctctacaaggagaactacaa

SEQ ID NO: 36806 - DNA, 476 bp, Macaca Mulatta
  misc_feature (1)...(476): n = A,T,C or G
ggggtcaaactttaaggaaaaggaaagagatgatgaattctgtggttcctgaggtcttggcagtattcctagcccaggaggctaattgatgtgaaactcacatcatgtagaattcaccgttttaaagtgtacaattcagtggcatttagtacattgacaatattgtgcaatcatcactcctattattactttgtaaactttacaaattcattttatttatttaatggttgttacagtttgcaactaaaatagaagggaatacataaaaatattagcagtagctcttctgggtgaagtacaaggtgcaaattgttttctcctgtttgtttttctgtactttgtttattgtacacgttgtttactgtgtcacattgtttactgtgaagacttactatttgaaactaaagatcaagggcaataaactgttctttaagagtnaaanannnnnnnnnnnnnnnnnnnnnnnnnntggtcgg

SEQ ID NO: 36807 - DNA, 933 bp, Macaca Mulatta
  misc_feature (1)...(933): n = A,T,C or G
ggcttnnnnnnnnnnnnnnnnnnnnnnnnnnnnnnnnnnnnnnnnnnnnnnnnnnnnnnnnnnnnnnnnnnnnnnnnnnnnnnnnnnnnnnnnnnnnnnnnnnnnnnnnnnnnnnnnnnnnnnnnnnnnnnnnnnnnnnnnnnnnnnnnnnnnnnnnnnnnnnnnnnnnnnnnnnnnnnnnnnnnnnnnnnnnnnnnnnnnnnnnnnnnnnnnnnnnnnnnnnnnnnnnnnnnnnnnnnnnnnnnnnnnnnnnnnnnnnnnnnnnnnnnnnnnnnnnnnnnnnnnnnnnnnnnnnnnnnnnnnnnnnnnnnnnnnnnnnnnnnnnnnnnnnnnnnnnnnnnnnnnnnnnnnnnnnnnnnnnnnnnnnnnnnnnnnnnnnnnnnnnnnnnnnnnnnnnnnnnnnnnnnnnnnnnnnnnnnnnnngtggagccaataatagtgagttgaggtttttgaggtttttatttggaataagccccgcgcgcatggtttaccgggttgggcagagaaagataaaaaaaacaaccaaggccctaattttgcaaccctgcgggcccaaattaatgagatccggtttggcaaattccaccgcactcaggatggaggaaacagggttgataanagccttggagcctaggccatgacgacgttcacaaggggggggggcaaaagcaggaagaagtggtgtcgccccgagcgaaataagcgtttggaagcgccctagagccgataaaaacggtaaccaagtgctaacgggacgaagggagggtcaggaaaagtgaggcagactaaagccaatgagacacaaaaagatccaaacgctttgaacaaatgaccagggancgagacaacgaagaaaccaaacaggtaacgcgagtggtcccngcccagacatatgacaaagtaaagagtgcacctcatcaccgtcaggag

SEQ ID NO: 36808 - DNA, 500 bp, Macaca Mulatta
  misc_feature (1)...(500): n = A,T,C or G
aggaccagcagagagaagagattccatcttccagannnnnnnnnnnnnnnnnnnnnnnnnnnnnnnnnnnnnnnnnnnnnnnnnnnnnnnnnnnnnnnnnnnnnnnnnnnnnnnnnnnnnnnnnnnnnnnnnnnnnnnnnnnnnnnnnnnnnnnnnnnnnnnnnnnnnnnnnnnnnnnnnnnnnnnnnnnnnnnnnnnnnnnnnnnnnnnnnnnnnnaggtatttacagtgagctcattctaaaaccgaaggatgtttctcaggaagagcttttggacataactgatcaattgaatatggacccaagagtcagtggtatattagttcagttaccactaccagnncagaccacgttgatgagcgaacgatatgcaatggaattgccccagaaaaagatgtagatggatttcatattatcaatattggaagattgtgccttgatcagcattctctcatacctgccactgccagtgctgtttgggaaataataaaaagaacag

SEQ ID NO: 36809 - DNA, 719 bp, Macaca Mulatta
  misc_feature (1)...(719): n = A,T,C or G
ggggaaaaagaaccccataaatattcaaaactaaattgctgcaaaactgcaaaatgagggcattagagaccagtgattggtttttattcgtgttttaattttcagtgctttgcctggtacctaccatatggtaggtttttagtgtttgttttgttgatgatcaaataaattaattaagtgagaaaataacttttttccaagcttgggcagatactgagaattaagaaagggacagttaaaaattatatccgtcaagtacactgatgaaacttaacctaatggctttgggccttttggaaaacctgtttatgttacactaggcaaacgttacaaatgtttacatctttcagataaaagactcagattctataaaaggaaaagaaacgcagataatgagctgcaaagacagtaaaggcgaatggacgttgtttatatctattaacaaagtgacttctgtaggcctttcatttcctcctattgcctgatgggggtcagcaaatccttatgtgctgtttggctattgngaagtttacacatttttttcaatanataggcagtcgcacgagcaggaatgtaattccccctctccatccagagcttcaaccatgcccctgagcagtttgcagtcacaatgcccagtgacgggctaatctgctgggttgttggaaacctatttcgngtanaagagaaaaacagaatggtctggctctttaactgcc

SEQ ID NO: 36810 - DNA, 1147 bp, Macaca Mulatta
  misc_feature (1)...(1147): n = A,T,C or G
ggggggctctcggccttagcgccatttttctggaaacctctgcgccatgagagccaagtggaggaagaagcgaatgcgcaggctgaagcgcaaaagaagaaagatgaggcagaggtccaagtaaaccgctagcttgttgcatcgtggaggccacaggagcagaaacatggaatgccaggcgctggggatgctggtacaagttgtgggactgcatgctactgtctagagcttgtctcaatggatctagaacttcatcgccctctgatcgccgatcacttctgagacccaccttgctcataaacaaaactgcccatgttggtcctctgccctggacttgtgacattctggactatttctgtgtttatttgtggccgagtgtaaaaaccctcaaaataaatcgacctcttccgctcctgtttagccggggcgaagtgccagcggtgtaaccggacaaagcgctccaagacataacagtacagaagacaatccctgcgagttaatatgcggatttatttgtatgaattgagtcgtagaatactnttgtggtttgtgtggccgagccaaacattaggaggcgccccacagaatagaatataatagcaccgtgttattagattatacataacacacgccaacattcttgttctacttatattttggtgataatgntcaccgctgcccgctggcacgcggatctccccggcactatgatgataaaataagggcgtgatctatataaaggagtaccgtatacaaagaccatccagtagcgtgggcgtatacacgaaatgcatacgcacgggggagtgtggtttgcacttctcaagcgggaatgtagtaataaatatttcccctccgcaggtccgttatcatcaatattcacccgtcatgcatggagcgattttttagttgttaaatatgggtaacaaagcgcgccggacatatgantcaagtagaacgaatactgtgtgtctgatcgttgcgtggttcttcacttgcgggggcgcgcggggtgttgtattacgtaatactcacaaaactccccttagatattagtgatataactcgttatatagagatgggacaacgcgatacaaacgacgaattcacagcacactacatacggtggggcgattgacatgaaccg

SEQ ID NO: 36811 - DNA, 978 bp, Macaca Mulatta
  misc_feature (1)...(978): n = A,T,C or G
ggcatgcacttttaaaaaatgctgtaatcctgcagattgtactctaattggatttgcagaatgtggcagtggaccatgctgtaacaataaaacttgtacgnnnnnnnnaagaggccatgtctgcagaaaaagcatagatatgtgtgattttccagaatattgcaatggaacatctgagttttgtgtacctgatgtgaaagctgctgatttagaatactgcagtaataagactagctattgctttaaaggaatatgcagagacagggatagacagtgttcacagttatttggaaaatnnnnnnnnnnnnnnnnnnnnnnnnnnnnnnnnnnnnnnnnnnnnnnnnnnnnnnnnnnnnnnnnnnnnnnnnnnnnnnnnnnnnnnnnnnnnnnnnnnnnnnnnnnnnnnnnnnnnnnnnnnnnnnnnnnnnnnnnnnnnnnnnnnnnnnnnnnnnnnnnnnnnnnnnnnnnnnnnnnnnnnnnnnnnnnnnnnnnnnnnnnnnnnnnnnnnnnnnnnnnnnnnnnnnnnnnnnnnnnnnnnnnnnnnnnnnnnnnnnnnnnnnnnnnnnnnnnnnnnnnnnnnnnnnnnnnnnnnnnnnnnnnnnnnnnnnnnnnnnnnnnnnnnnnnnnnnnnnnnnnnnnnnnnnnnnnnnnnnnnnnnnnnnnnnnnnnnnnnnnnnnnnnnnnnnnnnnnnnnnnnnnnnnnnnnnnnnnnnnnnnnnnnnnnnnnnnnnnnnnnnnnnnnnnnnnnnnnnnnnnnnnnaaaagtgtacccttgtttccaaaacaacgtgctgctcctaaaaacaatggtcttttgatcagtttctacatttttttacctttgctcattttaattgctattgttagtcttaaatggaataaaatgaagagattttggagcaaagtgggaacagtaagcagcannagatctatctcagaagacagcagtagtaacaacagccagtcacagagttaaag

SEQ ID NO: 36812 - DNA, 514 bp, Macaca Mulatta
  misc_feature (1)...(514): n = A,T,C or G
accacgtgagggagatgcgttgctcccggagccgttgaaatctcatggccatcccgtgcggcttcttttctgagatcaagacgaacacagtccagccacggacaaaagccgcacgggagctcattgtccggcaggagaggaggaggcccacatcacagaagaggcttggatcttttcagggctcttctctgagaaaagaagccacaccacgacacaggctgaaagaggaagccgggaatgggagatgaccacaatcccagtcactggaacgctggcctcactaancaagacacccgtttggcacccctctgatgaagcccgtggcagtggcacggtgctctaccccgcctgggctctggcctctcctccgtcctccctctggctgtgtatcccctgtttctccggggcttagatgcttcctgggctggctggatgtcttccagaaggatcacttcccagtccatcagggagacacttcctggagagcccaaacatgattgtttctctctgcaaa

SEQ ID NO: 36813 - DNA, 852 bp, Macaca Mulatta
  misc_feature (1)...(852): n = A,T,C or G
gggattgtaggtgtaatgccttaatcatctttttgaatgttttctcagagctgaaggttgctgggccacctaaatgatgtttcatgatagctttgggtgattttattgctatttataatttgctgtataaagtgagcactacttaatttgcaagctgatttctcacagtgtaaatttgttcattcctggtagtctattttctataaaaatgtatttttgcacaacatttttaaaaactggtgtaccttcatctatgatgtgttcaggcataaatccagagaagtgctttatatgaaatgtattattttgaacagaatttgtgatttggtagttattttatgttgttgaaatttgaatttcacaattcttagataattatttcaaatggatattgaaacatttttgttaccagatgtttggcccattccattttgatgaaacagagctgttgttttggaaatcattatttttctagaaatggtgaatcttttaaagaaaattatctaatggaaggttgtgggaaggtgttttttttcttttttgtcccgttttaagggatagtaccaggtcttacttaaatgaaagtctgatatttgctgatggcagaatggttattctgtaccctggttgatatgtagagtagatcgtctggtgctctcaattgttnttattgacatttgttattttgttataaagagaatgtttatatggtataaaactctgtgacaagataagcctcctgctttaactttcttggatccaactaagagatttataaactaaatgggcataatgtctgggagcaacccctggncagttacangcaggagaaccactgtctttaatatttct

SEQ ID NO: 36814 - DNA, 529 bp, Macaca Mulatta
cagtacattgagctccatagagacagccccggggcaagtgaaagccggacgggcactgggcaactctgtgccttgctgaggaaaaataactaaacatgggcaaaggagatcctacgaagccgagaggcaaaatgtcatcatatgcatttttttttgcaaacttgtcgggaggagcataagaagaagcacccagatgcttcagtcaacttctcagagttttctaagaagtgctcagagaggtggaagaccatgtctgctaaagagaaagggaaatttgaaggtatggcaaaggcagacaaggcccgtgatgaaagagaaatgaaaacctatatccctcccaaagggaagacaaaaaagaagttcaaggatcccaatgcacccaagaggcctccttcggccttcttcctgttctgctctgagtatcacccaaaaatcaaaggagaacatcctggcctgtccactggtgatgttgcgaagaaactgggagagatgtggaataacactgctgcagatgacaagcagccttata

SEQ ID NO: 36815 - DNA, 264 bp, Macaca Mulatta
tgtagtttatgtaatgtaattgacaggatggctgctgcagaatgctgggtgacacagggattgttatactgctgtttttccctgaattttttcctttgaattccaactgtggaccttttatatgtgccttcactttagctgtttgccttaatctctacagccttgctctccagggtggttaataaaatgcaacacttggcattttttatgttttaagaaaaacagtattttatttataataaaatctgaatatttgtaaccctt

SEQ ID NO: 36816 - DNA, 583 bp, Macaca Mulatta
gcgaggaatcggcacgaggctctgcttttagacctggttacagtatcaccatccttatttacagaagggcaaaactaactcaatgataaaagctttataagttcaagggttgtaaaacatgacctacttagggtactctgctttctatgggaacttggctagacttagaaaaagatgttccgtggccctaattgtaaagtgtcatacaatttagtagatttttgaagatggtaaacttagaattctgtgttctgaattgccgacttttagaatgtttttctttgaaaacaggctaatatctttttcttttcttgacaaagtttcagctctttattgtgtcatttttctggtttaaatttcccttatctttccacctgtaatgtcagtggcaacaacatcatacttcacttacttgttaatttactttttacccttattctaagagcaagttgagttgaactgaatcttccttgtcctagtaacaatgtataaatagtggcttctctgtacaaaaggttgtaatgcctcctgatggatataattttgtgattgtattttaaagttgaataaatcacaccagctt

SEQ ID NO: 36817 - DNA, 1904 bp, Macaca Mulatta
  misc_feature (1)...(1904): n = A,T,C or G
ccaggattttcctaccatctcagagcacccacagatcttctcaaacacgtctcctcagtggggaggcttatacagagagggagatggtgttcctggtgtccaggtcccactgggcacagggcctgcagggctgaggtagaacccactggaacccggagtggccctagtgaatgtgaaagcccatttgtcacaggtgtggtcagggggtggttctggcttcgagattgagccatgtggatccgtaaggggtcacctgctgcctttctctgctttgcaaaaaagtccatgtgggtttttttctctgcaggcaccctggagagggggaacctccttggccaaagccctcatctctagccttcagacacagatccccaaggcccnnnnnnnnnnnnnnnnnnnngctccccgggtcctggtgaaggtccaggccaggccaccaccccaagggcccgctgtcctgggggaagctgagcctcctgagtaggcctctgaactgcggttggaggaagggctggagaggagatgagaagcggcagactggctgagagactgctccgagggcagcctcttgcccggctgtttatttactggagttatttttcctcatcgttccctttctttggtgnnnnnnnnnnnnnnnnnnnnnnnnnnnnnnnnnnnnnnnnnnnnnnnnnnnnnnnnnnnnnnnnnnnnnnnnnnnnnnnnnnnnnnnnnnnnnnnnnnnnnnnnnnnnnnnnnnnnnnnnnnnnnnnnnnnnnnnnnnnnnnnnnnnnnnnnnnnnnnnnnnnnnnnnnnnnnnnnnnnnnnnnnnnnnnnnnnnnnnnnnnnnnnnnnnnnnnnnnnnnnnnnnnnnnnnnnnnnnnnnnnnnnnnnnnnnnnnnnnnnnnnnnnnnnnnnnnnnnnnnnnnnnnnnnnnnnnnnnnnnnnnnnnnnnnnnnnnnnnnnnnnnnnnnnnnnnnnnnnnnnnnnnnnnnnnnnnnnnnnnnnnnnnnnnnnnnnnnnnnnnnnnnnnnnnnnnnnnnnnnnnnnnnnnnnnnnnnnnnnnnnnnnnnnnnnnnnnnnnnnnnnnnnnnnnnnnnnnnnnnnnnnnnnnnnnnnnnnnnnnnnnnnnnnnnnnnnnnnnnnnnnnnnnnnnnnnnnnnnnnnnnnnnnnnnnnnnnnnnnnnnnnnnnnnnnnnnnnnnnnnnnnnnnnnnnnnnnnnnnnnnnnnnnnnnnnnnnnnnnnnnnnnnnnnnnnnnnnnnnnnnnnnnnnnnnnnnnnnnnnnnnnnnnnnnnnnnnnnnnnnnnnnnnnnnnnnnnnnnngaacagtgacagtgacatgcaacctgcctcatgcagttgttgagtgggatgcacagggactgtcctagcacagcactcaaggaagggtggccatggccttagtttgtcaccatcattatcctgtctctgttgagtggcacctcctgagggagctgtgtttgctcagccgcagtaccggcccccatctccccctgtgggtcgggcacctgcccgaggcggaccttctgtgaggacggagggagggtgcctgcacttcttgcctcgggagccaagagtcagccagacaggcagctctctcagatggagatcctctgaagactataaagatttgtttgtacgtctttctctggggtttgagaatctagataagtagagaaaaatggagggagggtggaagggaagacttaaaaagggaatgacagggaggggaacatcacacactggggcctgtcatggggtgaggggctaggggagggatagcattaggagaaatacctaatgtagatgacgggttgatgggtgcagccaactaccatggcaggtgtatacatatgtaacaaacctgcacattctgcacatgtatcccagaacttaaagtat

SEQ ID NO: 36818 - DNA, 645 bp, Macaca Mulatta
  misc_feature (1)...(645): n = A,T,C or G
gggggaggagaagccgggagctagcccaggcggcagtcttgattctcttttggccagcagtttttaggtccatcagtactgcactgcaagaatggcagattttgggatctctgctggccagtttgtggcagtggtctgggataagtcatccccagtggaggctctgaaaggtctggtggataagcttcaagtgttaactggcaatgaaggccatgtgtctgtggaaaacatcaaccagctgttgccatctgcccacaaagaatccagccttgacattatttttgtcgggttttagtcccgggaaagcccccctctgcccagtgctgaaaattttggcctgaaatcccccgggatccttccggcctggtggannnnnnnnnnnnnnnnnnnncccgggtaaaaaccgctgtttaattacaatttccaaaagtgaaaacccccttttaaccctggttctgccccccgaccttttttgggtttttgtgaaagtaaaaaaactcccccgggagccccctaacccttgaaattctttttgcaaaggggggnnnnnnnnnnnnnnnnnnnntgggggggnnnnnnnnnnnnnnnnnnnnnnnnnnnnnnnnnnncagattttttggggccgccttcccacaaagggagggg

SEQ ID NO: 36819 - DNA, 553 bp, Macaca Mulatta
cactagccaacaacccagatgcccaacataagccgggcaccatcctcaccaagaagtgctggaaagagaccatctttgcctgacacagcactcttcctgtgggctgagggcatctcggaagctgcctgatgcctgttcttcagaaacctcacatccctctttccaggtcctcattcttgggttatgggggcttaggaaaacaatcagactcgctagcccagaccctcaggtcgggaggcctgcgtgtggggctgcaaaaggagcagacaacgctgttggaggcagggagaggaaattaccacagctttttggcccagctctgcccttctttgctttgggattgcgctgggccatcagctcatgccaggctgtgggggcagccatttggcattgctgcccagactgaacagaaacctggctgcctgatgggacctcctttggcacagacttgactgtgtaactgtataaactgcagcagcattgttgccctagatgccccaggggacctggcaccatgaagattacggacagtggaatcttcctgtcatctgga

SEQ ID NO: 36820 - DNA, 561 bp, Macaca Mulatta
ggcccctgatccccactcctccctctgtaggtcctggcagatctgggctccaagacactgaccgggctcttcagagcctgggtgcgggcaggcttggggggtcggcatgtggccttcagtggcctggtgggcctggagccggccacactggctcgcagcctcccccgactgctggtgcaggccctgcaggccttccgcgtggctgccctggcagaaggggagcccgagggacactggatggatgtagggcaggggcctggactggagaggaacgggcaccacccactcaaccctcaggtaccccccgccaggcaaccctgagccatgtctgggcccccagcccctggggaggagctactgctcccaggagctgagagcggctcgggagcataatcacaaactgttgctgccatagtggctgggtgtgtgcgggagggatggggtgggggtcctgggccctccgtgtcttcccaggtttacaatcagagaatcacagctgctttaataaatgttatttataatacatggaaacaactctggagctttcttgggacgggacct

SEQ ID NO: 36821 - DNA, 836 bp, Macaca Mulatta
  misc_feature (1)...(836): n = A,T,C or G
gggaggcattgaggcagccagcgcaggggtttctgctgaagtggcaggcgcagcttgaggaacccgcagataagttttctctctttgaaagacagagattaatacaactacttaagaaatgtagtcagtagcttactaagattttgcttagcattaggttcttaacgtaatttgaataagattttaagagaaaatatgaagagttaaaagtgtagcgtgagnnnnnnnnnnnnnnnnnngtttctaaaacatgacggaggttgagacgaagcttcttcaagaagtaaaaaaatgtatttaaaagaaaattgagagaagggacgccagagccctgaattaataccagtagaagggcagtgcttttagattaaaatgaaggtgatttaaacagagcttaaacgttgtttgaaaagttgtaggtgattaaaataatttgaaggcgatcatttgaaatgagattaaatcgaaggtcattaaaagaccttgaactccatgacgcagggagagttgcgtcatttaaagcctagttaatcttaacgccgtttgctaaacgcagacgaaaaataagaaagattaattggggagtgggtaggatgaaaccacctggacaaagattagaaagtttgaagcggaaaccccgagaacgaaagtccgcggagggccggatgcgaatggggtgccgcaccgccctgccttgtgccgccgccttgggcccccgaaaaaggttttctaaacccttccgttttggccccgcggcccccgggacggcaaaccgaacggggggcgccagcctgttttcccaaggaaaacccgggccctacgcccttaggggcgcg

SEQ ID NO: 36822 - DNA, 852 bp, Macaca Mulatta
  misc_feature (1)...(852): n = A,T,C or G
ggcatacttnaaaacttaaaaatatgggctgaattttttatggacttgatttttatgactattggtatctaaaggtcaaggaagccatttacattattttggatgaatctgctatacatctatggaaatgcctcttttttattttaaattctggtttctcgacggaaaatttcagaaaagatgccctttgccattttcgtttatttttcagtcttttctcagacacacccccagcctaagaccttgttcgagcagtttattgtgtctgtctttnnnnnnnnnnnnnnnnnnnnnnnnnnnnnnagacggagtctcannnnnnnnnnnnnnnnnnnnnnnnnnnnntagatctcatctcactgcaagctccgcctcccgggtttacaccattctcctgcctcaaccccccatnnnnnnnnnnnnnnnnnnggcccaccacccttgcccggcatagatttttgtaatatttttacatacaaacaggggaatacactgatgttagaccaaggaaaggtctcgaatctcctgaacatcaggattcggcccggtctcgaccctcctcaaaatagatggggaataaacaggcaatgaagcctaccaacccctagacataaaacgcgccaatgaacataacagtatatgcagcaaaaaggatatatacaaaaggaaaacaaaaatatagttgggatattatgtaacaccaagattttaaaaaggaaaggcataaattacaggtaaaaatttgaaattcgtaatgagctcagggaaaacgttaatagcggcgtcggagtaacataataattatgacacagaaaaggaggcccacctctcaatagtactatagataagcag

SEQ ID NO: 36823 - DNA, 669 bp, Macaca Mulatta
  misc_feature (1)...(669): n = A,T,C or G
ctccccatgtctctnngagccttcctctntcnttttctttccctctgccatcctgacactgatagtttgtcatataaatccccccggnttgtgttttttttctagannnnnnnnnnnnnnnnnnnnnaaaaccaaaaaaccagaaaccacaaataacaatggaaatgccaatggctgcctgtcatttttgtcacaattttcctgatttggtttgttcccttcatctcagagaagcaggagacattgatgaggctgtnnnnnnnnnnnnnnnnnnnnnnnnnnnnnnnnagagtctcgnnnnnnnnnnnnnnnnnnnctgcagtggcgtnnnnnnnnnnnnnnnnnnnnnnnnnnnnnnnnnnnnnnnnnnnnnnnnnnnnnnnntnnnnnnnnnnnnnnnnnnnnnnnnnnnntgccactgtgcccggatacnnnnnnnnnnnnnnnnnnnnnnnggggttttnnnnnnnnnnnnnnnnnnnnnnnnnnnnnttgacctcaggttatccannnnnnnnnnnnnntnnnnnnnnnnnnnnnnnnagcatgagccaccgcgcctggccaaagatgtaatttaaaatggttagaagggacttggcatgggccagctccgtgcgtgacattttcacccccagagctttctaatcctgttttcacacaggaagc

SEQ ID NO: 36824 - DNA, 2181 bp, Macaca Mulatta
  misc_feature (1)...(2181): n = A,T,C or G
gcactgccaataactccaaccgcagcactccggcctgctcgcccatcctnnnnnnnnnnnnnnnnnnnnnnnnnnnnnnnnnnnnnnnnnnnnnnnnnnnnnnnnnnnnnnnnnnnnnnnnnnnnnnnnnnnnnnnnnnnnnnnnnnnnnnnnnnnnnnnnnnnnnnnnnnnnnnnnnnnnnnnnnnnnnnnnnnnnnnnnnnnnnnnnnnnnnnnnnnnnnnnnnnnnnnnnnnnnnnnnnnnnnnnnnnnnnnnnnnnnnnnnnnnnnnnnnnnnnnnnnnnnnnnnnnnnnnnnnnnnnnnnnnnnnnnnnnnnnnnnnnnnnnnnnnnnnnnnnnnnnnnnnnnnnnnnnnnnnnnnnnnnnnnnnnnnnnnnnnnnnnnnnnnnnnnnnnnnnnnnnnnnnnnnnnnnnnnnnnnnnnnnnnnnnnnnnnnnnnnnnnnnnnnnnnnnnnnnnnnnnnnnnnnnnnnnnnnnnnnnnnnnnnnnnnnnnnnnnnnnnnnnnnnnnnnnnnnnnnnnnnnnnnnnnnnnnnnnnnnnnnnnnnnnnnnnnnnnnnnnnnnnnnnnnnnnnnnnnnnnnnnnnnnnnnnnnnnnnnnnnnnnnnnnnnnnnnnnnnnnnnnnnnnnnnnnnnnnnnnnnnnnnnnnnnnnnnnnnnnnnnnnnnnnnnnnnnnnnnnnnnnnnnnnnnnnnnnnnnnnnnnnnnnnnnnnnnnnnnnnnnnnnnnnnnnnnnnnnnnnnnnnnnnnnnnnnnnnnnnnnnnnnnnnnnnnnnnnnnnnnnnnnnnnnnnnnnnnnnnnnnnnnnnnnnnnnnnnnnnnnnnnnnnnnnnnnnnnnnnnnnnnnnnnnnnnnnnnnnnnnnnnnnnnnnnnnnnnnnnnnnnnnnnnnnnnnnnnnnnnnnnnnnnnnnnnnnnnnnnnnnnnnnnnnnnnnnnnnnnnnnnnnnnnnnnnnnnnnnnnnnnnnnnnnnnnnnnnnnnnnnnnnnnnnnnnnnnnnnnnnnnnnnnnnnnnnnnnnnnnnnnnnnnnnnnnnnnnnnnnnnnnnnnnnnnnnnnnnnnnnnngaggtccaggccttctatgaggacctgagtggccggcagtacgtgaatgaagtcttcaacttcagcgtggacaagctctatgaccttctcttcaccaactcacccttccagcgggacttcatggagcagcggcgcttctctnnnnnnnnnnnnnnnnnnnnnnnnnnnnnnnnnnnnnnnnnnnnnnnnnnnnnnnnnnnnnnnnnnnnnnnnnnnnnnnnnnnnnnnnnnnnnnnnnnnnnnnnnnnnnnnnnnnnnnnnnnnnnnnnnnnnnnnnnnnnnnnnnnnnnnnnnnnnnnnnnnnnnnnnnnnnnnnnnnnnnnnnnnnnnnnnnnnnnnnnnnnnnnnnnnnnnnnnnnnnnnnnnnnnnnnnnnnnnnnnnnnnnnnnnnnnnnnnnnnnnnnnnnnnnnnnnnnnnnnnnnnnnnnnnnnnnnnnnnnnnnnnnnnnnnnnnnnnnnnnnnnnnnnnnnnnnnnnnnnnnnnnnnnnnnnnnnnnnnnnnnnnnnnnnnnnnnnnnnnnnnnnnnnnnnnnnnnnnnnnnnnnnnnnnnnnnnnnnnnnnnnnnnnnnnnnnnnnnnnnnnnnnnnnnnnnnnnnnnnnnnnnnnnnnnnnnnnnnnnnnnnnnnnnnnnnnnnnnnnnnnnnnnnnnnnnnnnnnnnnnnnnnnnnnnnnnnnnnnnnnnnnnnnnnnnnnnnnnnnnnnnnnnnnnnnnnnnnnnnnnnnnnnnnnnnnnnnnnnnnnnnnnnnnnnnnnnnnnnnnnnnnnnnnnnnnnnnnnnnnnnnnnnnnnnnnnnnnnnnnnnnnnnnnnnnnnnnnnnnnnnnnnnnnnnnnnnnnnnnnnnnnnnnnnnnnnnnnnnnnnnnnnnnnnnnnnnnnnnnnnnnnnnnnnnnnnnnnnnnnnnnnnnnnnnnnnnnnnnnnnnnnnnnnnnnnnnnnnnnnnnnnnnnnnnnnnnnnnnnnnnnnnnnnnnnnnnnnnnnnnnnnnnnnnnnnnnnnnnnnnnnnnnnnnnnnnnnnnnnnnnnnagatgaaggactcgctcatcaaccttcagaatggcatcaggtcccgcgactacacgtcggaaagtgaagaaaagaggaatcgctatcattga

SEQ ID NO: 36825 - DNA, 635 bp, Macaca Mulatta
cttccagaactgacctgtggatttagcttttccggccttagttggttctaggttctgggggaaccccacacttccagtcgtcccttcctcccaaaatgcaaaatgcagggttttcactgcccctcttgcacatgccaggatagctagacctggtctacaaaccctcaacggtagttcagagccatacacagtgctgggccccatgatctgcgattattttagcattactaagaacattgttgatattattaatagctactatgtatcgggtatttacatacacaaggaagtggttaatttgtatactctgtcttttaattccagtaaccaacagtaagatagtctttataattcacatttttcaatgtgcaaacaaaaccttgagtttcagagaaggtcaatggctgattccaaatgcaagccttgtccgcctaacttcaacaccgtgtatacccaggtgtcacacgatttctctgaatcctcaaatcacggcgtccaacagttaccatttaccttttctcccagaagcagtcttgagtggtttcccttgtcaacattgtatcccagtgtgtgtgtccatagtgactagggtgaggctcccacagtcatggctggaggtgtgagactgggttcag

SEQ ID NO: 36826 - DNA, 84 bp, Macaca Mulatta
  misc_feature (1)...(84): n = A,T,C or G
tgtgctagagcctatagcagcggctggtactcgtacaaccggttcgatgtctggggcccgggagtcctggtcccgtcntcctca

SEQ ID NO: 36827 - DNA, 690 bp, Macaca Mulatta
  misc_feature (1)...(690): n = A,T,C or G
ggtccaaaggcatcatctccaattgccatcatattgggggttagagcttcaacatgtgaatttgggggacacacaaacattcagtctataatgacaaagatgacatggtagagcagtggagaaaggatggtcttttcaataaatatgtttatggaaaaaaaatgtatgttgattctctacttcacgtcattcataaaaagttctacatgaattgttgatctaaatgtgacaggtaaaacaatagagcttctagggaatacctaggggaatatatttatgatcttgaatacaccaatatttcttaaactacatacataaagcactaaccataatggaaaaagttaattaaatataataaaattaagaatgtttgttgatttttaaaaatctttcaggttgcttggtggatacaatgtgcattattccagtgatggatacactgaaggccttgacttcaccacagtgcaatgtatcaatgttgttaaattgtactcatatcccgtgaatttatannnnnnnnnnnnnnnnnnnnnnctttcaaaagaatgaaaaaacgaatcactgagtaccagatgatgttagtaatgcatttccctataaaagactcatattgacaatgtataaggaacctctgtcaataaaaataaaacagctcaataaaaaaaatggggcaaaaaatgtaaaacgggg

SEQ ID NO: 36828 - DNA, 330 bp, Macaca Mulatta
tggctgagttacgagcagagcaaccatagatcccgttatgctttgtactaatttgggggataaagagtctttcctgattgacaaacttcccattaatctccaagatatcgcgtgtaatcgacagaaagatattctgacgtaatccggagggaatctggaatcagaccataagaatagggtgtcccgtgatcatggttcttcatttcaaattcatagggtccgcagtatcctttgtgacaccaatgacgaggtctttgttccagacagctgcactggatataggagcttgccgttaccaccacagtagcttacatcactgagtgtcagatc

SEQ ID NO: 36829 - DNA, 746 bp, Macaca Mulatta
  misc_feature (1)...(746): n = A,T,C or G
ggcagagagaaatactgaaaaatgaagactttttcaaatgttataatatggccatttataaatgactatttatatatgtcagttgcatacatagtgacagttatagtaaaacactaggaacctacacttaaagagaaaaagcaaacaaaatcctgtacataaaataagcacacatatataaggatttgaatctatgtatatatattttatacttttcaacatttgtgttttattacgttaacataaccatttacagttattccagaaatttcagtcatacacagtgctcttgaatacaaagaatggtctagtgtgttagtattttcatcaagtacagtcctagaaaatgtcaagttgaacaataagatattgaggcacattggtcactgaattctgaattctttagcacagtcagaggaagtagttaatatatttcatgttgattctttggctactcttgattttgctttgggtaacatcttcatcctgggaacattcattaccacttaatagcaagatannnnnnnnnnnnnnnnnnttctttgccacatttaatagcatgtttaaagaggcagaggttgcaatgagctgaggttgnnnnnnnnnnnnnnnnnnnnnnnnnnnnnntgagacattgtctccaaaaaaaagtgtttaaaatgagaccaaaccctcatggagacatttctctgttctattagaaatgcaatggcattctcatagatcctctttcttttttatgatcc

SEQ ID NO: 36830 - DNA, 181 bp, Macaca Mulatta
aggacctggtctcttgccttgcctgcttagaaagtgttttcagccggttctatggcttgggcagctccacaactcctgtggttcctgccagcctgcacggcctgctctgtgctgccctgcaggcaagggcattgctgctcaccatctgccccagcacccaaatcaacgacatccttgacag

SEQ ID NO: 36831 - DNA, 625 bp, Macaca Mulatta
cagtttacaagtggtggcagttaccttactactgggtaggaatcaagctgtatgattttgttgcaggaagtaattgcctgaaaagcagtatgtcctcagcaaatcaagagcccttgaatattgcccaatgctccagaaggacaaactggtaggaggaattgtctgctatatgggcgacataatgatgcatgaatgaatcttgccattgagctgactgctgacagatatgggggtgccacagtcaatgacagggaggtagtgagcttgctcaagaagacagacaccaagacagggaaactgcatgtgagtggtgcatggtgcaaggatgtcctcaaagggcaggaatgtgacatgagagccaaatgtgttatcaatgccatgggacatttcacagacactgtgtgcaaaatggatgataaggacgctgcagctatctgccagccaagtgctggtgtccatattgtgatgcctggttattacagcccagagagcataggacttcttgaacagtgatggatgagttattttcttcttaccctggcaaaagatgatgactgctggcactactgatactccaactggtattacacaccatccacttccttcagaagatattaacttcatt

SEQ ID NO: 36832 - DNA, 718 bp, Macaca Mulatta
  misc_feature (1)...(718): n = A,T,C or G
gggtactatttagtttgcttccttgtaagaagctttcagatgtctcacttgctggtgcctgttaaattaagctttggataacagtacaaaatttggccaacatgaatgcctagttcaccactaatgaaagctgggcactgcagatgttctgctgtgcttcaaaaatcagaagttgccagcttttatatctagactgtgatttcctcatagaggattttgtatatgccaattcaaagtttaaatttgtgccatgtgtgaataagtgcacaaaatgcccaaataagaatgagaaaaatatctccttttcccatccacattgagatacctgaaacagctatgaaatacagtttttcttccagttttccaaaatacttatttgggttgagaccaagaatggagcattttaggccaaaatgctttttgaaaattttatgatttatgactttagaaaaaatctcttttggactttaagcatgttatttttaggatgtcttattcatgaacaaaacaaattttttacataggtgaaataatttaggtgtttgtataagtcagttatctctataatatatgacttttatatttgtgtttttcagttacattcagtagcccacatttgtttagtaacaaaattaacaaaaattgctgtcattatttttgagttaattttcaancttgtatttttaattttgctaaaatacatttcctagcactattt

SEQ ID NO: 36833 - DNA, 90 bp, Macaca Mulatta
acacaaagtctcagcatggctatgatctaaacgaacatgggcgggttactaaacctcccaaactaatttcctccatctcataggtcaccc

SEQ ID NO: 36834 - DNA, 637 bp, Macaca Mulatta
  misc_feature (1)...(637): n = A,T,C or G
gatcggcacgagggctgcagacctgcatctnnnnnnnnnnnnnnnnnnnnngggaaacttgcaactttgactgctacagaaattctattcatataacataaatctcagaggcaatatataataatcagctttttaaatagttgaaaaatagcattttgaacttatgaaatttaaatatgagaaaattaatttccttcagtgaactgaagacttatagacaatatttaggttcaagagccttttcagataatggtgcaattttatttttcgccatagtaaagtcactgaaataaaatgataatgcagtaacatcncgtaagactagncatattcgtcacatttggttttggtgaacaatgtatttcnttccttttaaactacttgacatttcctacctactttatttgtaaattgaaactgatattaaacattatctccaaatctcaaaactcctttcggaaagttccaaaattttataaacccatccctttcttactcttttcatttttctctttttctttaatgcggaaagcccagaagactcctaacttggtgaccgtgtttcttacatcaggctatgtctaacatggaactggggttcatttggagccagggagtgagctcagacatcttgtgt

SEQ ID NO: 36835 - DNA, 591 bp, Macaca Mulatta
gaattgatttgcattagtcttgaatgtgttaaattatgttgaaagtatgaaagcaggatgtaggtggtactatatattaaataagattatataacatgtgcctgtgtcctgattcagtattactgtgtcctgtaaccttgaaatggagaggaggtaagagggacatttttttatgtctgtctgcattaaacatgtgttgaggcatccaagacccttcacatttcaggtttttattggtttaaaacctctttccggtttgtattggtttgtctttgctaaatacagtatgttactctgcaagtcacatataagtagaccttatgacatttccagttgaaactaggcttgttttcggtacacaggtgaagacttgaggaagccagtgccagggaggacgtgcctcacccccctgctggctgaatgcgcttcatccgcttacgctttgctttctgtatgctttctgtccttctgggtggtgtcgtgtatatttttaaaaccacattcagtgtgatgaacacttgttggtacacttctaaggttagtcatctttccttctccacacagatccttgagaagggcattgacagtgga

SEQ ID NO: 36836 - DNA, 690 bp, Macaca Mulatta
  misc_feature (1)...(690): n = A,T,C or G
ggggagtcagttccgcggtagaggtgacctgactctctgaggctcattttgcagctgttgaaattgtccccgcagttttcagccatgtctgaaccaatcagagtccttgtgactggagcagctggtcaaattgcatattcactgctgtatagtattggaaatggatccgtctttggtaaagatcagcctataattcttgtgctgttggatatcacccccatgatgggtgtcctggacggtgtcctaatggaactgcaagactgtgcccttnccctcctganagatgtcatcgcaaccgataaagaagaagttgccttcaaagaaccctgaaatggtggcccatttctcgtggggccccatnnnnnnnnnnnnnnnnnnnnannnnnnnnnnnnnnnnttaccgggaaagccnnnnnnnnnnnnnnnnnnnnaaattccccaggggtggccaccnnnnnnnnnnnnnnnnannnnnnnnnnnnnnncccgtttttaagggtttattttggtttggggggggaaaaccccccgccccccaaaaaaccaaaaatggggccctgaaaaagggggtcctccaaaaatttggggggggtccccattttcacattnnnnnnnnnnnnnnnnnnnnncttcccggttttgggcttttgaaaccccctctttgggggaatcccacaacccgcggggatt

SEQ ID NO: 36837 - DNA, 864 bp, Macaca Mulatta
  misc_feature (1)...(864): n = A,T,C or G
ggtcatcaaatgccattattgcaaaaatgccatatcattttaaacaagattaaaattttgacatgactggcttgtagagtatttgaatagtgctgtggcaaatagctatttctcttgcgttaggttgacttataaagtgcatcctgtatggaattcagtttatagatggtctctgttaagcttctcaaactaaagagtctatttcagggattgaaaaccatcatatgcaaatgaatagcaggcaaaattttcatgatatgaatgatatcatgaccaggagattcaagaagggctaaacttaccttgtctcaaggtttctacaagcacaaaaggatcgcaaatagcatttaaatagtataacgttgtttggtgcatgcccctaaaaatgtgataactgaaccctactagctcattatggtccaattcactacaatctgacaaataagctcacgaaaccgaagggagaggtgtatagagaaatgcaatagaagtggcnnnnnnnnnnnnnnannnnnnnnnnnnngaaataaaatccaaaaggttcaatttccccctccagatggaaccaccattctaaagtgctccgtaaaccaccatgttggaaaaaggacctacctttttccaagccatagccaggattaccttttccccctgaaactccatttaaacaaattaattatccctttccccaatgttattatacctaacccgaataattttaaagtgtttggaccaagtttattcaccccactttttccttaccaaaaccttaaaaaataaaaaaatagaagtgttttagaaaaacttttaattttttcgccccatccccaaaaatcctatatcccaagggaaaaatttaaattt

SEQ ID NO: 36838 - DNA, 796 bp, Macaca Mulatta
  misc_feature (1)...(796): n = A,T,C or G
ggcgaggtggcgggcnnnnnnnnnnnnnnnngnnnnnnnnnnnnnnnnnnnnnnnnngcgnnnnnnnnnnnnnngnnnnnnnnnnnnnnnnnnnnnncgnnnnnnnnnnnnnnnnnnnnnnnnnnnnnagagactccgtctnnnnnnnnnnnnnnnnnnnnnnnnnnnnnnnttcaaagaactaaaggaaggcatggagaaaaatgaagaagacaatgtttggaaaaagataaaaatatcaacaaagatatagacatcttaaagagaaaccaaaaattctagagctggaaagtacaataactgaaataaaaaattcactagaggaattcaaaggcagatttgagcaagcaaaagaaataatctgtgaacccttggagactggacaatggaaattctccagtctgaggaaaagaagcacaaagattgaagagaagtgaatagagactaagggacctaggggacacaatcaagcagaccaacatacacattgtgaaagtccccgaaagagaagataaaatagcggagagaatattttcaaatataatggcacaaaatttcccaaaatttgatgaaagacctgaacataaacatctgaaaagctcaactcccaaccgggatgaaatccaagagactcttaccaagacacctttataatccaactgttgaaaaaacaaagggccgggtgtggatgaacttaaaacccggcctgggtgggccccccgccgtgtaatccccacccctttggggaaggttgaaaacagggcaaactaccagggttcatggattttgaaaaccg

SEQ ID NO: 36839 - DNA, 156 bp, Macaca Mulatta
  misc_feature (1)...(156): n = A,T,C or G
aggctttcaaggagacgcggaagaaacgggtgctttccggaaacagcaagtgtgaagctcctccggacattcccacgcaaaaccgcactagagatgcagaactaccggcagcagaaaggngctgggcgttcggctccaactcgctccccatagctg

SEQ ID NO: 36840 - DNA, 412 bp, Macaca Mulatta
agaaaacatggggttgttcttttggccacgcatatgtgaatctataagaaaggtgatattgtagacatcaagggaaggggtgctattcaaaaagaaatgccccacaagtgtcaccatggcgaaactggaagagtctacagtgtgacccagtatgctgttggcattgttgtaaacaaacgaagggcaagattcttgccaagagaattaacatgcgttttgaacacattcagcactctaagagccaagatagcttcctgaaacgcgaaaatgatcagaaaaagaaagaagccaaagaaaaaggtacctgggttcaacttgccaccatgtgccacccggagaagcacactttgtgagaaccagtagaaaggagcctgagctgctggaacctattccctatgaattcatagcataa

SEQ ID NO: 36841 - DNA, 766 bp, Macaca Mulatta
  misc_feature (1)...(766): n = A,T,C or G
tggaggcacttgtagaggctccggagacgctggacgcctaaaagtgagaggagtacatcagttagaataaatacagtttttctctggttccccaaagttgatacatctcccagttgtatgttccggagactgggactttgtttcaaggaaaggaagggtacttgtttctgagctaacgctattgcagattgtcatcaagtacgtaactattttattggtagccatctctcctccttgtgtcaacttttataaattatactgataatactcattttgggagcttgttaaaatgtaggtgaaaggaactatgaagaattatattaatgcattgtgtaaaaatggaactcattcagtcaggcctgcaacccgtttcttatattaataacacaacaggaagaatctctctccttgctaatacgcagcttcatccgcgcagggcctgttctgtgcaaggcactgttctaagaagctgggaatactgggtgcctccggctctctgggaaagataatatggggggcagtgtgtgagcaacgaaactcacatttacagtaaagtctaagtgcagccacggagaagcccagcgttgtgtggggacactgggcaagaagcacaggacaaaggcaaagccatcaagccctgagaactcccttacccaaagccgggcgggaaccttgaaaaaccccaggcagganagaaagtaattaggaccatttgccttcatagttagtacaaagtgttgtactaacgtatcactcatttttcaga

SEQ ID NO: 36842 - DNA, 1161 bp, Macaca Mulatta
  misc_feature (1)...(1161): n = A,T,C or G
gggttataaaaattctgtttgcaaattaaactggaaaagtatccaaagtctcaaaaggcaatgatttgtgtgataatatggcatgcccggagccctactcatcaatgaaaaccccatatgtaataatcgaattcatttaacatgaatcttgagtatgtggaccattgcttgcatgnnnnnnnnnnnnnnnnnnnnnnnnnnnttttttttgcatttttaactccagatgtcctaaagctcaattgtttgctctctgggtttcatccttagagaagccatggagaacagacttgagaagtttaggaaatcataatgggaagaagaaagttgagctttttccccttgagaaacttatgcatttagtttgtatctttccaggcaaaacaaatgggtattcttttcatacagccattttcaaatgaaccttagaaaagtcttaacatttaaggtattttatgcacagaatacacttagattgatgggaaagaactcataacggagtttgagtgaagaaaaggactgatgtactaaacccagtagaaattgttgaaaatgttaaaggtcagcatgttctaattgggaatctagatatagcttagatttcctattgtcttagagtatttgctataacaaatgaagtgcaatgacaattatatattcctactcggtccatactgggactggcttcgtgtcctcttaacatactcagtaaatggactgaagccctctggctattaacataccctagttgccattttttaattgccatgagccagatacttcttggtatacaattgatccatttattttaatggctgccttttcattttcatcttttcttgctgctacccatctatgtatgtagtcattggggggaaaatgtagccacattttttatgggaagactttgtgttaaaagtgaacatttggaaggtttttaactggtgaaactagcctggaataatgccaccagagactgagtggaaatcgccccttttgaaggtgccattcttatgagccaaaagtttgtcatttaaaagttcattttgagggaataacatgtaatataatttgaaataaaggtatagaaccttaaaaagaatattataactgattgttgtgaatggggtgaatttgtttaaatgaataacttttgataaa

SEQ ID NO: 36843 - DNA, 1146 bp, Macaca Mulatta
  misc_feature (1)...(1146): n = A,T,C or G
gccggaggagcgccgggcgcggcgcaagattaaatggggcgccaccanaatcacgagtggcacgaccacacaacgtgcccgcgcacgcacgtgttatccgctgcagcgcacacaggtctggcgcgcaccgngagagccgcgtcaangagtcgcgtcgccgcagcgcggccagactggtagtcaaggacaccggctcgcggtgagacacaaacagactatggtgcgaacacncgacaagtgagacaaccaccacatgggggagcgcgttataaggagaatgagcgatantaatcgccgtctgcgcgggcgcgcatacgctaacgggcgtgcggcgaagaggagacaggcaactgaggactgcggcgggagacacaatacgggaggagagagcggaagcacatgaacaggcgaaagcgggctcgcggcagggcacagagcgggaacccggcgggatcgggcgacgcaaagtcgtgccccacacgcgggaccagcgagcggtctgcctatatttgggcgggcgacgaggcgggacaaccacgccggccccgtctagtggttgcgcgcgcgccagctccaccccgcgcggtggcgcccccggcgcggggaacgttttttcaaccgctccggcgcgagaggcccccttttccccagggggaggtttggcccactccatgcgtcccggcaccatttgtaggccggggacggggggaagggccttctgttggtaggggataacgccccgttctgggacgaaaacgcgcctctggcccttcatccaaagaggggtgtcaagggaaaaccggttttgaaggttccggaggcctggggggggggccaagtggcccgcaaaggcccccacccgccaggggtggggtatccacaaaggttacagcgtccacccacgtcctttttgtgcaccttagatcgtggcctgtcgacttcccgcacgatgtgggtcatgccagccttgtatcccaggaaggctgtgaggtggaccggcttagacggatcatctttagggaagctcttaaccttcccgcgatgcctgctgctgcgcttccgaggcaggaagccgagcgacccatgtctgggagccgagaactttctgtgagacatcacgccatcaaatcccgccggtagagcccc

SEQ ID NO: 36844 - DNA, 487 bp, Macaca Mulatta
tggtatgccttttaaatcataataaaggtacatgtttaatttaaaacagaaattcagaacacaagctactttcaacttcatctaagagcctattctatcagatacataacaggaaatagagaccaaatatttatctccaatattgaaataaagcatagtgttccatattttattgttcaaatataagaaaactcaggagaatcatgtaataaacgttttctagttttgctaataatctcgatggaaggaaaagagccaggtcccgtcgctggcacatcagtgattgggagggtagctatggtcctgtagaaaagctgccctgatgttttgttgtttctgtaaacatcttgttcttgaaatcctaattattcgggatgtaaaagttttgagaattatagtcatcagaatttccaaaacagttgtgcttatgaagggcagaggacgcttccgtacctacctccgtgtattcatctaaaactgtgatatc

SEQ ID NO: 36845 - DNA, 845 bp, Macaca Mulatta
  misc_feature (1)...(845): n = A,T,C or G
ctttccgggctttcccctatgtggagtgggagaacttccaggttttagtggcccactaatccctgtgttnnnnnnnnnnnnnnnnnnnctctggaagaaaaccgggcttctttctttttgttggncccaggctctgttttttgaaaatttaatggggcttcaaggcaattcttccctcacccctattggttccagcccattattgggctttctttaaaggtttggtggggattaacagggccatgagcccacttgcaacctgggccttgannnnnnnnnnnnnnnnnnnnnnnttcctgggcttttttggcacagaaaaaatgtttgggtttttcccttgtgctttctttgccctcagacccgaaaatgagttttttttttctcaaggagccttctttgggtaaaaggtttcaactttgaattttagagatgctcgatgttaccagaatgatgtagtttgtatgccgtttgtctagtggacaaaactaggaaatatttatcttaaaaagggttcaagttcatattgatatttttnnnnnnnnnnnnnnnnnnnnnnnnnnnnnnnttcactcttgttgtnnnnnnnnnnnnnnnnnnatgcgtctcagctcattgcaacctccgtctcccaggttcaagtgaannnnnnnnnnnnnnnnnnnnnnnnnnngccccccagtagctggaattacaagcatgcatcaccacacccaactaattgnnnnnnnnnnnnnnnnnnnnnnnnnnnnnnnnnnnnnnnnnnnnnnnnnnnnttcctgacttcanactatttgccagcgtgggcttgngtannnnnntttattacaggcatgaaccaccatgcc

SEQ ID NO: 36846 - DNA, 838 bp, Macaca Mulatta
gggcttgtttagggtagagtggtgagatgaatttcaaatcaatgccaaaagaatgattatttggaaaatagcttgtgggggttattgggtctcattcctaatggattgaaatttttaatgagaaaaacaaaagcataaaagatttaatttttaatttacctattaggttggcgagtcttcaaaatgtttgataatgttctgttttggcaggagtgtaagtggcactcatacttttggaatctaaactgctacagttttcctggaaaataatctagaaaagtggatcaataatttatatgacaaaaacagaaaagtcagatgtggtggcacctgcttttattctccgctactggaggttgaggcgggaacatcagttgagcctaggagttcgagaccagcatgaactctgcaacatagtgagacatcatgtcttaaaaaagagaatttgtttttgttgattgaagtaaatttttgtaaggatatagtaatgtacacacctgtgtatctaaagggataatagcattatttatagcgaaagattatgaaaacatctaaatatgtaaaggtagtagactgggtaatatcatgttcacttctatacggaagagtacttaatatgtacgccattaaaaagaatgagtggctggggcacaaaggggtctatgccctggaaaacccccaatatttgtggggggaaggtcaaagggaaggggtaaaatcgcctggagcccagggagtttgagacccaccttggggcaatatgggtgaaaaaccctggtctcctaaaaaaaattaacccaaggatatgggtgaatgggcctaccctgggggggccccc

SEQ ID NO: 36847 - DNA, 829 bp, Macaca Mulatta
ttttccaatttcccataattcccaattcccatttctctattaatccagttaccaattccatttttcccaatacccatcccttcaattccaattcccattcccatttttatatttccactcccattcccttttcccaatttcaattccatttttgcagtccattcccattctccattccattccatttggcattgcattttattccattttccttccattcctttctactccattcgccataccatcctccattccattttattcaccactgcattccattccattccattctccattccattccataccccattcaactccattctccattgcattcaatattcttttcctttctccattccattcaccactgcattccattccatactccattccattctattcatcactacattccattccattccattctccattccattctatattccattctccattccagttcattctccattccattcgagtccattctccattccatagcattctccattctattccattctccattttattgcactctgcattccactctgcattccattctgcattccattccaaaccattctccattccactgcattcccgtttccactccattccccattcaattccccattccattccactccccattccatctccattccatttcattctccattccattccattctattctccattccattctgcattccattccattctctattccattttccattcctttccaatctcttttccattccattctccattccattccattctccataccatcctccattccatttcattcccc

SEQ ID NO: 36848 - DNA, 1083 bp, Macaca Mulatta
  misc_feature (1)...(1083): n = A,T,C or G
agaatcacactttttattgttaaaccagatnnnnnnnnnnnnnnnnnnnnnnnnnncaaccagtattaagttgttaaaaccaagagaatggggccctaaccaaaaagaagtctcacccgaaaaataagtccccagtcaggtggttcttactttcttgtgggttgcatattttatgtctctctaacatcaacgtattcctgactttcaagcagatgtttatatgtaaaatgaaacctgggtattgaaaggaaatgcgttctttttatggagtattgaccctgatcctctatgatgtcatatagggcaactcagggctatacttgctagattttaaccaagcagtttgaaatcttaatcatcatcctctcatcttctctgctctccattgccaaagtctttgtcaaaactccaaatttgttgataaaagattgtgtttgcctttctcattataatgcagtttctccttaagcctggagtttttttaatgagtgcatgagtaaatgagagaatgcgtgaacgaacatttatgaagtatctaatatgtgccaagcattgtgcctggcactttcaatcattagaatgttttatgtgattccacagcattttctgtatgagagtagctcacaacattttaaacgtttccaatatgaatcgtgttacaaaattcttaattttatatttcatataaagaggaaaaagaaaaggtttataatatattttaaaacaatgtgttattatataatactaacaactataattgtagttaataagtaaaatctcttgaaaatgtcaaagaaatacttgatttctgatgcaactttgactaaaatatttactttagaaataaaaacattcttattttgctatatcactttaattgcatacataattaaaaagcagtgttttatagaaatgctggttattttatattcaaaaagattttgtcacataattcatgggtaaaatttgcaattgtaaaattgtctttcctctggtatgggccctattaatagtcccatgctgttaaatataaagaaaaatatactaaaatattcagagttcccaataacagttcctagtagt

SEQ ID NO: 36849 - DNA, 876 bp, Macaca Mulatta
ttttttttgagaccgggctctttttgcgaaaaacttgtgaaccaacggacctgcctcacggaatcggtgggttaacaagtggcagcattcctatgggagctgggaacacatctcttccagagtcagggtcagtacctgtagttttagagatgcatcgaaggtggctttgcgaatttcccaagggtgacagtcaacccccgggctgagtgtcagcagtcatcaataccagccatcatgagcagcttcttgggcacaggcgctgagacgatgccagtgcccctgggtgcagggatgaggcgcacgagcacagagccgcagcggcctgtcaccttgcaagggacagtgtggggcttgccgatcttgttcccccagtagcctctgcgcaccgggacaatggagagtttggccaggatgatggccccacggatggcagtggccacctccttggagcacttaacacccaggccgacgtggccattgtagtccccgatagcaacaaacgccttaaacctggtgcgctggccagcacgggtctgcttctgcaccggcataatcttcaaaacctcgtctttaagagaagcccccaagaaaaagtcaatgatctcagattccttaatgggcaaagagaagaggtagatctcctccagggacttgatcttcatgtccttgaccaagcggcccagcttggtgacgggcatccactccttatcctcggccttgcctccgcgagctccgcggcctcggccccggccccgtccacggccgcgaccccggccccggatgccactgccgaaacctccgcggaagccaccgcgattccccatcccagggccaccagggcctccggcccccccgctgcaccggcgtcatccgcca

SEQ ID NO: 36850 - DNA, 1878 bp, Macaca Mulatta
  misc_feature (1)...(1878): n = A,T,C or G
gccaaattgtagttgaagctaaggaagggggatctggcccctgctgacagagggaactggaatgccacacaaggcaaggcctgcttccttcccgtctctgctgctgctacctccgaatgctgcagcccaggcttcctcttacagtggcccttggaagtaggccgcagagtagacagctgcttcttttggaagagtcagtcccccgtgttttctgaactgtttttcctagcatgtatgtgggtagagctttcatgcatctccaataataagaagctgaagttannnnnntttttattctccaatttaaaacttttatttaaaaagtaaactattattaatgtcgaaaatgcaaacttggggagagcaaaaagatcacacataaggccgtcacttcacacttggagggttgcacagcagccgggcagaggcgcttctcacttcccagacggggcagcgggcggcagagacgcacctcacttcccagacagtgcagcagccaggcagagacgcacctcacttcccagatggtgggtggccaggcagagacgcacctcacttcccagatgnnnnnnnnnnnnnnnnnnnnnnnnnnnnnnnnnnnnnnnnnnnnnnnnnnnnnnnnnnnnnnnnnnnnnnnnnnnnnnnnnnnnnnnnnnnnnnnnnnnnnnnnnnnnnnnnnnnnnnnnnnnnnnnnnnnnnnnnnnnnnnnnnnnnnnnnnnnnnnnnnnnnnnnnnnnnnnnnnnnnnnnnnnnnnnnnnnnnnnnnnnnnnnnnnnnnnnnnnnnnnnnnnnnnnnnnnnnnnnnnnnnnnnnnnnnnnnnnnnnnnnnnnnnnnnnnnnnnnnnnnnnnnnnnnnnnnnnnnnnnnnnnnnnnnnnnnnnnnnnnnnnnnnnnnnnnnnnnnnnnnnnnnnnnnnnnnnnnnnnnnnnnnnnnnnnnnnnnnnnnnnnnnnnnnnnnnnnnnnnnnnnnnnnnnnnnnnnnnnnnnnnnnnnnnnnnnnnnnnnnnnnnnnnnnnnnnnnnnnnnnnnnnnnnnnnnnnnnnnnnnnnnnnnnnnnnnnnnnnnnnnnnnnnnnnnnnnnnnnnnnnggcgcctgtaatcccttatactagggaggctgaggtgggagaattgcttgaacccttgagagaggntgcagtgagccgagatcatgccactgcactccagcctgggggacaagagtgagactctgtctccaaaagacaaagaatccaatgaaaatggctgcaattacaacaagaagtgaaggaagaggactggtgacatctctgaaggatgcagttgaggctgatccaggtttatccaaatgtgctacctttctgagccttaaaccttcatctctcaggtgtcgattttcttctgatagcttcatcatttctccctgaagtcttttacactcttctgttagtttccttgttgcggtgtcattaagtgaaacactgtgtggttttggcatgggtccatcttgttcagatggattcagtggaacagctttgctaggttccatgtcattcaatttatcattttcattgggnatctcaatttggaatccattaattcgtcaggttttgcctctttccacacaacttccatatctgaagtgttcagtggagcaaaaattgtaccatacacttgtgtttactcttttcattcggatcatagtcaaagggctgtagcattactgaaacagtcacagttgaccctgggtcaataattccactgttgggcctcacacagtaccggtgaggcgctgtagtcttcagtttganacacacttttctatccgatggatttcgcaatttaagatttatagtgactacatctgtgaaggggcctttgaatttgaggtctgtgggc

SEQ ID NO: 36851 - DNA, 147 bp, Macaca Mulatta
cctttatacaaagaatgttcactttcaacaaactgaaaattactcttacctatggcttcagaatatcactgtctacctcagaaagtggaatgttttgtacaagtcataaataagtgtctagatggacactatttggtcatcaaatga

SEQ ID NO: 36852 - DNA, 830 bp, Macaca Mulatta
  misc_feature (1)...(830): n = A,T,C or G
gggtatttaattctcagcaaaaatattaaatacataaaatagttattcctattttacagatgaggaaaactaaatacaccaaagcgagaagaaaagttataataaagagcattttttaaagagaaaatttaaaacctcctgccataactctgttctctttactttccagcaatccctgctggtccttgtcaggaagaaaacacgctttgtacactcccttgggcaacttatatgtgaccacagcataacaagaacagccgcaaactgacatgatctcaccctgtcgtggttcacactgtgctcatgtacagaaatctttcctttgtgtacctaacacttcatacaggagagatggaatagctccagttgctctgtttttctttattttttgacattctatgtcatttgggatggggatgtccgcacagaggtacacaaaaacgcggaaataatttgaatgcacaaagaaacaattggggtctcatgggggcacccaatgctcattgggtgtaacttcaattatttttccaactggttatgcgagaatgcattctccccagcccattttgtttccccccgcgcacaacccttgttctccaatccccctaggcccattcgctttctttccgtgaatgccagtgcccccgcggcgggcgagtatcctttccctgcccccccctatacgctcgatttcttaccacattttttggacccgccattttagcgccaaccggacacgcctcagcgccacctgccacacgttgggataatccccgaagtggtggtgctcacgcaatcgagggataccatgatgggaccccgccgccaan

SEQ ID NO: 36853 - DNA, 998 bp, Macaca Mulatta
  misc_feature (1)...(998): n = A,T,C or G
atattgcagagcaactgaaaagggggagccggccgcgtaggaggtgagagccagccgcaaaaatccgttcggcggcattttccttcaaacccgcccggtcggatgtggcatttgaagaaagaaggcgtgggtcaataatcaacccgcactttctcctccaaactgctgacgcgactctcaccgccttctcagctaagccagctgccgggaaggccagctctccgtgagaacctgccgggagaaggaattctccgggccatagggaccgagggcgcccgagctagggctggggcgcccggaatgcatacctttccactggcgccaagaccctgccaggcaaaacgcggggaccggacctgaggagccgcgggagcccagggagatctgaggctggagcttcgttccggccagggcctctatccgccccgatacgtggctcgcgggccgcgggcctcagcgggcagaagtggggctccgacctcaagacgaaagtccggcgtcctggcacgcagatggtcggtgccccagcctcaagccgctctgctgaaatccaaaggactggctttggagcaaacgtaggcgagaggattttaaaataataatttatactggcggannnnnnnnnnnnnnnnnnnnnnnnnnnnnnnnnnnnnnnnnaagcgaaaatgccggttgttgatttccacctccagaaattaccggccgccgtctctgagccctttctagacaaatcccacagcagttcacccggctccgccaaaaccgcagagcttttctttactgagaagaccccttggttccaccaattcccccaaatccccatggctcccgatctctcatctaggggaactagaagaaaatatttttctcagcactagaagaatacttggagcagcaaaggtgcccgtggtgcctttctactgttcaagggggtgtcctcctgaaggcgtctaagagggcctctggcggttccaaggctgtgcagccagggaggaagg

SEQ ID NO: 36854 - DNA, 786 bp, Macaca Mulatta
  misc_feature (1)...(786): n = A,T,C or G
ggggaaacatagattgtcttcccctcaaatnnnnnnnnnnnnnnnnnncctttgttcaaatggattctgnnnnnnnnnnnnnnnnnnnnnggaaatcacaaattgcatgtcattcttaatgctagtcttatagactaaatccctaaaattgtttttatgttcagtatgtttgtgtcattgtaaatgcagtatattcaatgatagcagttcaattgactcatagcagtgttttgtattttttccaattctttagctttcaatgttggattaaaggcttgtttgtgaatatagtttctgtatggcaaatgattctgcttattagcttttgttaaagaatgcttagtaagagctaagcttttaaaagtaatgcaaacatttgtcattaataaaacctatggtataatatcatataatgctttgatcttttgagaattattcttttatagtagtatacatgaattttgatttttaaagcatttaaaaaatcttaatacattaaaaaacttgttattgttaaaaaggaaattaccatgcctttaagaaacaagggtgtacatcttcaactcagcgtaagtgtccacatctagaaggctctccttgcaattgtttacaattaaagtacctctgtctaaaaggccaaaaaagcttttcatattttacaccttcaattcttcaggattaagacatatggaaaataatctgaataagataaattttgataaggaagtaaattaccccgtctggaagaattcatccnnnnnnnnnnnnnnnnnnntattcctctta

SEQ ID NO: 36855 - DNA, 471 bp, Macaca Mulatta
aatataatgtcagtatacatattatatttggagatagataagactatagagtacgtgttattttgctcttagatgttgattgctgttggtgcctacacagaagtcttcaagatcaaaaagatacctgtcttagaaaaccaaatgtcatagtaaactcagatttcagggtgtataatcatgcaggttcatctgtctctagaccagcttgtggtcccaagggggtaattagggtgattccttgctagtcaaagttatagaaattatactcataacttttattaatcccaatttttgaaatacctttttgtgcattcctataatgcatgtaatactttagtatccatactgacatctaggttagggggatgctgctgaaatgtatgtaatactttagtattacatatattatatattagtgcatatatatatgttagtgtattatgtcaatacataaagaaagtggatctaata

SEQ ID NO: 36856 - DNA, 809 bp, Macaca Mulatta
  misc_feature (1)...(809): n = A,T,C or G
ggatgtaggttttggacataaagtttggtgcatcttggtttatcctggctcaattgctattaaacctctctggtttatagtctcttcattctatcagacaaggatgtattgaacacttgctttgcacaaggctctttagttaacaatttagcagctactgttatgttaaacacacttttcaccaaatagattctaaggcaaacaagagcaattaatatttaaagaaaggctttcccagcatcacttacccatcccgaatctaaaaagatcaactcttccaattgagaaaacactcttggctttgaatggaaacttatagcagagagtaataggcaacaacaacaacgacaacaacaaacatttggaatattattctcaactcacggtttaataatagatcttattatttttctagtagagaaactacaaatcagcctcttcaacatttacatacagtttaataagcctcttgcaagttacttgttctctcacctgaggtattttttcctccccaccttacccctgtttctccattcctcttcntcctttgcaagaagaaatatttaacatatttgggtctaacttcaattatgtaataattaatacattaaaagcatttaacttcctttctagaaaaacgtacagggctaggcntagacnaaacaaagagaaatgctgagaaatttgccactggagacaagtaagcttgaataaatattggccaaaagttctttccggtgtccatatagtgtcaggattttgaaggaacttatctttcttaatgtttgcacttaagcaactcatcttta

SEQ ID NO: 36857 - DNA, 823 bp, Macaca Mulatta
  misc_feature (1)...(823): n = A,T,C or G
ggtcactctggctaggcagagatgataagaaaatgtaagtttgatcaagaaaagtaagtagtaacagcggggaatcaactgaatgccactggagatccagaaatcactagagaattttgagcgtgtcattttttcatgaagaaataacnnnnnnnnnnnnnnnnnnnnnnnnnnnttagttctaaggcacattacacaaaatgagaggaaaaagttgtcagttctgttctgacaggcctctgctactgaacagtgggattcttcctcacatcaaatccacagatgcagtagacttgcatctcctggggtaccaaatcttcagaatcttgacttaagaaagtcagaattcgaaacagagttgctagaatggcaatgatgagttgctcagctcccgaaacaaattttctcggtccaacagcaacggatctgcaaattaattttatttctttgctggaacctgttatgttgcatctgctcatgggcattcatctagaggcttctccacaccagcccagatacatctccttcattcctaggttgctttagaaatgtatttggatactttctttttaataaaaaaaataaaacttagtcaacaaaaagatatgcaccttgcaatggaaagttttattaaatgggaaatataagtggagagaaatttcagtgaaaaaaatgtttaatttttgtctttagatttctgacaatttggaagataactttcatttttactccagtggggaaaatgtaatacccaagtccaaggacagggttaattattttccaagttaaacttggtaattttgggaaaattgggggtaaccta

SEQ ID NO: 36858 - DNA, 708 bp, Macaca Mulatta
atgtcccagccggtgatctcacaactccctacttccggtccagctgctgtgtctgatcggggagagctttgaggaacacagcagggaggtatgtggggctgtcgtcaacatccgcaccaagggggacaagatcgctgtgtggacgagggaggcagaaaaccaggcgggcgtgctgcacattgggtgaggaggttctctggcacggagtgggggctgggtctcttctagagggaaggtgggtggaggtggcttgacctgcaagggagacctctggaagtctccatagcctgtctcctttctgccttgctcacctgtatggaagggtctggtgtccagatttctaactttctattatggcagtgcagttctccttttgcattaagggggtcatactttgtttttccacatgggtaagacacaacaggtgtggctgtggccagaatgagggtagcagtctggtggcctaggttacctctaggaccctctgatgactacctgtgtctcttttcctgtgtcccccacacctgcaggcgtgtatacaaagagcgcctgggcctctccccgaagaccatcattgggtaccaggcccacgcagacacagccaccaagagcaactccctagccaagaacaagtttgtggtgtgaaggggggccttggcaccccttctctgtaatgggacagccaccacccgagcctcattactttgc

SEQ ID NO: 36859 - DNA, 3325 bp, Macaca Mulatta
  misc_feature (1)...(3325): n = A,T,C or G
gtgttcaaccccaactcggaggaccccctgcccgggcagctcaagaagcagctggtgctccggatcatcagtggccagcagctccccaagccgcgcgactccatgcnnnnnnnnnnnnnnnnnnnnnnnnnnnnnnnnnnnnnnnnnnnnnnnnnnnnnnnnnnnnnnnnnnnnnnnnnnnnnnnnnnnnnnnnnnnnnnnnnnnngggttcaaccccacctgggaggagaccctggtgttcacagtgcacatgccggagatcgcgctggtccgcttcctcgtctgggaccatgacccaatcgggcgtgacttcattggccagaggacgctggccttcagcagcatgatgccagnnnnnnnnnnnnnnnnnnnnnnnnnnnnnnnnnnnnnnnnnnnnnnnnnnnnnnnnnnnnnnnnnnnnnnnnnnnnnnnnnnnnnnnnnnnnnnnnnnnnnnnnnnnnnnnnnnnnnnnnnnnnnnnnnnnnnnnnnnnnnnnnnnnnnnnnnnnnnnnnnnnnnnnnnnnnnnnnnnnnnnnnnnnnnnnnnnnnnnnnnnnnnnnnnnnnnnnnnnnnnnnnnnnnnnnnnnnnnnnnnnnnnnnnnnnnnnnnnnnnnnnnnnnnnnnnnnnnnnnnnnnnnnnnnnnnnnnnnnnnnnnnnnnnnnnnnnnnnnnnnnnnnnnnnnnnnnnnnnnnnnnnnnnnnnnnnnnnnnnnnnnnnnnnnnnnnnnnnnnnnnnnnnnnnnnnnnnnnnnnnnnnnnnnnnnnnnnnnnnnnnnnnnnnnnnnnnnnnnnnnnnnnnnnnnnnnnnnnnnnnnnnnnnnnnnnnnnnnnnnnnnnnnnnnnnnnnnnnnnnnnnnnnnnnnnnnnnnnnnnnnnnnnnnnnnnnnnnnnnnnnnnnnnnnnnnnnnnnnnnnnnnnnnnnnnnnnnnnnnnnnnnnnnnnnnnnnnnnnnnnnnnnnnnnnnnnnnnnnnnnnnnnnnnnnnnnnnnnnnnnnnnnnnnnnnnnnnnnnnnnnnnnnnnnnnnnnnnnnnnnnnnnnnnnnnnnnnnnnnnnnnnnnnnnnnnnnnnnnnnnnnnnnnnnnnnnnnnnnnnnnnnnnnnnnnnnnnnnnnnnnnnnnnnnnnnnnnnnnnnnnnnnnnnnnnnnnnnnnnnnnnnnnnnnnnnnnnnnnnnnnnnnnnnnnnnnnnnnnnnnnnnnnnnnnnnnnnnnnnnnnnnnnnnnnnnnnnnnnnnnnnnnnnnnnnnnnnnnnnnnnnnnnnnnnnnnnnnnnnnnnnnnnnnnnnnnnnnnnnnnnnnnnnnnnnnnnnnnnnnnnnnnnnnnnnnnnnnnnnnnnnnnnnnnnnnnnnnnnnnnnnnnnnnnnnnnnnnnnnnnnnnnnnnnnnnnnnnnnnnnnnnnnnnnnnnnnnnnnnnnnnnnnnnnnnnnnnnnnnnnnnnnnnnnnnnnnnnnnnnnnnnnnnnnnnnnnnnnnnnnnnnnnnnnnnnnnnnnnnnnnnnnnnnnnnnnnnnnnnnnnnnnnnnnnnnnnnnnnnnnnnnnnnnnnnnnnnnnnnnnnnnnnnnnnnnnnnnnnnnnnnnnnnnnnnnnnnnnnnnnnnnnnnnnnnnnnnnnnnnnnnnnnnnnnnnnnnnnnnnnnnnnnnnnnnnnnnnnnnnnnnnnnnnnnnnnnnnnnnnnnnnnnnnnnnnnnnnnnnnnnnnnnnnnnnnnnnnnnnnnnnnnnnnnnnnnnnnnnnnnnnnnnnnnnnnnnnnnnnnnnnnnnnnnnnnnnnnnnnnnnnnnnnnnnnnnnnnnnnnnnnnnnnnnnnnnnnnnnnnnnnnnnnnnnnnnnnnnnnnnnnnnnnnnnnnnnnnnnnnnnnnnnnnnnnnnnnnnnnnnnnnnnnnnnnnnnnnnnnnnnnnnnnnnnnnnnnnnnnnnnnnnnnnnnnnnnnnnnnnnnnnnnnnnnnnnnnnnnnnnnnnnnnnnnnnnnnnnnnnnnnnnnnnnnnnnnnnnnnnnnnnnnnnnnnnnnnnnnnnnnnnnnnnnnnnnnnnnnnnnnnnnnnnnnnnnnnnnnnnnnnnnnnnnnnnnnnnnnnnnnnnnnnnnnnnnnnnnnnnnnnnnnnnnnnnnnnnnnnnnnnnnnnnnnnnnnnnnnnnnnnnnnnnnnnnnnnnnnnnnnnnnnnnnnnnnnnnnnnnnnnnnnnnnnnnnnnnnnnnnnnnnnnnnnnnnnnnnnnnnnnnnnnnnnnnnnnnnnnnnnnnnnnnnnnnnnnnnnnnnnnnnnnnnnnnnnnnnnnnnnnnnnnnnnnnnnnnnnnnnnnnnnnnnnnnnnnnnnnnnnnnnnnnnnnnnnnnnnnnnnnnnnnnnnnnnnnnnnnnnnnnnnnnnnnnnnnnnnnnnnnnnnnnnnnnnnnnnnnnnnnnnnnnnnnnnnnnnnnnnnnnnnnnnnnnnnnnnnnnnnnnnnnnnngcaggcctcggccgtgcaatggcaagcgtcccagcggggcatacgagggggcccccagcagccagtcggacggcaggagccagccccggaccccgggccacctgcccgtgattagaagggtgaagagtgagggtcaggtgcccacagagcccctgggaggatggcggcccctggctggtccctttccagcccctgccgtgtacttcgatgccacggccggtgaccggctgtggcagcggctggagccatgtggccaccgagacagtgtttcctcctcctccagcatgtcgtctagcgacactgtcattgacctctccctgcccagcctgggcctgggccgcagtcgtgaaagcctcctcggagcccatgtgggacgcctgccccccaggccccactcagcttcagctgcccgcccagacctgccacctgtgaccaaaagcaaatccaaccccaacctgcgggctgcgggccagcggcctcccacgcctgacgaactgcggcccaggcccctggccccacggatgcctggcctcccgctccggctgccctggggctgcctctccctggtgggcctgcaggactgccccgtggctgccaagtccaagagcctgggggacctcactgctgatgactttgcccctagctttgagggcggctcccgcagcctgagccacagcttgggcctcccgggagggacacggcgggtgtcggggccaggggtgagacgggacgccctgacggagcagctgcgctggctcacggtcttccagcaggcaggagacatcacgtcacccaccagcctgggcccggcnnnnnnnnnnnnnnnnnnnnnnnnggttttctgcggcgctcctcctcccgcagccagagccgtgtgcgtg

SEQ ID NO: 36860 - DNA, 681 bp, Macaca Mulatta
  misc_feature (1)...(681): n = A,T,C or G
caaaaagttattgcatgtttttgatgcaatttgagaaattgtttacttcacaatgtagtcattcataaaaaaatcatgaaaatactgaatatatgtttgaggatttttcttttctttgtttttttccgagacggaggtttgctcttacgcccaggctagagtgaaatggcacannnnnnnnnnnnnnnnnnnnnnaccccccannnnnnnnnnnnnnnnnnnnnnnnnnnnnngnnnnnnnnnnnnnnnnnnnnncccgccaccacgtctggctaacttttgtattttcagtagagatgggatttcgctgnnnnnnnnnnnnnnnnnnnnnnnnnnnnnnnnnnnnnnnnnnacctgtgtcggccttccaaagtgctaggataacaggtgtgagccactgtgcccagccgaagatttttcttaattgcaataaatattcagcattttttctaatgaaaatgaattttgtttacgagtagaagtatgcattttaaaagactttcagatttatgctttttatgtgaagctgctaaactaaaagtaaatggaagaaaccaagtctagtaggttttttctttttttggtgggggtgggatgggggaagttagctacactttaaattttcttcttcagagactgtatgctcttatatagactgtagctcttgagggcagtctgtca

SEQ ID NO: 36861 - DNA, 702 bp, Macaca Mulatta
ttatggggcctgagaatacacagtaaattgttaagtttgggtttgggaagccaatttgggatgccaaattgataagtttgggtttgggaagccaatttctgaaatttttgacaggcagatagcattgtcatagcaatggctaagatgtcagcatgtacctatttccagcctgtatggtaagtgtgtcactgctacctcaactccagttcaaaatttggtctgtaccaaaaagggagcctggatcgtcccctacctcctttcctaacccccaggaggacagttggggtcctcaaagtacacagccaggaagttgcttgaagaagcagttaagtatagtgggcaaagcttggctctggtgtgagacttttattttctgtcccaactccatccctttctagggcaaaatttttttagcctctctaagcctcattttcttactgtgcatatggaaataatggtagcaccaacttcccagggttcttatgcagattaaatgagttacagaacgtaaggtgtgccaaacggtgcctggtgcaaagtaaatgcctcaaagaatgttagctagtagtattgcttgcagcttaaatctactcttttaccctgtattgataaaaatctataatctttttgttctaagtaccctgtacaataccttgcacatagcagatgttcattacaagttcaattgaacctggaaagaag

SEQ ID NO: 36862 - DNA, 927 bp, Macaca Mulatta
  misc_feature (1)...(927): n = A,T,C or G
ggggacattaaagcaagatggccgcgccctgcagattttctcttgttgcgtaaggttttttgaccgtcactcgtgtcagcttcaaagtcagatagattttctcccagcatgttctacttacgaggctgtggccgttgggtcgcggcttccttcaccaagcagcagtttccattggtacggttgagcagtgacagcgcggcgccccggactccgcatttcgacgtgatagtcattggtggaggacatgccgggactgaggcagccaccgccgcagctcggtgcggctctcggactctgctcctcactcaccgcgtggacacgatcggtcagatgtcatgtaatccttcctttggtggcatcggaaagggacatttaatgagggaagtagatgccttggatggcctgtgttctcgcatctgtgaccagtctggtgtacattataaagttttaaaccggcgtaagggaccggctgtgtggggtctgagagctcagattgataggaaactctataaacagaacatgcagaaagaaatcttgaatacccactgcttatgtcagaggactgagaattatctcgacaactgacctnnnnnnnnnnnnnnnnnnnnnnnnnnnnnnnnnnnnnnnnnnnnnnnnnnnnnnnnnnnnnnnnnnnnnnnnnnnnnnnnnnnnnnnnnnnnnnnnnnnnnnnnnnnnnnnnnnnnnnnnnnnnnnnnnnnnnnnnnnnnnnnnnnnnnnnnnnnnnnnnnnnnnnnnnnnnnnnnnnnnnnnnnnnnnnnnnnnnnnnnnnnnnnnnnnnnnnnnnnnnnnnnnnnnnnnnnnnnnnnnnnnnnnnnnnnnnnnnnnnnnnnnnnnnnnnnnnnnnnnnnnnnnnnnnnnnnnnnnnnnnnnnnnnnnnnnnnnnnnnnnnnnnnnnnnnnnnnnnnn

SEQ ID NO: 36863 - DNA, 556 bp, Macaca Mulatta
agcctacagttggacaaaattaacacaaagagcctatattataacaaagtgttgacactactcggaaagaaaaatttttaagtgttgaatactgtactgaaagtgaaaaagtatggtcgcatgagtacagttactactgaatacatgttaccttcgcaccatcataaagtcgaaaaattaagtcagccgtcataagctgaggaccgtctgtacttttacctattctagaacttcagctaagtgaattcatgcagacaatgcgtcctcttctgcttctagcttctttcactcagaatatgtctgtgggctcaccttgggggtgagtctaattccattcctttcgatagctaagtgagactccattgtgtgagccaccacgacttctttattcattctgctgctggtgggcattaggattctttccagttttttggacatgaggaataaagccactgtgaattttcttgtacacatcttgtagtggacatatgttttcccatttcttggaagaatctctgggactgggatttgctaggtcatgtagtacatgtatgcc

SEQ ID NO: 36864 - DNA, 797 bp, Macaca Mulatta
  misc_feature (1)...(797): n = A,T,C or G
ggnnnnnnnnnnnnnnnnnnnnnnnnnnnnnnnnnnnnnnnnnnnnnnnnnnnnnnnnnnnnnnnnnnnnnnnnnnnnnnnnnnnnnnnnnnnnnnnnnnnnnnnnnnnnnnnnnnnnnnnnnnnnnnnnnnnnnnnnnnnnnnnnnnnnnnnnnnnnnnnnnnnnnnnnnnnnnnnnnnnnnnnnnnnnnnnnnnnnnnnnnnnnnnnnnnnnnnnnnnnnnnnnnnnnnnnnnnnnnnnnnnnnnnnnnnnnnnnnnnnnnnnnnnnnnnnnnnnnnnnnnnnnnnnnnnnnnnnnnnnnnnnnnnnnnnnnnnnnnnnnnnnnnnnnnnnnnnnnnnnnnnnnnnnnnnnnnnnnnnnnnnnnnnnnnnnnnnnnnnnnnnnnnnnnnnnnnnnnnnnnnnnnnnnnnnnnnnnnnnnnnnnnnnnnnnnnnnnnnnnnnnnnnnnnnnnnnnnnnnnnnnnnnnnnnnnnnnnnnnnnnnnnnnnnnnnnnnnnnnnnnnnnnnnnnnnnnnnnnnnnnnnnnngggcctacagcaaacacatagatcgggtaatattaaaaaattactattaatttactttttattgtgttcgaccgctttgggcccttgaaaaaacttttctaagaccatttttttttggggccgcggggcccccgtcgggtaaatggaaacatgggtccatagctcggtttcccctaaggaaaatccctggtgtcagtgaacaaagggccttggaaatctctcccnnnnnnnnnnnnnnnnnnncgggggggaataacggaacctgtttt

SEQ ID NO: 36865 - DNA, 775 bp, Macaca Mulatta
  misc_feature (1)...(775): n = A,T,C or G
gggggtgcagaataaggtaaaaaaaggtttccaaccactggtctagataatctcttcaaagcgtacttctgctctactattctatgtcttataaatcaaatggatgtgccacaattaagagaattcttttgaaaatacatctagtgtaaatgaattccaagcccacagccagactatgctttgacaaggctgttataaaccattcttatctatttcttaaagaaaaactaccagtattaaatagtagcatatgtcacactttctagagatactggtagccacagattagggctatcaaatatacgtaaaaatagagttctgtgggccaggagcannnnnnnnnnnnnnnnnnnnnnnnactttggtaggcagaggcaggcggatcacttgaggtcaagagtttgacaccagcctggccagcatagcgaaacctnnnnnnnnnnnnnnnnnnnnnnnnnnnnnnnnncctggtggcgggcannnnnnnnnnnnnnnnnnnnnnnnnnnnnaggaggaaaatcgctcacttgaaccccaggaagtnnnnnnnnnnnnnnnnnnnaattgtgccactgcaatccagcctggggcaacacagaannnnnnnnnnnnnnnnnnnnnnnnnnnnnnnnnnnnnnagagttccgtggtcaaataatttttggaacttggggaaacactgggtgtctctattgccagcattctcaaagcctttatatgccactgtatcctgtgaaatttctaagctgggaaaacaccatgtaatggttatcca

SEQ ID NO: 36866 - DNA, 91 bp, Macaca Mulatta
gaccctgtttctgagtggaaacccctggaagtgcaactgctctttcctggacttcgccatcttcttaatagtgtcccatatggacccctca

SEQ ID NO: 36867 - DNA, 782 bp, Macaca Mulatta
  misc_feature (1)...(782): n = A,T,C or G
ggctatatagatgtgcaattagaatttcctggataatagtctcctaaaaatggtgcagtggtagaccacaaacttagatgaccttggtaaacaaagtctaattctacttattagagtgtatgcatatctccacaaatatttgtgtcttatgtttgacttattataacagcttgttttaagggaagatggtttaatgtttttccaattttcacaatactttcaaggatcctgatttttggagactccataaagggacttctacttctcagtgacctggtaattacattgagtttatatgttcactttgttgaaggcactcatcccactgcaagatttctgcaagacctcttatttgttctctctctaaatgtgacccacaacggtatcatctaatcagttgggaggtgtatcccaaactcattaagctattaataagttccttgtctttatggctgccattacttaaaatataaactaaaactgtttaaagcttatgtctacaaagtcatttctcattnaaatttccctgtgctttcttcattgtgatcaaagggatttgagttaaagtaggaatacagggaggacactttaattgtctttttagtttccaaactgaaacacccttacccaaacttttttatttaactcaaggggcctttggtccctaaaatttcagaaatgggaaaaactcactttccaaatagaagccatgtttccaaaaattaattcctctcctggtaaacctttttggaaggaaaataaatcctttccccctcttttga

SEQ ID NO: 36868 - DNA, 818 bp, Macaca Mulatta
  misc_feature (1)...(818): n = A,T,C or G
ggggcgcactcctgtccgctgacgagggctcctcccttcagcttcagtccctcggggcgtttgggcagcctacgctttccgtaaatatcctctatttcttcatgacattgatgtgttgaagcaatcagattcaaacatccacaactaaggccatgaaannnnnnnnnnnnnnnnnnnnnnntgccataagtacagtctatataaagactgtccaggacaaaaactggccactccattcagcattgagagcagtatttacagctggtgcatggtaaggtgaagtttctcaagggcaaagacagtgccttcatgcatgttcagtgtctgcccccgtgggctttgaaatgagtgccgacaaggggaatctgcagtgacttctctgcctctgccaaagcccaggggtgctgctccctaattctaaggattctaatgagactcagagcaggtgtaacacagggcgtggagcttcctgagcaagaggctggctaacaagctgtggacgattaagagacattatagggacaccagcaagtatgtctccctggggagaagccaagcgcagatgctatggccacagatgatgtggtttggccctgtgtccccacccagatctcatcttaaattggtatcccgggatgttgaggggagaccctgtgggaagtgattggaacctggtggttcaggatagggaagttctccccaagattgggttgttttgaaaaatggtctgggccatttccccccgggggctgtctcccccccggcccacccttggtgaaaaaaaaagggccctgcccttttttccttttcgccctttt

SEQ ID NO: 36869 - DNA, 626 bp, Macaca Mulatta
  misc_feature (1)...(626): n = A,T,C or G
aaacagggagctaattagagtattaaaacgtaaaaccatttttttgactctgattttaagtacatttttatatgtcagttcctgcccttcacactaccaggccctgcagccacagtgttctgttggagaaacttggagaagtattttctgaaccggttctttttcttggggtagaacttgtaatccagacctgtttttgaaaggacagcacaggaggagaaaagtgactgggacgatgcttcctctcatccaaaacacatgcagagtcacatcctcgtcctagtgtttggcagtttgagaccgctaccctgaacttacgagctttaaataagagggttgtgttttcggggggttnnnnnnnnnnnnnnnnnnnnnnnnnnnnnngtgcttaaaaaggttacagatttcatcttcacctaccaagaggcggctgcctccttggacaagccgctcatggaccattagacttgagaagaagacccatgtggtaatgcaaagccctgggtacttgggtgttttggtttggttttccctttttctgctgctcttggcagcagcctggtcatcatctgcttgtgggagtgggaaatgggtattttacacccaacacaggttctaaatttaaa

SEQ ID NO: 36870 - DNA, 2659 bp, Macaca Mulatta
  misc_feature (1)...(2659): n = A,T,C or G
gcgaaggaaaccgatggggatcggaaccgtagcggttgagctgccgctgctacggatatctgaccgaagccttcggtggttgttggcctaatgagcggacggcaaagaacgctttttcagacgtggggctcaagtatctcccgatcatctggggctccgggttgtagctccggaactgagcgacctcagagccctggcagctccaaggcgcctttgtcagcaacagcggaggctcagctggagtcggacgatgatgtgttgcttgtcgcggcgtacgaggctgagcggcagttgtgtatagagaatggcgggttctgcacctccgcgggcgccctgtggatttaccctaccaattgcccagtgcgagactaccagctgcacatctcccgagctgctctgttctgcaacacgctggtgtgtctacctaccggactgggaaagacctttattgccgccgtggtcatgtacaatttctaccgctggttcccttcaggaaaggtggtcttcatggccccaacgaaacccttggtgacacagcagatcgaggctgctaccaggnnnnnnnnnnnnnnnnnnnnnnnnnnnnnnnnnnnnnnnnnnnnnnnnnnnnnnnnnnnnnnnnnnnnnnnnnnnnnnnnnnnnnnnnnnnnnnnnnnnnnnnnnnnnnnnnnnnnnnnnnnnnnnnnnnnnnnnnnnnnnnnnnnnnnnnnnnnnnnnnnnnnnnnnnnnnnnnnnnnnnnnnnnnnnnnnnnnnnnnnnnnnnnnnnnnnnnnnnnnnnnnnnnnnnnnnnnnnnnnnnnnnnnnnnnnnnnnnnnnnnnnnnnnnnnnnnnnnnnnnnnnnnnnnnnnnnnnnnnnnnnnnnnnnnnnnnnnnnnnnnnnnnnnnnnnnnnnnnnnnnnnnnnnnnnnnnnnnnnnnnnnnnnnnnnnnnnnnnnnnnnnnnnnnnnnnnnnnnnnnnnnnnnnnnnnnnnnnnnnnnnnnnnnnnnnnnnnnnnnnnnnnnnnnnnnnnnnnnnnnnnnnnnnnnnnnnnnnnnnnnnnnnnnnnnnnnnnnnnnnnnnnnnnnnnnnnnnnnnnnnnnnnnnnnnnnnnnnnnnnnnnnnnnnnnnnnnnnnnnnnnnnnnnnnnnnnnnnnnnnnnnnnnnnnnnnnnnnnnnnnnnnnnnnnnnnnnnnnnnnnnnnnnnnnnnnnnnnnnnnnnnnnnnnnnnnnnnnnnnnnnnnnnnnnnnnnnnnnnnnnnnnnnnnnnnnnnnnnnnnnnnnnnnnnnnnnnnnnnnnnnnnnnnnnnnnnnnnnnnnnnnnnnnnnnnnnnnnnnnnnnnnnnnnnnnnnnnnnnnnnnnnnnnnnnnnnnnnnnnnnnnnnnnnnnnnnnnnnnnnnnnnnnnnnnnnnnnnnnnnnnnnnnnnnnnnnnnnnnnnnnnnnnnnnnnnnnnnnnnnnnnnnnnnnnnnnnnnnnnnnnnnnnnnnnnnnnnnnnnnnnnnnnnnnnnnnnnnnnnnnnnnnnnnnnnnnnnnnnnnnnnnnnnnnnnnnnnnnnnnnnnnnnnnnnnnnnnnnnnnnnnnnnnnnnaagggatgacacggtcaaaaaatgaacttggccgaaatgaagacttcatgaagctctataatcatctagagtgtatgtttgcacatacacgtagtacttcagcagatagtgtttctgctatccaacaaggnnnnnnnnnnnnnnnntttgtttatagtcatccaaagttaaagaaattagaagaagttgtaattgaacacttcaagtcgtggaatgngctgaaaacacttctgaaaagaaacgtgatgagacgcgagttatgatcttctcttcatttcgagatagtgttcaagaaattgcagaaatgctttcacagcatcagccaattattagagtaatgacttttgttggccatgcctcagggaaaagcacgaagggttttacccagaaggagcaactggaggtanaggtagtgaaacagtttcgtgatggtggttacaacacgttggtttctacctgtgtgggtgaagaaggtttggatataggagaagttgatcttataatatgttttgattcccagaagagcccaattcgtcttgtacaacgaatgggtagaactggccgtaaacgtcaaggcaggatagttgttatcctttctgaaggacgagaggaacgtnatttataatcagagtcagtccaacaaaagaaatatatgtaaagctatttcaagtaacaggcaggtccttcatttttaccaaagaagtccacgaatggttcctgatggaatcaacccaaaattacacaaaatgttcatcacacatggtgtctatgaaccagagaagccttctcggaacttgcagcgaaagtcatctatcttttcctatagggatggtaaataaattttgcatttgacacatgcatttttcccctgtttttacttagcagatcatatcttgatataatatttcttgtttgaaaaactgaatatatgttctaagtaatatattatggacattctctttggaaagtctataagagattgttcatgttgcaaatggagagacactggtagtatagagtgacagaaactcagtgctggggaaaattaaaaataccctaccaacctagagaatgttctccataaagtttag

SEQ ID NO: 36871 - DNA, 706 bp, Macaca Mulatta
gagatcctccggagaagcgctgagaacgtagaggtggtctttggcctctacctgaaggaaatggaccccagccgtcagtcctatgtgcttgtcagcaagctggactttcccgatcaaggaagcttgggcgatgatgggggttttccccggagcgggctcctgatggttctcctgagcaccatcttcatgcatggcaaccgtgccactgaggaagagatgtgggaatgcctgaatgcattggggatgtataagggtaggaagcacttcatctatggggagccccaggagcttctcaccaaagatttggtgcgagaggggtacctggagtaccggcaggtgcccagcagtgatcctccacgctgtgagttcctgtggggtcccagggcccatgctgaaaccagcaaaatgaaagtcctggagtttgtggccaagctcaatgataccgttgccagtacctacaagtcccagtatgaggaggctctgagagaggaggaagaacaagccagagccagagcagcagccagggctagcgccagggccagggttagcaggtcctctcagccgtagtgaagtctcaggcaatcctcactaagagattgaaaagggctgtccaccatctcagtatttgggggtgaggtggggctagagggagcccaagacatgtgtccttctcgtgttctggttatttgcaagccacttgtagatt

SEQ ID NO: 36872 - DNA, 588 bp, Macaca Mulatta
ttctaagacatcatatctagaccagatcaccccttgtgttcatataacacagatagtatctttattcaagctttttgtttccgcctcttctctgaagtttaaaaccagtttaactggcttaaagtgtgtgtgtgtctgtgtgtgcatgcatgtacatgcatgcataagtactttcctttgtatagattttatcaccacctggccttttcatcaagttgcctggtgcttaagtaccacagttcatttgggcttagcttactgtgtatatatgcgactgacataaaaataatttgtatcctgtatacttgtggacatgagttcatggtcttagggagggtcattcaaaatgatttagtattgtaaaagtaaatgtcaatttactcatatgtctgaaaggtatgaaccaaagtacacatatttaaaaaggtcatgcgattcaatattgaactaatgtattagattaaagatgagactaatactgttgattgaaggatgataaatttgacaatttacagtgacataaaggagaaggaatgtattggtactggttaattgcgaatactgagttcaaacatggggtaaatccag

SEQ ID NO: 36873 - DNA, 901 bp, Macaca Mulatta
  misc_feature (1)...(901): n = A,T,C or G
gcacgaggcactgggtatcttctactttgctgcgactttagtagacttttataccttcaacagatgaattgggtgtcatttgaaccctagatgaatggccctgtccagtctcacagcgatgcttcacaggtaccagcacagggcacgcctggcccaagtgcctatgatggccagtgggcttgggtcttttggaacccagtgtacatggttctggaaaaccccattcacttcctccaaatgatgtgatctgctttgtgtgagaatgctggtcaaggagcaggtaattcagtgacgtagcggagcattgatgaagtgtgaaaccgaacattgccttggcatgaagcaagtgcagagttgttataaggtaccattaacccatcttcatttcttctgatgtatttagatggatcctgaataccgtgtgagaaaattcttagccctcttaagagaagaaggagcgtaagtacacacaacatttaatgaccatcaaccaaacttaccaccctgttaaatccctgtgcctattctaagagttgctttcctagataagtttgtttccatttatttgaattcttcgctgtgttgtaggtccgagagaccaagcaaggaagttggttgtactgttggtttgctctccctgtcctgcttcgcaaaacttccttgtcacaatgcaggaaaaacttaatgtagcccccttgattttgattgcacatgancttattgtaaacccctgcgaccacgggagctgccccgctgagacggcctgggacttccgggttctccgactccggcactggagcttcctcgtaccgggtcccttctgttgtgtgtaaccctctttgttcgatttttccgctcggcgacggtagagcggccctcttgctacggtgtgttcccctgt

SEQ ID NO: 36874 - DNA, 176 bp, Macaca Mulatta
  misc_feature (1)...(176): n = A,T,C or G
gcccaggagaccaggtaacaccacccaggtccctgacnnnnnnnnnnnnnngactatgactttcaaggatgtggaggtgaccttctcccaggacgagtgggggtggctggactctgctcagagaaacctgtacagggatgtgatgctggagaattataggaacatggctttcctgg

SEQ ID NO: 36875 - DNA, 590 bp, Macaca Mulatta
cgctgcaccttcatcgcgtacccgggacccgccggcccgcgggagaaatgttgctgaagtgctgctgaaagggccagagatgcaaggatttgggacacattttgaacctttaagctgtctgacattgacctcctttcgttattaataaagaagaagcaggagcttaggatgtattaacaccaactcattaatatactaaccggacaatgttctacaaataattctacactgtaaaggactggattggcacaaaataaaataatttcattttattcagcttataatatgacttgatggaggaaaatttgataagcatgagggaagaccattcttttcatgttcgttacagaatggaagcttcttgcctagagctggccttggaaggggaacgtctatgtaaatcaggagactgccgcgctggtgtgtcattctttgaagctgcagttcaagttggaactgaagacctaaaaacacttagtgctatttacagccagctgggcaatgcttatttctatttgcatgattatgccaaagcattagaatatcaccatcatgatttaactcttgcaaggactattggagaccagttc

SEQ ID NO: 36876 - DNA, 760 bp, Macaca Mulatta
  misc_feature (1)...(760): n = A,T,C or G
ggnnnnnnnnnnnnnnnnnnnnnnnnnnnnnnnnnnnnnnnnnnnnnnnnnnnnnnnnnnnnnnnnnnnnnnnnnnnnnnnnnnnnnnnnnnnnnnnnnnnnnnnnnnnnnnnnnnnnnnnnnnnnnnnnnnnnnnnnnnnnnnnnnnnnnnnnnnnnnnnnnnnnnnnnnnnnnnnnnnnnnnnnnnnnnnnnnnnnnnnnnnnnnnnnnnnnnnnnnnnnnnnnnnnnnnnnnnnnnnnnnnnnnnnnnnnnnnnnnnnnnnnnnnnnnnnnnnnnnnnnnnnnnnnnnnnnnnnnnnnnnnnnnnnnnnnnnnnnnnnnnnnnnnnnnnnnnnnnnnnnnnnnnnnnnnnnnnnnnnnnnnnnnnnnnnnnnnnnnnnnnnnnnnnnnnnnnnnnnnnnnnnnnnnnnnnnnnnnnnnnnnnnnnnnnnnnnnnnnnnnnnnnnnnnnnnnnnnnnnnnnnnnnnnnnnnnnnnnnnnnnnnnnnnnnnnnnnnnnnnnnnnnnnnnnnnnnnnnnnnnnnnnnnnnnnnnnnnnnnnnnnnnnnnnnnnnnnnnnnnnnnnnnnnnnnnnnnnnnnnnnnnnnnnnnnnnnnnnnnnnnnnnnnnnnnnnnnnnnnnnnnnnnttatttatgggatccaccattcccttctttggtctggcctcaattccgccaaactacttacaaccacctttccgcattggaaaccaattccctttccggggctttcaaaaaaccccccccgcctttggaaata

SEQ ID NO: 36877 - DNA, 947 bp, Macaca Mulatta
  misc_feature (1)...(947): n = A,T,C or G
ggnnnnnnnnnnnnnnnnnnnnnnnnnnnnnnnnnnnnnnnnnnnnnnnnnnnnnnnnnnnnnnnnnnnnnnnnnnnnnnnnnnnnnnnnnnnnnnnnnnnnnnnnnnnnnnnnnnnnnnnnnnnnnnnnnnnnnnnnnnnnnnnnnnnnnnnnnnnnnnnnnnnnnnnnnnnnnnnnnnnnnnnnnnnnnnnnnnnnnnnnnnnnnnnnnnnnnnnnnnnnnnnnnnnnnnnnnnnnnnnnnnnnnnnnnnnnnnnnnnnnnnnnnnnnnnnnnnnnnnnnnnnnnnnnnnnnnnnnnnnnnnnnnnnnnnnnnnnnnnnnnnnnnnnnnnnnnnnnnnnnnnnnnnnnnnnnnnnnnnnnnnnnnnnnnnnnnnnnnnnnnnnnnnnnnnnnnnnctcctaaaacaccttctgaatttacctgcatcccggagttacaattaccctgacctcatacccagttctcataaaacaacggatcgataaacaaactaattccaaagcccttacttcatccacaaatacatacctcaggcacccctttttttcacccccttattaccataattctccaagaaataacctttttaaaaccaccccctttcatcccattacacccaacatggggctttcctaacagggtagctaacattttactttacaattaaccctccaagggctgttcccatagggtacctcccccacgatcttattttaatttgggtatttccatacaattttccatctcgattgtgatctggccctgtcctatcccgcacccaaataataatctatacaaccaacccttgtcatactttactcataaccctaatacctcattacccggtcactttactagaagcccctacagaccaatttaataattctgtaccaccacttcacccggtggaaatgtctttttatcccactgaggcattactgccct

SEQ ID NO: 36878 - DNA, 535 bp, Macaca Mulatta
aaaccaaagccacttccccacttgatattcttcttcagtagtttaaggctgaggtatgctttgttcttttactgcagtgtatattccaggatttttaaaggatcctcgcttccaggagatctctgtgaattgaaatcaagttaatcccattagaccattttaagaagttaagttgatataacagcaaaatttctcctacccaaaactatgtcaacaattggatgtactcaccaagtcacccttactctgccactaatttatttccttgttgccgaaatgatgagagacatataatctccaccctcacggagttgtcatcaccctggagaggaaggagacagccaaaagagagaagtattgtcttgtagatttattagattcacatagtatcatccttctccagtgtgtaaggcgttgcctaaataggtccagttaaagcactacagggtagccatctttcaaaaaaattgttggccacatttttaagttcacaggggagggggaatgatgtctcatactctagccctcctgagta

SEQ ID NO: 36879 - DNA, 684 bp, Macaca Mulatta
caccacacggggggggcaaaacgaccctcggggcagaaatcaaaggggccgcgggggtgttccaaagtctttcttttccccccccccttaggtcaggggggaaggtttcccccccccacgggctaaaatgttcaggcccccgggttccaggcttggttgcccaaacaaaggtaaatccttgtcccatggcctctgtaacactttttcgaaggccagggaagtagcgattttttgttttctctttgatcaaggcaatcttggcatctttttcctcaggtcgacataagggcagaagaaggatcatctcattcaaatctgccataccttccgtatacatatcaattagggctctctcctttatgtctttcccgtagaggttgtatttgctggcaatgtagttgagaatggctctggtctgcaccagcttcatcccatcaatctcaaccattggtacttgctggaacatcaaactcccatcatttcttaacttttccaaatcttctgcagattctataaatttctcttcaaactccactccagctgcagccaagagccaccggatgggctccattctgccccgtccattgaagtagtgaagcttgggcttccccgccatggtaacagtctcttggtttctctgattaaagtccagctggtctccgctcagcttctcaaggccacccc

SEQ ID NO: 36880 - DNA, 412 bp, Macaca Mulatta
acatttccatgtggccccagcagccccgggctgggttggaggactccagactcttgtgtgcctgccccacaagaagaacaaccccagggggtgctgcacgtgcagggctgggttcccagagtgctgcgtccacttgcttgcagcacgcccggtgaagcaggtgctgctcctgcactattttacaggtgacgggacagccctgggccacctctgtgacccaagtgatgggtgcagtgtgtgactggagggtcctctctgtccctgataacaagacactgagctcttactctgggcagagctggtccaggggcctttaagcaacaaggtgacccctcccaggataaggtgttatttcacacactttaaatattacccaatagcttataattcactggctaaaagcatacaagtt

SEQ ID NO: 36881 - DNA, 634 bp, Macaca Mulatta
  misc_feature (1)...(634): n = A,T,C or G
gggnnnnnnnnnnnnnnnnnnnntgagnnnnnnnnnnnnnnnnnnnnnnnnnnnnnnnnnnnnnnnnnnnnnnnnnnnnnnnnnnnnnnnnnnnnnnnnnnnnnnnnnnnnnnnnnnnnnnnnnnnnnnnnnntgaggctgcagtgagctgtgatcacgccactgcacttcagcctggacaatagagcaagacactatcttgaaaaaagataaaaagataaaaagaccagttttaaactgatgataattactattctctcctgttgactattaatcttgtttcatttttattataaataaatcagaatgactaaaacatttcaattttgctagttgactgaaatgtattgatgtagttggccatggttttactcacttaaggcagaatttcaggggtaacatgttttttcttcagttcagtaccaaaaggacaaatctgccatgtaccaaaatgaaacttgtcatcaaagacagcatatggtattgtcaaatgcgttgataaataataaagatacttaatatatatctttattttaaaattatgttgagatttacttgcttctcttatgaaaatgtataccataatacttaaagtattgtatgaaacacataggtgtatagcgtgaaataatgc

SEQ ID NO: 36882 - DNA, 282 bp, Macaca Mulatta
  misc_feature (1)...(282): n = A,T,C or G
ctggtctcaagccatcctcccacctcggcctccagagtagctgggagcacaagtgtgcaccgtcacgcccagctaatgtttannnnnnnnnnnnnnnnnnnnnnnnnnnnnngttgcccaggctggtcttaaactcctggcctcaactgatcctgtccctcctttggcttcccaaagctctgggaccataggcctgagctgccattgccggctaatttatttttacatttgctgaggtggggtcccactgtgtggcccaggcagatcttgaactcctggcct

SEQ ID NO: 36883 - DNA, 673 bp, Macaca Mulatta
tggcagtgggacagcggggtaactttcagagagactctcactgtctgcacccttttaataattgctcttcctggcaaggctgccacctccctgtctcccagactggcagtggggcaacccaggcctgcttccagttacctgcaaagccagacctagccctgccgtagctgttgtcccatgcctaattctagttgcaggaagccatccctgtaccctgggtccattcacaggaacaggttccagagaaggctgatggaagggtttgaaatgactggttgaacccttcctgctcagacacagtggtagctggagagcaggcagagatggtagaattgcaggtttggccacctgtactgaccccagatatatatctccttcctgggaagagcatgagttggaaaaatgttgagccactccctggaaaacctgggtcctggcctggattctacccttagccagctcttagcaaatcccttaacctcactctctcctccccttcacgatagagttaataattcccatccaactggcttcacgggcttttgtgaactcatgaatgtgaaagtcttttctagtttataaaacactatatgaatgtgggaaaatctttacttgaccttagggcatggagggtggagcccattttgtctgctgattggacttagatgctgat

SEQ ID NO: 36884 - DNA, 755 bp, Macaca Mulatta
  misc_feature (1)...(755): n = A,T,C or G
ggatctggatagggttggtgttcaaaagnnnnnnnnnnnnnnnnnnatgataaacaaaattcaataggagacaatcttgccatttaaactaaaacaaagcacattttatccactacttgatttttttaaataaagcagacatgtttccagggccaccctccctggggtctgtgtcagcagcatggtgattgtattcctatggttcattcccagcagtcctggacattccccgaggaccctgtagacaggaggtacatggacacttcagtgtctgcctttgcctgaagggtgatggctgcttttccaaggttgaggtgggtggccacgttgaggatgggtgtctgccctggaagacaggttaagggggtatgttctttatctggtaggcagaaacccttcctcttagaggcttgatgacattatctcaaaaccatagcatttttattctttctctggattagttagaaaaagactttacaaacacactctttcaaaagccagtaaggaatgggtgggggtgggggtagatgggactagtggggattgggaagaaaggcagaataaatagcaacccaaaccaagcctctggcttttatcaaaaatggccgtgtttggggctttaaacagaactgagacccctcatgaatttaccggaatgccagaaccctactaggcccgcccaagaaaaaataactgggcctttgaaaacgggtttttccctgggtccataccccaaattcaaatttggacccgca

SEQ ID NO: 36885 - DNA, 791 bp, Macaca Mulatta
  misc_feature (1)...(791): n = A,T,C or G
ggggctatgctgtgaaaggaaccttgtaaagtgatagtatcagagtcatactatcttaggtagtacttaatacatgtatatgaatgtaggaatattgtgtctgtaattaatacttcgactattttgataatggttgttctgtttattattgattatcatattcatcaaagtcttttcattgctttctgtactctttcctgctatttaccacagaatgaaacaatatcataccatgtaaatgacatttgaacactttggctgaatatttaaatataatataaatatattaatttcattaattatatattaatatattgattatataataatatattaattatataataattaattatataataatatattaattaaataatttttttttacagttaggtaatctttgatgagttgtcctaatgtcattttaccttgatgtcttttactttccaaattgataccaactttgaagnnnnnnnnnnnnnnnnnnnnnnnnnnnnnnnnnnnnnnnnacccaagctggagtgccatggcacaatctcctgacctcatgacccgcccgacctaggcctcccaaaaggctggggattattaggcatgaacccattgcaccccaccccacttgtaattatttttgaaaccatatttttttgtttaacaatttttttaaacaaaaggttttggcaatttcctgttttttaaaggtggcacccttccattttttagaaaaaacattttttttatgagatttccctccctggaaattaaggtttactccactaaaaaatttt

SEQ ID NO: 36886 - DNA, 622 bp, Macaca Mulatta
  misc_feature (1)...(622): n = A,T,C or G
ctgcaaaggggttatggtcaaaatgagcctcatccttcctgtaatctgggaagaggtgatgatcaagtccccaacttcagtgtgagggacagagttgggggatggccccttttcaaagaagtggaaatagttttggagaagcgcagctgcttcactgggggaatgcggcagggactagggcccaggatgcctcggcctgtggggaaagccctttaaaaggcagggcccaggccctggagccagcacaagactggcagcgagcccctgagccaggaggtcctggaggagagccaggccggtgggcctgcccgaggctggagggtcagccccaatggggagctgggttggccagggagcagggctgctaccagcctctttggcctctggggacccaagaggacacatccccactttgcccacttttctgtgtcattttgttgttttggtttgtggtgnnnnnnnnnnnnnnnnnnnnnnnnnnnnnnnnnnnnnnnnnnnnnacttcgcccacacgggacagtggagccctacctggtcagttccacttatgggctcccatgcacttgtccaaggcggcctctttggggcagggatggtttgaggaatcacttttaaagaaaaa

SEQ ID NO: 36887 - DNA, 834 bp, Macaca Mulatta
  misc_feature (1)...(834): n = A,T,C or G
catcatctgtctttatcaccatggcactcccgcgccgtgatgtagctgtggttgaggaagggaggcagatggtttgtgaggcctggtgtggcctcccctgggaggctcctgttcccatgaaggcacccagagctggcttacaggggaagcccagcccctgggcaccccctggcagggctgcagcgacagtgccagctgcacctctgcagctctccaatgaaggatgctcactccctcctcctgacctggnnnnnnnnnnnnnnntcctgacctggacctcgtcccacccccaccaccgccccctccggtgctcctgcgttctgaagaagagactcctgttccaatgggggcctcactcattgcagacttagagcagctgcacctgcccctgtccccactccgaccacaggccccggcagaaggaccttcagtccagcctggaccccgtcccctcatgcctggggaggaagagctttcgcctccccgagcagagcctgttgagagatagttgtccacagacatctgtgccttctgccacaaaacgtgtccccctaggagctgactgtggaggccatgaagaggccgtaccatgcccagtgcttcacgtggcacacctgcctccgccagctggctgggcagagcttctaccaggatgggtgacccctctgtgaactctgctaccaggacacgctggagaagtgcggcaagtgtggtgagatggtctgggagcacatcatcagggccctgggccaggccttccacccctcctgcttcatgtgtgtgacctgcacccggtgcatagaggatgagctttgccctgggcagccaaaacga

SEQ ID NO: 36888 - DNA, 141 bp, Macaca Mulatta
ggacagcttgttattttatggtgggttatatgttctgtatacaggaaggggttagtagtttgggagtcatgaaattaagtgatgttcaaccttgttaacttgggagcagtggttagcaaacctgattatttgacagataaa

SEQ ID NO: 36889 - DNA, 223 bp, Macaca Mulatta
gaaagaaacagaaaaacattaaatatagtggaaatatcacttttaatgagattgttaacactgctcgacagatgcagcaccaatctttagccagagaactctctggaactattaaagagctcctggggactgcctagtctgtggtctgcaatgttgatggccaccccctcatgacatcatggatgacatcaacagtggtgtggtggaatgcccaactagttaa

SEQ ID NO: 36890 - DNA, 1128 bp, Macaca Mulatta
ctgctgctgctctcgggggctctggccctgacagagacctgggcgagctgccactccatgaggtacttcagcgctgccgtgtcccggtcaggccgcgggaagccccgcttcatcgcggtgggccacgtggacgacacgcagttcgtgctgctcgatagcgacgctgccagtccgaggatggagccgcgggcgccgtgggtggagcaggatgggccggagtattgggaagaggagacacggatcgccaaggcccacgcacacactgacagagtgaacctgcggaccctgcgcagctactacaaccagagccaggccgttcgcctacgatggcaaggattacctcgccctgaacgaggacctgtgctcctgaaccgcagcggaccctgtggctcagatctccaagcgcaagtgtgaggcggccaaagcgactgaacgaaggagagcctacctggagggcacaaccccccaattcacacgtgacccaccaacctgtctttgactatgatgccaccctgaggtgctgagccctgggcttctaccctgtggagatcagactgacctggcagtgggagagtgaggaccagacccacgacgtggagctcgtggggaccaggcctgcaggggatggaaccttccagaagtgggcagctgtggtggtgccttctggagaggagcagagattcacgtgctatgtgcagcaccaggggctgcctgagcccctcatgctgagatggactgttgtcactgaagctgtggtcacttttgtgctgtggaggaagaagagctctgagtttttttgtcccactgagggttccaagccccagatagaaaaggagggagctactctcaggctgcaagtaagtatgaaggaggctgatccctgagatccttgggatcttgtggttgggagcccatgggggagctcactccggcaatatttcctcctctggccatatttcctgtgggctctgaccaggtcctgtttttgttgtaccccaggcagtgacagcatccagggctctgatgtctctcatggcttgtaaatgtgagaccctgggggcctgatgtgtgtgggtttttggggggaacagtggacacagctgtgccatgaggtttctttgacttgga

SEQ ID NO: 36891 - DNA, 548 bp, Macaca Mulatta
ttggtttcttaaggtcattatcaaccctaatttttctttcgttcttaatatctttcagatttggagtctctctacctttggtcttctccatacttttgtcagtgaacatgctcggcagtccatttttaggaatattggaactggagtgatgcaaattgagacagggcccgcaaatcacattttctcctgtggagctgatggaacaatgaaaatgagaatactgccagatcagtttagccctttaaatgaagtgttgaaaaatgatgtgaaatttatgctataacatttttacaataagatgtacaatttattacctacatggaagtagtcaccagatgtaatatacagtgatcattctctatgccacaaattagctaatgctttcttgtttttatatttattttatggagctttgcccttgatgcactgatgccttaaaaattaacaaggtcattcagaagtagattacattgcctaaagtagaatgtgtaagtaatgctgtaataatacatatcatagtatattataatcagtatgtcatagtgtta

SEQ ID NO: 36892 - DNA, 845 bp, Macaca Mulatta
  misc_feature (1)...(845): n = A,T,C or G
ggattctactcgtgtacttaatctcnnnnnnnnnnnnnnnnnnnnnnnnnnngagatggagtttgctgtgtcgcctnnnnnnnnnnnnnnnnnnntnnnnnnnnnnnnnncnnnnnnnnnnnnnnnnngttcaaacannnnnnnnnnnnnnnnnnnnnnnnnnannnnnnnnnnnnntgttcnnnnnnnnnnnnnnnnnnnnnnnnnncattttagtagagaagannnnnnnnnnnnnnnnnnnnnnnnnnnnnnnnnnnnnnaactcagatgattaacccnnnnnnnnnnnnnnnnnnnnnnnnnnnnnnagcatgaaccactgtgcctggccagatttatcttcatagtagcactatactgtttatttactgtaacattggaataagaacgtatattctttagcataagccattgaattatttctcaaacttcgctgggtatatttcacattcgccgcaccatccatcttttccttacacctttgtccggcccccaccatttacatgcgcgttgggaacttctaattgacacctgtaagccgttccgccccattggtctgtaaataccgaactatagttgtccccaaaccctttggcctggattctccattattttccagtttttggtatctagattatcgccacgattcaagaaaaatcccccgttcctccagtatgcaaaatattcttcaggttaaaagaaacctcctcgtttgccccttactaccatccgtggggacattcccacaaaattcatacagcaatacttcctcacacctctttttatattccgagcctaccccggttattcgcctcgataaacgaataccttaccccggacgt

SEQ ID NO: 36893 - DNA, 500 bp, Macaca Mulatta
aacagtgcctgaactgttgccctggtgtgagttacatatctttgtcagcttatttcttttattgaagggctattcctttgccagtgattgctattcccagtaacatcactgcattgtcctgattctcctgatcctggagcttaaaatgtttttatataatgttaaataatctaaatgaaagtaacttaatgtaatccctagagtaatttaagtatcatcagatgtatattctatatttttatcatcatgcacatcacatatgtaaaattatatatcattacatgtatcaagctgaaattttgttatattattactctattaaatattttctagacctgtaatctagattaggttctgagagaaaatgaagcaaagaggaaaaaacaaataaccacaaggaaaaatatttattttgaagaaaactgcaatgagtttttaatcttgctattttatgtaaattatagataagtacagatactctatgagaagcttccattttt

SEQ ID NO: 36894 - DNA, 853 bp, Macaca Mulatta
  misc_feature (1)...(853): n = A,T,C or G
gggcttgactacgatttctagtcaatcagattccctgcgttaattgtttatgcatgactttgaacatacaataacattttaaacaaccagttaagggttattggaatggctttgtttaatgtttctggctcttcataaacagctatgctacacagaaaggtcacagagagtttcagcagccctcttctccaaactcatcctctttacctctcagtacataaacaagaccagtggcttagtaggcttttctctccctcatattggacataatttcaaaagagaggcttttaacccacggaactaggactctgactgcgctctgattttccttcacgtggattgcatgtaactaattatctctgatattattcttgtggtattgtacatagattatcttttgagagccaaaataccaaaattcaagtaaagtaatcgaaaagagaactgaaaattctcatattttcccccccgaaaagaaaatttttggttatttttttgcctaattctggggaagcccatattatacctacgtgggtaaggcaatttaatttttcctataaaaaaagaattcgaagtccctaacatatgtccctcctcccctttcgtaagtccccacaatttacattttaaggaccggaacagaaaaacaggtgtaaaattccaaagaatatgtcctccgggggnnnnnnnnnnnnnnnnnncacacattttccttttatcctggggggggtgggggggtaataaaaaaaggaccccttttattgaacttaccagggttgctatatttttccccaaaaaatggggattttttcattttcaaaatttaatttccaaaagagttccctcccaagtt

SEQ ID NO: 36895 - DNA, 866 bp, Macaca Mulatta
  misc_feature (1)...(866): n = A,T,C or G
gggtctaagatttgttttaaagtacttcaggaaaaaggaaaaaaagagacaaagcaactgtgacaatacattgacaaataatgaattagcgtgggggatattaactatacttatcagttagactaatcattatattaattaatgtttatgcttgaaatttttcataataaaccatgttttaaaatgaactctatttttaaacccattctgtttgatatacttgacagacttttacatggagactaattgtctgctggaaatttagaccttgagttaatatagatttgagaacatctgtacagtggtgatagctgaagctctgggggtggaacagattacccagggagatggtgtagagctagcgaaactaccaactgatcacccagaggaaggcctctggtttagcggcaggtagtgtgagataaaatgatgaagtcagtgaagtcatgagagtgagcccatacccaagaggctgacatgtcttatgctcaagagcagaaagctctgcaaggaaaagcatcatcaaataggaattagaatatagtggggtcaaaagtatgtaacgagggaccagagggagtggacacagtgttactttccaagaaattctgtggtaaagtgagagatgcaggtccgtacagaatactgaggcanaggtnaagaatccgatctcttgtttgtnnnnnnnnnnnnnnnnnnnnnnnnnnnnnnnnnnnnnnnnnnnnnnnnnnnnnnnnnnnnnnnnnnnnnnnnnnnnnnnnnnnnnnnnnnnnnnnnnnnnnnnnnnnnnnnnnnnnnnnnnnnnnnnnnnnnnnnnnnnnnnnnnnnnnnnnnnnnnnnnnnnnnnnnnnnnnnnnnnnnnnnnn

SEQ ID NO: 36896 - DNA, 142 bp, Macaca Mulatta
tttctctcgaaaatctcccaatactgtatatgattttacaacttggaagcaacagtttccaaaaggcaagaatataattttgtcttttagctctgacaggtaacacacaaacagagaatacagattatactacgcattctat

SEQ ID NO: 36897 - DNA, 395 bp, Macaca Mulatta
actgaggtgggcgccgagcattcagtaaacgaggaaacgaaagcggggaaagttgggaatcaagcgtctgtctgcctgccaccagcagactagcggctttgggtaccccttggacccaaacacgaactcagcccctgcaggagcacagtcatcggcacccacgtgggaacagtgccctgggatgggtggccacgggatgtttctggggcccctcagaggcccagcggcgcgggtcttggagaatgaatgtgtgtcactgggccgctgctgcagagggccggtcctgagtcgctgcttggaaaagaggcccacggccagcgtttggcttcaccaggaggaaaaagcacgtgctaaaccaccagcattcggggtttgtctgtttgataaaggatgca

SEQ ID NO: 36898 - DNA, 250 bp, Macaca Mulatta
agagagagttgtgttgggatcctacagcctgttatcattctatggagggaaaagattataccagatttcatgggttaattcaatcaaagccatagaagtagaaaatcaaagacagagtgggctgggcactgtggatctccatcaattcctcttgcagacaggacctcttttgaaagtcccaaactgcatatatgggccctcattgtctgacctttggtgacatgcccctgacacagataataactcgact

SEQ ID NO: 36899 - DNA, 764 bp, Macaca Mulatta
  misc_feature (1)...(764): n = A,T,C or G
gnnnnnnnnnnnnnnnnnnnnnnnnnnnnnnnnnnnnnnnnnnnnnnnnnnnnnnnnnnnnnnnnnnnnnnnnnnnnnnnnnnnnnnnnnnnnnnnnnnnnnnnnnnnnnnnnnnnnnnnnnnnnnnnnnnnnnnnnnnnnnnnnnnnnnnnnnnnnnnnnnnnnnnnnnnnnnnnnnnnnnnnnnnnnnnnnnnnnnnnnnnnnnnnnnnnnnnnnnnnnnnnnnnnnnnnnnnnnnnnnnnnnnnnnnnnnnnnnnnnnnnnnnnnnnnnnnnnnnnnnnnnnnnnnnnnnnnnnnnnnnnnnnnnnnnnnnnnnnnnnnnnnnnnnnnnnnnnnnnnnnnnnnnnnnnnnnnnnnnnnnnnnnnnnnnnnnnnnnnnnnnnnnnnnnnnnnnnnnnnnnnnnnnnnnnnnnnnnnnnnnnnnnnnnnnnnnnnnnnnnnnnnnnnnnnnnnnnnnnnnnnnnnnnnnnnnnnnnnnnnnnnnnnnnnnnnnnnnnnnnnnnnnnnnnnnnnnnnnnnnnnnnnnnnnnnnnnnnnnnnnnnnnnnnnnnnnnnnnnnnnnnnnnnnnnnnnnnnnnnnnnnnnnnnnnnntacctaactactaaatcgaaccaacccccttactaaacctagaatggactaaatgggcttgccccccgccgcttattcccacattccgaaggaaccccccctatcattaaaactagtccgaaaaaagggagggggagtccaaaacccccccaaaaaagggggtttcccggc

SEQ ID NO: 36900 - DNA, 244 bp, Macaca Mulatta
aaccagtgttattaaaaagcatctataggaaaatgttattagcattactaatgacctgtatgttgtatttctagtgtccataacatcatactccattttgtagaatatcagactttgtgatttccatgatctactttaaaagtggttgtacttgtccttaggatgctagtcaactccactggaaagctgtttctatgtaaaatgatgcaattccaaaatgcacatctaacctcaataggaagat

SEQ ID NO: 36901 - DNA, 627 bp, Macaca Mulatta
gggctggaggtcgggcttctgtaacatggctccgcctccaaaatcaaattttcaccacatgatcagggatcagcaaatattttttgtaaagagccagaaagtagatattttaagtcataaggtccttgttaacaactacttgactctgccattgtagcacaaaggcagccacagccaaaataagcaagcagtcatgtctgtgttccaataagactttatttacaaaaacagcaggcacagacaagatttggcccacaggcatagattcccaactcatggtggtgaaggacaaaaaaaacacctgtttacaagcctttgtaagaaaataggctaaatattacctgtttgggttggagaatttcttggtttgagaaatgctttccccttgccttggcatgcccagaaggataaatgactcttaaaccaccccccttcaaaaaaacctggtcttcacccgaaaaaaaactccttcgttttaatggaaccaatccccctttggggagggaaaatggtaagccctaacctcccaaaaaatttaaaaacttcttttgaaaaaccaaaggtaaaagattttttttttcgcgggggaaacccacacacccccggtggcaaaaatatttggaaacc

SEQ ID NO: 36902 - DNA, 662 bp, Macaca Mulatta
ggggagtgtgaatactctggacaaaggaatgatttatgtcccaggcaggatgaagcaggatggtatgatgtgatttcctatgtagaaaatctgaaagtatcaacagcaacaaagccctggaactcgaattgatgagtgccgtcagaaagctgtatcatgagctgcctgtgcttctaaagtatccagtggatttttaatcacatgagcgtggaaatagggttatgagaagaagctcagagcagaacaccaaaagtggccaccaccagcatgaagaacccaacaattcaaactggtgaagtgagaaaaacagaatgcagctttcaagattttcctatgaaagaggaagagataacgattaataggcagattatggaaacgctgagtgtaccaaatgtcagtgaatcctgtttcagccatgattattctatagcatggtgatggactccaaactgtaagcagtggcagcacgcgtagcggataccgcaatgatttccttggtattaaacctgtatttggaatgattcttatgtggaatggaaaagcattttggcccttggtttccaagggataaaaccggagctaaaggttcaaaaaaattgcccgcttatattcaaggaatttttttaaacatggcttctcgggccaggtaaaaaaaaaaaaaa

SEQ ID NO: 36903 - DNA, 832 bp, Macaca Mulatta
  misc_feature (1)...(832): n = A,T,C or G
ggttttttctaggggcccgggaaaaaggggggaaaggagaaaaaaaaggttgccagggatcttcccttgaaggctttggtttccaggagttctcaccaaatttcactttcccaccacatttctaattgtccaaagcacttcacccaagcgcctggccttaatagtaacccaaaccactgactagcatttcgggagagaaaaaaacactccctttctgaaaaacaaaaggagaccaaaatggaaatttcaacaaacttcccttgaccttgtttntaagatatgctcagcaatggtcccctttcctgggggctctagagaccnntcaaggcaagggagaaggggaaaggaaaggggtaaggaatcatgagacatcacacctttcttggaacccagactggctaaactggaaaaaattattcccaccacacaagctctcatcatctaccatacacatactcagatggaagtaaaagggagatgggagtactgataatccttcttaatattcaagggaaaggccagggtcactgattcccaggactggggactttctctaaattcacataagtctcccggggagacatctctgggaatgatgtggttcacatggaacctgacctctgggagttcccaagggagagcatctgaggaaggaatcctactcctaggctctccccatcacgtcttcccagaactctgcctgagagacacttacaaagcctcgttccaaaaacaggtctgtgctttttctgtttgcagattttactccaccactcgattatcccttcccttttacggctatttcactgcagctggggtctatacagctacc

SEQ ID NO: 36904 - DNA, 275 bp, Macaca Mulatta
ggagaacctgctgcgccacaccgtcgggctgagcaagctgagcctggagctgtaccctgcccctctggagagttatgatgcccagggtgctctctgctgggggagatttgctcaacttggggctgagctaatgaagacactgagggacttaaggcagcccaagactgttgtgttcagcactgtcccctgccctcgctgtggcatcagggcctcctatgacctggagcccagtcactgcctctgctgaatgcctgtccatcagggtggatgtattt

SEQ ID NO: 36905 - DNA, 835 bp, Macaca Mulatta
  misc_feature (1)...(835): n = A,T,C or G
gggaaacctcaataagggtcttgtcctcttctgtcatcctaaccctgattctagtttaatgcctttcctgacttatatgccatttgcaaatcaactgcctttcaaactgttagaacacgccaataaaacaaagttctatgaactttcatagtctagaaacaccaacaagatcccccttatttagcgattattagctaatgtgtggaagaaatatcaataaaagttcaaatgctaataactcaattccagataattgaatgctaaaatatttatgtactttgaaacgaaactgtgtttatttcattgatcgaacaagcagcaacacattttatgaccattgtcctaggtcatttgtgtctttatgaatttgctgatattgtcagtccattttttaaatcttcaacaaaattcaattttaagattaagaaatcagaaattttaggtaaagaatattccaaaattaaattgttctttttaagaaatatatcagttttaggtcctttattcacacatcaatttgttcatctggaagatactcaaattcttattgcgaatgaattacactacaaacaatgagttaagctaaaactacatataacttaaattgagattttcataactaatttggaagttttcacaccaatgaaaccatgcctcagagaaacagtaacatgttttcccagtctatgtttgtgcacccatggaatgtttaaggcaatggggtgttatttgccctaccccattgggatttgggtaaaaaataaaaggttgggctttttacccttaaaaannnaaatacancnntaaattaaaaatactaagacaaagacataaa

SEQ ID NO: 36906 - DNA, 864 bp, Macaca Mulatta
gaagttgctgaccaggaacgttctagatggcatttttgatgacttgatggaaaataatgtgttaaatacggaagagttacgcaatctaggaaaaggtttgaacttcatggtgaacaacgctggaaacctagttgataacatcactgagaaagcgcaaatggtaggcaaaatacttaaggaccgcctattgagtcacccaaaacagctgagtttagaatatcaacatgagagtgaggaccaggaatctgaagaaagctctgcatcatcttcctcttccacagaatcagaagaagaaaatgaagaaagcaaagatgaagaaagagctgcatcagctcattcaatggctgttcctccaacagctcctctggaaatccagggtgcccaacccagtggcaggttaaagctttgccctcatgctcatttccgtgaactgaagacgaaaagggcggatgagatatatccagtgatggagaaagagggccgaacacgcctggccctcatcatctgcaacaaagaattccactatcttcttaatcgaaatggttctgaacttgacctttaggggatgcaagatctacttgaaaaccttggatactcagtggttatagacgagaatctcacagctcaggaaatggaaacagccctaaggcagtttgctgctccgacccagagcaacagtcctcggacagcacattcctggtgttcatgtacatggcatcctgaagggaatctgggaactaacactgggatcagaaccaaaagtcgtgagaagacccatcttcgaattttcacaacgaacggcggagtgaaagcaagcagggcacaagtcaactggcagactggcgcaagtggcacacgaacgaa

SEQ ID NO: 36907 - DNA, 759 bp, Macaca Mulatta
  misc_feature (1)...(759): n = A,T,C or G
ggattccaaagccagaaatcttatcttaaaagcaattgaaacaataatacttacttggttgtgtaattcattacattcagtgatttttttttttgcataattaaaaccactgtcttagtaaattatctgtctgaagcagaattaagttgttgagaatgtatgatcttatatagaatgagtgctgtcctctgaaaataatgactaattctatcatatatttatttgctaattatggaatcaaaaattttgataacattctaacttactttaatgtacatacattacttagacttataatccagatcaataaagtatttgatagttnnnnnnnnnnnnnnnnnnnnnatgccattaattagataattcaatataaacgaatggctcaaacttgtgttcagcacctttggataactctttatttgggaataagtggggatttaattaatataagtaataaatgtttgccttttaatttatgatattaattttacttgttaaaaaagaaccagttaacaactattctatatcttaggttttaaatttaccaatttttatttctttctgctttgttaattttcattttagtttttatattactcaagtcatacttttttctttgccttattgatttttcctattcctactttaaattttgattangaaagggaaagagaggatactttagaggcagactgtttttgctgcttggtgggcaagttcctgactgtatacccttacaataccccaaaaagtttaacc

SEQ ID NO: 36908 - DNA, 470 bp, Macaca Mulatta
tggcccgctgcacgcctctgtgccccctggcacagccaacccccccagtgcaaaccccaaggccaagccaagccggatcagcaccgtggtctgatgaatggagagagtgagctggggaacaggaaagtctggggaaccacaggagagggaccttacaccctctttgcttcctcggttttttcaaaaatatatatacacatagcaatgtcctcctccccatgttttttctgccttgggacccgtcccctcacccccagcagttgccatggggtttccttccagattcgaggatccttgccacttgaagcctggactcagggtgctccagcgctggggagtggtgagggccttccagagatcctcgttctctttctcctgtcttcttcttccccacttttccctggaggtctagctctgtggcctcagacctctgggcctgtgtgagctccctgtcagctctggctggcgga

SEQ ID NO: 36909 - DNA, 837 bp, Macaca Mulatta
  misc_feature (1)...(837): n = A,T,C or G
attatatgtgccattaatgttggccagggggggggcgtaaatatttaataattcgaacgcctcccctttggaaatcccccgtttggaaaagaatcccccgttaaaggccccttcacgaaactctccttttgggaaatttgttttcagaaaccagcttcgggttgccccccnnnnnnnnnnnnggggggaaattcccaggcccctttgttcttggaccccgggattcttcctagggaaaccacgctttggccccatgttccactttaccctaagtgggccccgcgcggccaaaaagaatggtttataaaaattctttatggcgaaggggggcccgacaggccggccgannnnnnnnnnnnnnnnnnnnnnnnnnnnnnnnnnngccaannnnnnnnnnnnnnnnnnnnnnnnnntnntcttcagctaaaagagcggaagaggtgatttattttagggttgttacactcggccacaaataaacacagaaatagtccagaatgtcacaagtccagggcagaggaccaacatgggcagttttgtttatgagcaaggtgggtctcagaagtgatcggcgatcagagggcgatgaagttctagatccattgagacaagctctagacagtagcatgcagtcccacaacttgtaccagcatccccagcgcctggcattccatgtttctgctcctgtggcctccacgatgcaacaagctagcggtttacttggacctctgcctcatctttcttcttttgcgcttcagcctgcgcattcgcttcttcctccacttggctctcatggcgcagaggtttccagaaaaatggcgctaaggccgagagccc

SEQ ID NO: 36910 - DNA, 463 bp, Macaca Mulatta
  misc_feature (1)...(463): n = A,T,C or G
gggattttgaagtagaacctgctctatcttttaaaatcagaaagcttttgcattcttgagccattctcatataattatggaaggaaaaggaggtgagacatgagaaaggattgccctggagagtttttggccaggtgacttctccttgcctgtaatttcattannnnnnnnnnnnnnnnnncttttcttatgatgatgctattattagtagtactattttcaccatcatcagtatcattgctatgctctataacatattagagcctgtttatactgtactaaattataaatggttaatcctttatactgtaaacttgggcttttcctgtcatatatgttacacatatttgttctgagttttatttgttgagattgtttacaacagttgtttttcagattgaatctaccttagaatcacttgatatgtatgtgtgtaagcctgaatgagtatgggggggggttn

SEQ ID NO: 36911 - DNA, 335 bp, Macaca Mulatta
  misc_feature (1)...(335): n = A,T,C or G
ggcagctgcggcggctggactccggcacatgagcggcttcagtaccgaggagcgcgccgctcccttctccctggagtaccgagtattcctcaaaaatgagaaaggacaatatatatctccatttcatgatattccaatttatgcagataaggatgtgttccacatggtagttgaagtgccacgctggtctaatgcaaaaatggagattgctacaaaggacccttttaaacccncattaaacaacgatgtgacaaaaaggaaaactttcgctattgttgcgaactttggttccccgtacaaagcgatatattctngcgaactatttggtgccatcc

SEQ ID NO: 36912 - DNA, 777 bp, Macaca Mulatta
  misc_feature (1)...(777): n = A,T,C or G
ggggagttgtatctgatcatccttttattctcagagcccatcttgggaccttttacagaataggcatcagtaaagacatgtcaggtgaattcatcatttcaaactggcctattaacagctgtaatttcccgatgagtcagttactccatgttgctctgggctgannnnnnnnnnnnnnnnnnnnnnnnnnnnnnnnnnnnnnnnnnnntnnnnnnnnnnnnntnnnnnnnnnnnnnnnnntccntccgcctcccgggttcaagcnannnnnnnnnnnnnnnnnnnnnnnnnnnnnnnnnnnnnnncgtgcnnnnnnnnnnnnnnnnnnnnnnnnnnnnnnnncnnnnnnnnnnnnnccattgttttggccaggatggtcttnnnnnnnnnnnnnnnnnnnnnnnnntcctttgcctcccaaggtgctgggactatagcatgagccattacccctggcctgggctgaagtaaaatgtcttctatcattggtgttgccccttgctccctgcccccttgtggtatctctactctacttcaacccacctctcatgttactttccccttacccctttgcccctgggctggggtcagtggaaacttgtggtcccgagtttaaactcaaaaggagaccccaaaaaagaaaccttgaatttttattgcacagggtcccccttggaaaaatttccccccgtggaaaatgaaaattgaaaaaaactccccattcgtggtttaataggggagaaaaaacacttggggccacaccttatgttgaacttt

SEQ ID NO: 36913 - DNA, 785 bp, Macaca Mulatta
  misc_feature (1)...(785): n = A,T,C or G
gggattcaggagtttttttattctttgcccctttcttcacctcccgttgcaaataaaaaaacagatgtttgattctttgtgatgagtaaaagaatgatttatttttatcccaaaatgttatatgctttcatgtaagactagtcttgctaaatgaatgatatagtctaatgacaatgttttgagtattatatatatacataatatgtaatatatatatctagtatatagccatatgaatccaaattcattgtagctaaggaagtatagaaaactaaaaggttaggaaaaggaacttagaaattaataagatacacttaccacaggcgattttaggtcagttgatactatttaaaggctgagactacctagtagttatcaaaatctactacatactactacacacactaattcataatatgtgtttttgatgcagtaatataatacaattttatgatgagtcccatcttatatttcaaacagatatttaaaaaaaggaatatagcaacttgacaatattctgtggaagcaatcacctagtgaaatatcataatgcaacgtcattggtgtcacagtgataaagatccacttttataaagaaagtgcttggttttgccaataaatcttgagatatctacctttaggtacctttcccttataacaccctgctcataggttttagaaagttagnnnnnnnnnnnnnnnnnntttcattgggtnnnnnnnnnnnnnnnnnnntttagaagccccctccctgcaaccggctaagaacaatccaataaaatcta

SEQ ID NO: 36914 - DNA, 1812 bp, Macaca Mulatta
  misc_feature (1)...(1812): n = A,T,C or G
gaacaatctagagatcctcaagttcttgatttcctgaaaaagaatcaggattactggcaattttatgggaaatcgttagaatcaatctctacaaaagtcattgtaactcaaactactcagccaaaggaggattccagtggtgccagtggtaaaatgttacannnnnnnnnnnnnnnnnnnnnnnnnnnnnnnnnnnnnnnnnnnnnnnnnnnnnnnnnnnnnnnnnnnnnnnnnnnnnnnnnnnnnnnnnnnnnnnnnnnnnnnnnnnnnnnnnnnnnnnnnnnnnnnnnnnnnnnnnnnnnnnnnnnnnnnnnnnnnnnnnnnnnnnnnnnnnnnnnnnnnnnnnnnnnnnnnnnnnnnnnnnnnnnnnnnnnnnnnnnnnnnnnnnnnnnnnnnnnnnnnnnnnnnnnnnnnnnnnnnnnnnnnnnnnnnnnnnnnnnnnnnnnnnnnnnnnnnnnnnnnnnnnnnnnnnnnnnnnnnnnnnnnnnnnnnnnnnnnnnnnnnnnnnnnnnnnnnnnnnnnnnnnnnnnnnnnnnnnnnnnnnnnnnnnnnnnnnnnnnnnnnnnnnnnnnnnnnnnnnnnnnnnnnnnnnnnnnnnnnnnnnnnnnnnnnnnnnnnnnnnnnnnnnnnnnnnnnnnnnnnnnnnnnnnnnnnnnnnnnnnnnnnnnnnnnnnnnnnnnnnnnnnnnnnnnnnnnnnnnnnnnnnnnnnnnnnnnnnnnnnnnnnnnnnnnnnnnnnnnnnnnnnnnnnnnnnnnnnnnnnnnnnnnnnnnnnnnnnnnnnnnnnnnnnnnnnnnnnnnnnnnnnnnnnnnnnnnnnnnnnnnnnnnnnnnnnnnnnnnnnnnnnnnnnnnnnnnnnnnnnnnnnnnnnnnnnnnnnnnnnnnnnnnnnnnnnnnnnnnnnnnnnnnnnnnnnnnnnnnnnnnnnnnnnnnnnnnnnnnnnnnnnnnnnnnnnnnnnnnnnnnnnnnnnnnnnnnnnnnnnnnnnnnnnnnnnnnnnnnnnnnnnnnnnnnnnnnnnnnnnnnnnnnnnnnnnnnnnnnnnnnnnnnnnnnnnnnnnnnnnnnnnnnnnnnnnnnnnnnnnnnnnnnnnnnggtccattatcttggcagagaagttggagcaaaattttgggagctcctccttgtcattattcgatgtccnnnnnnnnnnnnnnnnnnnnnnnnnnnnnnnnnnnnnnnnnnnnnnnnnnnnnnnnnnnnnnnnnnnnnnnnnnnnnnnnnnnnnnnnnnnnnnnnnnnnnnnnnnnnnnnnnnnnnnnnnnnnnnnnnnnnnnnnnnnnnnnnnnnnnnnnnnnnnnnnnnnnnnnnnnnnnnnnnnnnnnnnnnnnnnnnnnnnnnnnnnnnnnnnnnnnnnnnnnnnnnnnnnnnnnnnnnnnnnnnnnnnnnnnnnnnnnnnnnnnnnnnnnnnnnnnnnnnnnnnnnnnnnnnnnnnnnnnnnnnnnnnnnnnnnnnnnnnnnnnnnnnnnnnnnnnnnnnnnnnnnnnnnnnnnnnnnnnnnnnnnnnnnnnnnnnnnnnnnnnnnnnnnnnnnnnnnnnnnnnnnnnnnnnnnnnnnnnnnnnnnnnnnnnnnnnnnnnnnnnnnnnnnnnnnnnnnnnnnnnnnnnnnnnnnnnnnnnnnnnnnnnnnnnnnnnnnnnnnnnnnnnnnnnnnnnnnnnnnnnnnnnnnnnnnnnnggtcaaaagagtactgaagaaccttagtccggattcattgtctagttcagaagatatggtaaaaatgtttcctcttctcgttgaaaagttaagacaaatggataagttgcctgcaata

SEQ ID NO: 36915 - DNA, 277 bp, Macaca Mulatta
aggctttcaagggctgcccacctaccgggcacgatcttcatcggggacggtggcaggagcccacagggcagacggagcgggccaggggtgtgggaggtcacaggcccctcggaggaggcacaagccaccagcggcagcgtcgggtgggaggagggcacggccgtgccgctgtcagcagcaggttgtgggggaggggagcggtgggcagggacccaggggatataaatatctgaggagggcgcgcaaggaccgtcaccacccagacttagaacatgac

SEQ ID NO: 36916 - DNA, 612 bp, Macaca Mulatta
  misc_feature (1)...(612): n = A,T,C or G
ctaaattttccattctagggtagcttttatctttttcggagtctttttaatccaaaagcaagcttgctaaccctcccagtgaatgtatttttccttccagcttctgggttgtgaataatcaccccgtcataaaaatttgctgttctctagtctctctcttttatatagctctcccatccaggcggtccgtaagacaaaacttcctctgcatctggtgccctcttcagttctggctgccattttcctcttagacctcgtcaaattttagttgtcttattgtagtaactgatggtttctctttcagcttttcctaagctctggcatattctaaatattaaaactaggttaatcatctgaaaatacaactttgatttttagtggttctccattgtgtcctgagtaaagaccaaacttctggccggcacggtggctcacgcctctcatccgagcactttggagaccgnnnnnnnnnnnnnnnnnnnnnnnnnnnnnnnnnnnnnnnnnnntaacatggtgaaaaccagtctctactaaaaaatgcaaaaaattagctgggcgtggtggcgggcnnnnnnnnnnnnnnnnnnnnnnnnnnnnnnnnnnnnnnnnnng

SEQ ID NO: 36917 - DNA, 780 bp, Macaca Mulatta
  misc_feature (1)...(780): n = A,T,C or G
ggatcctgattcatacaggtaaataatgctgtacttgcttgtttagttttatcatagcagaagtaaagatatctgaatttcaaagaaataagtgctgaacaataataagagacacgttataaattctccaaacgtcagccaactgtaggtttttccattgtttgtacaaaaagtatctcaggcatcccatattgctgtgttgatattctccaacatgataacattttaattggtatcctctcatgcacctggtctgaaagattaagcattaccataaagacattgagtcacctaagagacagcttagattagacagttgataaggcgctgaactttgactagcttgaatatttaaaataaagagattcatttaaattgaaggaaataagagagactgaaatatttttatttggctagtctaagtggggagacttatgaggaattaataaaaaagtcgacttagaggccctattatttgcacagcagcaaaacctgagatgtacacattttagtgtacatttttagaatatgtttacaacaataagataatctgaattggatggttgagtaacctttaaactcatctggtaaacctctaatgtatagtagaaatagtttgaaagtttctgacatataatagtatttacttcangaaaataatttgatgtttncacgttggtctctttttctatattatttcagccctaagtctatcttcataccacaggaaaatgcatttctactgagggatgaaaaatcaagggaacaatccaagagatg

SEQ ID NO: 36918 - DNA, 241 bp, Macaca Mulatta
gtcctggataaacgaagttccatgcactgacgttcgagacgtcaatgagagtgagctcatcaagataattagaaggcgcttacagctcaatgctaatcaagccttcctcctggtggtgagcggacacagcatggtgagcgtcttcatggtctcagaggtgtatgagagtgaggatgaagatggattcctgtacatggtctatgtctcccaggagacgtttgggatgaaattgtcagtgtaa

SEQ ID NO: 36919 - DNA, 158 bp, Macaca Mulatta
ggacggggcatgctgcggagaggtggaggatgatggcatcctgtttcctgtattgtaaatacaagcactgaccaccggaggcaacaccaattaagtgacatggtaacaaattcatctattatccagaatccggtaaagacacacaaggactatagtct

SEQ ID NO: 36920 - DNA, 848 bp, Macaca Mulatta
cgatgccaggtgtatgaaaactaccctaaaagccaaatgggaaaggaaaagactcatatcaacattgtcgtcattggacacgtagattcgggcaagtccaccactacgtggccatctgatctacaaatgcggtggcatcgacaaaagaaccattgaaaaatttgagaaggaggctgctgagatgggaaagggctccttcaagtatgcctgggtcttggataaactgaaagctgagcgggaacgtggtatcaccattgatatctccttgtggaaatttgagaccagcaagtattatgtgactatcattgatgccccaggacacagagacttcatcaaaaacttgattacagggacatctcaggctgactgtgctgtcctgattgttgctgctggtgttggtgaatttgaagctggtatctccaagaatgggcagacccgagagcatgctcttctggcttacacactggttgtgaaacaactaattgttggtgttaacaaaatggattccactgagccaccctacagccagaagagatacgaggaaattgttcagggaagtcagtacttacattaagaaaattggctacaagcccgacacagtagcatttgtgccaatttctggttggaatggtgacaagatgctggagccaagtgcttacatgcgctgggttacgggcatggaggtcgcccgcaaggatggcatgccggttgaccacctgtgttggccgtggggggtttctccccaacctgtcattgagagcccgtgcggtgccttcgggtgtgcaccagggggtttggcagccttgctgcggagtggttttacccccggtggcgcgtcctcccacggc

SEQ ID NO: 36921 - DNA, 1311 bp, Macaca Mulatta
  misc_feature (1)...(1311): n = A,T,C or G
agagatactgtttcgaataattggctnnnnnnnnnnnnnnnnnnnnnnnnnnnnnnnnnnnnnnnnnnnnnnnnnnnnnnnnnnnnnnnnnnnnnnnnnnnnnnnnnnnnnnnnnnnnnnnnnnnnnnnnnnnnnnnnnnnnnnnnnnnnnnnnnnnnnnnnnnnnnnnnnnnnnnnnnnnnnnnnnnnnnnnnnnnnnnnnnnnnnnnnnnnnnnnnnnnnnnnnnnnnnnnnnnnnnnnnnnnnnnnnnnnnnnnnnnnnnnnnnnnnnnnnnnnnnnnnnnnnnnnnnnnnnnnnnnnnnnnnnnnnnnnnnnnnnnnnnnnnnnnnnnnnnnnnnnnnnnnnnnnnnnnnnnnnnnnnnnnnnnnnnnnnnnnnnnnnnnnnnnnnnnnnnnnnnnnnnnnnnnnnnnnnnnnnnnnnnnnnnnnnnnnnnnnnnnnnnnnnnnnnnnnnnnnnnnnnnnnnnnnnnnnnnnnnnnnnnnnnnnnnnnnnnnnnnnnnnnnnnnnnnnnnnnnnnnnnnnnnnnnnnnnnnnnnnnnnnnnnnnnnnnnnnnnnnnnnnnnnnnnnnnnnnnnnnnnnnnnnnnnnnnnnnnnnnnnnnnnnnnnnnnnnnnnnnnnnnnnnnnnnnnnnnnnnnnnnnnnnnnnnnnnnnnnnnnnnnnnnnngctaatgcacaagctgagtgtggaagccccacccaaaatcctggtggagagatacctgattgaaattgcgaagaattacaatgtaccctatgaacctgactctgtggtcatgnggcagaagctcctcctggggtagatacagatcttattgatgttggattcacagatgatgtgaagaaaggaggccctggaagaggagggggtggtgggttcatagcaccagttggtggacctgatggaacggtgccaatgcccatgcccatgcnnnnnnnnnnnnnnnnnnnnnnnnnnnnnnnnnnnnnnnnnnnnnnnnnnnnnnnnnnnnnnnnnnnnnnnnnnnnnnnnnnnnnnnnnnnnnnnnnnnnnnnnnnnnnnnnnnnnnnnnnnnnnnnnnnnnnnnnnnnnnnnnnnnnnnnnnnnnnnnnnnnnnnnnnnnnnnnnnnnnnnnnnnnnnnnngtcctggacccaagccagaagcctctgcaaagcttccttccagacctgcggataactatgacaactttgtcctaccagagttgccatctgtgccagacacactaccaactgcatctgctggtgccagcacctcagcatctgaagacattgactttgatgatctttcccggaggtttgaagagctga

SEQ ID NO: 36922 - DNA, 446 bp, Macaca Mulatta
gggtgttcctgcaagggctggtgtggaaacaaacagtgtgggtgcaggaagcaaaagtcagactgtggtgtggactgtagctgtgaccccacaaagtgtcggaaccgccagcaaggcaaggatggcttgggcaatgttgaatggacccaggattctgaaggctccttcaaactggaggatcctaccgaggtgaccccaggattgagcttctttaaccctgtctgtgccacccccaatagcaagatcctgaaagagatgtgtgacatggaggaggtgctgtcaaagaagactgctccagctccctcctcttttgacctcccagaattgaaacatggagcaacagaacaccaacaaaataaggctccagggaagaaaaagaaacgagctctggccagcaacaccagcttcttctctggctgctcccctatcaaagaagaagcccactg

SEQ ID NO: 36923 - DNA, 76 bp, Macaca Mulatta
tgggagtcggcgccaaagtggccttcagcaaggcgtcccgtgcgccccgggcgcaccgggagatcaacgtgcccag

SEQ ID NO: 36924 - DNA, 778 bp, Macaca Mulatta
ggcgggtgctgtaggcttgagggtgctccagagaatggtggcaaattatgttcagttttgaattatcttggccccactctctgtcattttttaataattatcacatatccacagaatttcagatctagtaaaggcaattagtaatccagtaatataattatccagtattctacataagtgctcaataaatactagtagaaatgaaacaatacattttatataagagaatccacgactctacacctctctctctcaattgaagaaaatagggtataatcaaatgaaaaaatttaaaacaggtgtatttctttcttataaagattcatcacaaattcaacaataaggtgccacagactgtattacttttcaaaactctgatatttttcagaagcaagcctatcacacagcagtattttatcttttcatatgcatcctttcttttttaaagtattaataatgaaaaaacttattaagtccttgaatatgcagtggatatgaataggcaaaaacaccctaatagataatacagaaaagaaaatgtaccactatgaatgtgtttaaaagtaacttacgaaatgcacaatctatatatataatcagggcttcagatttttcttcaagtagttcagatacaaatgtgttattccctgtctcttccaatcattctgatcgggagagaagaaaagaatcccaagttgaaacacaaccattctaaatttaatagaaaatgtttgaacatttttactttcagggaactattgtcttgccccccttttta

SEQ ID NO: 36925 - DNA, 758 bp, Macaca Mulatta
gggtgatggtaagctggccacttgcccttccttcccagatctttaggaggctgtgggaagccttggaggcacccaaaatccagggaacacaaacctgggatagaggcttttgtgcaggaagtatactctttttgaaatacaaatatagatgaatcgaacaactgagatcccagtagactctcctcataagcccttacaagcagagttggcagttgccccaactgcaaacacagtggtgaataaaatggtggtgaataaaaattacttacaaggaatcagagtgacagtgtccagtcatacaagtcatcattgcattcttcgctactgggtgtttacaataaaaaagaaaacaaacaaatgaacgaagccagcttatcttaagattgaccttgataaattagtaaaaatgattaatttcactaaatctcaactcctgagttcatatcttttaatattttatgcgataagttggagatatgtagaaagtacttctgttacatagcaaagtacaatggttggctcaaagaaaaccacttgtgtgattgcttgagttgtgagctgaactagccccttttttttcatggaatgccgtttttgcttggaagagcattggatcagttatgattatggtggacattttcttgaaaatgagtaaagtgagcctgtcattttaaaggaaacaattgacagtatctgttgccaatggtacaagtcaaggtttcaagtgaaaaaacttgaatctgtaactgtgagcttga

SEQ ID NO: 36926 - DNA, 456 bp, Macaca Mulatta
  misc_feature (1)...(456): n = A,T,C or G
agcagccagagaagtggggtactcactggaacagagaaccacaaagatgaaacagagagatgagaaagttgtgacgaaggtcattcgtggtgcaggcttggctgttccagtggataaaaatcgtgttgggtacacagagctccctgaaacacatgctgacgtcaagagaatttgcaagacaatagttgaggctgcaagggaggaggagagactcaaagcttttgttcccattcaggaaatgatgacttttgtgcagtttgctaatgatgatcgtgattacggctcggggcttgagttgggaatggagctcttttgctgtggctcacattattttcataaagttgctggccagcatttacctcttgcgtataatctgttgaagaggaatctgcagaaattactgaggatcatttcgcanacagaagtgaagagaacacagagcaacttgctgcatga

SEQ ID NO: 36927 - DNA, 905 bp, Macaca Mulatta
gccttacctagtaaatgaagatgatgtacgtgtctttttctctggtttgtgcgtggatggagtaattttcttaaaacatcatgatggccgaaataatggtgatgccatagtaaaatttgcttcatgtgttgatgcttcaggaggtcttaaatgtcatagaagttttatgggttcaagatttatagaagtaatgcaaggatcagaacaacagtggattgagtttggtggtaatgcagttaaggagggtgacgttcttaggagatctgaagaacattctccaccaagaggaattaatgatagacattttcgaaaacggtctcattcaaaatctcccagaagaacacgttctcgttcccctcttggattttatgtacacctaaaaaatctgtccctcagtattgatgaaagagatttaagaaatttctttagaggtactgatctgactgatgaacagattaggtttttatataaagatgaaaacagaacaagatatgcctttgtgatgttcaagactctgaaagactataatactgctctgagtttacataaaactgttttacagtatcgtccagttcatattgatccaatttctagaaaacaaatgttgaagttcattgcacgttatgaaaagaagagatcagggtcactagagagagataggcctggacatgtttcacaaaaatactctcaagaaggtaactctggccagaagctgtgcatctatataagaaattttccatttgatgttacaaaagttgaagtgcagaagttctttgcagactttcttcttgctgaggatgacatttacttgctttatgatgacaaaggtgttggtctgggagaagcattagtgaaatttaaatcagaagaacaggccatgaaagctgaacgttaaaccgacgaag

SEQ ID NO: 36928 - DNA, 1147 bp, Macaca Mulatta
  misc_feature (1)...(1147): n = A,T,C or G
ngatccagatgccctcggggttgtgtgcccacctgtttggcctctctgactgtccagtgctcagtggctctggggctgtgtaccgagtatgtgcaggaaccgccaccttccacctgctgcaggctgtgttgctggtccacctccactcccccaccagcccgcgggcacagctgcataatannnnnnnnnnnnnnnnnnnnnnnnnnnnnnnnnnnnnnnnnnnnnnnnnnnnnnnnnnnnnnnnnnnnnnnnnnnnnnnnnnnnnnnnnnnnnnnnnnnnnnnnnnnnnnnnnnnnnnnnnnnnnnnnnnnnnnnnnnnnnnnnnnnnnnnnnnnnnnnnnnnnnnnnnnnnnggcagacaggtgcagctcaagactgcagctggttcctggctgtcctgctggccaccctaggattctacagcatggcaggtgtgggagctgtgctcctattccgctactatacacacccagctggctgcctgctcaacaagatgctcctcagtctgcacctttgcttctgtggcctcatctccttcctctccatcgctccttgcatccgcctcannnnnnnnnnnnnnnnnnnnnnnnnnnnnnnnnnnnnnnnnnnnnnnnnnnnnnnnnnnnnnnnnnnnnnnnnnnnnnnnnnnnnnnnnnnnnnnnnnnnnnnnnnnnnnnnnnnnnnnnnnnnnnnnnnnnnnnnnnnnnnnnnnnnnnnnnnnnnnnnnnnnnnnnnnnnnnnnnnnnnnnnnnnnnnnnnnnnnnnnnnnnnnnnnnnnnnnnnnnnnnnnnnnnnnnnnnnnnnnnnnnnnnnnnnnnnnnnnnnnnnnnnnnnnnnnnnnnnnnnnnnnnnnnnnnnnnnnnnnnnnnnnnnnnnnnnnnnnnnnnnnnnnnnnnnnnnnnnnnnncccctccagctccttcagtccaagtccagcatctttcctacaactattctgccttccatttcgtcttcttccttgcctcactctatgtcatggttacccttaccaactggttcagncagctatgagggagcagaactggaaaagaccttcatcaagggtagctgggccaccttctgggtcaaagttgcctcatgctgggcctgcgtactcctctatctggggctgttactggcaccactc

SEQ ID NO: 36929 - DNA, 320 bp, Macaca Mulatta
cggctctggatttagtttaaccttactccgagttcctagttctagtcccttctctgacagggcaagctttatccctaaatgtaccacagttaactaaaggacccagagaaggaaccctcaagccttctcaatactgggcctcaataccaaactctattaacacaagatctcaaaggcagtaaccaggcttagaatacaactcaacaattctcaacactgcctccccactgaaaactgctgctctctctagacctgctgaagacaaaaccaacaatacacattccagacccttccctctgctagtgtccagtcctagtagg

SEQ ID NO: 36930 - DNA, 825 bp, Macaca Mulatta
  misc_feature (1)...(825): n = A,T,C or G
ggggcaccgctgtatnnnnnnnnnnnnnnnnnnnagagactgcgtctccnnnnnnnnnnnnnnnnnnnnnnagtgtgacacctcacctccccttcactctcctgctcccactctcgccatgagacatgcctgctccagctttgcctgccatcataagtaagatctccctgaggctttaccagaagcacaatgcttgttgtacagcctgcagaactgtgagccaattaaagctctttcatttttaagttacccagcctcaggaatttctttatagtgacaaaacaatttctttatagtggcaaaaatgtctttattgcaaaatcaacctgacacacctacaaagactaaaatattaactatgtggtacttcacagaaaaagtttgacatccgcctgggctaaggtaatgcaggagagagatagctaagtgaaggggcggcattctttgtggggcaacagggaatgcagttaagaaagaggaatgtcttattctctaaaattggagagaagttggtgagaattagggagaatctaggtaaaattacaggtatgtggcttgggtgaaatttgatgaaggtcacttgaatagaagtgaaaaagggtggggagttgataaaattgggctaaggttttaaatttatcttttaaaggggaataaggaaaaattggctaaaagaccttctttgaaggtttgaggggtggttaattttttaggggggacttttgccctaatgaagtaatcattttatattcaattggggcctaattggttccaaggggtnnnnnnnnnnnnnnnnnnnngtttggtggaaaatggacccccaaa

SEQ ID NO: 36931 - DNA, 738 bp, Macaca Mulatta
  misc_feature (1)...(738): n = A,T,C or G
agacgttccctgatggatgacctctgtgaagcaaatggcacttttgccatcagcttatttaaaatattaggggaagaggacaactcaagaaatgtattcttctctacccatgagcatctcctctgccctggccatggtcttcatgggggcaaagggaagcaccgcagcccagatgtcccagnnnnnnnnnnnnnnnnnnnnnnnnnnnnnnnnnnnnnnnnnnnnnnnnnnnnnnnnnnnnnnnnnnnnnnnnnnnnnnnnnnnnnnnnnnnnnnnnnnnnnnnnnnnnnnnnnnnnnnnnnnnnnnnnnnnnnnnnnactttaaagaatcctgtcagaagttctatcaggcagagctggaggagctgtcctttgctgaagacacggaagagtgcaggaaacatataaatgactgggtggcagaaaagactgaaggtnnnggtaagatttcagaggtactggatgctgggacagtcggtcccctgacaaagctggtccttgtgaatgccatctatttcaagggaaagtggaatgagcaatttgacagaaagtacacaagggggatgctctttaaaaccaatgaggnnnnnnngacagtgcagatgatgtttaaggaagctaaatttaaaatggggtatgtggacgagatgcacacccaggtcctggagctgccatatgtggaagaggagctgagcatgatcattctgcttcccgatgatgacacggacctcgctgtgg

SEQ ID NO: 36932 - DNA, 1090 bp, Macaca Mulatta
tctttgtaggttctggatattagccctttgtcagatgagtagattgcaaaaattttctcccattctgtaggttgcctgttcacgctgatggtagtttcttttgctgtgcagaagctctttagtttaatgagatcccatttgtcaactttggattttgttgctgttgcttttagtgaagtccttgcccatgccgatgtcctgaatggtattacctaggttttcttctagggtttttatggtattaggtctaacatttaagtctttaatccatcttgaattaattttcgtataaggagtaaggaaaggatccattttcagctttctacttatggctagccaattttcccagcaccatttattaaatagggaatcctttccccatttcttgtttttgtcaggtttgtcaaagatcagatggcagagactttgatcctcttgtatgtggaacgttcgctgccagtgactgagttacgagcagagcaaccatagatcccactatgctctgtagtaatataggggatatagagctcttgtcctgattgcagaaacttcccattaatcgtccaagaatactctgccggtgggttagagtgcgcgaagcagtacaagtggatgttttctcctgtatagtagtaatacttgactggagacaaaacgctgggtttgtctggaccatagacaggattcagggtgactgggtcactgcggctggaactcactgggctcttcatttcacattcgtagggtcctgcagtacgctttgtgacaccaaatagaatgagggtcctgttgttttcggacagctgcaacctgggactgatagggaggatctgaccatttatccaccacaggtagcttgcgttcggagtgtcaggatcacaggataaggtcacagtctccatgccctccctggggtttaagttgctgctgtagatgtagggcttgggagtctccacatataaggtgaaatgtccagttactccttcagtcctgtaacctcgctttatgatttttacggtgtaggatcctgcgtccttctggttcacactctggatcagcagggatgcattggatatactctttctcgtcc

SEQ ID NO: 36933 - DNA, 632 bp, Macaca Mulatta
acaggaagatttcccatagggaaaagatgttttttaattgctgtcataatgtgatttctctctaaggggaacaaacatgtatcctggatgaaaataaaccaagtctattgaaattgcaacccaagacattcagaagagacaaggctacagtgaatctggaaagtttgcacgtgtttggatgtattgattgccttaactggcagccctttgcactgccagcttctccctcaattacatgaggaaccacgagggggcaatgtcttcccgagcaataataggtgagtggtggtcttaggaccccgtggtggcccatgatgctagcactgtgtctttggccattcttgcctgttatggaacgtagtccacagaagggcatggtcttcttggagcctggcatgggcccaacaaaaatgacaatgtagtcaatagttccactcagacttcacttgggagcaggtggactacgttgtgtgataccaggatgcctggagaacctctcctatccccacccagggaagcatggcttaattccaaataaagaatctggttcctttgtctttaagccaagccaggactttgtccattgttaaaagtcaaaaatctctgggataagaaacaaaaataagttccag

SEQ ID NO: 36934 - DNA, 281 bp, Macaca Mulatta
caaatcccaagtctggccagactgctttgtcttgctcaaacacctctgatgactgtccactgactaagtccttgacaagtgcccttctttctatctccggcctgcctcctcagaaccactgtctcctattagacctcacttcaccccaggctcaagccacatcaagaagctgtctgctgttccccagaaacatgccattcactctgcaataactgtgactatacctagaacacctccatctctgttcactataagaattaacatttcttaggacccacctt

SEQ ID NO: 36935 - DNA, 802 bp, Macaca Mulatta
  misc_feature (1)...(802): n = A,T,C or G
ggagtttaaaatggcctgggcaacataatgagaccccatccctacaaaccaaaagcaaaaacaaaaggctaaaaaaattaaaccttaggatgtactgctaactgcatcattttactgttgaataatttgtttttaattggaatgtaagctttgtgagggaagagactatggatttcccgctttatttttccacatctcctaggatggagatgtcagtagcttccaaacatttttattgattgcctaattaaatgctcaaaatggacagtcaaaatgtaatacaggaaataacttcatcaatttctctacatagttaaattttttatcttttctgtactgtttaaaaaaattaatgcagatatattaaaaaccattgaattgtacatcttaggaataaatgaaaatattaagaagaaaaaaccaaaatctgttggggcaaactgaaaaaggattaaaaatcaaagaaaataaatgaataaactcttttnnnnnnnannnnnnnnnnnnnnnnnnnnnnnnnnnnnnnnnnnnnnnnnnnnnnnnnnnnnnnnnnnnnnnnnnnnnnnnnnnnnnnnnttttgggcccccccccgccctcggaannnnnnnnnnnnnnnnnnnnnnnnnnnnccccgggcgcccccttagggaaaggaaaaccggggccaaaaccgtttttccccagagaaaaaccggggcctagaaaacaggggcgtgggatttnnnnnnnnnnnnnnnnnnnnnnnnnnnnnnnnnaaaaccgagaggttttttgagaaacaactcccaggagggggggttc

SEQ ID NO: 36936 - DNA, 757 bp, Macaca Mulatta
  misc_feature (1)...(757): n = A,T,C or G
gggccaatannnnnnnnnnnnnnnnnnnnnnnnnnnnnnnnnnnnnnnnnnnnnnnnnnnnnnnnnnnnnnnnnnnnnnnnnnnnnnnnnnnnnnnnnnnnnnnnnnnnnnnnnnnnnnnnnnnnnnnnnnnnnnnnnnnnnnnnnnnnnnnnnnnnnnnnnnnnnnnnnnnnnnnnnnnnnnnnnnnnnnnnnnnnnnnnnnnnnnnnnnnnnnnnnnnnnnnnnnnnnnnnnnnnnnnnnnnnnnnnnnnnnnnnnnnnnnnnnnnnnnnnnnnnnnnnnnnnnnnnnnnnnnnnnnnnnnnnnnnnnnnnnnnnnnnnnnnnnnnnnnnnnnnnnnnnnnnnnnnnnnnnnnnnnnnnnnnnnnnnnnnnnnnnnnnnnnnnnnnnnnnnnnnnnnnnnnnnnnnnnnnnnnnnnnnnnnnnnnnnnnnnnnnnnnnnnnnnnnnnnnnnnnnnnnnnnnnnnnnnnnnnnnnnnnnnnnnnnnnnnnnnnnnnnnnnnnnnnnnnnnnnnnnnnnnnnnnnnnnnnnnnnnnnnnnnnnnnnnnnnnnnnnnnnnnnnnnnnnnnnnnnnnnnnnnnnnnnnnnnnnnnnnnnnnnnnnnnnnnnnnnnnnnnnnnnnngaaggcaataaatgcctaggtataaggtaaacattgaataattttttctccccacctggcattaaagccccaaaattccggaaatccgaaaaaacccttcacaccggaaatacccttaaaacaaggcccacggg

SEQ ID NO: 36937 - DNA, 739 bp, Macaca Mulatta
agcttattacaatgagactatgaatcttacagagttcagtaaagttgagaaataacaaaatccaaagcaaagtggaacatctttcagaaagctatgtgaagctctattggttggattacattttcggcgtctggtaccattgatctcaaatgtagagatataaggtgtatcttaaccatataaaggaactctaaaccatttaaatgctatactgtaaagatggagattagatcatgtgtcaaaaactcagatattactgaaattcatctttaaggaaagcatacattcattttctagtttctgattggcattggcctgcagtaaattaggacagtgattttcagcttgtatttggagtagtgagcatggggacaggtcacaaataggaagggaatatataatttgaaaatgtatagattgactccaggtccagccagaaaaggagagaacctcaaagaggatgtggattggctgtataccctccaaagaggcacattgtagacttaagaggtcggagtatggagaagacgtgagattttcgtttttatgaaagaggatatggtttttaaaagactgataagtatggcactaagcagctgagttataaaatgagtctagagaggtggtgcctgtagttgagcactgtgtgtacctctgggaacaaacatatttcttcctgttcatgctagtttcagagaggaggagtgaaaatgagggatccacaggcaattctatgtgg

SEQ ID NO: 36938 - DNA, 763 bp, Macaca Mulatta
  misc_feature (1)...(763): n = A,T,C or G
gnnnnnnnnnnnnnnnnnnnnnnnnnnnnnnnntgnnnnnnnnnnnnnnnnncagtgcttggattacaggtatgagccaccgtgcccatcagcaaagtaattataagattgagcacaggctttggtttttgaaagacttggatttcagtgacgagctctattaatttttgctctgtgatattgagcaaattatttaacctctctgagtctccatattgttgtcagtaggactaatacttactttaaattgtttgaaacattagatgaaataataaaaaggtagagtgccaggcacagtagcaggcacagtagcagctctccataaatcatgtcaattgtttttattttaattatgcattctactatcagccatttctaaaattttctttctagttaaatagaatttaaatccccacctgtgcctgtttctttctaattgtttttaccttggcagtactttataatttagaaatgttgaacaattgagaataccacaggctttcaacaaaaagagtgatatatattactccatcttagtaagctcaatataagttagatgctattaataatatttagaaactaacttgaaaaaagtttagaaatccgctaaatcttcattacaggttccaaagaatgaataaagtaaacactttcatttttaaggacaatcctattattgagaaataaaactggtccaggtaaattaccatttaaatttacccaaaatgcccaacctgtaaagaaacccctaattggtaatttc

SEQ ID NO: 36939 - DNA, 803 bp, Macaca Mulatta
ttgctggaagtaggttctggctctccaggctttggccacaaccagtttagtgccagattatcaccgtggtcatcaagtaattgagtaatagtggcaggtgacactgtttgcccttctagtgtcctatgtcagggagctctgtgaatggaaatccagggaaacggtggaaatagagccacagtgagagtgggtctgagctggcagtcatcccctgcagaacttttcaccctgggcttgttgggatcccagctgctgacttaatgaggctccccagtgggagactagttttagaagctgtgtgtccactgctggttaagatccgttatagtgccttgtttatctacagtgcccttacttagtggcctctaattctccgcggtgctatgagaagagcataggaagtaggggtgaaatgggccagggtcagggcgcaccacgggtggtggtgaggtcactgtccaggtctgggactcagctattgtgggaggaggacatggacagacactctaccacatcagggaatttgaatactgtctttgggtgtgatgatgaagagactgtcacccaggggatttcggcttcccctgtgggttctggaaagcttgctggaaacagactcgtgagacatattcaaatcagtttgttttcttaagcaaacacctcctagagattgggattgaccagtgagtaaagaatgacctcacgctgcccagaattctgattccatgtgtaatgcaaatcatgagaggcgtctgtttctcagctcttgggtggtattcagaaaggtctagtaacatttggtg

SEQ ID NO: 36940 - DNA, 634 bp, Macaca Mulatta
  misc_feature (1)...(634): n = A,T,C or G
agtagagatgggatttcacatgttgaccaggctagtcttgaactcnttgacctcaagtgatgatccattnnnnnnnnnnnnnnnnnccnnnnnnnnnnnnnnnnnnnnnnnnnnnnnntggcctaatattttggtcctaaaacacaagtattttgcccttaacaggtgagagacaactaaggtttggtacaacttaacagagattaaatgtgtgcgaagttgtttcagtaactgtgtatatatggtaatttatcatcatattattattactgttatcactctcactgcggctgacacaatcacagtttatcttggtggttaggagtcaatcagctctggagtaggatttttgcgtctcacctctgttacttactaactgtgtggccttgggcttgttaattaaccttagtcaatttcctcatgtataagatagagacaacaataatccgtctctcaaggggatccttggaaaaatttcctgaaatggtcaacataaattgttttagaactgctaaataagtctctgatgtttttctctcgttccatttaaagaatatacttctgattacatatcggttgagacttttatagatctctcaatacttgtcaacagcacgtatttcttaaacactag

SEQ ID NO: 36941 - DNA, 325 bp, Macaca Mulatta
tgcagtccatgaccaagatcagcgaccgctgtgctcccccagaggtctacgggtttgcaatgctagaagagccgaggaacccagacaagcgcaccctcacctgcctgatccagaacttctagcccaaggacatcttggtgcagttgctgcacaacaaggtgcagctcccagacgcctggcacagcatgacgcagccctgcaaaaccaagggctctggcttcttagtcttcagctgcctggaggtgaccagggccgaatgggaacagaaaaatgagttcatctgccctgtggtccatgagatggtgactggctcacagaccgtcaa

SEQ ID NO: 36942 - DNA, 155 bp, Macaca Mulatta
tgatgatcacacttttggagctatttgacagcgaatatcctcgggaatgggactactttaaaaacagtcttaacatagaatttatggcaagtttctcagtcttagagcatttatctgaaaacagattaacaatattttcctaaggtttgtttatg

SEQ ID NO: 36943 - DNA, 533 bp, Macaca Mulatta
caataatgcagcttcaagttctggggagaccgcagggggccccccagccggctcccccggccttggctctaactcccaccctcctcccagccctaggagaacacgattctccatgctcattggccagtttcctctaagccctccctccgagcacccgggcgccagtcccaggcggaggggacgggctggggaccccaaagcggggaccggaggggtgagcctggcagaggcagcgacacacgcggagaggaggagaggctgagggagggaggtggagaagggcgcgagaggcagagagaggagacacgcagagacactccggaggggagagacaccgagacgcagagacacccaggccggggagtgcgagggagcgaggcacagacccggcttagcgagcgcggggggcgaccccagagtcccgagagcctgggggcgcgcccagcccgggcgccgaccctcctcccgctccgcgccctcccctcggcgggcgcggtatttttatccgtgagcgaacagccctcctcctcctc

SEQ ID NO: 36944 - DNA, 388 bp, Macaca Mulatta
agcttccttctagctctggttctcccacaagtatgctttcaggcgctccgagggcccaggtggggggaaagccaggtctccaggctcctggcccagggtgtgtttaggaggcagggccttatctgacacaagtatgaggggcagagaggtttttcttcttcagtctccactaggtcctggcctccctggcttctgtaggcagagacctagacagggcattcaccagagactttgacagggagtccacgcccagaccccataggcagagccgggagctctgtgccagcttcgcagggagcaccgggccccaacgcagagtcaagagctggcatcagcacaggtgcaaggtggggttgggaagggcatggcagcttgggggtctgcagtg

SEQ ID NO: 36945 - DNA, 255 bp, Macaca Mulatta
  misc_feature (1)...(255): n = A,T,C or G
cgtacaccctaagaaatggtgaggtaactgggctaanataattgctgaacagctgcaggcgcaggccctgtgctgtgagcacggctgaacgantccgtgcatgantccgtgcangactcatgaccgcacggatcagctggctgttccctcgcccgcctcctaaacacctgcangggcctttcacttggaaaagaanggccaatanggtccttntttttnaagngttaaaggaattttanaatggtccctggggga

SEQ ID NO: 36946 - DNA, 962 bp, Macaca Mulatta
acacaaggtagagcggtggacgaggcaacagtgatgctttatgttctccagtgtcagaagttccaatggaaagcaaaagctaaaaaaatagaggttcctgcacagttgaaagaattagtttcggatttatcttctcagtttgtcatctcacctcctactttaaggagcagacaaaaaaacacatccaataagaacaagcttgaagatgaactgaaagatgatgcacaatcagtagaaactgtgggaaagccaaaagcgaagcgaatcaggacatcaaaaacaaaacaagcaagcaaaaacacagaaaaagaaagtgcttggtcacctcctcccatagaaattcggctgatttcccccttggctagcccagttgacagagtcaagagcaaaccaagaaaaactacagaagtgacaggaacaggtcgtggaaggagcagaaagaaactatcttcgtatccaaagcaaattttacgcagaaaaatgctgtaatttcttgggaagtttttaatgtacacctatttgtaaagtcatcagaatagtgtggattattaaatatctagtttggaagaaaataatttatataaattattgtaaatttttatgtaaacagaaggtcttcaataagtaagtaactccatatggagtgattgtttcagtccaggcaatttttctattttatattaagacttcatacatttatataatatgtaaatatggcttcttaatggaatgttaactaaaatgtatacttcacaggtgtcagcgtctgccggttttcgacacggaggcgaactcgtgggatagattaatatgatcatgagctactttctcataatgaaaatttaaccgtttaaacgggtcattaccatgatatccttacaggcacatttaatttccgtgactggataattacacaagttatactgcttgggaaacacaatgcaacacatatccaggttcac

SEQ ID NO: 36947 - DNA, 809 bp, Macaca Mulatta
gggtgctccctcctggtcttcccaggaggcaggggagggggctgggtgtaggacatgtaaagttacagctgcttgattggaagattccagagaatagaaggcaggcaaacagtagaggtgggagtgaaaaaagattaaataaaagaacgataaaacccaagttgaaaagtgattaaagaaggatggtaatgaaagctggatacagggtagggcatgagcaatgttttatgtgcctaccaccctctatccagtaatctaggcatggaacactgaaaccagaccaaccagtcagatgctgcaggtagggaggtgggatgggaattgtcactatccaatcactacagtaactggctgctcaccccggcaatgaccacgtgttactactcccaacacgtccttttcccagggatggcggagggaagcggataagcaaggagagttcttttttcaattaccagtagaagcggggcagggggtggtgtctctgaagagatgacagacaactttgttttatagagtctttaataaagtcaccctgccccagggtccactggggccagaaaaagaaaggataaacagggcaagggggaccttggggtagcttgaagcttgaaagccacttcttgaagcaagggctcccaagtgaggctctaaagcagataagacagtgaaatgagagtgctgctataaggggcgggggaaatcagctgggcagaaagcgattgggaactaagcagaaaatattcaccatggggaatcttcactagaaccaaagtgggaaacatgctaataaattcaaaaagtgctca

SEQ ID NO: 36948 - DNA, 597 bp, Macaca Mulatta
  misc_feature (1)...(597): n = A,T,C or G
ggcaacattgcggaccgcacagacgggtacctgaagcgctgcacgttccacgaggcctccgacctctactgccccatcttcaagctgggctttattgtggaaaaggctggggagagcttcgcggagctcgcatacaaggcagggcaagcgcaggcnnnngtgtcatcggggtcattatcaactgggactgtgacctggacctgcccgcgtcggagtgtaaccccaagtactccttccggaggcttgaccccaagcatgtgcctgcctcgtcaggctacaacttcaggtnnnnnnnnnnnnnnnnnnnnnnnnnnnnnnnnnnnnnnnnnnnnnnnnnnnnnnnnnnnnnnnnnnnnnnnnnnnnnnnnnnnnnnnnnnnnnnnnnnnnnnnnnnnnnnnnnnnnnnnnnnnnnnnnnnnnnnnnnnnnnnnnnnnnnnnnnnggctccttcctgtgcgactggatcttgctaacattcatgaacaaaaacaaggtctacagccataagaaatttgacaagnnnnnnnnactcctgcctccgagcctgccccacaagcctccatacccacagaccccaaaggtttggcccaactctga

SEQ ID NO: 36949 - DNA, 777 bp, Macaca Mulatta
gtcccactaacagatggaatccggttgtctgtatgaaggtagaaagcatgagtttgtaagggcaaacatgagatgtgtatatatgtatacatgtgttcagagatgatgctactttctgacattatggatgatataacaaattctggtgagtggatacgtgtcttagaaaatgctagagccagtattgaaccttctcaagtgatctagaagtccagcagtttaagaagataacctcattctgtactcatgaagcccccttcaaacttagcaggtaatatgcttgcaaattttagtaataattttgtcgttaaaacatgtttatataggtctgctgacagagtgacaatatgcattgcctgtaacatcaaaagttgggtagcttcagtttgtgtaaactaggtgtgagggtttactttgaactcccttgtctcttaattgtgtgtcgtgtgttggtttcaaaagtggttttgcttccctgtttagtagctgattcttgtgttaatacttttcttgtttatacaaaaaatatagtactcttttaatgttaaatgttcaagggaaaacattctatataataactatatagcaagcaagggaaaaaccttaaattctgagtatagaataggcaaaatgttaaatttcttggtaggtaaacatgtaggttatgaaatattctttcagaatagactttaaattgtctattgtattaatacaggttttgatttttaagaactaacgtggtaaattgccacctttagaattgttgtgctgatactt

SEQ ID NO: 36950 - DNA, 826 bp, Macaca Mulatta
  misc_feature (1)...(826): n = A,T,C or G
gggaatagtcatctaacatttttcttacttgagttaccacctataccaattacacttcaattgctgattttcagagaactaagctgtaataaattacatataaccttaaaattaaactgtcaattattttttaaaattcaggccaggcatggtannnnnnnnnnnnnnnnnnnnnnnnnnnnntggccaagccaggaaggatagcttgaggtcagtagttcaatnnnnnnnnnnnnnnnnnngcnnnnnnnnnnnnnnnnagnnnnnnnnnnnnnnnnnnnnnnnnnnnnnnnnnnnnnnnnnnnnnnnnnnnnnnnnnnnnnnnnnnnnnnnnnnnnnnnnnnnnnnnnnnnnnnnnngttacggtgagccacgatcacaccactacnnnnnnnnnnnnnnnnnnnnnannnnnnnnnnnnnnnnnnnnnnnnnnncagacaaaagaatcggatgggcactgtatttcgatcttgtgggaatgaggggggtcatcttttttttaatacccattatggaaaggaaagagaatttttggtgaaaagaacttttgaaaaattattaaagggtatataaaaatatatacggtttgggaaaatacccaaaaaacgtccgggaaacaaagaagaaaaaaattggattgtacccaacccggggtaaagggcttaaaaaatttgacaaaaagaaaggggctttacccaatgttataggaggtattaaaagacacctccagtgggaaatatttcactttaccaaggggttgtgggtatgttaaatacttaaaaaaacgcgtagacatcactaagtggcacatcaagtgcagagg

SEQ ID NO: 36951 - DNA, 565 bp, Macaca Mulatta
tagtcagtggtcagtggttacctggctttctgaccctgaagccagaacagagattcttaataacccaccttgcctcccagaactccaagctggaggccgcggtggcccagtctgagcagcagggtgaggcggccctcagtgacgcccgctgcaagctggccgagctggagggcgccctgcagaaggccaagcaggacatggcctgcctgatcagggagtaccaggaggtgatgaactccaagctgggcctggacatcgagatcgccacctacaggcgcctgctggagggcgaggagcagaggtgaggaccacagctgtggggagggtgtcccctcagtttcccctaggcagtgctgcagtgcttcaacacccaggagcatgtctgcatattatttacttggaatgtgcctcaacgctaattggaggagagaatttacaggttaacagatttcaccagttttgctccccacaactaatttctgtctttttgctttccctataaggttgtgtgagggcgttggtgctgtaaatgtctgtaagtaatccattttgtgggtcctgaaat

SEQ ID NO: 36952 - DNA, 534 bp, Macaca Mulatta
cttctgaaccagtgtatagttgtcaagatttctgaagtcatttattttagctcttcctgtatatacatttttgctagagatttgaggagtgcttctggagggcaggaaatgtattttgaatgttaactaaggggaatttacttgtgacttttgtcttcagttgagttgattctgtgttgggttaaagacatgaattctgacctactcatagagttaatttcactctgtctactaaagagattaattaaatacaccattatagtgactatatttgatcttatatttgccatgtggttctgtgatgtctgcttattgctcctttgttgtttcctttgtttattatgatgctacctggtgttataccttctctgtcagttccatctgggatgtataaggcagccaactgctatcagttgttcattccatattacctctgaaaagcattcatttctaagtattaaaaagtagtcagagttgaagacatgattcaaatacgactaagttagttaagcatgaagtttgaaccaaccagga

SEQ ID NO: 36953 - DNA, 769 bp, Macaca Mulatta
  misc_feature (1)...(769): n = A,T,C or G
ggcataggaatatcctatgctgtcttgacatggctcagtcaaacactatggatgccaatttatcctttgtgtgttctcgctgaagcatttgccatctatcaatcgctgccttattttgaatcatttggcacttattccaccaagctgccctttgacttatccatctatttcccatatgtgctgaaaatatatctcatgatgctctttataggtatgtattttacctacagtcatctgtactcagaaagaagagacatcctcggaatcnnnnnnnnnnnnnnnnnnnnnnnnngaagtacagcattccagtgtgacatgagaaaagacaggctgtggattcaaccgcagtaaatacaacacaggaagtattctggtggaaaaataccttatgtttgataaaaatccattacatgaaatgattgcacatacccccaaaactgtagacataacaggctatgtttttcacacattgtatttttaagacatatatattctccataccctgcttcaccaaattcctgcttcatttggattttatacaagttacacttacattgtatgcagtctgattattttccctgtaaagtttatgagaaataaggaaattaactgcaatagattccattaaattttagaaccccaaccnnnnannanannnnnnnnnnnnnnnnnnnnnntgttgggccggcctcgnnnnnnnnnnnnnnnnnnnnnnnnnnnnnnnnnnnnnnnnnnnnnnnnnnnnnnnncttaaggttaaatttgaaca

SEQ ID NO: 36954 - DNA, 665 bp, Macaca Mulatta
  misc_feature (1)...(665): n = A,T,C or G
caggtgcacttttgacagaatggcaggtgtctctaggaatttgtttctgatattcataggactcgttcatagctgattctgtattcatatcaatagtgaatacttagctgcatttcttacttagagtttggttggttcaagtcagttattttgtttcttagcaatagtcaaatctttcaacttaatactaatcatatatataaagaagaaagtaaatctcattctgatcattagagcttttcagtcatgaaattaatgtttcttgttactatcagtgattcctcttgaggtttcagtgatgtgaaatagtttgtcgttacatcacatctctccaggtgtagagtctgatgaataaattttaggacacgttagaaaagacttggcagtttcagtatggggcaaatataaaatgaatgagtttgtgttttagctttttaaatattaatatnnnnnnnnnnnnnnnnnnnnnagacaagagaaagacaaatattcagagttgaagtaggagaaatctttcttcattaaagatcctggccatatcctaaagttgtattcaaaaagagcaatattttcgattgtaagtctggtttagtgtctttacttgattcccatgtcctttatacagatcttcttcatcaattctcattgaatttcagaagtagcta

SEQ ID NO: 36955 - DNA, 733 bp, Macaca Mulatta
  misc_feature (1)...(733): n = A,T,C or G
ggatgaatattttctccactgcataagcccaaatcggatcgaaaacctcaccgatacctaacagccaggcatagcaagcacannnnnnnnnnnnnnnnnnnnnnnnnnnnnnnnnnnnnnnnnnnnnnnnnnnnnnnnnnnnnnnnnnnnnnnnnnnnnnnnnnnnnnnnnnnnnnnnnnnnnnnnnnnnnnnnnnnnnnnnnnnnnnnnnnnnnnnnnnnnnnnnnnnnnnnnnnnnnnnnnnnnnnnnnnnnnnnnnnnnnnnnnnnnnnnnnnnnnnnnnnnnnnnnnnnnnnnnnnnnnnnnnnnnnnnnnnnnnnnnnnnnnnnnnnnnnnnnnnnnnnnnnnnnnnnnnnnnnnnnnnnnnnnnnnnnnnnnnnnnnnnnnnnnnnnnnnnnnnnnnnnnnnnnnnnnnnnnnnnnnnnnnnnnnnnnnnnnnnnnnnnnnnnnnnnnnnnnnnnnnnnnnnnnnnnnnnnnnnnnnnnnnnnnnnnnnnnnnnnnnnnnnnnnnnnnnnnnnnnnnnnnnnnnnnnnnnnnnnnnnnnnnnnnnnnnnnnnnnnnnnnnnnnnnnnnnnnnnnnnnnnnnnnnnnnnnnnnnnnnnnnnnnnnnnnnnnnnnnnnnnnnnnnnnnnnnnnnnnnnnnnnnnnnnnnnnnnnnnnngacaaaatagagctttacgaaccttcgatggttgggaatcanggaacaatcctaaatggggtgcaagcaaa

SEQ ID NO: 36956 - DNA, 814 bp, Macaca Mulatta
  misc_feature (1)...(814): n = A,T,C or G
ggacaggtatttgagaatataaacccatggttggacttagctttggaaagtcctatctgagattctttgtggtacagagttccatcaaagccaatctaaaaggcctatatagaaataattattcttgctgtattttatgcaaataatcagggcaagtatatgactgaagactattttgcaaacaacactgtcctatcatggttttttgtttgtttgctttttgttttagatggagtctcatnnnnnnnnnnnnnnnnnntggcagtggcacgatctcggctcactacaacctccgcctgccannnnnnnnnnnnnnnnnnnannnnnnnnnnnnnnnnntnnnnnnnnnnnnnncacatcacccatgcccagctagnnnnnnnnnnnnnnnnnnnnnnnnnnnnngatggtgtttcactaatgttggtcaagctggtctcaagctcctgaccttcatgattcacttgcctcaaacttcccaaagtgctggggattaacagttgtgaagccaccacaccccagccccaggggttttttttataccagtggagaggacattaataatataaataatgaaacatctcatgttgggccgcctcggccctatnnnnnnnnnnnnnnnnnnnnnnnnnnggccacccgggccccagtagggaaattaaacatggtcctaaccttttttctcaaggaaaaccctgggttataaacaggcgccttggatttctccccccattaaaatatcccccggcgggaaaaaacgaaaaccttcttaataaatatcccaaagggatttctttaagggctcattatctgg

SEQ ID NO: 36957 - DNA, 779 bp, Macaca Mulatta
gggtattttgacatgaaagtgaaaacttaaagtaaccttcagagttactaattagtttgatactagctccactttttctaccatgtagatttcatttagtagaggagagtaaaagaagaacattaattaaaattggaatgattaatttcgttatgtgtctgtgtaaattaattccagtgtcagtataaattaactccagtgttagtaattccatagacttcctttccatggttcgcttcaataattgagaatttgtcggtcattctgatatcagaactcaaataagcatttatacgtgcttgtgtgtgtggagcgggtaagggacatgaaaatgtatagatatttaagaaatgtcacttatactccaatttcttatttatgttaggatggccttcgatttgaagcaaaatacgtatttagaaggtttctccttcatctccttctctacctaggtccctttctcttttctcacaccccttataattagaaacaaatgaagagctttgcactttccagatattaaaaacatggtttttttcctattgcacgaagtgaattttgtgcacacaattgctatctctcccatcaaaacagtgttctcttctagagaataatgcttgttagggcagtttggtgtggcaacatttataggggatacacttgaatgaatgaaaaattgtaatggagatgttcccctaacatttgtttgcttctcttgtccaccaaagggaatacctaactggagaaaaccttttaagggttgacaaccttactccgca

SEQ ID NO: 36958 - DNA, 1077 bp, Macaca Mulatta
  misc_feature (1)...(1077): n = A,T,C or G
ggagaagctcttagagcaaatgaggattttatggaaaaagattcaagaaaatcagagcaatctaaatgaggagagaagaacagccctcctctggaggnnnnnnnnnnnnnnnnnnnnnnnnnnnnnnnnnnnnnnnnnnnnnnnnnnnnnnnnnnnnnnnnnnnnnnnnnnnnnnnnnnnnnnnnnnnnnnnnnnnnnnnnnnnnnnnnnnnnnnnnnnnnnnnnnnnnnnnnnnnnnnnnnnnnnnnnnnnnnnnnnnnnnnnnnnnnnnnnnnnnnnnnnnnnnnnnnnnnnnnnnnnnnnnnnnnnnnnnnnnnnnnnnnnnnnntttgggagacatcgtggcaaggnnnnnnnnnnnnnnnnnnnnnnnnnnnnnnnnnnnnnnnnnnnnnnnnnnnnnnnnnnnnnnnnnnnnnnnnnnnnnnnnnnnnnnnnnnnnnnnnnnnnnnnnnnnnnnnnnnnnnnnnnnnnnnnnnnnnnnnnnnnnnnnnnnnnnnnnnnnnnnnnnnnnnnnnnnnnnnnnnnnnnnnnnnnnnnnnnnnnnnnnnnnnnnnnnnnnnnnnnnnnnnnnnnnnnnnnnnnnnnnnnnnnnnnnnnnnnnnnnnnnnnnnnnnnnnnnnnnnnnnnnnnnnnnnnnnnnnnnnnnnnnnnnnnnnnnnnnnnnnnnnnnnnnnnnnnnnnnnnnnnnnnnnnnnnnnnnnnnnnnnnnnnnnnnnnnnnnnnnnnnnnnnnnnnnnnnnnnnnnnnnnnnnnnnnnnnnnnnnnnnnnnnnnnnnnnnnnnnnnnnnnnnnnnnnnnngtttcttgattttgaaggtggaagtgtgagttttttgaatgtcaccaggagttccctcatatggagttacccggctggctccttaaattttcctgtcaggcctttcttttccactggccacagatgatcaggattaagaaccctgactgtttggtaactccatatacaagggatcccttcactgttgatacaaagaaatcatactgttcaggcttttatctatgttagtgtcacttcattttgttgctattaaatagaaaatatgtaaaatgcaa

SEQ ID NO: 36959 - DNA, 834 bp, Macaca Mulatta
  misc_feature (1)...(834): n = A,T,C or G
ggctaataaatgcattagatggatcccctctgggcgtttagtgtttctttggaatcccagccagccctatcttgggatggtttggggtagttctttcagaaattctcatgccactgctcctggggtgactcagactttgcctaggccatggggagtgaggaatgcaggcactcctcagcttctcttacctaaagataggaaaaccaagtagtgtcagcagtaacagagcttcagttatagaacaaagggggaaaatgtcatctgggcaggctggactgcagacctctttctgacctcttatgccagtgctggtttagctcaaccaggtgcagagtccccgtgttcaaatctccctcaacagaaagagcatgaacttgagagtcgggaacacccaggctcaagtctgctacccacttgctctgtgaccttgcacctcttaacttctcagaactgcagttacttctctggacaatgcaaagaaagaagcctgcttcaaagggttgttctgagaagaagaaataatttctgtgcaacacttggcacaaccgtagctgcctgaacttgtaaccatttgcctattaaaccaagccccattcatagaatttgtttccataaaaattttttcctccttataaaggcccaatcccctttttggaaatttaaataagtcagataatgaacctattgnnnnnnnnnnnnnnnnnnngtggccctttgtccccacagagctggagaataaaaggtgaccacaaataaagggggctccaattgggacccctcccacctccccctgggttacaaagggaattctttttggcctttaaaccctcccca

SEQ ID NO: 36960 - DNA, 691 bp, Macaca Mulatta
gtctctcttcgtcctgccgtcatgtctaagtcagagtctcctaaagagcccgaacagctgaggaagctcttcattggagggttgagctttgaaacaaccgatgagagcctgaggagccattttgagcaatggggaacgctcacggactgtgtggtaagaattgggacaaagcagtaaaatagccgagatttccttggcatatcttggtgcagtcctctctgaatgcttatgaaagttgttagtagcattatggttagagctttgtcgacaaaggaatattctgctttgattttaaaagctacctgttaaatctagggtagtgggaaactggaccgcttttcataaaaggctggtataaagtttcctattgccctattcaaagttaaaatgacaaaagcttctgcggtcagactttgttacataaattaacactgttctcaggtaatgagagatccaaacaccaagcgttccaggggctttgggtttgtcacatatgccactgtggaggaggtggatgcagctatgaatgcaaggccacacaaggtggacggaagagttgtggaaccaaagagagctgtctcaagagaagtgagttgtcccgcgtagggttaaaaatggtacttttttcccccttcaactcatttagagatgtgctgctatggacttaagattcaggagttttctaaactta

SEQ ID NO: 36961 - DNA, 856 bp, Macaca Mulatta
acttgaactatcaccttgactatcagatatgtttttgcactattttttttaactgaaaaagaaatatctaagccgtacatggtacactagaattttctgaaagcagaaaacgtctagattttgtagatagttttcattacaatagaagcatgcacatggaaacccatgagctagggttctaccgaggaaaacatctagtgggattagcaaggcgaagggaaagcatctggtggcatgcatggcagcatgggaggctcacacgcagaagctgcacgtggacgtctgttttaatcagcacaagtgaattaaccatgcttcttcattttttttactttagtttaaaaagagaacatttaatattctacatgctgtaactatcaggacatgtttagcaatctaaatttcatttttgatattcaaattaattcttacagcttgagcatatcaaccttattaccagagcaaatccttccttcaggtgggagtttaccgactagttggagcgtttgtaagcacatggcgaaatcagcccctgcccaccaaaacaatccttatgttaccaagtgattcccatttgtctaaggatttgaagggggtctaaattggatgtatcttacttagtctaaagaaccaaaaccatccctgaaatgccttgctaatacaactaatccttgcatatatgtgccatacttatttttttcctcagtgtatactttatgttaacagggttattacaaagcacattttctgaatctgcaatcattcctttgacaattactggacccaaaggaaaattcattttctttgcattatttcagtaatatataaaaacctgtgtcttgttatagtagtacat

SEQ ID NO: 36962 - DNA, 133 bp, Macaca Mulatta
gagggacagcagtcagacccctcccccatgtcttatccatagacttgaccacatcgtgatgacggtgaagagcatcaaagacaccaccaagtaatattccaagatcctgggcatggaggtcgtgacttttaag

SEQ ID NO: 36963 - DNA, 725 bp, Macaca Mulatta
  misc_feature (1)...(725): n = A,T,C or G
ggataaattatcttttnaagggcccaaaaccagaggaaaagattttcatttaaatattaaaaatgttataatctcaacacctgtagtatcatttgtgtacattatttttctatacagtccggatttgtgtcacttaatttccttgttcaattaataggcattagtttgaaagtccataaagttcaacacaacaaggtaattaacatctgtaattagtacttaaaagtgaactcttgaagattataacagtcgtaattaaaattaaagggatatgttaacaaattctatttataattatagttccatatttaaattaatatattaagaatcattaatacttcttttcattgctaaaaataatattaataaagatagatatctgattatttcatttgagactagataaattccttgaagacaaagaactatgttttgttcatctttgtcttccccaaaatggcctgatataatataatggttttcatataatcatttataaaaatttgattgactttttattcttattttcattgaaagcaacccatgtattagtcttcaaatccattgccatcttttaaatttacatttttggtttttgtatctcgggagcatgattaaggtctatgtagttttcccttattcttcatacaattgttnnnnnnnnnnnnnnnnnnnaaatactgaacatttgcatatatttttaaacaaaagcaaaattcctatcc

SEQ ID NO: 36964 - DNA, 352 bp, Macaca Mulatta
cgaggaatcttgatagaactcacacagaattccagggagaggacttggggtaaagaatgacgagggagacccacgggggtaaaaccatctccagatcccagcttttctctgccttggtggccccccgccttttctcaaggaccccactgtcctgggcgttgggctggtctgaaaagggaccggcactcatggcatgaagatgtgaagccaggttctgacttggggctggtttggctaacttggtctgatgaggggcatctctcccgatcttcactacctggcattctccaagactgagagagaatccacacttgtctgcctcttccctctctatcagtattctgaagtcttc

SEQ ID NO: 36965 - DNA, 613 bp, Macaca Mulatta
ggggacagataaatgagcgtctggcacggggtgagccacccataaaggcaggcccactcgttcttttcctgtttgtcatgctattccaacaaacggagcttcccagtgctctaatttctacttatgttgctggagcctcacacaaggggtgagaatcttgaggggagaacttgtagaccaacaagctgtctcttggtgctgcactgtgtgagcttgcaagagaagcgatgcaggtcaagtgaaactacttttatccttttcaatgcattatttctcatttctgtgctccatcaagatggtactctcacctgcatgccggagctcttataaagaattgctttggctagtctgggcgcttgcatttccatatggatcgtaagatcagcctgtcagtgtctgcaaaacccagctgggattttcgtagatattgcattgaatctgtatctatttggggagtgtagccattttaacaatattatcacttacaatccctgaacaaatatatacaaatctctacctacattatctgccccccacttctaatacagtacatcatttattccccatttctcaatttcctaactttttagaattaattaatatacttcccccc

SEQ ID NO: 36966 - DNA, 305 bp, Macaca Mulatta
gtcatctgtgtaaagtggacgtggtatgaaatgtctgacattttggaagctgagattgctctgaaaatgttaactgggcaggtgaaaagggtacagatgtgctgtaggagacctttggttttaaaagagaagcatcatttccccaacagggcaactgtagaacgccagctgaagagtaaaggaaaaggtctgaggactgagcctgtggttggctggaaaaaggtgaatgttgagggcccgtcacttccatcacaaagtcattagacagtaccagttccgtgtctgttcctggcagctatttcctc

SEQ ID NO: 36967 - DNA, 774 bp, Macaca Mulatta
  misc_feature (1)...(774): n = A,T,C or G
gggactgctatgtgctgtgggtacataaagtattccaatcaaaatgtacagatgtagcatgatttaaaaggagaagaaattatatttgacttaagataatagaatcaggacattttagataaatcttaaagtaggtagtactccacctaagagaagaagggcttgcatatatacaaagtaaacaggaaaagtagagccatgttgcaggatgtcttctcttctaggataacacttttataatttatttgataagtagtagagagtcatggaagatgtttgaacaatgccttgagagaattattctttatagaatattattctgacagcagtgtacagatttgaagatgagagactgattgagaaaaggtttattagaaggtcattgaagttgcccacaatgataagaatatgaactagggaagtggctctgggcttataaaggagaggagatttagagacttgacctctaatttatggatggaggaaaatgacagagaaggtctaacataattgtgaagtttgaaacataggagatcgaagagctaaccttagtgccattaacagaattagggaactgaagaagagatggtttggaagtaaaggtgttttattttagtcatattgagtttcaagttttcagttacagttctagatcatccactctacaggtgaaataggactggaaaattanngagactgggactgggagaataatacattttgagaaataaagcctgaactacaatttaaatatttaggccctgaagggaaagt

SEQ ID NO: 36968 - DNA, 343 bp, Macaca Mulatta
atgacttcgcggatgaagttcctgacctgcacacaagggccccaggaggggctgtttgccttcgtggtgcgcctggaaggcctgctgcagaaggccgtggagaagggggctgtccacccagccatggccaactacctgcgactgcggcaggtgctgtctcgggcccaccccagcgaggcgcttcaggataccctgaggaggatgcagctggagaggaggccacccggcttcctgaggctgctgcggctcatccgggacatggaggcgttggcggcctccccagcgaggagccagcagtgtgcggcctggccagcggccccagtggagagtgaagacccagctg

SEQ ID NO: 36969 - DNA, 828 bp, Macaca Mulatta
gggatacacgtgaggggggggccttgagaagctgagcggagaccagctggactttaatcagagaaaccaagagactgttaccatggcggggaagcccaagcttcactacttcaatggacggggcagaatggagcccatccggtggctcttggctgcagctggagtggagtttgaagagaaatttatagaatctgcagaagatttggaaaagttaagaaatgatgggagtttgatgttccagcaagtaccaatggttgagattgatgggatgaagctggtgcagaccagagccattctcaactacattgccagcaaatacaacctctacgggaaagacataaaggagagagccctaattgatatgtatacggaaggtatggcagatttgaatgaaatgatccttcttctgcccttatgtcgacctgaggaaaaagatgccaagattgccttgatcaaagagaaaacaaaaaatcgctacttccctgccttcgaaaaagtgttacagagccatggacaagattaccttgttggcaacaagctgagccgggctgacattagcctggtggaacttctctactatgtggaagagcttgactccagccttatctccagcttcccactgctgaaggccctgaaaaccagaatcagcaacatgcccaccggtgaagaagtttctacagccctggcagccccaaggaaaaccttcccccagatgcaaaaagcttttagaagaaagccagaaagattttcacgaattttaataaaagcagcccctgggagaggcccaagaaacatgcaagaacccggtaatttcttaaagttttttga

SEQ ID NO: 36970 - DNA, 823 bp, Macaca Mulatta
  misc_feature (1)...(823): n = A,T,C or G
ggggctgggcctggtgtgattccgtcctgcgcggctgttctctggagcagcgttggtttatctccgtccgccttctctcccacctaagtgcgtgccgccacctgatggaagattcgatggacatggacatgagccccctgaggccccagaactatcttttcggttgtgaactaaaggccgacaaagattatcactttaaggtggataatgatgaaaatgagcaccagttatctttaagaacggtcagtttaggggctggtgcaaaggatgaattgcacattgttgaagcagaggcaatgaattacgaaggcagtccaattaaagtaacactggcaactttgaaaatgtctgtacagccaacggtttcccttgggggctttgaaataacaccaccagtggtcttaaggttgaagtgtggttcagggccagtgcatattagtggacagcacttagtagctgtggaggaagatgcagagtcagaagatgaagaggaggaggatgtgaaactcttaagtatatctggaaagcggtctgcccctggaggtggtagcaaggttccacagaaaaaagtaaaacttgctgccnnnnnnnnnnnnnnnnnnnnnnnnnnnnnnnnnnnnnnnnngaccatgatgatgatggatgattctccatgatcggaagcttgaagaaaaagcaccagttgaaagaaatctatacgaagattactcccagccaaaaaatggcacccaaaagtgcaaaattcccaaatgtggagaacacaatcctaaaaccatcttccgttacatgatcagaaggaaatctaaatggcggccctaccaat

SEQ ID NO: 36971 - DNA, 854 bp, Macaca Mulatta
  misc_feature (1)...(854): n = A,T,C or G
gggaattcaaacattttttagacgaacactatgagaatataccttgtagagatacttactgaaagaaataggaaatgatnnnnnnnnnnnnnnnnnnntatccaaaagtaattggatgggatgcaggaagcaacaaggagctcagaaagtggtaagtatatgtataagcatagnnnnnnnnnnnnnnnnnnnnnnnnnnnngagagataataattgcaattaacttagaggttaaaaacaaactgaaactaaatatttcataacaaaaacactgcagatgagggaatttgagataaagtactttaagatccattttacagtttggaagaggactggaattgttgattaagtttggatgcatgctacacttcctatagcctctatgatcgtcagacgcagccgtatttactagatgagaggcgttnnnnnnnnnnnnnnnnnnnnnnnnnnnnnnnnnnnnnnnnnnnnnnnnnnnnnnnnnnnnnnnnnnnnnnnnnnnnnnnnnnnnnnnnnnnnnnnnnnnnnnnnnnnnnnnnnnnnnnnnnnnnnnnnnnnnnnnnnnnnnnnnnnnnnnnnnnnnnnnnnnnnnnnnnnnnnnnnnnnnnnnnnnnnnnnnnnnnnnnnnnnnnnnnnnnnnnnnnnnnnnnnnnnnnnnnnnnnnnnnnnnnnnnnnnnnnnnnnnnnnnnnnnnnnnnnnnnnnnnnnnnnnnnnnnnnnnnnnnnnnnnnnnnnnnnnnnnnnnnnnnnnnnnnnnnnnnnnntnnnnnnnnnnnnnnnnnnnnnnnnnnnnnnnnnntgnntnnttttttnntnttnntnnnnnnnnnnnnnnnnnnnnnnnnnnnnnnnnnnnn

SEQ ID NO: 36972 - DNA, 170 bp, Macaca Mulatta
tgtgaacaaatagaccgtctgatgttacagagcccgcgtgtgcaggagcctgctcctctgatacgtggcgtgtaggctgctgtatttacagctcctccgtctctctccattgtgttctgacccatttctgtgtgtgcccccagcctttatttccaagtgacattttcagt

SEQ ID NO: 36973 - DNA, 771 bp, Macaca Mulatta
  misc_feature (1)...(771): n = A,T,C or G
ttaccaggggggattgtgnagtgagaatcaaggcccacagntgtgtattttctcactctcgaatgcaagtgggagagagaaagtgactcaggacgccatngtaactgtcctggaagctgggccctctcactggcatacacactactccttgccgcagggcaccatcccaccgggatccagttgcaaagtttgtctccacagttgaaggcctcgcttagatgtactggattctcagggagccctctgtggcctttttgctttgagtgctgtgttccccttgtaccagagggcggcactgtggaaattgttttccccgtagcatattctgttggattgcattactggcagagaaaggacaagttgccattcaagtctagggtgggcttccagctgccttaatagaagtactcaagtcttttgggtagtgagctggaaagtctacaggaaaagaggggtacctgttttcatttgaaaactttgattcatggaacctttaaaactaatctcagataaatttttggtgcccatgcggctgtagttgttcactgctttcctggatggatgggactctcatgttgtaacttctgtactcctttggcccatagctaaggtcatccttccccacaggggtggctttgggattggatgatacagcttttgcttctgtgtagtatacctgtacatacctgcttcaggcagcctttaatgttttcagttggtttgtattctgtagctcagtagctgctaataaagttaaagatcctgtgtccc

SEQ ID NO: 36974 - DNA, 828 bp, Macaca Mulatta
  misc_feature (1)...(828): n = A,T,C or G
ggggagcgcggtccggttcccttttccggtcggcgtggtcttgcgagtggagtgtcagctgtgcccgggtcttcgccatgagcgtcccggccttcatcgacatcagtgaggaagatcaggctgctgagcttcgtgcttatctgaaatctaaaggagctgagatttcagaagagaactcagaaggtggacttcatgttgatttagctcaaattattgaagcctgtgatgtgtgtctgaaggaggatgataaagatgttgaaagtgtgatgaacagtgtggtatccctactcttgatcctggaaccagacaagcaagaagctttgattgaaagcctatgtgaaaagctggtcaaatttcgcgaaggtgaacgcccatctctgagactgcagttgttaagcaaccttttccatgggatggacaagaatactcctgtaagatatacagtgtattgcagccttattaaagtggcagcatcttgtggggccatccagtacattcccactgagctggatcaagttagaaaatggatttctgactggaatctcacaactgaaaaaaagcaccccccttttaagactactttatgaggcccttgtgggattgtaaagaagagtgatgcctgcttcaaaagtcatgggtgggaattgctttgggaagtttacaccagaaggaataatggctttcccaagggttcgccgtttgaatggccccacaaggttgtatttggtaccgaaaacatttggaaaaagaacccccaaaatggccattttttcccttttttttgaaccccaaccccttttcntttaannnnnnnnnnnnnnnnnncca

SEQ ID NO: 36975 - DNA, 687 bp, Macaca Mulatta
  misc_feature (1)...(687): n = A,T,C or G
ggggagaccttcgagcgggtatcgctgctggcgagctaccggcgagtaaccgtctgaggcccggagcgctgcggccgaggcttgaccgccgctgccctgccctctcccgcgcagccccgggcttccgcaggaatattgggaaaccaaaatgaggcacaatcagatgtgttgtgagacaccacctactgtcactgtttatgtaaaatcagggtcaaatagatcacatcagcctaaaaagcccattactatgaagcgtcctatttttaaagataattggcaaacatttgaaaaaaatacacataataacaacaaatctaaacgccccaaaggaccttgtctggttatacagcgtcaggatatgactgctttctttaaattatttgatgacgatttaattcaagatttcttgtggatggactgctgctgtaaaattgcagacaagtatcttttggctatgacctttgtttatttccagaaggctaattttctataagtgagcttaccaggataaatttctttattgctctgtgtctggtaatacagttgaagaagatgaaaaagaaccagtttgaatttttccatggctttagggaaaactggaaaaatgttccctaattctaaaattaaggaccgctcgggaaaaatgacttagggtttgttaccgcaatttggagggtatgccttccn

SEQ ID NO: 36976 - DNA, 786 bp, Macaca Mulatta
  misc_feature (1)...(786): n = A,T,C or G
ggggggagatactatgtgttcaaaggagagtggtgtcagaggtacatataccaaagaatcaaaaacagactgagacagaatgtgtataccaatgttcacagcaccattattcatgattttcagaagctggtaacaacccaagtacccatcagtggaaaatagataaacaaaatatggttctgatatacattacaacatgaaaacctgcgaagtgaaataagccagaaagaaaataatgaatatatgattccacttacatgaaatatctagattaggcaaatgcatagagacaggtggtagatgagagattacctgaggctgacgggagggaaaatgggagaaatattgtttcatgggtacagaatttgttgggggtgatggaaagttttagaaatgtatggggggatggttctacagcatcatgaaggcatacgatgccacagaattgtacacttaacagttgtttaaattgcatattttattatatattttttactacaataaaacaaaaagaaatttcacaaagctggaaaaaaagagggcatgccaacatatgtgtgcctgcatgtcctgggaggggactgagcttagaggagccaggggtaggcagatggagccactgaaaatggaggactctaaagtctttacgtgggagttttaaatctcgtttttgggaacaaacagtctctagaatccgctcnnnnnnnnnnnnnnnnnnnnnnnnnnnnnnnnnnnnnnnnnnnnnnnnnnnnnnnnnnnnnnnnnnnnnnnnnnnnnnnnnnnnnn

SEQ ID NO: 36977 - DNA, 447 bp, Macaca Mulatta
  misc_feature (1)...(447): n = A,T,C or G
gannnnnnnnnnnnnnnnnnnnnnnnnnnnnnnnnnnnnnnnnnnnnnnnnnnnnnnnnnnnnnnnnnnnnnnnnntattatcctctttattccaaaacaattacacatttcaacttttcaaatgcaacatatgggtgtaacttaggaatattcacagcatcttgcacagtgccagagaaagagactatctgagcttaccaggtatctgctctgtgttcgggaaactgaaaaacaacaagcaaaagtataactacaatctggnnnnnnnnnnnnnnnnnntnnnnnnnnnnnnnnnnnnnattcttttcatactgtgaattgttcttgactccttttcttgacattcagttttcagaatttacatccttcttctggaactaatgtgctgttcgtagtgtcctatattttgccaatctactgctctgctctgcagcgatcctcttgcc

SEQ ID NO: 36978 - DNA, 508 bp, Macaca Mulatta
tttatcatctgacctataaaaattattgggtgtgctttatgaaggggacacacaaaagacttttacaaacatatcgtctgtggaagcttgctgtgtggagacaatttttgggtgtgggagattatctaatgagagtctgacagtatctgggtcaagaccatccctcttcctgtataccctcctccttgcaaagagtccaggcttgtgtgtgtgttgggcactgtggagctgtgcaggaggtcggcctcatgtcatgtgctgctctttcttccaggtaccctgctgactgctcactccccaactcctgtcgccccccacccagtcactgtgcccacataccgggccccaggaacacccacttacagctatgtgccccctcagtggtgatcacctgcaaatgtaagtgaccagtgaaggctgggccagcctttgatgaaagggcatttccatgggacagtggcagatttaccacatatttaagcactaacgaggaaagtgtgcctgaccc

SEQ ID NO: 36979 - DNA, 808 bp, Macaca Mulatta
cgccgttactcccgaggagagaccagtcggtagaggagaagtcgaggttagagagaactgggaggcactttgctgtctttaatcgaagttgagggtgcaaaaatgcagagtaataaaacttttaacttggagaagcaaaaccatactccaagaaagcatcatcaacaccaccaccagcagcagcaccacaggcagcaacagcagcagccgccaccaccaccaatacctgcaaatgggcaacaggccagcagccaaaatgaaggcttgactattgacctgaagaattttagaaaaccaggagagaagaccttcacccaacgaagccgtctttttgtgggaaatcttcctcccgacatcaccgaggaagaaatgaggaaactatttgagaaatatggaaaggcaggcgaagtcttcattcataaggataaaggatttggctttatccgcttggaaacacgaaccctagcggagattgccaaagtggagctggacaatatgccactccgtggaaagcagctgcgtgtgcgctttgcctgccatagtgcatcccttacagttcgaaaccttcctcagtatgtgtcaaacgaactgctggaagaagccttttctgtgtttggccaggtagagagggctgtagtcattgtggatgatcgaggaaggccctcaggaaaaggcattgttgagttctcagggaagccagctgctcggaaagctctggacagatgccgtgaaggctccttcctgctaaccacatttcctcgtcctgtgactgtggagcccatggaccagttagatgatgacgaaggga

SEQ ID NO: 36980 - DNA, 234 bp, Macaca Mulatta
ggaagacacccccaaacaagaatccttgccacaggctctgctccgggggaactgacgggagaccaggacctagagcaaaccctgggaaaggtgcccagctcaccctgcattcgagtcctgccagggaacacggcaacgaagggtgtgatggccccaagtggatttcacagcaccggggaatccgagaggttccgtccaattgccggatcccggcaccaggagcacgggccctgg

SEQ ID NO: 36981 - DNA, 1879 bp, Macaca Mulatta
  misc_feature (1)...(1879): n = A,T,C or G
ttcgcaccaaaacccgtgaagaggctggccggtgttattcatagagaagtattacacgcgcctgggcaacgacttccacacgaacaagcgcgtgtgcgaggagatcgccattatccccagcaagaagctccgcaacaagatagcaggctatgtcacccatctgatgaagcggattcagagaggccctgtaagaggtatctccatcaagctgcaggaggaggagagagaaaggagagacaattacgttcccgaggtctcagccctggatcaggagataattgaagtagatcctgacactaaggaaatgctgaagcttttggacttcggcagtctgtccaacctgcaggtcactcagcctacagttgggatgaatttcaaaacgcctcggggacctgtttgaattttttctgcagtgctatattattttcaataaatctgggacaacnnnnnnnnnnnnnnnnnnnnnnnnnnnnnnactagttctctctctcagcacccgggccgagatgtctccctcagtggccttagccgtgctggcgctactctctctttctggcctggaggctatccagcgtactccaaagattcaggtttactcacgccatccaccagagaatggaaagccaaatttcctgaattgctatgtgtctggatttcatccatctgatattgaagttgacttactgaagaatggagagaaaatgggaaaagtggagcattcagacttgtctttcagcaaagactggtctttctatctcttgtactacactgaattcgcccctcaatgaaaaaatatgagtatcgcctgccagtgtgaacccatgctgaagtatgcacagggcaccaaggcacaagttacaaagggggaatcatagaaaattggctaagccaagctaaacaatgagaagagtatattgacaacaaaagccccgacaactaactggggaattggggacattgaaaacttttccccacacacttttccttggcactcnntcactcatatggcgccggtgacaatgttagaaacatactagctggcgtatttaagtgggcgcgtctcatacagactaagcatggagggatttattatttaaaagtaggggcccacaactctgcaccacacaaccttaaattgtgagggtctttaagagggnaaaaaaagattaccatttctttccaacgctgttgaacttgacgaaccctgtacaaaacactttttgggggagttttttacacgtaaaaaaaaccccaaacatacccccgatctatcagggcacctttgcaataattttgggtaagagataatataaataattccngttctcttctattgcnctattttaattaacgagagaacagaagcttaaatttccatgaggaatgatccttctatttattgtttagacaatccgacacactccagacgtcatattcgcaactacccctccttgttccgccattancccaccccctattaaccttctttcagaaaaaagatgggggtgataacagtcccaactagttggacagagagcaatggaaagatgttcatgtaagataaagcgttngattcatagtgccatgggcgggcagacaacgaggggcgggctcacctcctgggtggattcctccccaacgtttcttttagttttcctataaatgagcctctgtttggcacttagcggtaagaatcctatcaccgtcataggtacttcgcagtattgttctccatccacatcattactcgttaacgtcgctactatcgaccactatataaatattaaaantattgacacgtgagggggagggctcaccgtgatantacgtactantnagaagcgcacttactttacgtaaacactcgtcatcagccacg

SEQ ID NO: 36982 - DNA, 769 bp, Macaca Mulatta
  misc_feature (1)...(769): n = A,T,C or G
cccctttttataaataatttcccaccttttgacaaataaaccccactttctgtaaataatgaccagtaaatccattcatgagggaacagagccctncacgatctaatcatctcttattagggccccacctcccnaacactgttgcattggggattaagttttcaacacatgaactctggggggacacatgcaaacctcggcggacacatgcgaaccagaggaaagctcatacttcctgctgtgacccaagtaataaagtttctaattcccccttggacttgtttccttcccagtcaaatctgtggaagtatgacaagcaaccctaccagcctcccaacaccctgctgcttgggaactgcttgacttcttgaccattacaagatggaaaaatcaaacccctttatttattgattaagccatatgcagaacctagattgttacctgacacatactgcttaatagctccaaactacagattgaagtcctcactttaaaagggatctttctgaagaagatcagtttcacagctaagagtcagtgctgctagcagacctactacctctgttgtccgtaccatggctccttaaacagtgacaacatcaattcaaaagttcacagtatagatttcactttcacagtccatgcctgtcaagtcacttcctgaaacaatgtcagttcaaaagagttctcattaagccaacggcagttcaaaactgttctcattaagccaccaaaaattggaacccaaaattcttatcaccatcaaccc

SEQ ID NO: 36983 - DNA, 597 bp, Macaca Mulatta
  misc_feature (1)...(597): n = A,T,C or G
cggccttgctggtggcccgcggacccgaagagcttctgtgcttcccgagcggttggaggacttggtgtgtttctgggaggaagcggcgagtgctggggtgagcccagacaactacagcttctcctaccacctcgagggatgagccatggaagctttgtcgcctgcaccaggctcccacggctcgtggtgcggtgcgcttctggtgttcgctgcctacagccgacacgtcgagcttcgtgcccctagagttgcgcgtcacagcagcctccggcgctacgcgatatcaccgtatcatccacatcaatgaagtannnnnnnnnnnnnnnnnnnnnnnnnnnnnnnnnnnnggctgacgagggcggcctcatagtgttgcgctggctcccgccgcctgaggcacccatgacgtcccacatccgctacgaggtggacgtctcggccggcaacggcgcagggagcgtgcagagggtgnggtggagatcctggagggccgcaccgaatgtgtgctgagcaacctgaggggccggacgcgctacaccttcgccgtccgcgcgcgtatggctgagccgagcttcggcggcttctggagcgcctggt

SEQ ID NO: 36984 - DNA, 539 bp, Macaca Mulatta
ggttcaaatcttcgtgttctcttcaagaacattcgtgaaactgcccaagccatcaagggtatgcatctacgaaaaaccacgaagtatctgaatgatgtcactttacagaaacagtgcttaccatttcgaagttataatggtggagttggcaggcatgcccaggccaagcagaggggtgggacacaaggtcggtggcccaaaaaagtgctgaatttttgctgcacattcttaaaaatgcagagagtaatgctgaacttaagggtttagatgtagattctctggtcattgagcatatcctagtgaacaaagcacctaagatgcaccgttggacctacagagcttatggtcggattaacccatacatgagctctccctgccacattgagatgattcttactgaaaaggaacagattgttcctaaaccagaagaggaagttgcccagaaggaaaagatatcccagaagaaactgaagaaaccaaaacttatggcaggagagtaaattcagcattaaaataaatgcaattaaaagtttaaaaag

SEQ ID NO: 36985 - DNA, 701 bp, Macaca Mulatta
acagcccacgcctgatggataaaatctccaaatggctgaaggtattgatattggggagatgccttcatatgatctggtgctgtccaagccttccaaaggtcaaaaacgccacctctcaacatgtgatggtcaaaatcctcctaaaaagcaagccggttccaaattccatgcgagacctcgttttgagcctgtacattttgtagctagtagttcaaaagatgaaagacaggaagatccttatggccctcaaacaaaagaggtaaatgaacaaacacattttgccagcttgccaagagacatctaccaagattatactcaagactctttcagtatacaagatgggaattctcagtattgtgattcatcaggattcattctcacaaaagaccagcctgtagcagccaacatgtattttgacagtgggaaccctgccccaagcagcacatcacagcaggcaaactctcagtcaactcctgagccttcaccatcacagacatttcccgagtccgtggtagccgagaagcagtattttattgaaaagttaacggcgacaatctggaagaacctttctaatccagagatgacttctggatctgataaaattaattatacatatatgttaactcgttgtattcaggcatgtaagacaaatcctgagtatatatatgctcctttaaaaggaaatcctcctgttgacatcc

SEQ ID NO: 36986 - DNA, 532 bp, Macaca Mulatta
aggtggggacggagcagctgatgtttccgcagtagacacaatggatcataaagacttgggttttgagcgccctgcaggaagctgctggccgcatccagggtcacctgtgcctggttgttagtccttcacgacgctgtcgctttgtgatgcgcttgtgcgggattaaacgtgaatagcagagacgtgggcaatgcgctgcctcagcggatcatggtcagttgtccaagtgggctgccttggctcttggccccgtcatccagggctcacacactggatggttgggccacagtcgcgataccccccaggctgcacccaggctttccaccctgcttagcagggctctgggtctccaggtagagcaggggggtccttcccttggcatttccccagggaggagcacggccacgctcagctgcggtcaggctgctgctcttagctgtctttccttctaactctcaggcttcccttcctgcctcccccggtcgctggagaaggtcaggcccagagaagaggcctggggagagaatggtgg

SEQ ID NO: 36987 - DNA, 631 bp, Macaca Mulatta
tctcatgaaatgtagatgtggtaccaaatgtacaacacacgactgtgtactgtcataagttggctaaaacacatgtaaacatatgtcatgtcagtcattaagaaaagggtataattacacttttaaatgtggcaaagcatttcggaagtagcgtataattttccagtgtaggagcctttgtgaacacatcttcctctgtgtgtttatacagtctgacatcttcaggtttgttcatatcaagagccccactgtgaacaagccagctttcagtgggtctccaacattttcctatacaattcttccaggatgatggtaactttattttttcatatgtttaggaattcattttatgtccattgcaggtcagtcagggcctctgctccatgtggtctttactcctgatgatagaggagtcactatctggattcttgtaagttgcgtcacggaaggcctggtccttgccgaatctgctgtagacaaactcggatttgattcctgccgaatcaattgtagaacctgagcttatattgaatattccgggctggcataataaccataaagtgttacttcatgcttgaaagacttaataatcaatagacgctcacgcacatacgcaccctcacgcagcccc

SEQ ID NO: 36988 - DNA, 808 bp, Macaca Mulatta
  misc_feature (1)...(808): n = A,T,C or G
ggcaagtatggctttacttggtgacactggccatagctaaattacttggcatgtttgacttttgacaataacagaaattgttttggattttgttttatttccaaaaaaatgtatacaatgtcagaacttcacattttatatactagtatctggctattagtattttacaggaaccatagttcttggtgactannnnnnnnnnnnnnnnnnnnnnnnngtgacctttttttgtaaactaagtgccgtttcaacgttacaatcatttttagagttattgtaatcaatgtgaatatcatgtttttttaaatctgttctgagcctatagtgtttgctttgtgaacataagtgtattgtatatattctgtatagttatattgtactgaaattagcttgtttgatataaggaaaatatgtattgagtacctttttgctagcctgattgtttaatctttttaaaaaaggtttannnnnnnnnnnnnnnnnnnnnnnnnnnnntaaactggcctttattacatggtcacacataaagttgcagttaggaaagggatgggcagggaaaaactagttttgagtgtctttagatagaaacatgagactaaggtttggttttgttttcgttttctcattaaaatatcttatgctttatggnatnnnnnnnnnnnnnnnnnnnnnnnanannnannannnannaaannnnnnnnnnnnnnnnnnnnnnnnnnnnnnnnnnnnnnnnnnnnnnnnnnnnnannnaaannntttttaccccannntatatatnnnnnnnnnnnnnnnnnnnnnnnntgccccg

SEQ ID NO: 36989 - DNA, 256 bp, Macaca Mulatta
tgttgttagcacacagagcccttcattgttgttttgggggaaaggggcatatgtcactaatagaatgtctctgaagctggattgatgtggggaaaacacctttcccttctagttttgagagacttcctcttggctcccaggatgagggattccctgattttgacacacatggccacctcagcacacaaaagcctcgtggtctgaaaagacaaattcgtgtctatgtcctcttctccctttccacctttcagcatag

SEQ ID NO: 36990 - DNA, 342 bp, Macaca Mulatta
atgcaatctgttgggcttttactatctttcctgggatggattttatccattattacaacttatttgccacactggaagaacctcaacctggacttaaatgaaatggaaaactggaccatgggactctggcaaacctgcgtcacccaagaggaagtgggaatgcaatgcaaggactttgactccttcctggctttgcctgctgaactcagggtctccaggatcttaatgtttctatcaaacgggctgggatttctgggcctgctggtctctgggtttaggctggactgtttgagaattggagagggtcagagagatctcaagaggcgactgctgatcctggga

SEQ ID NO: 36991 - DNA, 688 bp, Macaca Mulatta
  misc_feature (1)...(688): n = A,T,C or G
gggagacaccaccggaagcaaggaaggtgctgtgtaatcattaaggagaggaggcatttggagctgctaaaatgccggattacctcggtgccgatcagcggaagaccaaagaggatgagaaggacgacaagcccatccgagctctggatgagggggatattgccttgctaaaaacttatggtcagagcacttactctaggcagatcaagcaagttgaagatgacattcagcaacttctcaagaaaattaatgagctcactggtattaaagaatctgacactggcctggccccaccagcactctgggatttggctgcagataagcagacactccagagtgaacagcctttacaggttgccagatgtacaaagataatcaatgctgattcggaggacccaaaatacattatcaacgtaaagcagtttgccaaggtttgtggtgggaccttagtgatccagtggcacctactgacattgaanaaaggaatgaaaagtgggtggtggaccgaaattaattttcgaaattccccttcccatttggctccctaagaattgggcccccaaaggtttaccattggaggcccnnnnnnnnnnnnnnnnnnnnnnnntggatggcccccataaacactgggaaaatttttgggggggggccgttttgagaggggaacacagcaaaagttggaagaaaa

SEQ ID NO: 36992 - DNA, 1136 bp, Macaca Mulatta
  misc_feature (1)...(1136): n = A,T,C or G
cagtcacatgacccacaaagtaacagaggatttttctcctcgggatccaagaactgttgttgggaagcaagatggcgggggctgcacttcagtcacaacagcattgtccctacctgaactggaaagggaagatggaaaagaagacatttcagatcctatggacccaaatccttgtagtgcaacatacagcaacttaggnnnnnnnnnnnnnnnnnnnnnnnnnnnnnnnnnnnnnnnnnnnnnnnnnnnnnnnnnnnnnnnnnnnnnnnnnnnnnnnnnnnnnnnnnnnnnnnnnnnnnnnnnnnnnnnnnnnnnnnnnnnnnnnnnnnnnnnnnnnnnnnnnnnnnnnnnnnnnnnnnnnnnnnnnnnnnnnnnnnnnnnnnnnnnnnnnnnnnnnnnnnnnnnnnnnnnnnnnnnnnnnnnnnnnnnnnnnnnnnnnnnnnnnnnnnnnnnnnnnnnnnnnnnnnnnnnnnnnnnnnnnnnnnnnnnnnnnnnnnnnnnnnnnnnnnnnnnnnnnnnnnnnnnnnnnnnnnnnnnnnnnnnnnnnnnnnnnnnnnnnnnnnnnnnnnnnnnnnnnnnnnnnnnnnnnnnnnnnnnnnnnnnnnnnnnnnnnnnnnnnnnnnnnnnnnnnnnnnnnnnnnnnnnnnnnnnnnnnnnnnnnnnnnnnnnnnnnnnnnnnnnnnnnnnnnnnnnnnnnnnnnnnnnnnnnnnnnnnnnnnnnnnnnnnnnnnnnnnnnnnnnnnnnnnnnnnnnnnnnnnnnnnnnnnnnnnnnnnnnnnnnnnnnnnnnnnnnnnnnnnnnnnnnnnnnnnnnnnnnnnnnnnnnnnnnnnnnnnnnnnnnnnnnnnnnnnnnnnnnnnnnnnnnnnnnnnnnnnnnnnnnnnnnnnnnnnnnnnnnnnnnnnnnnnnnnnnnnnnnnnnnnnnnnnnnnnnnnnnnnnnnagatctgtaagagcaaagctaaagaatctcagcagtattatcacagcttggctgtccggcagagtctggctgtccattttaacattcagcaggactgtggtcatttccttgctgaagtccctaaccgtctgcttccctgggaggatcctgatgaccctgaaaaggaagaggatgacatggaagagactgaagaag

SEQ ID NO: 36993 - DNA, 337 bp, Macaca Mulatta
ggcaggcaagcaggtgtgtctgctgagatgttcgccatgccccgaggtctgaaggacagcaacatggatggaatccctgaggacctagatgggaacgtggaggaacccaggtttcagaaaggtgagctcaggagtcaggatgtcatggacctcatggaaggtgacaatgaagcctcagcctcagctcctcctgcagccaaaagactgaaaacagacaccaaaggaaagaaggagaggaagcccaccgtggaggcagaggaggctcagaggatgagcaccctgctgtctgccattatggggagcagctggcccgctatgaagtggtcgccggtcagct

SEQ ID NO: 36994 - DNA, 625 bp, Macaca Mulatta
  misc_feature (1)...(625): n = A,T,C or G
ggggttcactttgctcaatttttcctcttcactggcacagtgtatctgaatacctccttcccttccatctagaattctttggattgtacttgttcccactactttgctctctgccttgtgtttgcagcatctccattctctaaaattaatatcattgctttcctccacacccagccactgtaaagaggtaacttaggtcctcttccattgcagtcctgatgatcctaacctgcagcacgatggttttacaatgttccagagcaggaatgccaggttgacaagctatggtaggattaggaaagtttgctgaagaggatctttgacgccatagtgggactagccaggaatgagggagaaatgccctttccggcaattattggagctggatgggtcaattttataagagagcgcattttgagcacttttagggcatcaggaacaatgctactgatgggtagactgggagaggtggtgtaacttagttcttgatgatcccacttcctgtttccatctgcgtgggatataccagagtttaccaccagtgttttgacctgatacattcctgagctttcactctgctgcttccccaagccctctttacaatggcaggagatgtggcatgccn

SEQ ID NO: 36995 - DNA, 685 bp, Macaca Mulatta
ttggttttatgtttgtgataattttcttaggataatggcctccagctgcatctacgttgctgcagaggacatgattttgttcttttttatggctatgtagcattccatggacgtatatgtaccacattttctttgtctaatccaccattgatgggcacttgggttgattccatgtctttgctattgtgaatagtacccgataaatatacaaatgcaggtgtcattttggtagaatgatttattttcctttggacatacacccagtaatgggattgttgggttgaatggtaattctattttgagttctttgagaaatctccgaaccactttctacgggggctgaactaatttgcattcccaccaacagcatataaaccttcccttttctcctcaaccttgccagtgtctgttatttcctgactctaataaaagagagcagttgtaaaacactgtaacaaatctactttctgtgcttctcactattcaaatcagacttcagtttaaccacttgaacatttggtcttaaatatagattgatgacatagtgatggatcgattgtgttttatgacatatatttcatattggctaacaattctgtgtgtaatttcattgttgtagggttatgagagaatttacaacgaaattccagacattaatctggatgtcccacattcgtactctgtg

SEQ ID NO: 36996 - DNA, 3004 bp, Macaca Mulatta
  misc_feature (1)...(3004): n = A,T,C or G
agatttaccttctgggagtnttattcaagatgacatggtccactgctcatatctttgtgacgaaggcaaggactgctgtgaccgaatggcaagctgcaagtgtgggacacacacaggccattttgagtgcatctgtgaaaaggggtattacgggaaaggtctgcagtatgaatgcacannnnnnnnnnnnnnnnnnnnnnnnnnnnnnnnnnnnnnnnnnnnnnnnnnnnnnnnnnnnnnnnnnnnnnnnnnnnnnnnnnnncctccacctggaagcacgtcccctgaagactgtgtctgcaaagagggatatagggcatctggccagacctgtgaannnnnnnnnnnnnnnnnnnnnnnnnnnnnnnnnnnnnnnnnnnnnnnnnnnnnnnnnnnnnnnnnnnnnnnnnnnnnnnnnnnnnnnnnnnnnnnnnnnnnnnnnnnnnnnnnnnnnnnnnnnnnnnnnnnnnnnnnnnnnnnnnnnnnnnnnnnnnnnnnnnnnnnnnnnnnnnnnnnnnnnnnnnnnnnnnnnnnnnnnnnnnnnnnnnnnnnnnnnnnnnnnnnnnnnnnnnnnnnnnnnnnnnnnnnnnnnnnnnnnnnnnnnnnnnnnnnnnnnnnnnnnnnnnnnnnnnnnnnnnnnnnnnnnnnnnnnnnnnnnnnnnnnnnnnnnnnnnnnnnnnnnnnnnnnnnnnnnnnnnnnnnnnnnnnnnnnnnnnnnnnnnnnnnnnnnnnnnnnnnnnnnnnnnnnnnnnnnnnnnnnnnnnnnnnnnnnnnnnnnnnnnnnnnnnnnnnnnnnnnnnnnnnnnnnnnnnnnnnnnnnnnnnnnnnnnnnnnnnnnnnnnnnnnnnnnnnnnnnnnnnnnnnnnnnnnnnnnnnnnnnnnnnnnnnnnnnnnnnnnnnnnnnnnnnnnnnnnnnnnnnnnnnnnnnnnnnnnnnnnnnnnnnnnnnnnnnnnnnnnnnnnnnnnnnnnnnnnnnnnnnnnnnnnnnnnnnnnnnnnnnnnnnnnnnnaaaaggtgtcaatccgtgttcatccagctttcaccccaccttaccttttcccaattggagatgttgctatcatatgctcagcagctgacctatccggcagccaagccagctgcgttttccatatcaaggtnnnnnnnnnnnnnnnnnnnnnnnnnnnnnnnnnnnnnnnnnnnnnnnnnnnnnnnnnnnnnnnnnnnnnnnnnnnnnnnnnnnnnnnnnnnnnnnnnnnnnnnnnnnnnnnnnnnnnnnnnnnnnnnnnnnnnnnnnnnnnnnnnnnnnnnnnnnnnnnnnnnnnnnnnnnnnnnnnnnnnnnnnnnnnnnnnnnnnnnnnnnnnnnnnnnnnnnnnnnnnnnnnnnnnnnnnnnnnnnnnnnnnnnnnnnnnnnnnnnnnnnnnnnnnnnnnnnnnnnnnnnnnnnnnnnnnnnnnnnnnnnnnnnnnnnnnnnnnnnnnnnnnnnnnnnnnnnnnnnnnnnnnnnnnnnnnnnnnnnnnnnnnnnnnnnnnnnnnnnnnnnnnnnnnnnnnnnnnnnnnnnnnnnnnnnnnnnnnnnnnnnnnnnnnnnnnnnnnnnnnnnnnnnnnnnnnnnnnnnnnnnnnnnnnnnnnnnnnnnnnnnnnnnnnnnnnnnnnnnnnnnnnnnnnnnnnnnnnnnnnnnnnnnnnnnnnnnnnnnnnnnnnnnnnnnnnnnnnnnnnnnnnnnnnnnnnnnnnnnnnnnnnnnnnnnnnnnnnnnnnnnnnnnnnnnnnnnnnnnnnnnnnnnnnnnnnnnnnnnnnnnnnnnnnnnnnnnnnnnnnnnnnnnnnnnnnnnnnnnnnnnnnnnnnnnnnnnnnnnnnnnnnnnnnnnnnnnnnnnnnnnnnnnnnnnnnnnnnnnnnnnnnnnnnnnnnnnnnnnnnnnnnnnnnnnnnnnnnnnnnnnnnnnnnnnnnnnnnnnnnnnnnnnnnnnnnnnnnnnnnnnnnnnnnnnnnnnnnnnnnnnnnnnnnnnnnnnnnnnnnnnnnnnnnnnnnnnnnnnnnnnnnnnnnnnnnnnnnnnnnnnnnnnnnnnnnnnnnnnnnnnnnnnnnnnnnnnnnnnnnnnnnnnnnnnnnnnnnnnnnnnnnnnnnnnnnnnnnnnnnnnnnnnnnnnnnnnnnnnnnnnnnnnnnnnnnnnnnnnnnnnnnnnnnnnnnnnnnnnnnnnnnnnnnnnnnnnnnnnnnnnnnnnnnnnnnnnnnnnnnnnnnnnnnnnnnnnnnnnnnnnnnnnnnnnnnnnnnnnnnnnnnnnnnnnnnnnnnnnnnnnnnnnnnnnnnnnnnnnnnnnnnnnnnnnnnnnnnnnnnnnnnnnnnnnnnnnnnnnnnnnnnnnnnnnnnnnnnnnnnnnnnnnnnnnnnnnnnnnnnnnnnnnnnnnnnnnnnnnnnnnnnnnnnnnnnnnnnnnnnnnnnnnnnnnnnnnnnnnnnnnnnnnnnnnnnnnnnnnnnnnnnnnnnnnnnnnnnnnnnnnnnnnnnnnnnnnnnnnnnnnnnnnnnnnnnnnnnnnnnnnnnnnnnnnnnnnnnnnnnnnnnnnnnnnnnnnnnnnnnnnnnnnnnnnnnnnnnnnnnnnnnnnnnnnnnnnnnnnnnnnnnnnnnnnnnnnnnnnnnnnnnnnnnnnnnnnnnnnnnnnnnnnnnnnnnnnnnnnnnnnnnnnnnnnnnnnnnnnnnnnnnnnnnnnnnnnnnnnnnnnnnnnnnnnnnnnnnnnnnnnnnnnnnnnnnnnnnnnnnnnnnnnnnnnnnnnnnnnnnnnnnnnnnnnnnnnnnnnnnnnnnnnnnnnnnnnnnnnnnnnnnnnnnnnnnnnnnnnnnnnnnnnnnnnnnnnnnnnnnnnnnnnnnnnnnnnnnnnnnnnnnnnnnnnnnnnnnnnnnnnnnnnnggcttaaagtgtgaaacagacatcgatgagtgcagcccactgccttgcctcaacaatggagtttgtaaagacctagttggggaattcatttgtgagtgcccatcaggttacacaggt

SEQ ID NO: 36997 - DNA, 822 bp, Macaca Mulatta
  misc_feature (1)...(822): n = A,T,C or G
ggggactacagcagcttgtgactactttnntgnnnnaatgactgaatagttgcagagttggaaaaaagacccaaatagcctaaaatacatactatctggcccctgacagaaaagggggcaatttgtaagagtaaaataattttcagtatcactgtctcttcctacactacacattggctaattcatgattactaaaatgacctaagcacataccagcaaggagattatattttaggaaagggactttaaagtctactcaaatgggggattccactaacttctcacctaaaaagccactcaaagaatgaggtatttttccaggaagtctgatgtcattatctttctcctttggtacctcccaagcgaagagaaaagctaaattaaacacattatccctgttcttatattcctataaaactgaattttttgaaatgtggtacaggagaaccaataatcgtatatatgccacatttcattttactagttatgtattaatttcacatacattaggaaaaaacaccaacaagcaatttaaaaacatgagcctatacaattgtggtttagctttaggacaaagctgcctttacaatttttaatattttaagtatgtaaataaaaataatgggcataaaaacccatggccaatgtaaaagtttaaggcaaacacttaatttcacaaaagtctcctggccaaggggttnnnnnnnnnnnnnnnnnnnnnnnntgaaaaaacattgcctcctttttgggggaaacttatattgtgcccacaggggttttggtggtaagtttaacctaccacttgtttttggtgaaaatctt

SEQ ID NO: 36998 - DNA, 800 bp, Macaca Mulatta
  misc_feature (1)...(800): n = A,T,C or G
cggttcttcgggaagagaacttcctttaccccccccccgaaatgccccgtttttttcgggaagtgccaggccatagcatggatgttaggtttgggttttttaagaaagggaaaaggaaacccgggagaatacccaaatggacctggggagttttgaaactttggggaaaagggggaaagtggggaaaaaaccatttgtcagtttgttggccaggaaaacaaaaaaggaaacaaatgcaggcatggacacagaatggtgtatctagggtctgcatagggtttcctatatgctaggcactattataagtatttacatttgttaacacatttaattctcatgaaactaccacaacaaaaactatttttatccacatcttacagattatgaaactaaggcacctggagataaggtaacctcctaaggtcaaaggtcacataggtatcaaatgtgaaagctggtacttgaatacaagcagtctggnnnnnnnnnnnnnnnnnnnnnnnnnnnnnccggcctggctctgttgcgcaggctggagtgcagtgctgtgatcatgcgatcatggctcaactgcaacctccatctcacgagctcaagctgtctgtcctccaacctgagcctctnnnnnnnnnnnnnnnnnnnacatgtgccaccatgcccagataaacttttgtactttttgcagaggcagggtttcactgtattgtccacgctggtcttaaactcctgaactcaagtgatcctcccaactcaccctcccaaagttctgagactacagtgcttgagcactgtgcctgccc

SEQ ID NO: 36999 - DNA, 509 bp, Macaca Mulatta
  misc_feature (1)...(509): n = A,T,C or G
tgacagtggagctgcagtaatccagctccagttcctgattaatgagggagctcttgtgagtgccttggctgatgacaccttacacttattggaatttgcgttcagaaagaaggccctgtccatactaacattcgncnttaaattttttggccgagaaagggttacattttgccatctngcctntnntccagaagtaagttggngnnctctattgntttgggcnancnnntgaancngaaaggtnanantnnataccantnnattgtncnnaanntgtgngnnagtccntntcnnnacanctctcaggctacgtcattatgtggaataaagccattgaactgtcatctaaatctcatccaggacctgtggtccatataagtgataatccaatggacgagggaaagcttttgattggctttgaatctggaacagtagttttatgggacctcaaatcaaagaaagctgactacagatacacatatgatgaggctatccactctgttgcttgg

SEQ ID NO: 37000 - DNA, 715 bp, Macaca Mulatta
ggagaatacatgatgttactcatttccatctcttccagctccttgctccattaactattccttctgtctgctatcttcaatctctctctctctgttgtttcattttcttcaatctaagaaaataatttttagttctgacttagaagcaacaaaataaaaccttcctcaacatagcatttcattttccttttatgaagcttagctgtgaaggaaacaatagattttactcattagctacaggtcacattctatttgctttttttcacttgggaaaattttcagacatacagaaaaatagaataataaatatccattgcttattgtctgcatttaacaattgttaatattttgtcatatttatttttttcaaagtatttcaaagtaaatattgttaatattttgtcatttatttttttcgaagtatttcaaagtaaagctcagaaattgtgacactttactctttaatacgtcagtattcatgtccataaagtaatttgcctcctttaccacattgctttcaccacttaacagtaattccataatattgcctaatactcagtctatgttcacatttcctcagttgtgccaaaaatttccttgccattgattgcattgtattcggttgttcacttacattttcaaaaatttagatcagcactacctattccaatcttcctttttaatatatttgacttggttgaaaaagaccaagtcc

SEQ ID NO: 37001 - DNA, 800 bp, Macaca Mulatta
  misc_feature (1)...(800): n = A,T,C or G
ggcacatgagtcttagcttcaggatctcctcagccgaaggcctttggacctgtagaaaccagacataccggtgggtgaagcaaggccatcttatgatcatttaaataagagcagtcatcctgggcagaagccaagtcttcacatttctcatcttaaccagcactcccgctgcctatggtttgaatagactttacagtgtgtgaaggtcttttcaggcacatgtctctggattttaatagctcccaggaggtgtttttgtcattgccaccatgtaggaggcttggttagagcctcacagctgatgggagcctccgtcgcctcccagaaagtcagttgtaggcctggtgcagaggccagcagcagcaagatagtcacattctagcagagcgtctccgtccactggctgctaagccacggaattcactcgccagtgtgccggccaggcattgcggagctctcctgatttcttttcagaaactcacgggatcaagttgagagcaggatggaattttggactcttaagaggtgtcccagtgtagcccatctcattantcacactgctttgagagtggaactaacccacccctctggaactaagagctctccgatcatttcaggggccccgatccggggacaccggtgggaatgggaatggcttcttgtcctggcaaagtttgcccccctacatacatggtttaaggtagccccccaggccaccgttaaaatcttttccccttttggacctggaggcccatctttcgaaaggggtaagagttcttcctttgagggcccccgtgttc

SEQ ID NO: 37002 - DNA, 198 bp, Macaca Mulatta
ccaggggcttgaatatcagaccgatgagccttcggaagaaccgataaagaccatcaggaactggctgaaggagaacttgcatgtcttcttggagaagttagaggaagaggtgcgagagctggagcagctagtgcgggacctggaactgtggctggatgctcttctgggagagccacacctggaggagcactgctccac

SEQ ID NO: 37003 - DNA, 197 bp, Macaca Mulatta
ggctgtgtgtgggtcaatgggctgacgctaaggtacctggagcaggtcaccgagagtcccgtcaacaggctgttcttgtcaggcatccagatgctggttcgcgtagaagaaggcacatccctggagtcctttgtctgatatttcagtgtcagcctttcacccttgatttacagtcctgaggttgagaaaactgtcga

SEQ ID NO: 37004 - DNA, 860 bp, Macaca Mulatta
ctttccaggatatgaagagaactcagatgctgttacagaaactgaaagttcccccttatagcccattggatatcagtattttcccacaatcagaatccaaaatgaaagattcccggtcaggtgtagactctgggattggagcaagggtgcttatctccagtggaactcacacagtaaatagtgaccgattacgcacaccatcctcaaaaaccgtctctcctgccttatttagctttttgccactgtgtttgcaacaagatctggagaaaaggccatcagcaagcagtttatagtcccatgttttcttcaaacagatgaaagaagatagccaggattcaatactttcactgttgcctcctgcttataacaagccatcagtgtcattgcctccagtgttaccctggactgagccagattgtgattttcctgatgaaaaagactcatattgggaattctagggctgccaaatcattttatgtcctatatacttgacactttctccttgctgctttttcttctgtattgctaggtacaaataccagaattatacttgaaaacacagttggcgcactggagaagctattattttaaaatcactctgttcaaaggggcatcagtttgtagtcccttcggttcacacagagtgctatgacaactccaaggaaacatcagaactactaatctagctagtgttatttattctggaaattattctaagctgtgactaactctcttgatctctcaatataatttttgagtcagttaattttttcagtattttgctgtcctcttgggaatggtccttcagaggatagtgcttccaaaatacatcttctcccagattcttctggcctttttaa

SEQ ID NO: 37005 - DNA, 814 bp, Macaca Mulatta
  misc_feature (1)...(814): n = A,T,C or G
gggcttctcgcctaacgccgccaacatggtgttcaggcgcttcgtggaggttggccgggtggcctacgtctcctttggacctcatgccggaaaattggtcgcgattgtagatgttattgatcagaacagggctttggtcgatggaccttgcactcaagtgaggagacaggccatgcctttcaagtgcatgcagctcactgatttcatcctcaagtttccacacagtgcccgccagaagtatgtccgacaagcgtggcagaaggcagacatcaatacaaaatgggcagccacacgatgggccaagaagattgaagccagagaaaggaaagccaagatgacagattttgatcgttttaaagttatgaaggcaaagaaaatgaggaacagaataatcaagaatgaagttaagaagcttcaaaaggcagctctcctgaaagcttctcccaaaaaaagcacctggtactaagggtnnnnnnnnnnnnnnnnnnnnnnnnnaaagttccagcaaaaaagatgacccaccgcgagtaaaaaagggcttcccagcccagaaaggtttcctgccccgaaagccacaggccagaaggctgcgccctgctccaaaagctcaaaaagggttcaaaagctcccgtccccaaaaagcaccctggctccaaagggcatctggtcaagaaaagcttaagttgggcaatcaaaaaaaagtaataaaaggttcctttttgacacagtttaaaacaaaacataataaacattttatattattaccttgtttggccgccctcgcccctataaaaaagttttcttaaactcttcg

SEQ ID NO: 37006 - DNA, 503 bp, Macaca Mulatta
tccttgcagcctcgcagagtgaggttcctgcggcacccctggaagaactggcctacagacggtcacttcgcgtggctctggatgttctgagcgaggggcccatttggagtcaagaaagctccccagggacaggcagagccgaccagtctctgcgagagaagcccactgaacacgtttcctcgccctgtgattccaacttctcatctattccccgtggagatgtgttgggcagttccggacctcacaggaggaggcaatgcgtgcaacaaagcctgtcaagttcgttcacttgtgaaaaagaccccgagtgtaaagcggaccacaagaaggggctcaggaaaagtgaaaacccaagaggcctgtcggtcctctcagctggaggtggtgctcaggatgagagcgggtccagaatccaccgcaaaaattggactcttgcaagtaagaggggaagaaactcagtgcagaagtctagtttgtgccggaatggatcttccctttcagag

SEQ ID NO: 37007 - DNA, 613 bp, Macaca Mulatta
gggcaatagcttgaatttattcagattattttcatgttttaataaaggatttttcttccattgaaaatgggaagaagataaacaggggcaaccacaagacattcaaactgtcaggactagggcataacagtgcccaccctctaaccacttgcctggttccattagtctccaagcatgtttgaaaacaaaagacaaactaagcatgttgaataaattagctgctatataatcagaaaggtgcagagtttcagaaagtaaagtagaggatgtcagtatggaatatgtaaaataactagatgtggatatggggcttataatatggtttatgtagacaaagtttgaggtcttttaaaactgggatttgagtttaaaagagtaagggtgcacatatttccattatttcagaattttcagatgactaggcacatgttgtggatgatactggtaccaactaacaataaccaactaccaataaccaactataaagtacccctgcgacaagggagacttcctttttgtagaatagtcctgaaaatactgacagatctgtggttagtttgttattttattgcataaaaaacagtttaaacaaattttatagccaaagttttac

SEQ ID NO: 37008 - DNA, 650 bp, Macaca Mulatta
  misc_feature (1)...(650): n = A,T,C or G
ggggcagcaagatggagggaagagcacagatggtcaggtaacagacagagggctgcggctcagatccccgccatctttgcgtggtgctcaggatgaatgaaatataccaaaaggatgacagatatcaccatctggaagcttttaccagcaacctttctgttccacgatgaagagaaatttgaccacagctgtcaagagacttttgaaagttcatgccctgtggcccagtcctcttccctattttaagccttctggctaagaagtcatttgcaggacgggcaccgtaannnnnnnnnnnnnnnnnnnnnnnnnnagaggcagaggtggaaggatcgcttgcgaccaggagtttgagacccatcttgggcaacatggcgaaaccctgtctttacaaaaataaccaaaatattagattgaggctgcagtgagctgtgatcgtgccactgcactccagtctgagtgacagagggagaccctgtctcanacaaaccaaagaagtcactagtggttctagcacatagtttagataacaagacccttcagaggagagttatttattagtaacaattggaagaaataaatatccaacatagaatggacaccatagaatttgtcaacaaattcgcataagatagctacattcctgttcg

SEQ ID NO: 37009 - DNA, 768 bp, Macaca Mulatta
  misc_feature (1)...(768): n = A,T,C or G
ggcgcatattgatgttaatgggctcttttacatctcccctcgacactgccaaaatgcnnnnnnnnnnnnnnnnnnnnccacaaaatccattcacagaaaccacgaaggaaatagaattctgactaattatctgggtggtttgaaaaagaataaggcctctcagatgagtctccgctctctctctcagagcagcctgcctggcggataaagggcgcactcaactggagcagggcctttgattctgcccagcacgaaccccagtagtcatcataaaagcccctctcttgccccggctgcctccctccacagccatgatctcatttactctcacaacagcccttgtccgtgaagctgccctttcagggacgccgcttgagggtagaaactggttggtttgtgtctctgtctggcctgcggtgggttgtatcgttctctaggatcaccataatgaatgaccgcatactttgtggcttcagcgatggaaatgtactctctcacagttctggaggccagaggtctgaaatcaaggtgttggcagggttggtttattttggaggctgcaagggagaaactggtctgtgccgttcccctcgcctctggtggttgctgggcagtcctggtgttccttgggcagtcttccttgcagacgctcactccgggtctctggcttccgtcatcacatgggtctcccttccccgagcggtctgaaatctccggtgtccttcacataagcccgtctttataaaagaccaccagtccatttgggat

SEQ ID NO: 37010 - DNA, 755 bp, Macaca Mulatta
ttcgcaaatattgtgataattcctgcattgttctgcagatcaacaatgcccatattgctgctgatgactttagagtcacctatgagacagagctggccatgagccagcctgtagagagcaatatctatgggttccacaaggtcaccgatgacaccaatgtcactcagctgcagctggagacagagatcgaggctctcaagaagtaactgctctttatgaagaagaaccacgaagaggaagtaaaaggcttacaagcccagattgccagctctgggttgaccgtggaaatagatgcactcaaattgcaggacctcaccaagatcacggcagacatcgaagcccaatacgatgagctggctcggtaaaaccgagaggagctggacaagtactagtctcagcagattgaggagagcaccacagtggtcaccacacagtccgtcaaggttggagctgctgagatgatactcatggagctgagacacacagttcagtccttggagatcaatctggacttgatgagaaatctgaaggccagactggagaacagtctgagggaggtggaggcccgctatgccctgcagatggaacagctcaacaggaccctgatgcacctggagtccgagctgacacagacccggacagaggggtagcaccaggtccaggagtaggaggcgctgctgaacatcaaagtcaagctggaggctgagattgccacataccacctcctgctggaagatggtgaggacttcaatctt

SEQ ID NO: 37011 - DNA, 7265 bp, Macaca Mulatta
  misc_feature (1)...(7265): n = A,T,C or G
ttatcaaagaggctcacggaatgtctttcaggagagtggccctcagcgctttgcttgatagtgcggagaagttagcaccagggaaaaaggtggaggagaatgaacaggaatctaagcctgcaggcagtaaaaggtnaggtcagaggcgggaagcattgtggataaaggccagatattcctctgcacctgaggaagtcgcagcttcannnnnnnnnnnnnnnnnnnnnnnnnnnnnnnngatgagcaaatgcaaggagccaacctggggcggaaagatttctggcgtaagatgttcaagtcccagagtgcagcaagtgacaccagcagccagtctgagcaggacacttcagaatgcaccactgcccactcagggaccacctctgaccgacgtgcccgctcaagatcccgcagaatttccctccgaaagaagcttaaactccccataggtaaaagnggaactggctgaaaagatcatccctctcaggcctggcagatggtgtggaggacctcctagacattagctctgtggaccgactctctttcatcagacaaagctccaaggtnaggtcaaattcaccagtgctgtgaagctttctgaaggtgggccaggaagtggaatggaaaatggaagagatgaagaggagaatttcttcaagcgtcttggtnnnnnnnnnnnnnnnnnnnnnnnnnnnnnnnnnnnnnnnnnnnnnnnnnnnnnnnnnnnnnnnnnnnnnnnnnnnnnnnnnnnnnnnnnnnnnnnnnnnnnnnnnnnnnnnnnnnnnnnnnnnnnnnnnnnnnnnnnnnnnnnnnnnnnnnnnnnnnnnnnnnnnnnnnnnnnnnnnnnnnnnnnnnnnnnnnnnnnnnnnnnnnnnnnnnnnnnnnnnnnnnnnnnnnnnnnnnnnnnnnnnnnnnnnnnnnnnnnnnnnnnnnnnnnnnnnnnnnnnnnnnnnnnnnnnnnnnnnnnnnnnnnnnnnnnnnnnnnnnnnnnnnnnnnnnnnnnnnnnnnnnnnnnnnnnnnnnnnnnnnnnnnnnnnnnnnnnnnnnnnnnnnnnnnnnnnnnnnnnnnnnnnnnnnnnnnnnnnnnnnnnnnnnnnnnnnnnnnnnnnnnnnnnnnnnnnnnnnnnnnnnnnnnnnnnnnnnnnnnnnnnnnnnnnnnnnnnnnnnnnnnnnnnnnnnnnnnnnnnnnnnnnnnnnnnnnnnnnnnnnnnnnnnnnnnnnnnnnnnnnnnnnnnnnnnnnnnnnnnnnnnnnnnnnnnnnnnnnnnnnnnnnnnnnnnnnnnnnnnnnnnnnnnnnnnnnnnnnnnnnnnnnnnnnnnnnnnnnnnnnnnnnnnnnnnnnnnnnnnnnnnnnnnnnnnnnnnnnnnnnnnnnnnnnnnnnnnnnnnnnnnnnnnnnnnnnnnnnnnnnnnnnnnnnnnnnnnnnnnnnnnnnnnnnnnnnnnnnnnnnnnnnnnnnnnnnnnnnnnnnnnnnnnnnnnnnnnnnnnnnnnnnnnnnnnnnnnnnnnnnnnnnnnnnnnnnnnnnnnnnnnnnnnnnnnnnnnnnnnnnnnnnnnnnnnnnnnnnnnnnnnnnnnnnnnnnnnnnnnnnnnnnnnnnnnnnnnnnnnnnnnnnnnnnnnnnnnnnnnnnnnnnnnnnnnnnnnnnnnnnnnnnnnnnnnnnnnnnnnnnnnnnnnnnnnnnnnnnnnnnnnnnnnnnnnnnnnnnnnnnnnnnnnnnnnnnnnnnnnnnnnnnnnnnnnnnnnnnnnnnnnnnnnnnnnnnnnnnnnnnnnnnnnnnnnnnnnnnnnnnnnnnnnnnnnnnnnnnnnnnnnnnnnnnnnnnnnnnnnnnnnnnnnnnnnnnnnnnnnnnnnnnnnnnnnnnnnnnnnnnnnnnnnnnnnnnnnnnnnnnnnnnnnnnnnnnnnnnnnnnnnnnnnnnnnnnnnnnnnnnnnnnnnnnnnnnnnnnnnnnnnnnnnnnnnnnnnnnnnnnnnnnnnnnnnnnnnnnnnnnnnnnnnnnnnnnnnnnnnnnnnnnnnnnnnnnnnnnnnnnnnnnncagctgccatgttcctgctgtgtgcagtgaaggtgcctgaggccgtgtccgacatgctgatgtcagagttccaccacccagagaccgtgcagaggctgaacgctgtcctcaagttccacacgctctggaggtttcgctatcaggtctggccccggatggaggaaggagcacagcagatttttaagnnnnnnnnnnnnnnnnnnnnnnnnnnnnnnnnnnnnnnnnnnnnnnnnnnnnnnnnnnnnnnnnnnnnnnnnnnnnnnnnnnnnnnnnnnnnnnnnnnnnnnnnnnnnnnnnnnnnnnnnnnnnnnnnnnnnnnnnnnnnnnnnnnnnnnnnnnnnnnnnnnnnnnnnnnnnnnnnnnnnnnnnnnnnnnnnnnnnnnnnnnnnnnnnnnnnnnnnnnnnnnnnnnnnnnnnnnnnnnnnnnnnnnnnnnnnnnnnnnnnnnnnnnnnnnnnnnnnnnnnnnnnnnnnnnnnnnnnnnnnnnnnnnnnnnnnnnnnnnnnnnnnnnnnnnnnnnnnnnnnnnnnnnnnnnnnnnnnnnnnnnnnnnnnnnnnnnnnnnnnnnnnnnnnnnnnnnnnnnnnnnnnnnnnnnnnnnnnnnnnnnnnnnnnnnnnnnnnnnnnnnnnnnnnnnnnnnnnnnnnnnnnnnnnnnnnnnnnnnnnnnnnnnnnnnnnnnnnnnnnnnnnnnnnnnnnnnnnnnnnnnnnnnnnnnnnnnnnnnnnnnnnnnnnnnnnnnnnnnnnnnnnnnnnnnnnnnnnnnnnnnnnnnnnnnnnnnnnnnnnnnnnnnnnnnnnnnnnnnnnnnnnnnnnnnnnnnnnnnnnnnnnnnnnnnnnnnnnnnnnnnnnnnnnnnnnnnnnnnnnnnnnnnnnnnnnnnnnnnnnnnnnnnnnnnnnnnnnnnnnnnnnnnnnnnnnnnnnnnnnnnnnnnnnnnnnnnnnnnnnnnnnnnnnnnnnnnnnnnnnnnnnnnnnnnnnnnnnnnnnnnnnnnnnnnnnnnnnnnnnnnnnnnnnnnnnnnnnnnnnnnnnnnnnnnnnnnnnnnnnnnnnnnnnnnnnnnnnnnnnnnnnnnnnnnnnnnnnnnnnnnnnnnnnnnnnnnnnnnnnnnnnnnnnnnnnnnnnnnnnnnnnnnnnnnnnnnnnnnnnnnnnnnnnnnnnnnnnnnnnnnnnnnnnnnnnnnnnnnnnnnnnnnnnnnnnnnnnnnnnnnnnnnnnnnnnnnnnnnnnnnnnnnnnnnnnnnnnnnnnnnnnnnnnnnnnnnnnnnnnnnnnnnnnnnnnnnnnnnnnnnnnnnnnnnnnnnnnnnnnnnnnnnnnnnnnnnnnnnnnnnnnnnnnnnagacctatgttcgagatatttatcctttccggaggtcagtatctccccagctgaaccttgtacatatgcatccggagaagggacaggaactcattcagaaacaggtgtncaggtgttcacccggaagctggaagaagtagggcgggtattgtttctcatctccctaacccagaagatccccacagcccacaaacagtcccatgtctccatgcttcaggaagacctcctccgcctaccctcattccctcgaagtgctattgatgctgagttttcactcttcagtgatcctcaagnnnnnnnnnnnnnnnnnnnnnnnnnnnnnnnnnnnnnnnnnnnnnnnnnnnnnnnnnnnnnnnnnnnnnnnnnnnnnnnnncgagcgagtttccatgggggagacgaatcatgcttttcctcaatgtttttaacggggctctgatcctccacccagaagacagtgccctgctcaggcagtacgctgccaccgtcatcaataccgcggtgcacttcaaccacctcttctctctcagcggctaccagtggattctccccaccatgctgcaggtgnaggtgtactctgactatgaaagcaatccccagctgcgtcaagccatcgaatttgcctgtcaccagttctatattctacaccggaaaccctttgtgctccagctgtttgctagtgtggcccctctcctggaatttcctgngatgctgccaataatgggcccagcaaaggtgtgtcagctcagtgcctgtttgacttgctgcagtccctagagggagagaccaccgacatattagacatcttagaactggtcaaagctgagaagcctcttaagtcattagnagatttctgctatggaaacgaagatctgacattttctatcagtgaagccattaagctctgtgtcactgtggtggcatatgctcccgaatcattcagaagnnnnnnnnnnnnnnnnnnnnnnnnnnnnnnnnnnnnnnnnnnnnnnnnnnnnnnnnnnnnnnnnnnnnnnnnnnnnnnnnnnnnnnnnnnnnnnnnnnnnnnnnnnnnnnnnnnnnnnnnnnnnnnnnnnnnnnnnnnnnnnnnnnnnnnnnnnnnnnnnnnnnnnnncaggcccatgacagccccacagatgagcaggtgtgaccaaggtcataagggaaccaccacagccaatcacaccatgtcgtctggggtgaacaccaggtannnnnnnnnnnnnnnnnnnnnnnnnnnnnncagggaaaaccttcatttactggaggaagggcaaggccttcccagagaggaactggatgaacgaattgctcgggaagagttcagaagaccccgggagtccttactgaatatttgcacagagttctataagcactgtggaccgcggctgaagatcttgcaaaatctggctggggagcctcgggtcactgccctggaattgctggatgtgaagtctcacatgaggtnaggttggcagaaattgcacactcccttctgaagctggcaccatatgacactcagacaatggagagtcgtgggcttcggcgctacatcatggagatgctacccattaccgactggacagctgaggcagtgaggccagccctcatcctcattttaaaaagattggatagaatgttcaacaaaattcataagatgcctactttgaggnnnnnnnnnnnnnnnnnnnnnnnnnnnnnnnnnnnnnnnnnnnnnnnnnnnnnnnnnnnnnnnnnnnnnnnnnnnnnnnnnnnnnnnnnnnnnnnnnnnnnnnnnnnnnnnnnnnnnnnnnnnnnnnnnnnnnnnnnnnnnnnnnnnnnnnnnnnnnnnnnnnnnnnnnnnnnnnnnnnnnnnnnnnnnnnnnnnnnnnnnnnnnnnnnnnnnnnnnnnnnnnnnnnnnnnnnnnnnnnnnnnnnacaggctttaaaagaagattttcctttaagccatgtgatctccccattcaccaatcaagagcgaagggaggggatgcttttaaatctgctcatcccatttgtgctcacagtaggatctggaagcaaagnagatagtccctggctggagcagcctgaggtgcagctgctgctgcagacggtcatcaatgtgctcctgccaccgcggatcatcagcacatctaggagcaagaacttcatgttagagagctccccagcccactgctccacccctggggatgcagggaaagacttgcgcagggaagggctggctgagtccaccagccaagcagcatacttggnnnnnnnnnnnnnnnnnnnnnnnnnnnnnnnnnnnnnnnnnnnnnnnnnnnnnnnnnnnnnnnnnnnnnnnnnnnnnnnnnnnnnnnnnnnnnnnnnnnnnnnnnnnnnnnnnnnnnnnnnnnnnnnnnnnnnnnnnnnnnnnnnnnnnnnnnnnnnnnnnnnnnnnnnnnnnnnnnnnnnnnnnnnnnnnnnnnnnnnnnnnnnnnnnnnnnnnnnnnnnnnnnnnnnnnnnnnnnnnnnnnnnnnnnnnnnnnnnnnnnnnnnnnnnnnnnnnnnnnnnnnnnnnnnnnnnnnnnnnnnnnnnnnnnnnnnnnnnnnnnnnnnnnnnnnnnnnnnnnnnnnnnnnnnagcctaccaaggcaagacatccatcagtaccgtgggcacctccacctctgcttaccgcctgagcttggccaccatgtcccgctctaacacaggcacgggcactgtctgggagcaagatagtgagccatcccagcaagcttcgcaggacaccctgagtcggactgatgaggaagatgaggaaanatgactctataagcatgcccagcgtggtaagtgaacaagaagcttacctcctgagtgccattggaaggaggcgattctccagccacgtctccagcatgtctgcacctcaggctgaggtgggcatgctacccagccagaggtaannnnnnnnnnnnnnnnnnnnnnnnnnnnnnnnnnnnnnnnnnnnnnnnnnnnnnnnnnnnnnnnnnnnnnnnnnnnnnnnnnnnnnnnnnnnnnnnnnnnnnnnnnnnnnnnnnnnnnnnnnnnnnnnnnnnnnnnnnnnnnnnnnnnnnnnnnnnnnnnnnnnnnnnnnnnnnnnnnnnnnnnnnnnnnnnnnnnnnnnnnnnnnnnnnnnnnnnnnnnnnnnnnnnnnnnnnnnnnnnnnnnnnnnnnnnnnnnnnnnnnnnnnnnnnnnnnnnnnnnnnnnnnnnnnnnnnnnnnnnnnnnnnnnnnnnnnnnnnnggcaggagttaggaccatctttatgtatttggtaaagtttaagcttctgttatactattatgattcagttgnnnnnnnnnnnnnnnnnnnnnnnnnnnnnnnnnnnnnnnnnnnnnnnnnnnnnnnnnnnnnnnnnnnnnnnnnnnnnnnnnnnnnnnnnnnnnntaaaatgaagaggtttgctaaaatgacctttaaggtaacttctccatctatagttctgtgattccatgacaaaacccctttaaatattnnnnnnnnnnnnnnnnnnnnnnnnnnnnnnnnnnnnnnnnnnnnnnnnnnnnnnnnnnnnnnnnnnnnnnnnnnnnnnnnnnnaaagtataatgaaaacgatctgacgtgagtcaaaacatttatcttaagtagataaatgttttggaacctaatgatattttcacttcaggactgagtttttcaaggaattgaccttatgtgattttagtgcgttgcttatttttaatacctatagattcattgtagtacaattcacacatggaaaataataaaattcagggcatattgtgatgttcacataaaaccagtttatatgtaggaataattatcctgtacccaaatcctttagcaaatggttcatggactacacagatgaaataaaatttgtgaaataaag

SEQ ID NO: 37012 - DNA, 622 bp, Macaca Mulatta
cgtgcagcgagcttgtcaggaagattggaggtgccaagtagcagagaaagcatcccccagctctgacgggcagacagcacatgtctaaggcccacaagtcttggccccaccggagaagaaatcagttttcttcccaacgctccctgaaaaaagaaatgaatttcttccagcaacagccaccgccattcggcacagtgccaccacaaatgacgtttcccccaaactggcagggggtagagaaggaccctgctttcctcaccaaggacttcaacttgctcactttgaacaatcagccactaccaggaaacacgagccagccaagggcaaaggggcccgagaacaacctgcacaaccagtacgagcagaaggtgcgcccctacattgacctcattgactccctgcgggctctgggtgtggagcaggacctggccctgccagccatcgccgtcattggggaccagagctcgggcaagagctccgtgctggaggcattgtcaggagttgcccttcccagaggcagcggaatcgtaaccaggtgtccgctggtgctaaaattgaaaaagcagccctacaaggcgtgggccggaaggatcagctaccagaacaccgagatagagctgca

SEQ ID NO: 37013 - DNA, 811 bp, Macaca Mulatta
  misc_feature (1)...(811): n = A,T,C or G
ggaactttgggaaagtcgaatcttgtgcttcagcttcctcacttataaagtgggggcaataagagtatcttgcttatttggtcacttgagaaataaatgagttaatataagggagatgcttagaatagcatatagtgattctgtgtagacgtagccattaataacaacattactatagtttgcatcagcacttcagatcccatcaaaactatttgattgtttcacttaactcttcatatttattatatgtccgaatgtcacaaaataagcctcttttatatttatttttataatctggattgaaaattttgtaggaagaattaagaaagagatcatatttgtatattcaatttaaggaacttgaaatttgctttcgatagtcaatttttatctcaagtttcctactttataaccttggacaatcaagcatatctatgnnnnnnnnnnnnnnnnnnnnnnttcacccatgttgtatcactcctcctatcccacattactacctagtcaaataaaaaatcctcggtcagcaaaatcctcttaggaagcagtttcaaaaaaacatctgggtattaatcacagatgctcttatgggtttttacccacaactccnataaaacttcagaatttttcagaacaaaatgcctgtccccaaagaactgcttttgccacttcaggctttatattgagaaataaaacttttccttttaatggtaggttccccccactcctggtggtttaggaaatttaattaaaaaccccccacgaatttttgaaaaatannnnnnnnnnnnnnnnnnnaaatttggggaaa

SEQ ID NO: 37014 - DNA, 690 bp, Macaca Mulatta
  misc_feature (1)...(690): n = A,T,C or G
gggaactgaactctaaggacagcagcagggcctgcctttgcagtacattatacagtttgcatgtattaccttatttgatttgatctcatgaaaaccagaaagacgacagtgactaagttcctaaaccatgagcacaagaccttctggaggaaaaaggaaagccccaggaaacagcggaattcgtcaccaggtcaagcgagctgccctgagcaaaactagccaggatcccgtgatcggaggcagataagagagaaagagggnnnnnnnnnnnnnnnnnnnnnnnnnnnntacaatgggggttaacgtggacataaaactcctggggcaaaaaaaaacaccccccttttcattatggccccaaatcatttccccccttttcaaacgggaaaagggggctttgcccttttaaggggggaaaaaaaagaggggnnnnnnnnnnnnnnnnnnnnnnngggaaatttaagggggggcccccccccagggcgtttgggggttcaaaagagagggggcaaccaaagatctctccctnnnnnnnnnnnnnnnnnnnnnnnnnnncgcgccccccccgaggggagtattgtggggccccgggcccccnnnnnnnnnnnnnnnnnnnnnnnnnnnntggaagaaaaaaagtagaaaatttttgtttgcccccccccccccgggaaagaagagaaactaaga

SEQ ID NO: 37015 - DNA, 554 bp, Macaca Mulatta
  misc_feature (1)...(554): n = A,T,C or G
cggctgcagcgtcggtagcatcagcatcagcatcagcatcagcatcagcggcctcgggcggggccggccggacggacaggcggacagaaggcgccgggggacggcgtcccgcccgggccggccatggagggcgcctccttcggcgcgggccgcgcgggggctgccctggaccccgtgagctttgcacggcggccccagaccctgctccgggtggcgtcctgggtgttctccatcgccgtcttcgggcccatcgtcaacgagggctacgtgaacaccgacagcggcccagagctgcgctgcgtgttcaacgggaatgcgggcgcctgccgcttcggcgtcgcgctgggcctcggagccttcctcgcctgcgccgccttcctgttgctcgatgtgcgcttccagcagatcagcagcgtccgcgaccgccggcgcgctgtgttgctggacctgngcttctcaggactctggtccttcctgtggttcgtgggcttctgcttcctcaccaatcagtggcagcgcacggcgccagggccggccacgacgcaggcggggga

SEQ ID NO: 37016 - DNA, 517 bp, Macaca Mulatta
  misc_feature (1)...(517): n = A,T,C or G
tttctagtgaaaaatcctaatctagtaaaactctaatcagaaaaaaagaatattctccaaaaaaatctattatgaaagtcagtaaaatagatagtttaacaaaagtacaggattagaacatgcttatacctattaacaagaacaaaatttctaatgctgctcaagtggaaagggtattgctaaaaggatgtttccaaaaatcttgtatataaaatagcaacagtgattgatgataatactgtacttcatctcactcgccacaaaataacatttaataattcctcaaagtaaaattgagaaatctttaagtatttatcaagtaacataatctatctttgtataattcatattagggaatatggcttttaataatgttctacccacaaataatcatgctattatacctatggttacagcattaaactctattttaaannnnnnnnnnnnnnnnnnnnnnnnnnnnnnnnnnnnnnnnnnnnnnnnnnnnnaccgtacgatgaacaacgtcgtgactggg

SEQ ID NO: 37017 - DNA, 707 bp, Macaca Mulatta
  misc_feature (1)...(707): n = A,T,C or G
ctcctactgtgagcacatagctttggccaggttagcatgtgctgaccccatgcccagcagtctctatagtctgattggttcctctattatggtgggctctgatgtggtcttcattgctgcctcctatatcttaattctcagggcagtatttggtctctcctcaaagacagctcagttgaaagcattaagcacatgtggctcccacgtgggggtaatggctttgtactatctacctgggatggcatccgtctatgcggcctggctggggcaggatgtagtgcccttgcacacccaggtgctgctggctgccctgtacatgatcacctccgccaccttaaatcccatcatctatggcatgaggaccaaacaattgtgggagagaatatggagttatctgatgcacttcctctttgaccactccaacctgggttcatgaacacaatatctgttcggatctggagcattccagccaccttcaaagatgccttagagatttgtggagcgggattggtttacctggtactataaggaattctaagatgaagctgtaaaggatatctttgtgtcacttttaaatttctaccaagaatatgaatganatgtttctaattttctgacatttttaatgggttaatacaatagtgtctgaatcagagtaagtttggtatagaatacagctctggaattttttcttctacagcttctga

SEQ ID NO: 37018 - DNA, 827 bp, Macaca Mulatta
  misc_feature (1)...(827): n = A,T,C or G
gggcagaaaacctcttcttcattgttgagctgtgctgtgagcttggaggacttcaagcccagctgaaaaagctgtagtattttctgtcagttggctgtcttggagaacttagtgagcactgggctggagcgatactgtcagagttcatgagctgtttgaagttctcaaagcctagatactggggttgcccaaatacatcggctggactcactatttctctcaggagtcggggggttggaaaatgctgtggtcttaactctgctcttaatttgacagtgctgttgttaatggtaagaatgatgtcttgcatttgtattttgcttcgtaattcacagagaatttaaaaatccattatctgattttattccctcagcagttctgtgaaaaaggcagagcagttttcatatcttctgttttcccgtgattctcttgtggctcacagaagctaagagccttcaccaaggtcatagggtgaatgagttgcagagctggaagtagaggctcaggcttctagtgaccctgtttcttcctggatagctcgctctggtggcactctgcacaagtaactgcgcatgctctgtttggtcttttgtaaattcctgccccattttgggggaggttcntggggaggcttctattcattttgggagcattttaagtatccttgtcctctcctccctcccagatgcatggggcattttctggcagggcccccggggctgggccccttggttccgtggggggtgttcttcccggccctcccaccgtttgcctttgcattggcccccccttcctggaaggggggctcctttcccccgcccatggaa

SEQ ID NO: 37019 - DNA, 674 bp, Macaca Mulatta
  misc_feature (1)...(674): n = A,T,C or G
gggggttttggaggtgagagtgattgacgagaagtgggttaagagaccagaagtcagaatttttggtgctgttgttttgggcttgggttttatgctttgttgttgtttgccaaggaagccttgtttttaaatggattgggaggcgtgaagaatactgccctaggtacaaagggaaggcggcaggtagcggtggacgaattaaagagcttcatgagcttgcgaatccccactgccctaaactggaggggatcgtcgtacgtaaagacagccatgggcgtttctgcataacggatcctcaaaacagccctggatggtggcctgtgcttgcctttaaagcaggggaaacagctccggattcaaaggaaattgaaagccttctcccttaatgggtagggaaaaaaaccaggaacctgtttttccgggaaactggggagagtggcccttggggnnnnnnnnnnnnnnnnnnnnnnnnatggctcccaaaccagttaactaaacccctgggggcctctcccgcaatttccggggggtgacccaagaaccctttttaaaattccttccaaaatgcccccaaaagagccccgtcttccacccttgggccttctcacccccgaaaaatttggtcccttctaaaatccannnnnnnnnnnnnnnnnnnnnnnncttcttctcgg

SEQ ID NO: 37020 - DNA, 202 bp, Macaca Mulatta
tgaagtatttttcaacagaaaccctttgcatgtcccccttgtctcctctgctgaggcggacactggcattggggccccgctgctggctggataggtccccatgatgaatcagatgcttctctctcatgctaagatctttcatgtcaggaaggggctcttctggatgaatagtgtctgtgctatgtttcctaaaaaactgttt

SEQ ID NO: 37021 - DNA, 775 bp, Macaca Mulatta
  misc_feature (1)...(775): n = A,T,C or G
tggataaccattacatggtgttttcccagcttagaaatttcacaggatacagtggcatataaaggctttgagaatgctggcaatagagacacccagtgtttccccaagttccaaaaattatttgaccacggaactctnnnnnnnnnnnnnnnnnnnnnnnnnnnnnnnnnnnnnnttctgtgttgccccaggctggattgcagtggcacaattnnnnnnnnnnnnnnnnnnnacttcctggggttcaagtgagcgattttcctcctnnnnnnnnnnnnnnnnnnnnnnnnnnnnntgcccgccaccaggnnnnnnnnnnnnnnnnnnnnnnnnnnnnnnnnnaggtttcgctatgctggccaggctggtgtcaaactcttgacctcaagtgatccgcctgcctctgcctaccaaagtnnnnnnnnnnnnnnnnnnnnnnnntgctcctggcccacagaactctatttttacgtatatttgatagccctaatctgtggctaccagtatctctagaaagtgtgacatatgctactatttaatactggtagtttttctttaagaaatagataagaatggtttataacagccttgtcaaagcatagtctggctgtgggcttggaattcatttacactagatgtattttcaaaagaattctcttaattgtggcacatccatttgatttataagacatagaatagtagagcagaagtacgctttgaagagattatctagaccagtggttggaaacctttttttaccttattctgcaccccc

SEQ ID NO: 37022 - DNA, 544 bp, Macaca Mulatta
  misc_feature (1)...(544): n = A,T,C or G
ggcctgtctcaccgagcactcttccctctgtagatgtctcggctgctctgtgagggagttccctttcaggtgtggggcagggcatggccactcctgctggatgtctagatggtggaaaccaagggcctagggaaataccaggtacagcctttccacgctcatccagtgcaggacaaacaggccaggtggtgtcaggagcccagatctccagctggaggaaacatcaaccctgcagtgggaacaggggcccattgtacatcctaggcacagnnnnnnnnnagacaccacaggtaagctgggcttggtacctacccctccccggatacagaaagaagccaaacgaggagttttgtgcagaatgaagcctccttccttccagaagcactgctgactgtttggcggttgccatttgtggcagtgggccttttgtttattctgaggttgggctggtttctcctcttggccctgacctacagattttaaaggagaacagtgagaggtccccaggaaacatccacagatggcattggaaataagtcacctt

SEQ ID NO: 37023 - DNA, 292 bp, Macaca Mulatta
gtagaaacacgagcataaacctcacatacagagggctttatctgtttctgcaaaggatatgaactgatatcacatatagattcatgtatctgcatgaaatatacagcaatcacagataacaaaattataaatatacctctgtggtttaaattaatgttatttatctcattgactgataagagttgattataacctgcttatctgaggcccacccgtcacaccaactcagctaaaatgcttgagaaagatgactatttaaatcttgatattttattcagctggaatatctaaa

SEQ ID NO: 37024 - DNA, 102 bp, Macaca Mulatta
tgcccgatatcatgagactgatcaccaaagatctgtccgaaccctactccatttatacctatagatattttatccacaactggccacagctgtgcttcttgg

SEQ ID NO: 37025 - DNA, 787 bp, Macaca Mulatta
  misc_feature (1)...(787): n = A,T,C or G
ggcaagcaagccctaaaaatattactgcgatcttcccctgattttctgtgtagaagctcattgtaaagaaattctctgatttatgttgtcccaaagtaggtcatagacccacattccagaagggtcctgtcctatacctaaggaaaaggaatgttacaccaaagttttataatgagaattacagaacaccaaaagtccaaatagaatctgaacaccaggtttgctaggttactctcctcccacaatcttttgccatcggtttatatccttttatcctaatcccacttctacatagttggccattcttcattgaacctatgcataaaactagacagtttccctggacccttggatcctcatttcagcaggctcccatgtcacataaaaatttcattaaataaatttgtatgctctctcctgtttatctttgtcaattttattttcagacctagctaggaactctaggagagttgaggaaagtttcctcccttacaatagtaataacacttatatgcagctttattgtgactattctccgtttnnnnnnnnnnnnnnnnnnnnnnnnnnnnnnnnnnnnnnnnnnnnnnnnnnnnnnnnnnnnnnnnnnnnnnnnnnnnnnnnnnnnnnnnnnnnnnnnnnnnnnnnnnnnnnnnnnnnnnnnnnnnnnnnnnnnnnnnnnnnnnnnnnnnnnnnnnnnnnnnnnnnnnnnnnnnnnnnnnnnnnnnnnnnnnnnnnnnnnnnnnnnnnnnnnnnnnnnnnnnnnnnnnnnnnnnnnnnnnnnnnnnnn

SEQ ID NO: 37026 - DNA, 992 bp, Macaca Mulatta
ggggtcttttctttcctgtctcacttgctggttctttttaatctctttctgttgaatgtgttatagaatcttaagcctcaggccttggactgctctttttgtttattccccctggtgatttcatcctgctccaagtacttgaaagtacatatgtacatatacgcacaccgataactccccaaatttcatcatccacctagccctgtgtagtctatatccagccacatagtccacctttcctcttgaatgtcaaatagacacctcatatgttacatgcctaaaatggaacttttggtatatttcctactactttaaacaatcttttgtatctcggtaaatagcaaattcagttcttttccttgctgtcagaacttctaagagttatccttgaacatgtcgcctttccaaagaaaagcatggtcagggatatcctttgttagggtgcctaacctttcaaaaaatattatttccaaatcctttaccacatggcccctccattttaataccccaaaacccaaaaacccaaccccattccaaaacattccttttaaaattccggggaaataaatatttggaccaccgtgggcggggaaaattcaccaactattgggtaccctctttttaacctcccccatataaatattcccaccttcccttgggaaaaaaaacgctcccatggtgctccctctaggagaaattgtgggcaagtgccccccaacgatctggatataataaaaatatataaatttctaaagcatccatttggggtaaatgttcctgcctggaggctctggggaattggctcccccagctctacatttttcccttcatcgggaaaaatcggcgaaatatagaaacccaaaaggccgcctaatattggggggttctcttatccaagtgaccatgagtttttcagatccccacgatagatggagataccatctaaactatcatacttcggaacgcttttccctactaaagaccgttatcag

SEQ ID NO: 37027 - DNA, 1279 bp, Macaca Mulatta
  misc_feature (1)...(1279): n = A,T,C or G
ctgcgctatcgatggtacagtagttcattcacttcttttcactgaaaattcttcaaaattctataattccaaattccaacttgaataggaaatggctttggattaaaatactaagacacaactccatgaataaagatactggtatattaaatagaattagttaacagtttaaaatgatttttaaaagggtaagccagattggtatttgtcacactgcattacaggaagctcgtttagaagtcacctggagtcctactttgggggtgagcaggcagagccctggaattcttcttttccctatcctctctatcagagtgactctatcttttcttacataccaaacttaaacatacttctacatagatgaattttaagagtttatcctgggaaatattccatgatactatgattgaatatttgtatatttatattgactacatttgtatgtggattgtccttcatgttttggtctcaggttgtcaaaatacacaagttgcagatcttacccagtgagcacattgattcacctgtggcaataacctcttaggtagtatttatttccccaccatgtgaacccacagacctgcttcatctgtgctctaagattatctcccttccccagcagtttacagcacagcatccaagtcagaaaaatgtttgtcttaggaatagattcgtttctgtgtttagtgtagataccagtactcctgattcaatcttgccaactactcaggattccagatgtcttcatatatcaccacctcccccactccaggccacaaagaacaaaacaaaacaaaanatttttgatccctagcttaattcttaaacactggtgaaccccccgccccacccaaaggctctgccttgatctctagttatcagtcataaatttttcagcattctctggtttgtctgacttgcttaanaacaagatctatcatctccatttgcagatctaatgcccctatgacatctagatgttcctggccagtctcagtaaggccttccatccagcccatagctgccatttttgttataaaaagttggcttcggtccttggccccaggaagagaccaacaatgtggaccccaatcgttgtcgaggatcccctcagagggagggttggaactaaagctccaaaccaccccttgggtttggtgatgtgggaaccctttgganggaggccctaaagagtggaaaagcgcggggtgtgttcttttttttttttttttgaagaccttttttcctggcggggggcccccaccccctcccggtc

SEQ ID NO: 37028 - DNA, 75 bp, Macaca Mulatta
agagactatgagagttcactatctgttcgctagaagatatacaagacttttgaggataatacttaaatcaagata

SEQ ID NO: 37029 - DNA, 177 bp, Macaca Mulatta
cagagttttgtattttcatcaccatcatagatgttacagttggctgtggtctcaaaagtagagttaagtgtgtcagtacccaaataaacatctaacaggtttctcaacagaggaatccacagtccaattccacttcaattgatagaccccaaaaatataatttaatcaaagttctag

SEQ ID NO: 37030 - DNA, 1664 bp, Macaca Mulatta
  misc_feature (1)...(1664): n = A,T,C or G
cagggccggcccctgctggtcagacctcaggggagccaggaccccgcctgtcccagctgtctgtgactgatgtgaccaccagttcactgaggctcaactgggaggccccacctggggccttcgactccttcctgctccgctttggggttccatcaccaagcactctggagccgcatccccgtcctctgctgcagcgcgagctgatggtgccggggacgcagcacacagccatgcttcgggacctgcgtccggggacgctgtacagcctgacactgtatgggctgcgaggaccccacaaggccgatagcatccagggcactgctcgcaccctcagnagttctggagagcccccgtgacctccaattcagtgaaatcagggagacctcagccaaggtcaactggatgcccccgccgtcccgggcggacagcttcaaagtctcctaccagctggcggacggaggnnnnnnnnnnnnnnnnnnnnnnnnnnnnnnnnnnnnnnnnnnnnnnnnnnnnnnnnnnnnnnnnnnnnnnnnnnnnnnnnnnnnnnnnnnnnnnnnnnnnnnnnnnnnnnnnnnnnnnnnnnnnnnnnnnnnnnnnnnnnnnnnnnnnnnnnnnnnnnnnnnnnnnnnnnnnnnnnnnnnnnnnnnnnnnnnnnnnnnnnnnnnnnnnnnnnnnnnnnnnnnnnnnnnnnnnnnnnnnnnnnnnnnnnnnnnnnnnnnnnnnnnnnnnnnnnnnnnnnnnnnnnnnnnnnnnnnnnnnnnnnnnnnnnnnnnnnnnnnnnnnnnnnnnnnnnnnnnnnnnnnnnnnnnnnnnnnnnnnnnnnnnnnnnnnnnnnnnnnnnnnnnnnnnnnnnnnnnnnnnnnnnnnnnnnnnnnnnnnnnnnnnnnnnnnnnnnnnnnnnnnnnnncccccgcacggccctgctcacttgcattgagccccaagtccggcccacaggctacctgctcagcttctacacccctggtggnnnnnnnaggagatcctgctcctgggaggggtcacatctcaccagctcctcggcctctttccctccaccctctacaatgcacggctccaggccatgtggggcgagagcctcctgccacccgtgtccacctctttcaccacnggtgggctgcggatccccttccccagggactgcggggaggagatgcagaacggagccggtgcctccaggaccaccaccatcttcctcaacggcaaccgcgagcggcccctgaacgtgttttgtgacatggagactgacgggggcggctggctggtgnggtgttccagcgccgcatggatggacagacagacttctggagggactgggaggactatgcccnnnnnnnnnnnnnnnnnnnnnnnnnnnnnnnnnnnnnnnnnaggccctgcagagtctgacgcacgcgggtgactactccatgcgcgtggacctgcgggctggggaccaggctgtgttcgcccagtacgactccttccgcgtagactcggctgcggagtactaccgcctccacctggagggctaccacggnnnnnnnnngactccatgacctaccacaggggaagtgtcttctctgcccgtgatcgggaccccaacaacttgctcatctcctgcgccgtctcctaccgaagggcctgatggtacaggaactgccact

SEQ ID NO: 37031 - DNA, 643 bp, Macaca Mulatta
ctacaatggtcacgacactgtgtagaactgcttttagaacaggaagttttccagaaaacggaaggaaatgcttttagtccattgcattgtgctgtgataaatgacaacgaaggtgctgctgagatgttaattgatacattaggtgccagcattgtgaacgccacagattcaaaaggaagaactcctctccatgcagctgccttcacagaccatgtagagtgtttacagctgctgctgagccataatgctcaagtcaattctgtggactctacagggaaaacacctcttatgatggctgcagaaaatggacaaacaaatacagttgagatgctggttagcagtgctagtgcagaactgactttacaagataacagtaaaaatactgccctccatttggcttgtagcaagggtcatgaaactagtgccttgttaatactggaaaagataacagatagaaacctcatcaatgcaaccaacgcagccttgcaaacacctctgcatgttgctgcccgaaatgggctaacaatggtggttcaggaacttttgggaaaaggagcaagtgtgcttgcagtagatgaaaatggctataccccagctttggcctgtgctcccaataaggatgtggctgattgcctggctctca

SEQ ID NO: 37032 - DNA, 409 bp, Macaca Mulatta
ggtggaggaggacttgccagactctgcctgcaggcgccggtatgaggtgtggaagaagagtaccaggatgcagctgaagaggttgcacaggccggccatcagcagcacagacgctggggacacatagcacagctgtccccacagccaagccccggggccacagatgggcagagccggacgctggcctatggtgacaccactacccttgaccacagagtgaccccagacagagcccactcccagttcttgacagccctgagggggtgtttgcagacccaggtcctgagagaggtcaccagcatggggtctgggatatgggtgtgccaacccacctctgatcttggccacacctgtcctagctcacctgtcctgttgcccagggactccctgcgtggggctcacctgtccc

SEQ ID NO: 37033 - DNA, 731 bp, Macaca Mulatta
  misc_feature (1)...(731): n = A,T,C or G
ggatctcttgatccataagtttaagaaatcaaacttgatgacatcacatttttaaatgagtgccaaagtaagttgtaagtcttttaagtagataacttatttggttgtaatattgaggaaacttttcaattgtcttgcaatatagannnnnnnnnnnnnnnnnnnngagacagggtcttcttctgttgtccaggatgaagtgcagtggaatgatcatagttcactgcagccnnnnnnnnnnnnnnnnnnnnnnnnnnnnnnnnnnnnnnnnnnnnnnnnnnnnnnnnnnnnnnngatgtaattacaccccaattttttttattttaattcttgtatagatgggatcttgctgtgttgctnnnnnnnnnnnnnnnnnnnnnncttcaagccatcctcccaccttcacctcccaaagtgctgagatttcaggcatgaggcaccatacctgacctagaagtttctttacttcacattttgtggtcaggttatctatctgagagcatctgagcaacataatcagaagatgctttgatcagtaacaacaaaacacagaaaccaagcaggtcactaaccatgtatgattcaactaannnnnannnaaannnnnannnnnnnnccatgttcggcccgccctcggcccttcgagaaagctttcttagacccattcgttttggcgccggcgggccccaggtaggttaaagtggaacatggggtcaatagacctgttttcc

SEQ ID NO: 37034 - DNA, 862 bp, Macaca Mulatta
gggagttaagagttgcaggggggagtagcgatggacactctggatcgagttgtaaagcccaaaacgaaaagagccaagagattccttgagaagagagaaccgaaactcaatgaaaatattaaaaatgccatgctgattaaagggggaaatgcaaatgcaacagtgacacaagtacttaaagatgtgtatgcactgaaaaaaaccatatggtgtcctgtataaaaagaaaaatattacaagaccttttgaggatcagacatcactggaattcttttcaaagaagtcagattgttctttattcatgtttggctcccataataagaagcggccaaataatctagtaataggtcgtatgtatgaccaccatgtgctggatatgattgaattaggtattgagaatttcgtctctctaaaagacattaagaacagtaaatgtcctgagggaacaaaacccatgctaatatttgctggtgatgattttgatgtaacggaagattatagaagactaaagagtcttcttattgatttccttcagaggccccacagtatcaaatatccgccctggctggattagaagtatgttctggactttcactggcactgaatggggaagatattactttttcgaagctataagtttgcttgttgaagaaaaatctggtctggagaaacaccaccgggattggaattgggaagagagtcgggacccctccattgggttgttgttcctggagggaggacacaccccggcactcggaattgacccttttttaatgttgccttaggaaaacgtgcccaaagcttctccggccccgggaaggaaaaaaggatattccccccagggacccctttggggtgcccg

SEQ ID NO: 37035 - DNA, 910 bp, Macaca Mulatta
  misc_feature (1)...(910): n = A,T,C or G
gaaggtagtaaaagcactcaaaaggagcaacaatggagtcatccatgcagcagttgatatgctttgtgcccttatgtgtgtaagtcatagttttcttaaggaaactggtttttcttaagttgactggtggttttgatttccacaatcccagattttcattgtaccaatcagttcttgtttctgtgttttttaaattgttctcatagttattcaaataaacctttgtttagcatattctatataccaggcaatgttctgtgagccagaaattcaaagatctataagacagaaattcttttcttccttcactttgttgacagtttggtaaagtaggcatatctgtacaaggtaaggtagtaggggccataggatcttgaaaagcagcactttttgtttggtgatgaggggaaatgaaagattctcacccactctttctggaagatgttacatttgatctgaatcttgaaggacaggcaggaattttctagctctggaaaggccttcctgggtggggaatagcatgtacaaaggcatgtttggaaagcaacaaataattaaatatggttgggttatgaggtatgnnnnnnnntaattaggagttgcggctagagatgtatgcagacagtaataaaaaaccttctatatcaggagggaggagctagatttgcatccttttgtaaggnnnnnnnnnnnnnnttttttagcaagagagcagtaacgtgatcaggtttgagtttttaaaaacccacactggtagtatgtggagaatagaagtaaaattagaggcaggttgaccaaattgtcatgtaagaaatgagttgctgagctagggtagtcacaggggctaaagaagtggtacatctgaaagctgttgcgcagtaaagatctaactcagtggcagctgtacaga

SEQ ID NO: 37036 - DNA, 762 bp, Macaca Mulatta
  misc_feature (1)...(762): n = A,T,C or G
gggtaattaccaaagctaaaaataaaaagatccggccgggcacagtgttnnnnnnnnnnnnnnnnnnnnnnnnnnnnnnnnnnnatgggcannnnnnnnnnnnnnnnnnnnnnnnnnnnnnnnccgccaaaatggtannnnnnnnnnnnnnnnnnnnnnnnnnnnnnnnnnnnnnnngtgatggcgcattnnnnnnnnnnnnnnannnnnnnnnnnnnnnnnnnnnnnnnnnnnnnnnntttggaggcnnnnnnnnnnnnnnnnnnnnnntgtgccattgcactccagtctgggtgatgagagcaaaactccgtannnnnnnnnnnnnnnnnnnnnnnnnnnnttttcttctactaacttgatcaataataaatgtatatttaaagaatgtcctaaaatttttgaaatatgctattagaaatcaaacaaagaaattccctggaagcattttttttgctccccttccatggtaaaaaaaactatgttctggaaacccttgtatgggaaaaggtttttgcctaaaaatccaggctttttggcgaaccaaagtccccttaaaagaaaaaacggggattccccaccggaaacccgaaagggaaattccctaaacccactttaaaaaaacccgtgtaaaattttcctatttggggctgttaagttttccaaaaggggaatttttaaaaaccccaaaaccccccgtnnnnnnnnnnnnnnnnnnnnnttaaaaatnnnnnnnnnnnnnnnnnnnactcccctttggga

SEQ ID NO: 37037 - DNA, 188 bp, Macaca Mulatta
cacattacagaatatctttgttgaaccttcttgagaattcagagaaactgctgagtgaccactgaacgaaagatctaatctttagagcgtgttccatccaccacatcagaacaatgtcgtatgtttttgtaaatgattcttctcagactaacgtgcccttgctacaagcctgtattgatggggacttt

SEQ ID NO: 37038 - DNA, 641 bp, Macaca Mulatta
ggggagagcccccacctctcccagtgaacagcccccgtggaaagaggatcacgagtgtggaaagcaggcagcacagagtggctctgatgagggcggcagctcctggagccccggccggcttgcccagagtcccgtgagacacctcttgaaggccccacaattccagaaaacatagctgaggccccttgaggatctgatgagccccttcctatgacaaatgagtcacctgacacctgaagtgacaaagcgactctacctgggttccgtctgcagcggccacctcctcttcctctggctccctcagcaagttttctacacagacatgaaggaagcaatattgtgtttctctaacacagaaataaagtattctgcaactcagatcttagacacaagtgcggtgaccaggcatagctgcatttgaagatactccagcagaaacgcatgcattttccagtggttgaggaggggagcgttgggggaatgtctgagcttccctctgccttatcacacactccctgttttggggctcggattgaaatggtgtggacgcccttaatatatgcacaccttcttctgcgatatgccttggtcctcgtcaactgaactctctacttatcttccgtgtcctcctctattctgtt

SEQ ID NO: 37039 - DNA, 522 bp, Macaca Mulatta
  misc_feature (1)...(522): n = A,T,C or G
cacacacacatctaaatacataaccttccttccacacctctagacagacactcagaggatcatgagtccaggcacacattcaaatacacacannnnnnnnnnnnnnnnnnnngagaaaataaaaactcaaatacagtttagccgggcttgnnnnnnnnnnnnnnnnnntgtgacactttggggggctgaggcgggaggattgtttgagcccaggacttccnnnnnnnnnnnnnnnnnnnngtgagtctccatctctactaaaagtaagaaaagtagccaggcgtactggcgcacannnnnnnnnnnnnnnnnnnnagaggttgaggcgggaggatcgnnnnnnnnnnnnnnnncnnnnnnnnnnnnnnnnnnnnnngcgccactgcacttctagcctgggggacaaggtnnnnnnnnnnnnnnnnnnnnnnnnnnnagtctgtccaacacacccatggacggacagctgagcactcacctcccagccattgctctccagcaccctatggctgatagcatccc

SEQ ID NO: 37040 - DNA, 863 bp, Macaca Mulatta
gggatacacatcaggaggtggccttgagaagctgagcggagaccagctggactttaatcagagaaaccaagagactgttaccatggcggggaagcccaagcttcactacttcaatggacggggcagaatggagcccatccggtggctcttggctgcagctggagtggagtttgaagagaaatttatagaatctgcagaagatttggaaaagttaagaaatgatgggagtttgatgttccagcaagtaccaatggttgagattgatgggatgaagctggtgcagaccagagccattctcaactacattgccagcaaatacaacctctacgggaaagacataaaggagagagccctaattgatatgtatacggaaggtatggcagatttgaatgaaatgatccttcttctgcccttatgtcgacctgaggaaaaagatgccaagattgccttgatcaaagagagaacaaaaaatcgctacttccctgccttcgaaaaagtgttacagagccatggacaagattaccttgttggcaacaagctgagccgggctgacattagcctggtggaactttctctactatgttggaagaagctttgactccgcgccctttttttccaagctttccccacttggtgaaagggcccctgaaaaacccagaattcggcaaacttgcgccccgcgggtgaaagaaagttttcttaaaggcctcgtgggggggccccaaggtataacacttcccccacaaaaggacaaaaaggttctttgaaaaaaaaccccacaaaaaaactttccccaaatttcttataaaaagccgcccccgggggggggcgccaaacaatattcggacaaaaaacgattttct

SEQ ID NO: 37041 - DNA, 87 bp, Macaca Mulatta
  misc_feature (1)...(87): n = A,T,C or G
tgtgcgagagatcaatactatgatagtggttattacaccggatacttcgagttctggggccagggcgcctggtcaccgtctncctcc

SEQ ID NO: 37042 - DNA, 170 bp, Macaca Mulatta
  misc_feature (1)...(170): n = A,T,C or G
gtagcctgtgtgcagtgaactctggcngagggaggtacaccccggcctcctgacagtgccagcatcctcagtcactgcatcacctgagtgcacaacagcttccagaacctggggcctcccatccctgagaccccagagctgacagggcctgggattgtggggacccagga

SEQ ID NO: 37043 - DNA, 507 bp, Macaca Mulatta
  misc_feature (1)...(507): n = A,T,C or G
tcacttgactgagagagtcccacaaaatcatgcaaatcaagaggtttaagtcttagtgttcactttaagaacacttgtgaaactgcccaggccatcaaggtatgcatatatgaaaagccacgaagtatctgaaagatgccactttacagaaacagtgcgtaccattntggtggagttggcaggtgtgcctaggccaagcagtggggctggacataaggtcggtggcccaaaaagagtgctgaatttttgctgcacatgcttaaaaatgcagagagtaatgctgaacttatgggtttcgatgtagattctctggtcattgagcgtatccacatgaataaagcacctaagatgcgctgctggacctacagagctcatggtcagattaactcatacatgagctctccctgccacactgagatgatcctcactgaaaaggaacaaaatgttcctaaaccagaagaggaggttgcccagaagaaaaagatatcccagaagaaactgaagaaa

SEQ ID NO: 37044 - DNA, 936 bp, Macaca Mulatta
  misc_feature (1)...(936): n = A,T,C or G
gagatcggccgaggcgatggtttagaaagctgcactgttgtggaactacaactgttagaaaactgaggtgctgtgttgactccttgagggcttttcaaaagtttgaaatctaaacctgaagtctcctgtgttctttgaactttttattaaaaataaaaaatcttggatatttttcctctggtattcacatagacattggaaaatggttgaaaataagttatagattttaatgtcaacaatatatatgagcaaaaagtacagaaaagtaatcagcaattgtttgctgcactgaataagaaatatacagaaggattttcttcattttcatcttcaaaaaaattttacatttcacatagtagaaaaatatttagcaatcctaaggtttcgnnnnnnnnnnnnnnnnnnctttttaaattctatgaaaaaaggataattattttaatatttgctaaattttgaattaaatatctaaataattaaacctaaatttaaatagtagttagatttattcttagaaggtaagggtatctatctgcttaataatctaagttaaaacatctttacatttatatttcatttttgtaaatgaaatccatcttgtttgcaaaacgtataaaattgaaatttttgctagtagattacaaaaattcatgatgttgtaaacttatgtgttgcggtagttttgtcatgataattcattcttaccctaaagattttcttaaaacttcacagattgaggcttacttatctgtgccttgtcagctttcacattattggcctctgctataataaaccgctctcatgctttcgaatcacaaaggctgcctagacgaatattaaacgccggcggattaacgtgcgcacacagagggtatatatagactccccaaaacacacacctttttgaaaacacatacaacttctccctcccaccca

SEQ ID NO: 37045 - DNA, 674 bp, Macaca Mulatta
  misc_feature (1)...(674): n = A,T,C or G
aacactttaaatagggagggcttctttaatctgttcattatcacttctgngaaaattcttagccatcattacttcaaatactgcctttattccatttccctcccttatttctggatctgattagacatatgttaaatgtttttactttggtctgacttcctttttctttcatgtttttcatctctttatatttgtgccatagtctgtataattttctttactgtcttccagtttgctattttctttcttccactatgtctatctcctattaaaccnnnnnnnnnnnnnnnnnnnngtctaccaaattttaaaatttcaatagttgtatcttttatttctgaaagttttatttggttctttctcaaatctgcttgatcaattttatagtatttttattaatattttcaatgcttttatttaacaattatatttagcaggctggctnnnnnnnnnnnnnnnnnnnnnnnnnnnntnnnnnnnnnnnnnnnnnnntgnnnnnnnnnnnnnagagatcgagaccatcctggctaacatggtggnnnnnnnnnnnnnnnnnnnnnnnnnncattggctgggtgtggtggcacgtnnnnnnnnnnnnnnnnnnnnnnnnnnnnnnnngcaggagaatctcttgaacctgggaggcggaggttgcggtgaactgagatcgt

SEQ ID NO: 37046 - DNA, 811 bp, Macaca Mulatta
  misc_feature (1)...(811): n = A,T,C or G
nnnnnnnnnnnnnnnnnnnnnnnnnnnnnnnnnnnnnnnnnnnnnnacgggcggatcacaaggtcaggagatcgagaccatcctcgccaacacgnnnnnnnnnnnnnnnnnnnnnnnnatgcaaaaaaactagccgggcgggttggcgggcnnnnnnnnnnnnnnncnnnnnnnnnnnnnnnnnaggagaatggcgtaaacctgggaaggcgnnnnnnnnnnnnnnnnnnnnnncggccaccgcaccnnnnnnnnnnnnnnnnnnnnnnnnnnnnnnnnnnnnnnnnnnnnnnnnnnnnnnnnnngtcctttacatttctacagatattctgcttgttaatttctacccctaaaaaacgtactgggattttgattgtgattataatcaaatatatagatcaatctgggaagactagatctctttgtaattttataatttataatttttaatcttcccatctaaaaacatgtaatatctttcccatgatttaggtcatctttaatgttttgtagttttctgtgaaaaagtcttgcatgtccttccgggaaatttattcctaggtatttgatgattctccttttttcctttgccttaaactttaaatcaagttaaattaattctttttgaaaacaaaagtcttggttcttggttgcccagcccagaaatgcgaaaggcatggggtttcaaaatcaatggcaagcctctgggcctcagggggttcaaagggaaatcctccctgagctaaacnnnnnnnnnnnnnnnnnnntgtccatggtagagggaacaccaaagatttagtgccggggcggt

SEQ ID NO: 37047 - DNA, 880 bp, Macaca Mulatta
accataattaggtaagacaagcttttgagtcagtgaaacattaaacgaatgcagcgacagaggcttacggtcttacatgaaatgcctcaaatcagtgcatttattctgaaagaaaacaggtgggtcctatgttggatttccctttgcatatttttattgctcttttaaaacccggtgtgaaaagaatgtctaaataagtccgttgtccccgatggtaggggcgtggtctggtttggagatcaagttacccttcccttttgtctgtcctgcacacgcacatacagacacttctgttgctgaaggaattgtgctccaagaggaacctgtgtgtgatcataaaacttaacgagtaacaaacacaggaccagaatctaagagacttgagttctagattagtgttttggggtactccatactgttaccacagctgggtctttggtggtttgcttgcatgtgttttaaaagtacctttccccacccctcttcagcaactgtttttcttttttctttctaaagatgacatcttctcctctggtatccaggctaagacaaccaaaccaaaaagtcgatctgcacaagccgcacctgaaccaagatcggaacacgaggtgtccaacatctttgatgatcccctgaatgcctttggaggccagtagagcatacagggtatccacatgttatcctgcagctacactgttgagttagtgatgatgttgtatatgcttatggtcttaactggggtacaaaaagcaagtattagaagagctagctcatcttttacccatgtacttagtatttttctgcactggtttaatcacgctttatactacaaaaccaaaataagtatttcacagggggttgggtggttttgtttttaaaa

SEQ ID NO: 37048 - DNA, 569 bp, Macaca Mulatta
ggcagagccgcactatgatttatgcaaaaccattactccggccgccgcatcattctcccttccccttttcagcaatcatgtatcccattagcctgtttgattgccgctgctcgcaaaggggcaccttcgctgaaccgtcttcaatggcctctggatctctcccccgagggaagccggctaatttggaatgtggtcgtgtgtatgaatccgacacagccccagtcacaatcgcgtgtccttttctgtagctgctgtttatgatcactttgccttgcctctctgggagccgtaattcacaacacactggagagagcctgggtgttcttttctccatgaacccgggacaggatgtacacaaatgtgctagccccttcttggtgaccaggctaattcctcagctggctggtggctgctgcctctcattagagggattccctaagcactatttgcttgacacattttcaaggtttttaaaagcagaagcctttgctagttttcccaagttggcctaagggtccgctgtgaactgcggcagaaattggggaaatttaataaatgttgatcaatga

SEQ ID NO: 37049 - DNA, 498 bp, Macaca Mulatta
gaaggtatcagcagaaagccagcactggcagggactctttggcacaatgcccagcatgcatgctgtgccaggggctgacaagggtgctgtccttggcttccccgttttggggtggtcacttgcctctactccagctccagaagcagaaactaactgagatgatgggtggaggaaagagccagggttcaggctgggaatcttgaggcttcttgccagttctcagattctgtgatgctcacagggtgagctccgggggcacaggacacatggtagatgaatcttagtcattctggtatccagttgggagccaagcacagaacacacatcagtgtttatcaaatgactgaggaaatgaatgaatgaatgtctccatctcaaccctcagcctggtccctccttcctttttccctgtagttggtacagatggcattgtcccagtctgttcccttctcggccacagagcttctcctggcctctgccatcttctgcctggtattc

SEQ ID NO: 37050 - DNA, 776 bp, Macaca Mulatta
  misc_feature (1)...(776): n = A,T,C or G
ggagccagctgttgcggtgacccgcaggaatagaggaagttacccatcggcagcatttgtacagagcagggagattctggttttagtccattggtagcattgtgtgtatgaggagattcagcgccacagacagccagctgcagggctcgagatccatggcttctttccatcgcaaaacgggtagaaacacattcactgcttcagggtctaatctgtgtgtctccttatgactccatttctgtaggatactctgtaactttgatatatgctgtattgtctttaaaagatttagatttttgttcagcaagctagccatacaaccattgtatctcttcctcatcagtatggtgttagagcacagctcagttattaggctttcattgtctactctttcaatacatgtacatctttactgtttgaaaggtgttacagctgtcgaagaatccttatggaccgtgaagacaatttcttgtgaagttgaatgcaagtgtactgtcattcatagtgtttatagcacaataccaggaatcttcacttttgctaccttgatatagcattgggctatcatgttacaacattgaaatacattgatttagtaaaaaaataactttgannnnnnnnnnnnnnnnnnnnnnnnnnggtaattacaaggtttttccccaaaggggacttcctcttatcaatcaaccctatacaatcataataaataaggaaaaataatttaaaggaagtagggcctttccaatacccacacaaaattaaaataaagaaaaaaa

SEQ ID NO: 37051 - DNA, 679 bp, Macaca Mulatta
agcaagcataagggctcaagtcttatctagttgaagctaacttgggtctttgagaatagtacatcgcgagaattaaacactttcttagtccttattgttaaacaagttgtttttggaattattgtcttatttgtctgaattaagtgtgctgcaggacttataggatctgatggatgatttgcctaaaagttagtccaggtcagccttagggcatgtaagtgcttggtccagccactttctgaaagttgactgaaatatgttgcacaccagggtagaggaggacaagtttactagatgtcatttttaacctgcttgtcttcatctctgactgtagaaatgtttattcattgtaagtttgccataaatagagaacagagtttatttttttgatcatttaatttctaggagctattgaaatttcactgctacctgcttttaaataagcaccaacaaacatttattaaaagggctttaaggtataggccaagatttattcaattgctaatggtatgttttctgtaaatgaaagcaaaaatatgttcaagtatataatattaaatattaacattcagaaactgttggagaaatatatatggctttcttataccagactataccccagacatgataacaagactgttgagcaacatcctgtgctactttaagtttgagccttcta

SEQ ID NO: 37052 - DNA, 115 bp, Macaca Mulatta
ccacataccatagcttgttgggtggttgtgaaggttgaatattataacacatgtgaagcattaaccatggggtgccctgcagtgcaggataaatgctgttatttagttaagttac

SEQ ID NO: 37053 - DNA, 799 bp, Macaca Mulatta
ccgtcattccctgtccttctcctgtctgtggtgacagcttcctgctccgaaacaaaagcctgtgaggatgcccagaagacctgctctgtgattacctgtggcatccccgtcaccaatggcaccccaggcagagatgggcgagatggacccaagggggaaaagggagagccaggtcaagggctcagaggtttgcagggccctcctgggaagtcggggcccccaggaaacacaggggctcctggaattccaggaccaaggggacaaaaaggagatcatggggacaattcagttgctgaggctaagctggccaacttagagagacagctacagagcctgagatcagaactggaccacatgaagaagctgcaagccttctccttggggaaaatgtctgggaagaagctcttcgtgaccaacggtgagcggatgcctttctccgaagtgaaggctctgtgtgctgggctccaggccacggtggctgcccccaagaatgccgaggagaataaggccatccaggatgtggccaaagacactgccttcctgggcatcacagatgaggcaaccgaaggccagttcatgtacgtgacgggcgggaggctgacctacagcaactggaagaaggatgagccaaatgaccacggttcaggggaggactgtgtgattctcctgagcaatgggctctggaatgacatctcctgcacggcctcctacatcgccgtctgtgagtttcctgcctgaagaggcacgttcctcaacccccttcttggcttccgattgctctctctgctgctttggaaga

SEQ ID NO: 37054 - DNA, 1307 bp, Macaca Mulatta
ggatttactttaataacattccagctttcctctaaatcaggctatatttctatcacatacattgagagaggttctatcatggatagcaatgagaattctgagtctctagggagaagacagagcctttcaaagcccctcaacaagcttaagctaaaattgactcaatgtttatttggtgaattctaggcataaacaactaagttaaccaaatattgtagggtttattgacaaaacaagtagccaagtcttcttccaggcacccagtgttggtggcacacacacattttcatggtcaatgaactgcagaacctggggatagatatgtttatttttactgcatggtatattttagctcctatacactacccaagtttttagtgcaaagggttattgagtaagcttccttccctgactctgaagctgacatttgttttgcatctggaaagtctttcagtctaaaactttatccaattgaaactgtcaatccttagcatgctgtagtaataattaaaaatttttagaggtatccatttgcatgtgaggcaagtggacagagaaaagtaacattattagaccagtaaggaaaaaatatggaacacattttctaccttgtaatcacaatacagcatccccttcacccagtacctcttaccaattagattcaaaactatgggtcaataatttttaaatggcaaatcttgaaacagcacaacacaaaaatgctgcatttcacagcatacataatatgacatttatatgcatgtgtatatgtatttgcatataatatctagggccgtgggaggagtgggagtctaatagagtatctggaactaaggcacaaaagaggcgagacattgagtacagaccttgcaatgtgacctgagcaggtaagaggtttggatgtaggagacaaagtctacatcactaaatgccttgactaccctgcttaggaactcatgttttatagagaaggcagcaggaaagtctttacatagtggaattgaaggagtcaatggctgtttatacaaagccctctaacagtgaagagagaagagggggccttggggtagtgaccacgctaggagtacgcgaatttatgtcgagaaggttcatggccgtaatctaagtgagaaaaaagcaaggacatatgctttaaaaaggcttcccttttctaccttggtaaatccaatacaaggttccttttggaaagactaaaagtttttcatgcggattttttccggaattgggtcaccagccatgaaaaaaaaataccccaagccttatcctgaacctccatgtaccttcaa

SEQ ID NO: 37055 - DNA, 722 bp, Macaca Mulatta
  misc_feature (1)...(722): n = A,T,C or G
ggcagggtgttgcaggccacccccagaagctctgacccaagtttttgttttagaaagacagctgtgatggccacatagagtggaaaggcctggagaagggaggccaaaagttgtaagattattacacctctcctggtgagaagccacgaaggcagtnnnnnnnnnnnnnnnnnnagtgatgacaaagaggcctaaacatccagctgcaaggctacatagttactggtagcaaaaacctcgtgtgagcttcctttgctgtacctcttgaggcctcagaggctcttataaagtgccagctgggtgctagggttctttagatcccactgtgtagcatagaaccagggcctggaactgagtcggtgctcaacaaaggtttgctgaatgaaagtgtgaaagagttagtaaatttattcaaggccccccagttaaaattttcgacctatagttagggattatttttccaaaattatcgaagttcaagagcaacaaatgtatctgtatcctcaaaagttaagaactttctgtcactcagcaaggtgtgaattgaggcccaagttttctgaagagactgccaaactgttgtgacttaaccctttattcactctaagcaaacttttgaaaaataatagaggctatttcaaaaagggcaaatccctggcctggcccagcaatgggtggtctcaataccttgttaggtcctcaagcaacttttggggaaggcc

SEQ ID NO: 37056 - DNA, 811 bp, Macaca Mulatta
gggaattctgctacttctagtcatttgcgaaatctgaggtttttttcattaaaataaaactttaaaaaatcactgccttcctacttttttgcctttctgcagactggctcctctgtacgcattctttgaaacatctggccattcctgtgttatccctgattaaatgaaggcttccagcatttcatcgtttaatacagtgtttcccctttcttttctttcttttctcttttccctgtctttttgtagctgtccactgttgggctaaggaagttcccttcttttctagtttgcgaagagattttttcatgagtggatactgaattttaacttctgtcttttttgtaggtatcgaggtgatcactttgattttacttataatctgtttttgagataaattaccttttaagtatcaaacaaaacttgcattctataataaacatagcttcatgatatattatcttttttattcatcactggattcagtttactaacatttgttttaggtttcttgaatcagaaattcatgaattaaattgaactggaattatccctgtttaggtttgggacccggactttttgagctttgaaaatgaattggaaggccaggcgtgggtggcttccaccgggaaattccctccttttttgggagggcaaaataaccttgaggttcaggaattccaaaacacgcctggttcaacatggggaaaaacccatcctcttattaaaaggggccaaaaaaacttaaaccacgggggtttttggcccccccaccctagttaataccacacctgccttgtggaaggcctaagag

SEQ ID NO: 37057 - DNA, 485 bp, Macaca Mulatta
  misc_feature (1)...(485): n = A,T,C or G
ntgaagcggcggccagagaagagacaagggtatgagcatcggatctccatgcctttcttggacatccagaaaaggttcggccttaacatagatcgatggtggacaatccagagtgctgaacagccctacaagcttgctactcgatgccatgcttttgaaaaagaatggatagaatgtgcacatggaattggtgctatccgggcagagaaagagtgcaagatagaatatgatgattttatagagtgtttgcttcggcagaaaacgatgagacgtgtgaatgccatcaggaggcagcgggataagctgataaaggaagggaagtacacccctccacctcaccacattggcaagggggagcctcggccctgagcagagcagctggtgatgtctggaggctgattttcccgttctctgttctccactggaaaggttgtttacggaaaacctccttgtcaaagtgtataaaaataaaggattgctccatc

SEQ ID NO: 37058 - DNA, 998 bp, Macaca Mulatta
  misc_feature (1)...(998): n = A,T,C or G
cactctacatgaactttaggctaggaaaggatgtctctgggggtaatgcaaggacagctgggtgtggacgctctccctgtggctccattttttcccaggagacacacaagctgtcttgggtgaaaacaagctcagagacttgatgaacgtggaccattacctcactgtcagacactacagtagctgaggagttggaaaccttacnnnnnnnnnnnnnnnnnnnnnnnnnnnnnnnnnnnnnnnnnnnnnnnnnnnnnnnnnnnnnnnnnnnnnnnnnnnnnnnnnnnnnnnnnnnnnnnnnnnnnnnnnnnnnnnnnnnnnnnnnnnnnnnnnnnnnnnnnnnnnnnnngatgttggctgacccccttcctcccactctcaatgctgtgactgagaacatttaagagagctttgcctgtaagtaatttgtcttaaagccctctgggctctcttctctgagggagggaacttcgagtcctcacaagggaccttgtctcattctgcctctgttatgcaatgggttctacagcaccctttcccgcaggttagaaatatttccctaagtcacagagaaatgggtcttagcctggggcctggggaaagttgggagtcctggttcatgaacttgatccctgctcaggtgttttctgaggggcccttgaggcccaatcttttctcaaggcaggtgtgaggcaccttagaagggagaactgtaacacttcctctttcgcacctgcctctcatctcaatccttgactgatgaatttgaagttctactagaaccatgaaaacttgttcctttcatgcatctccaaggagcttgctggctctgcagccacccttgggccctcacaccagcctgcaatgagtcagatgtccttcgcagagtcagggcctttctgaagttttctggagagttgttgggactcatctagtgctccacaacgtggacttgcctccttgtgtgtttaaaatgagcctctgggagctctgcttag

SEQ ID NO: 37059 - DNA, 758 bp, Macaca Mulatta
  misc_feature (1)...(758): n = A,T,C or G
gggtcccaatcctcctgggttggttgtgagtgctgagatactatccattggccgggcannnnnnnnnnnnnnnnnnnnnnnnnnntnnnnnnnnnnnnntgcaggtagatcaacttgaggcnnnnnnnnnnnnnnnnnnnnnnnnnnnnnnncaaaatcctgcttctactnnnnnnnnnnnnnnnnnnnnnnnngtagtgttgcacnnnnnnnnnnnnnnnnnnttgagacacaagaatccctaggagacagaggttacagtgagcagtgatcatnnnnnnnnnnnnnnntnnnnnnnnnnnnntacagtttnnnnnnnnnnnnnnnnnnnnnattgtccatgtaaagtcctaatgagaagtaagcactcagtgaatgttaaataaaggaaggctgaaagttttaatcttaaatgtcaccccattttcttttgtaagaaatgaaaaataaatagattgtgccgatatggcttttctgtggtaaatgtacttcaaaggagatttttttaatatagtggctatagaaccctgaaaagaagtggtccctgttatgtgaaccacacagaactgggaattaatagcagttgtatgaagtaactttactccctgacttgggccgggcttaaaactttgcgccttcctttcccagggcaaaaaataaaccaggccttgnnnnnnnnnnnnnnnnnnngtgaaaaaaccacaccccacaccattaataatgagaagacttttttttgtgggcccccccaccccccc

SEQ ID NO: 37060 - DNA, 664 bp, Macaca Mulatta
  misc_feature (1)...(664): n = A,T,C or G
gnnnnnnnnnnnnnnnnnnnnnnnnnngcccatcacggccgggggttgttgtccggtcgggggaggcggaggtcgctagctcgctgggctcgctgactcgctggggcgctctgtggcggtcggcggcaggtcggtcgcgagagcgggctctgtgcaggggggcgaggctatgtcgcggtggcagcccggatgggccggcagggccaggagtaacgggacgtcgccgcggagcttcttcccccggatacagtgcggcccgagcggaggccgcggcgccgccctccgatcttgaggagcccgcgctgcgcggagcccgcccccgcctgcgcaccggcaccaacgcggagcgacccaccccagccagacccgacccggcgaggccagatctaacccagccaggcaggcaacactagcttctctggagcacgaagcccccttctcaaggacatgaagctgttggagaactcgagctttgaagccatcaactcacagctgactgtggagaccggagacgcccacatcatcggcaggattgagagctactcatgctagatggcaggagatgacaacacatgttcaagcagtctgccaggaggcaccccactgctgaggcatctctcacccagactcaggctcaccccgtgactcacaaagcaagcggcag

SEQ ID NO: 37061 - DNA, 752 bp, Macaca Mulatta
  misc_feature (1)...(752): n = A,T,C or G
ggagaactggggtcccacagcccagcttcccacagcgtacagtacgtggtgtaaaggctttgtagcttcctgccagacatcttgctggcatgtagtaaatacttagtagctattcagatgattcatctttgccatgaagagaagtcgggcataaccaaaaatatcaaaacaagactgaagatttttctttttatcttatcccagtcataaaaaaaccctgaaatccagtgtgaatggagcctattgttcgacctttagtatcttggtaatgctaggacccacttgagttcagatctttaggaggtttatgttgttttgtattcttttagcaccatgtggttcgcttcctttgagaacctgatgcttttgagctactgatttttcattcttgtttccaaatcaccatccagttaaacacagtgtgtgtatttttttctttttccaaacttaaaaatgatagtactttaaaaatgtattattagttcagttgatgattcatgccttttagacttttgaaattatatatgactaaagattataaatttaaaatacaccaaagatcatangaaaatataaaggcagtcaagcagttcagaactactattggaattcagaatttaaaaaaataattatnnnnnnnnnnnnnnnnnnnnnnaaagaggggtctcactatgttgcccaggttggtctttgactcttggccctcaggtgatcctctgacctcagccttccaaagttataggccagggacc

SEQ ID NO: 37062 - DNA, 145 bp, Macaca Mulatta
ggttggacagcacttcatgaagctagtgtaggaggattttatcggacagcaagtgaactattaaaaggtggagcagatgtaaatatcaaaggaatgtaccagattactcccctacatgatgcagtggtgaatggacattataagg

SEQ ID NO: 37063 - DNA, 1104 bp, Macaca Mulatta
  misc_feature (1)...(1104): n = A,T,C or G
gggatcttcatgtccagtgagcagtgttgcgtttttccttgtagcatttggaaatgatttactggaattacaaaacctatttttcctttaaatttcagctttggctctggctgctttttagaataatgcaagataaaaatcacacctgagggctaaaaacggagagggaatgggagacttgatatttaagcagctttgaatggnnnnnnnnnnnnnnannnnnnnnnnnnngcacttgcctatgatactgtctctccagtgaaatgattactcctccattactctattgatacaatattgtgcatgctagtgttgtatttctatacagtagcttgaaattgattaacttatactgtaggtgttatgtattcctatgacaaaaaaattaagtcttcaaattttttnnnnnnnnnnnnnnnnnnnnnnnnnnnnnnnnnnnnnnnnnnnnnnnggggtaaagtttgctctaccaaatagtgattgtaacaaattgatctgttttggatgttgctatagtgacatgcagttatatannnnnnnnnnnnnnnnnnnnnnngcaaaagaaacaccagtgttagcttaatcttaatgtctggtgtttgtcatggtgaaattataactattacagtgtcggaggacaacgaatatgttctctgaatgagcctttgtgctttttgtcatgttatgccggtgaactattttttagggtccaatcagtgaattattttttccagctccgtggtttctcctaggggaattatttcccacacggaccatctttaccagttttcctccgtgatggaatatcatgaaagtggattcattatgtaacctgtccgtacatttgagccaaataaacttatcaaatcttgaatagtaattttcttcttttattaataatccttagcataattacttctactctttcctggatactctcttatactccctggatatccatatcctaactatataaagcatttttttcttgtgtctgccgccacctcgggannnnnnnnnnnnnnnnnnctttacaacaattattttttgggcccccccgggccccacaagggaaaatatataaattggttctttttcgtgttt

SEQ ID NO: 37064 - DNA, 788 bp, Macaca Mulatta
ggcggaagaaagagcaggaatttggcctggagttaggacatttattgtctgttagattttagacaagtcagctcttctaaattggcttctcatctgtgaaatggggataatagatctgcctaattaggttgatttgagataacggatgtaaaacacctaataaaataagcatccagcaaataactattgttcactctctgaatacagacttctggtcatgtcgttgtgtcacactcctgatagcttctagaacatcaaggttttaggggagagaggataaaatgaacattaagagtagcagaagactactttccttaatatttgagtgccagctatatgccagacagttctagttgctggcagtcagcagtaaacaaaaactttatctgatgcagcacacacattccaggtgggggaacaagtgaaatatatggaatattagtgataagtgcagagggaaaaaaaatagagcagggaagggggatggtttgatgtttttcaggttaaagtgacacaaattaaatgcaaaaaattaataaatgtataaaggtgcataatggcaaaactaatcatgtcccatcataccccttcattcctacctccctgataggtattttttctaattatacaaatatgtatacctaattattacctatgggggttttattctacatgttacactggtaccttgcttttttctaatattaatgtggttcaatgagcaccctttacaaattctaataaaaggtaatctccagaatttcctcctaagttacccggcaatacct

SEQ ID NO: 37065 - DNA, 514 bp, Macaca Mulatta
  misc_feature (1)...(514): n = A,T,C or G
atgctggtcccctgacagacaaccccctaactggcccagatgtgcagcccgccaccagcttagggcctcaggtgctctggaagaagactcagtctgctgtgnnnnnnnnnnnnnnnnnnnnncagtggtgacagaagacaggggtgcagccttgtggaggccccagggtagcatgccctggactgggactctggcttctcggaggtgtcaggcagcacatggcgagaggaagaactacctgttccccagcgcccagcaccctcagcacagccccttcgtaggcagcgcctctcagtcagtggcctccccatgcccagcagggcccctgtagccagtgtaccacctgtccaccgtccacggcccaagtccaccccagacgcctgcctggagcactggcagggactggaagcagaggactggacagcagccctactgaataggggtcgcagtcgccagcccctggtactgggggacaaattgtttgctgacttggtgcacaactggatggagctgc

SEQ ID NO: 37066 - DNA, 421 bp, Macaca Mulatta
tgtcttccaggtcctgagacagtacagcatcaacctctctgaggaagagttcttccatattctggagtattacgataagacgctgtcttcaaacatttcctacaatgacttcctccgggcgttcctccagtagacacccctgccatgcacgcagcgggacgacagccacagggcctgtgtcaagactaataaaatcctataatttggggatttcatgaattttcaaaaaagcaaagcccaagcccagcccgcctctctctgggtcgggggtaggcacggctgccctgggttctgacataggatacttgctctccaggcaccaggtgctaccactatgtcttgggcactctcacttgttagtctgaacaaatagtctttgcaagaatgattcttgacactataaaagaattactgatgctaa

SEQ ID NO: 37067 - DNA, 3085 bp, Macaca Mulatta
  misc_feature (1)...(3085): n = A,T,C or G
ttgcagcgggtgcctcccaggtcaaatggaataaaaaaaatgctatctgactggccaccagccatgacggtgatgtgcggatatgggatannnnnnnnnnnnnnnnnnnnnnnnnnnnnnnnnnnnnnnnnnnnnnnnnnnnnnnnnnnnnnnnnnnnnnnnnnnnnnnnnnnnnnnnnnnnnnnnnnnnnnnnnnnnnnnnnnnnnnnnnnnnnnnnnnnnnnnnnnnnnnnnnnnnnnnnnnnnnnnnnnnnnnnnnnnnnnnnnnnnnnnnnnnnnnnnnnnnnnnnnnnnnnnnnnnnnnnnnnnnnnnnnnnnnnnnnnnnnnnnnnnnnnnnnnnnnnnnnnnnnnnnnnnnnnnnnnnnnnnnnnnnnnnnnnnnnnnnnnnnnnnnnnnnnnnnnnnnnnnnnnnnnnnnnnnnnnnnnnnnnnnnnnnnnnnnnnnnnnnnnnnnnnnnnnnnnnnnnnnnnnnnnnnnnnnnnnnnnnnnnnnnnnnnnnnnnnnnnnnnnnnnnnnnnnnnnnnnnnnnnnnnnnnnnnnnnnnnnnnnnnnnnnnnnnnnnnnnnnnnnnnnnnnnnnnnnnnnnnnnnnnnnnnnnnnnnnnnnnnnnnnnnnnnnnnnnnnnnnnnnnnnnnnnnnnnnnnnnnnnnnnnnnnnnnnnnnnnnnnnnnnnnnnnnnnnnnnnnnnnnnnnnnnnnnnnnnnnnnnnnnnnnnnnnnnnnnnnnnnnnnnnnnnnnnnnnnnnnnnnnnnnnnnnnnnnnnnnnnnnnnnnnnnnnnnnnnnnnnnnnnnnnnnnnnnnnnnnnnnnnnnnnnnnnnnnnnnnnnnnnnnnnnnnnnnnnnnnnnnnnnnnnnnnnnnnnnnnnnnnnnnnnnnnnnnnnnnnnnnnnnnnnnnnnnnnnnnnnnnnnnnnnnnnnnnnnnnnnnnnnnnnnnnnnnnnnnnnnnnnnnnnnnnnnnnnnnnnnnnnnnnnnnnnnnnnnnnnnnnnnnnnnnnnnnnnnnnnnnnnnnnnnnnnnnnnnnnnnnnnnnnnnnnnnnnnnnnnnnnnnnnnnnnnnnnnnnnnnnnnnnnnnnnnnnnnnnnnnnnnnnnnnnnnnnnnnnnnnnnnnnnnnnnnnnnnnnnnnnnnnnnnnnnnnnnnnnnnnnnnnnnnnnnnnnnnnnnnnnnnnnnnnnnnnnnnnnnnnnnnnnnnnnnnnnnnnnnnnnnnnnnnnnnnnnnnnnnnnnnnnnnnnnnnnnnnnnnnnnnnnnnnnnnnnnnnnnnnnnnngatctctctcagccttgtccgcttatcacactggcttgatcgcgcctatgaagatccgcacagaggccccggggaaccttcgtttatacagtgggagccccactcgcagcgagaaagagcaggtctccatcagctccttctactacaaggagcggnnnnnnnnnnnnnnnnnnnnnnnnnnnnnnnnnnnnnnnnnnnnnnnnnnnnnnnnnnnnnnnnnnnnnnnnnnnnnnnnnnnnnnnnnnnnnnnnnnnnnnnnnnnnnnnnnnnnnnnnnnnnnnnnnnnnnnnnnnnnnnnnnnnnnnnnnnnnnnnnnnnnnnnnnnnnnnnnnnnnnnnnnnnnnnnnnnnnnnnnnnnnnnnnnnnnnnnnnnnnnnnnnnnnnnnnnnnnnnnnnnnnnnnnnnnnnnnnnnnnnnnnnnnnnnnnnnnnnnnnnnnnnnnnnnnnnnnnnnnnnnnnnnnnnnnnnnnnnnnnnnnnnnnnnnnnnnnnnnnnnnnnnnnnnnnnnnnnnnnnnnnnnnnnnnnnnnnnnnnnnnnnnnnnnnnnnnnnnnnnnnnnnnnnnnnnnnnnnnnnnnnnnnnnnnnnnnnnnnnnnnnnnnnnnnnnnnnnnnnnnnnnnnnnnnnnnnnnnnnnnnnnnnnnnnnnnnnnnnnnnnnnnnnnnnnnnnnnnnnnnnnnnnnnnnnnnnnnnnnnnnnnnnnnnnnnnnnnnnnnnnnnnnnnnnnnnnnnnnnnnnnnnnnnnnnnnnnnnnnnnnnnnnnnnnnnnnnnnnnnnnnnnnnnnnnnnnnnnnnnnnnnnnnnnnnnnnnnnnnnnnnnnnnnnnnnnnnnnnnnnnnnnnnnnnnnnnnnnnnnnnnnnnnnnnnnnnnnnnnnnnnnnnnnnnnnnnnnnnnnnnnnnnnnnnnnnnnnnnnnnnnnnnnnnnnnnnnnnnnnnnnnnnnnnnnnnnnnnnnnnnnnnnnnnnnnnnnnnnnnnnnnnnnnnnnnnnnnnnnnnnnnnnnnnnnnnnnnnnnnnnnnnnnnnnnnnnnnnnnnnnnnnnnnnnnnnnnnnnnnnnnnnnnnnnnnnnnnnnnnnnnnnnnnnnnnnnnnnnnnnnnnnnnnnnnnnnnnnnnnnnnnnnnnnnnnnnnnnnnnnnnnnnnnnnnnnnnnnnnnnnnnnnnnnnnnnnnnnnnnnnnnnnnnnnnnnnnnnnnnnnnnnnnnnnnnnnnnnnnnnnnnnnnnnnnnnnnnnnnnnnnnnnnnnnnnnnnnnnnnnnnnnnnnnnnnnnnnnnnnnnnnnnnnnnnnnnnnnnnnnnnnnnnnnnnnnnnnnnnnnnnnnnnnnnnnnnnnnnnnnnnnnnnnnnnnnnnnnnnnnnnnnnnnnnnnnnnnnnnnnnnnnnnnnnnnnnnnnnnnnnnnnnnnnnnnnnnnnnnnnnnnnnnnnnnnnnnnnnnnnnnnnnnnnnnnnnnnnnnnnnnnnnnnnnnnnnnnnnnnnnnnnnnnnnnnnnnnnnnnnnnnnnnnnnnnnnnnnnnnnnnnnnnnnnnnnnnnnnnnnnnnnnnnnnnnnnnnnnnnnnnnnnnnnnnnnnnnnnnnnnnnnnnnnnnnnnnnnnnnnnnnnnnnnnnnnnnnnnnnnnnnnnnnnnnnnnnnnnnnnnnnnnnnnnnnnnnnnnnnnnnnnnnnnnnnnnnnnnnnnnnnnnnnnnnnnnatggacagtggccttctaaaatatgacacttaaattgtaaatatgcactgcacttaaggattcttaagatgtatttttttgtttgttatttctcctccagctgctatcccttggctaataaaattc

SEQ ID NO: 37068 - DNA, 774 bp, Macaca Mulatta
  misc_feature (1)...(774): n = A,T,C or G
ggggcccttcatttcagtcaacatttattggatattggcattaggtattttcacaaacattaactcatagaattttcacaactctatgaaatagtagatgaggaaagtataattcagaggtgttaattaatttgcctaagatcctataatgtaacaaaaatgattaaagcaaactctctgactcaggctctgagctttagcattatgccatttggctctctgctgataaacctgattagtctgacgttggctgtcctatcttattataaaaatgcattggggtactttgccctgtgcagttggccaaaagtattgtgtaagttgaaattttgagttgattggtataatctgtgccaaccttaagcatacttaattaatggaatcacttgctaaaggttctcctttgtaaagttaataaccctatttcagtttcatgtaaagttatatcttcacatattggatttgatgacaaaatcacttgagtatatggctaaattacatgactatatgtattaatacttataaacatgtaggcaatggaatcacattctaaaagtatcacagatttgatatttataaacttgtannnnnnnnnnnnnnnnnnnnnnnataattataaattatttataaacttgagtcctctttgtggtcctcggaatgtccagtaatttttcctcatcataatgccttcatctatatagtgattttccttgtcaattctggaaaacctttctcagatttgtttttttataagcaaattttcctccttcttac

SEQ ID NO: 37069 - DNA, 634 bp, Macaca Mulatta
  misc_feature (1)...(634): n = A,T,C or G
ttggctctctttcataatttctatatctttactcatattctttatttagtgaaataggctcatactttaattctgtagacacagtttcctttagttatatgaacatatttatagaagccgatttaaagtacttgtctaggccagacgtcgtgctgcgnnnnnnnnnnnnnnnnnnnnnnnnnnnnannnnnnnnnnnnnnnnnnnnnnnnnnnnnnnagagannnnnnnnnnnnnnnnnngagnnnnnnnnnnnnnnnnnnnaccnnnnnnnnnnnnnnnnnnnnnnnnctaagataggtaggtaggtaggtaggtaggtaggtagatnnnnnnnnnnnnnnnnnnnnnnnnnnnnnnnnnnnnnnnnnnnnnnnnnnnnnnnnnnnnatagactagatagataggacttatctagtaagttcatgaacatcagggcctattcaggggaagttcctattgatggccttttttcctatgtctgaaccaaggaaataatgtactctttctttgtggtctcatgtatatctattgtttttgaagactggacactttacgtgctgagcaactctggaaatcagatgtgctctccacgagtttatttttgttttgttgctgttaccatttgtttagtgt

SEQ ID NO: 37070 - DNA, 109 bp, Macaca Mulatta
aggctgctgcagtacacgttcgtgggggacatatttatggttcctgatgatcctctgggaagaagtggacctcgattagaggagtttcttcagaaggaagtctgtctta

SEQ ID NO: 37071 - DNA, 744 bp, Macaca Mulatta
aggacgggggggaagtgctcgctgcagtttctcggagccagagcgcagccccggcggccgcccctgccccgccgtcctccttcccgcggccgtgagggagaccgcggctcggccgtagcggagctgcgagttacagaatgtctgaaggggacagtgtgggagagtccgtccatgggaaaccttcggtggtgtacagatttttcacaagacttggacagatttatcagtcctggctagacaagtccacaccctacacggccgtgcgatgggtcgtgacactgggcctgagctttgtctacatgattcgagtttacctgctgcagggttggtacattgtgacctatgccttggggatctaccatctaaatcttttcatagcttttctttctcccaaagtggatccttccttaatggaagactcagatgacggtccttcgctacccaccaaacagaacgaggaattccgccccttcattcgaaggcttccagagtttaaattttggcacgcggctaccaagggcatccttgtggctatggtctgtactttcttcgacgctttcaacgtcccggtgttctggccgatcctggtgatgtacttcatcatgctcttctgtatcacaatgaagaggcaaatcaagcacatgattaagtaccggtacatcccgttcacacatgggaagaggaggtaagaggcaagaggacgcggcaagctttgcagctagaagcggactaagctgctcacgt

SEQ ID NO: 37072 - DNA, 819 bp, Macaca Mulatta
  misc_feature (1)...(819): n = A,T,C or G
nnnnnnnnnnnnnnnnnnnnnnnnnnnnnnnnnnnnnnnnnnnnnnnnnnnnnnnnnnnnnnnnnnnnnnnnnnnnnnnnnnnnnnnnnnnnnnnnnacnnnnnnnnnnnnnnnnnnnnnagacacagcgnnnnnnnnnnnnnnnnnnnnnnnnnnnnnnnnnnngtgatagaggctcttggttgttccttaatatccaaatatccactctttccttcttccatgataataagccttgacttttaggagggcacgtactcattcaatacaaagaccacattctcagcctcttttgagggcagaggtgactctatcattactttctggacaatagtatgtaatcataaacatggggcagtgctaaggtttggatgtttgtgaccttccaaacttcatgttgaaatttagttcccaatgcaccagtactaagaggcaggaccattaggaggtgatcagaccgggagggttcccccctcgcggatgggattagtgccctccttaaagggcttgagggaaatgattggccccttttccaccttgcaccaaggtaaggacccccgcaccaccggcggcctggcgttggccttggcttgaaggaagagaaagggaaagccgccgaaagaggccacacacgatgcgggcggggggaaccgttggatcccggggaagtatgccacacgcctcacacaaaaccttcgcacaaaaaaacaacaatcctctcaaattccgcgcggagaaagtttacctccagcgctctggttgcgagacattaaccagacaacaaagctgacaacgcgccaacttaaggcacacccccaa

SEQ ID NO: 37073 - DNA, 670 bp, Macaca Mulatta
caagtacaataatcatatccaatgactggataattcagccctagtggtaagtgaagacagccaggagaggggcaagtgggaccagagaagactgggggagggagtggggtccttaaatctgccatgaggactaaggaatagagtagaaggaactcagtcagggctgggctgtctttaaaggtaagctccaacttaccaccatcaccaccccataccctgtacagtcctgggtccagtggacctgcatatctctaagcccttgaaatacaggtgggcaacttacctggacaatttatgtgaggatatgggtatgaagaggaacacctctgcctccaaataagatggaaccgattagagctagttgggaatctttctacaagctgggccaaatgatggatccaccaggaaggttgtctcagttattaatcttcttaaatgtacggactggttgttgtcgaagactatataacaagctgccatagaagagaacaattaatgtagtggtccgtggaatacagaagtaccagtttttgaggcacaatattccagagtatctttatctaatatatgtatgtcccgtgttgatatccctctctgtaccatctgtactctccttgggcagtgtctctaactccttggccttgtacccatggtgacacacatgcgggat

SEQ ID NO: 37074 - DNA, 962 bp, Macaca Mulatta
  misc_feature (1)...(962): n = A,T,C or G
ggtaaacaaaaatggacagaactgctggctaaattaactgagaaaattcaagtaagtacaaccagaaaatgataaaggtgacattacaattgataacatagagatacaaaagatcattcacagactactgtgaacatctctatgtgtataaactagaaaatctagagggaggtgggataaattcctgaaaatataaaaccctacnagattgaaccangcaaagaattaaaaagtccctgaacagaaccaataatgaagtaatgaccatggaatccgtaagtaaaaaatcttccttaaacaacaaccaaaaagcccccggaaccagtccaaattccccggtttggattttttttcccaccctttcaaaaaaactggggcctttccaatctttactggaaacctttctcaaaaaaaccccttgggggaggggattttttttcccaaaaccccttttttatagaaacccccaattattccccccccaaaaacccccaaaaatctnnnnnnnnnnnnnnnnnnnnnnnnnnnaaaaaaccgcaaaatactttttttggcccccctttttctcttctgggtggaaacaccccccatagtggcggaaaaaaatccctccccccccacaaaatttatttttttgtaaaacacccccggattttctcctattatatcccccccttttnnnnnnnnnnnnnnnnnnnnnatatttttcttccgcgcggagacaccaccggggggtggaggtggtcttcccctctcctcccccggcggggagacgacccacaaggtagaggggtgttgttcaaccacctctccccaccaacaaatactctccgnaataaagatggggtgtggtgttttctccnccccccctcctatctctcccgcgcgggggtgtttctttgttaaataaaacgaaagaaaaagaacactcctctccgcgggccgcgctgtcttttttttta

SEQ ID NO: 37075 - DNA, 1047 bp, Macaca Mulatta
  misc_feature (1)...(1047): n = A,T,C or G
gaggcgggaactattccaagcacatgaagactatagtagaaatggagaatctgggctagtacatatgttgaaaaatggaaagacagaaggtaagtgttaccgattgaaaaataattaaatccttattctgccttatcgatatttttaaaactttcctacatttaaagcaggtatcagttttcaagaagttgtggttttaattgttaatttgtctccgctgttaacctgggtgggatttccaagcttgatactgtcttaccaatgaagattttagatatttctaatgaattgagcatttcctgtctttaagtctcattttatgtttttcttaatccagaagataaaaagtgtaacagtaggtgagcccaatgagctcctcattcattcctgtacttgtcgtataccaaaggatgtgggctgtctttattcctacatactcttggggttttgtgattctcttaaaatcttaaatttccaccttagatttttgtagactttcctttgggatttagttgtgatagggtgccaaaaatgcaaaaatatttatgtcttccatattgatacacttagataaattagattggtttggggaacactgaagttacagaatggaaaaggaggaaggaggagtgcataaaagtagaaaacactattgagataactaacatttattttttgtagctatttatctttatttccctgggcgtacaaaacaaattgtgacaagtatcctagaagaaattcccagttaaaagaacaattaccatatcttctatncttagttctgatgctttgattaaaactttgccttatcagcgattggttttcacattaaaactggccttttcccggtcgaataatcgccattttcctttttgccgatacgtaccgggctccagcgattaaacttntcaggggccgacagattctgtcctctttgttatttcttccttgcgcacactcctcacccctgcgtatacgcgacacactaatacacatagtagacacagaaacaacacacaatatcatcacatcttgagaatactc

SEQ ID NO: 37076 - DNA, 918 bp, Macaca Mulatta
  misc_feature (1)...(918): n = A,T,C or G
aggcaaaacgtttctcttcacaannnnnnnnnnnnnnnnnnnnnnnnnnnnnnnnnnnnnnnnnnnnnnnnnnnnnnnnnnnnnnnnnnnnnnnnnnnnnnnnnnnnnnnnnnnnnnnnnnnnnnnnnnnnnnnnnnnnnnnnnnnnnnnnnnnnnnnnnnnnnnnnnnnnnnnnnnnnnnnnnnnnnnnnnnnnnnnnnnnnnnnnnnnnnnnnnnnnnnnnnnnnnnnnnnnnnnnnnnnnnnnnnnnnnnnnnnnnnnnnnnnnnnnnnnnnnnnnnnnnnnnnnnnnnnnnnnnnnnnnnnnnnnnnnnnnnnnnnnnnnnnnnnnnnnnnnnnnnnnnnnnnnnnnnnnnnnnnnnnnnnnnnnnnnnnnnnnnnnnnnnnnnnnnnnnnnnnnnnnnnnnnnnnnnnnnnnnnnnnnnnnnnnnnnnnnnnnnnnnnnnnnnnnnnnnnnnnnnnnnnnnnnnnnnnnnnnnnnnnnnnnnnnnnnnnnnnnnnnnnnnnnnnnnnnnnnnnnnnnnnnnnnnnnnnnnnnnnnnnnnnnnnnnnnnnnnnnnnnnnnnnnnnnnnnnnnnnnnnnnnnnnnnnnnnnnnnnnnnnnnnnnnnnnnnnnnnnnnnnnnnnnnnnnnnnnnnnnnnnnnnnnnnnnnnnnnnnnnnnnnnnnnnnnnnnnnnnnnnnnnnnnnnnntcttcatgtacttctgctaggcattcaactatgaagcaccaaggcgtacatatatgtccgaggatcaatctatccataaagctttgatataaagagctttactgtcgggcattaaaaatgggactttttcaccctttgccacccagtgggaaaaaagcggcccatagggggacaaacccaaatcctcttntccactctcttcccctttttctctctttcttgttctc

SEQ ID NO: 37077 - DNA, 492 bp, Macaca Mulatta
catctcaacttgcacagtgaatcaagatgctggtgtcatcctctcttggcaaagaggaaatgttaactcatggttaaaactaagtacaatgattcccaagggatcactttcttatttttttaaatgacattaacgagaaactttaaaaaagcatcagagaaagacgtgtgcatgtgaagcaccctgattctgatgttacgagaacttaagtgaacaggacctgctgcacacagccccattgtcttctatccatttctctttatcattcaaagcaagcaacatgtgccctcctcgtgaacacacattcttctcctttgtcagtatgtgtctcccaacttagtgtcaggatactttcgattcataattatgtatgatccaatgtgtacataatttcatttaacgttatttaaagaaatagatccaattcctctcttgcaaccaaaaataaatcacatacattgcctcaatataaggtccgggttattctgtgtt

SEQ ID NO: 37078 - DNA, 130 bp, Macaca Mulatta
tccacaaagaaaaaactccaaagattcttaaagtagctgaattcttcaactactcaaaaagcaggattgtgattttaccttgtaaatttttgccttcatatagaataattctattagagttggagtacta

SEQ ID NO: 37079 - DNA, 632 bp, Macaca Mulatta
  misc_feature (1)...(632): n = A,T,C or G
gggtcaatgatatgaaagtagaataatcaaatgttagaacagctgtgtgttgttgttgaagtgtaagatgccagacccgacttggcaggagaaaaaataggacatctaaatgtgcaagagctagacttggatggtctttatgccatgataagtagtttggaactttattcttggtggtgggaagctgccagaggcttttaggcatgatggataggttggcatttttgaaagatctctctggatgtaacgaaatggatggattggagagagtgggaaaaaggagaagaccagttaggagggtattgatacttcggtcaagagacctgaactagaagctgtatttgagatgcagaggtggggacatatttgagacatttttagagagaacagtgtctagccttctgtagacattcagtatttgtggaatatgaatgaagttaggacttgatgttggacttagggagtgagggagaaggaggaatctggacttacctcangcttcctccagcaaaggtgacaggttgcatggtcatgactttcactgagttcttgggagtactgaggccagactgtgtgtcagagatctttccttttagatgttgctcaagtaattttctcatatcccttgagga

SEQ ID NO: 37080 - DNA, 613 bp, Macaca Mulatta
gaggtgtctcgcgccgtcccaccctccctgctgtctccgggttgcgccgccggagccgggacgcgcctccgctgccctcgccgcctccatccccgcggccgcagctcccctcgccgtccgcgcgcgcaccatgacgaagaacgagaagaagtccctcaaccagagcctggcggagtggaagctcttcatctacaacccgaccaccggagagttcctggggcgcaccgccaagagctggggtttgatcttactcttctacctagttttttatgggttcctgggctgcactcttctcattcacgatgtgggttatgcttcagactctcaatgatgaggttccgaaataccgtgaccagattcctagcccaggacttatggtttttccaaaaccagtgactgcattggaatatacattcagtaggtctgatccaacttcttatgcagggtacattgaagaccttaagaagtttctaaaaccgtatactttagaagaacagaagaacctcacagtctgtcctgatggagcactttttgaacagaagggtccagtttatgttgcatgtcagtttcctatttcattacttcaagcatgcagtggtatgaatgatcctga

SEQ ID NO: 37081 - DNA, 2110 bp, Macaca Mulatta
  misc_feature (1)...(2110): n = A,T,C or G
ccagagaagagtatgatgacaagcaggtggtcacagagatcatggcaagatgttttattccgacttcgataacaactacttcctgggaaagttttcattttattggtcatgagattcgaattactgaggccatggattgttacggtgctgttgtttggccatcggtataatttcatacagaatttgttacattccnnnnnnnnnnnnnnnnnnnnnnnnnnnnnnnnnnnnnnnnnnnnnnnnnnnnnnnnnnnnnnnnnnnnnnnnnnnnnnnnnnnnnnnnnnnnnnnnnnnnnnnnnnnnnnnnnnnnnnnnnnnnnnnnnnnnnnnnnnnnnnnnnnnnnnnnnnnnnnnnnnnnnnnnnnnnnnnnnnnnnnnnnnnnnnnnnnnnnnnnnnnnnnnnnnnnnnnnnnnnnnnnnnnnnnnnnnnnnnnnnnnnnnnnnnnnnnnnnnnnnnnnnnnnnnnnnnnnnnnnnnnnnnnnnnnnnnnnnnnnnnnnnnnnnnnnnnnnnnnnnnnnnnnnnnnnnnnnnnnnnnnnnnnnnnnnnnnnnnnnnnnnnnnnnnnnnnnnnnnnnnnnnnnnnnnnnnnnnnnnnnnnnnnnnnnnnnnnnnnnnnnnnnnnnnnnnnnnnnnnnnnnnnnnnnnnnnnnnnnnnnnnnnnnnnnnnnnnnnnnnnnnnnnnnnnnnnnnnnnnnnnnnnnnnnnnnnnnnnnnnnnnnnnnnnnnnnnnnnnnnnnnnnnnnnnnnnnnnnnnnnnnnnnnnnnnnnnnnnnnnnnnnnnnnnnnnnnnnnnnnnnnnnnnnnnnnnnnnnnnnnnnnnnnnnnnnnnnnnnnnnnnnnnnnnnnnnnnnnnnnnnnnnnnnnnnnnnnnnnnnnnnnnnnnnnnnnnnnnnnnnnnnnnnnnnnnnnnnnnnnnnnnnnnnnnnnnnnnnnnnnnnnnnnnnnnnnnnnnnnnnnnnnnnnnnnnnnnnnnnnnnnnnnnnnnnnnnnnnnnnnnnnnnnnnnnnnnnnnnnnnnnnnnnnnnnnnnnnnnnnnnnnnnnnnnnnnnnnnnnnnnnnnnnnnnnnnnnnnnnnnnnnnnnnnnnnnnnnnnnnnnnnnnnnnnnnnnnnnnnnnnnnnnnnnnnnnnnnnnnnnnnnnnnnnnnnnnnnnnnnnnnnnnnnnnnnnnnnnnnnnnnnnnnnnnnnnnnnnnnnnnnnnnnnnnnnnnnnnnnnnnnnnnnnnnnnnnnnnnnnnnnnnnnnnnnnnnnnnnnnnnnnnnnnnnnnnnnnnnnnnnnnnnnnnnnnnnnnnnnnnnnnnnnnnnnnnnnnnnnnnnnnnnnnnnnnnnnnnnnnnnnnnnnnnnnnnnnnnnnnnnnnnnnnnnnnnnnnnnnnnnnnnnnnnnnnnnnnnnnnnnnnnnnnnnnnnnnnnnnnnnnnnnnnnnnnnnnnnnnnnnnnnnnnnnnnnnnnnnnnnnnnnnnnnnnnnnnnnnnnnnnnnnnnnnnnnnnnnnnnnnnnnnnnnnnnnnnnnnnnnnnnnnnnnnnnnnnnnnnnnnnnnnnnnnnnnnnnnnnnnnnnnnnnnnnnnnnnnnnnnnnnnnnnnnnnnnnnnnnnnnnnnnnnnnnnnnnnnnnnnnnnnnnnnnnnnnnnnnnnnnnnnnnnnnnnnnnnnnnnnnnnnnnnnnnnnnnnnnnnnnnnnnnnnnnnnnnnnnnnnnnnnnnnnnnnnnnnnnnnnnnnnnnnnnnnnnnnnnnnnnnnnnnnnnnnnnnnnnnnnnnnnnnnnnnnnnnnnnnnnnnnnnnnnnnnnnnnnnnnnnnnnnnnnnnnnnnnnnnnnnnnnnnnnnnnnnnnnnnnnnnnnnnnnnnnnnnnnnnnnnnnnnnnnnnnnnnnnnnnnnnnnnnnnnnnnnnnnnnnnnnnnnnnnnnnnnnnnnnnnnnnnnnnnnnnnnnnnnnnnnnnnnnnnnnnagaataaaagacagtttcccaaatttgcctcaccccaggcagtaatttttccagatactgcatgtgagtctgtaggattgggggtaacttgttcctagtttgtctccatcagcacccaggcctgccttctactcatgcagtaatagaaactcttggcaaagt

SEQ ID NO: 37082 - DNA, 829 bp, Macaca Mulatta
ggggagctgtcattcctgcatacttctaaaggatttagattctgtctacatttttgatctgttgtatttcaagttgttgagctccagaaatgttctgctcacttcataaaatactttttaatctatttctatcaaaaacaattttgaaatacaacggagtgtgttttaatcatggtaagttagggtgtagggaaaaatagagttaactttaccagtttttttctgattttaaattttcagttacatttttccttagtcttaattattctaggctaaattattttttattatttttaagctaaatacttattttattttttatttcgtgtctgttcctttgacctttttataggccttttctcaactttactatctcgttggggtacaggagaggtgtttcttggagagaaaagctataaattgctggagactaaattaatatcaaaatagaaggaattttgttacatcatctcttttttgccttattgcccggcataatcccattttatgcctgttatgtcagcataaatactgatgacttctacttttactcttaacatcactctttcagtttagacaacttgtttagtaatgctatccaaaagcagaccaaagctgatgattaagtaaatttattctttgcgaacaaattcatggacatttatgagaaaatgttgatattttaagaaaatctgccatgaaaaatgccatagtagttttttttttattgatttacaagcctctaaactataaacccaaaacacaattccttatttctttaaagcctcctctattctgaagaatagttaaacctttatgggaatgtggg

SEQ ID NO: 37083 - DNA, 714 bp, Macaca Mulatta
aagtggctgagatttacaaggcatgaaactgtaatttccagtgtgctgggctaaaaaatttatatcttaagtttcatttcagttaggtacttccaaatcctatgcttagacaactttgactttttaagcacaaaccaagaaaactataatggatacacataaagatattgtttttaagatgtttactacagcaataaatacaaatataaatcctataagtaactgcaatatcaaatactttggatttcattaaataaatgatggtatatctgtaaaaggaaatagagtcatgtatcccttagtgatggggatatattttgagaaatgcatccttaggctatttcattgttgtgcaaacatcacagagtatacttacagaaacctagatggtatagcctactacacacctaggctatatggtatagcctaatgtttctaggctgcaaacctctagagcatgttactgtactgaagactgtaggcaactgtaatacagcggcatttgcatatctaaacacacaaaggtatagtaaaaatatggtattttaatcttacaggattactattatacatgtccactgttaactgaaatgttattatgtggtacatgactatattttacagccattacctacattatagtgtattttatgatatggaaaatataatattaagcaggataaacaagttacatagcaatgtaatataattacc

SEQ ID NO: 37084 - DNA, 260 bp, Macaca Mulatta
gcctgaccctggattctggccttctcatgacctctgctgatcctcctctcctctcctgatgagccttccacctctgacctctcactgttcacgctggacctgtggatctcctgggactccgagcaaggcctgcacgagagagggctgaaaggctgctggggctgccacctcgctgtgcccgcataagcatctgcccccgacccccttgaccttcatctgatggacatttttatacagaaaacaataaagatttccctctc

SEQ ID NO: 37085 - DNA, 850 bp, Macaca Mulatta
  misc_feature (1)...(850): n = A,T,C or G
ggaaggtgtgctgaggggaggctggaaggccccaaaagcaaccatggccttccccccatgaaggtgtctgagaagacagtggtatgattacaaggcctctgaggaccacatatctggtagtgctgggcaggacagactggatcaagcaggtggctagaggcagggagctcagagggaaatgggaaaaattaagggtctatggtgactgatagtgagaatggcaagggataaccaggaatggccgcacgagggactgtgaccaaataaacagtttttacatggaactaaaaagttgacgttctgacctttgcnnnnnnnnnnnnnnnnnnnnnnnnntacagattttcactcatcacccaggcaggantgnaanggnnngatcntggttcantgntnnnnnnnnnnnnncnnnnnnnnnnnnnnnnnnnnnnnnannnnnnnnnnnnnnnnnnncacatgcagatgccactgtnnnnnnnnnnnnnnnnnnnnnntttttagtaaagatggggtttccccatgtccgtcatggggctctcaaatcctgatctcagaatcacccccttggcttccaagtgcgaaccgtacctcgatagtatatagagnnnnnnnnnnnnnnnnnnnnnnnnnnnnnnnnnnnnnnnnnnnnnnnnnnnnnnnnnnnnnnnnnnnnnnnnnnnnnnnnnnnnnnnnnnnnnnnnnnnnnnnnnnnnnnnnnnnnnnnnnnnnnnnnnnnnnnnnnnnnnnnnnnnnnnnnnnnnnnnnnnnnnnnnnnnnnnnnnnnnnnnnnnnnnnnnnnnnnnnnnnnnnnnnnnnnnnnnnnnnnnnnnnnnnnnnnnnnnnnnnnnnn

SEQ ID NO: 37086 - DNA, 782 bp, Macaca Mulatta
  misc_feature (1)...(782): n = A,T,C or G
gggttgaatttacctaaagaccaggcattaacagaaaggaatgtctgggttaagataaaagactgtgggccaggtacagtggctcacgtctgtaatcccagcaccttgggaacctgaggcaggcgnnnnnnnnnnnnnnnnnnnnnnnnnnggcctgaccaacatgatgaaacctcctctccnnnnnnnnnnnnnnnnnnnnnnnnnngtggtggtgtgtgcctgtaatcccagttactcggggannnnnnnnnnnnnnnnnnnnnnngcccgggaggcnnnnnnnnnnnnnnnnnnnnnntnnnnnnnnnnnnnnnnnnnnnnnnnnnnnnnnnnnnnnnnnnnnnnnnnnnnannnnntnnnnnnnnnnnnnnnnnnnnnnnnnnnnnnnnnnnnnnnnnnnnnnnnnnnnattgtggagaccaaagttcttatttgcagaggaagctttcagctattaagcttcagagagaaaaagttgtaaaatgtttatcaaacttaaagtctatggtgaagttaaaggcccaaaaaggtataaatgaggcattgcttgaaccccccacttttttaatcatgggcccggaaaccgggccttttccggggtaaaaattttaaagaaatttcccaggccccaaggcacgggggggggctgaaaacccccggaaaattccccaaacnccttttttggggaaagacgcaaaaaaggcgggggtgaaaaaaccaccttttggagggtccccggggnnnnnnnnnnnnnnnnnnccccccccctcgtgtaaaa

SEQ ID NO: 37087 - DNA, 230 bp, Macaca Mulatta
cagatgatgctgatataaattttggatactgtgaagtggaagaaaaatgtagacagtcttttgaggcttggcaagagaaacagaaggaattagaagataaagagaaagaaactctcaaagctcagagggatagagaagaaaaacaatttcaagaagaagaagaaaagcgacattgctggatgaaacaatttaaagttgaaaagaagaaattagagaatattcagaaggta

SEQ ID NO: 37088 - DNA, 769 bp, Macaca Mulatta
  misc_feature (1)...(769): n = A,T,C or G
gggaccctttctgtcaagctgggatccaattttccttgggttgcttgggaggggctcccccttcgttatctattagggatgttttagtaaacattccatggtcttttaccccattagatggcttggtagcggcccccctgcccctccacgtgtaccaatcggaaaatatcttccaggaattgcccaaatgttggaggaggcacaactgcccacttctatagaagtagacattacccaaagttttgacagtgcccataatntctgtcagggtgtctatttcccactcttatcacatatcttttgtctgcccttctgagttccatttccccgtattagacctttggctaatgcattgtttgtgggtgtcttgtcataccctgatttcagtatatctgcttacttccatccattctcaccccaaccctatgctgcctactgatttttctgtggtatttagtggcacccaggctgcaggttttgtggttgcctttgactctgcattggctcacccatgctagtgtttgccattcctgtccgtttttcaactgtgatttcttcctaatatgagtcattcctttctttttcccttgtcctacctaagttatcattacctcctgtcagaatagttggagaggcctattatagttcctaccttcggtcttcctctaatttgtccaacaaaacactgtcaactaagtcttcctgaagctcttcttcccggaacccttgctgctttccctgccttgcattaatgaaacgcccttccccc

SEQ ID NO: 37089 - DNA, 839 bp, Macaca Mulatta
  misc_feature (1)...(839): n = A,T,C or G
ggatgccccagttagacacatcgacatgattcaccactattatggcgatgcttcctacactatatcttatcatacagctaaagctactaaacacgaaccactaccaaccaccccttacaaaaaactccacccttcaactccacaacatccgnnnnnnnnnnnnnnnnnnnnnnnnnnnnnnnnnnnnnnnnnnnnnnnnnnnnntttaaatcaacccgctacgatccccattatcctattccctaccctactaatcttaacccccaagcaccccattaataatcgactagctaccaatcaacaagacctgactcgattcaccctaaaacaaataatatcaactcacaacgctaaaggacaaacctgatccttaaaactaaacatccctaatcacctttattaccacaacaaaacctcctaaggacttacacccctactcgttcacaccgaactgcggaggtggtccgaaaacatagcaaaaggcagtgccgtcaatgaagcagcgggtgatagataatggggaacttgcgctttagaaaccgaaagacgttcctgagactccaattgagaagcgcagagggcagagcgcggaggcgaatagagcccgtaggtgaagtatcaaagcgggaactagttagaactaccactattgaacaaagaagagtagaaggccaatgaggagggaagcagaaaaaaatcaaaaagccggtctattacgtacaatgtgaacaattggagcggggagggcgtggaggagagagcgcgtagagaggtaattataagatggcatagctaaaaattcgaacataacgctacacgcagcaagtagtgaataaggg

SEQ ID NO: 37090 - DNA, 449 bp, Macaca Mulatta
gctgttaacaggtgctgtggattatagatgatcgagctctgggcacagtcctttagaaacgcagatgcctgtgtggaggaaattctggcaggagaagagtggcgactcgccgctctgcttggatctcaaggcatgaggttctgggagtgacttgcagcctgcgaagccacgcgggccttgctgccagacgaggacgggctgaagacagcagctcctctctagtggacacctccaggttcccatggaggggtggggagcattgcaccgccatgatgccttgtctgctgagggtgggagttttcaggccttgtcatgtgagactcacaggggctccttcctgcgatttgcagcctccatgacttggcttctccagagcgccagatacacacgaggcattttatggcagtggtcactgggacccaactcccttctctgtacacagctggttt

SEQ ID NO: 37091 - DNA, 570 bp, Macaca Mulatta
taggctgtagctcctcctcaccgccacaacctgatttcctagaagggctctgtcatccaaaaagatttccattggcttagaggaggcgaggcccgtcttctcccgttatccattggctgccccttccgccgcaagttgggggcggggttagggcgcctgtcgattgcatcagctggtccagtggaggccaagtggcgcaagcgcagtgttcccgggccctagcccacctgcgacccggctctttgctcttctcctctaggccgtcgctttcgggttctctgatcgcttcgtcgttcgccaatgtttgaggagaaagccagcagtccttcagggaagatgggaggcgaggagaagccgattgatgctggtgaagagaagcgaaaggaaggaggcaaaaagaagaacaaagacggatctggagatggaggtcgagctgagtcattagagctgttttattggagactctttagaaagctaccagaaggaagaagcacaaaggaacagcctttttcgaagtagcacaataagctggctttgaagagccaattttacaaaagctgcaattactaa

SEQ ID NO: 37092 - DNA, 328 bp, Macaca Mulatta
ttttgttatgtttgcacttgtatattggttgaaactgttatcacttatatatatatacaggtatatataaaatctatttatttatgcaaacgctggttgctgtatttgttcagtgactattctcggtgccctgcgtagtgggttattgtctctgaaatgcctcttctttatgtacaaagattatttgcacaaactggactgtgtgcaacgcttttcgggaggatgatgcccccgctgtatgtatgagtggcttctgggagacgggtgtcactttttaaaccactgtatagaaggtttttgtagcctgactgtcttactgtgatcaatt

SEQ ID NO: 37093 - DNA, 644 bp, Macaca Mulatta
  misc_feature (1)...(644): n = A,T,C or G
ccctgtgaacctcaggctatgacagcaggatcctgaagcccacgcaggctctgaaccacacggccatccggaagnggctgcgggcacctgccactaccgcagggaactgaggggtcttgatccagcagggaccccagggccttggagcactgtgtgagccggaaacgtggctggccagatgggcagcgccatggagccccctgggagtgcatacctgcacctgggcgccgtgacgtcccctgtgggcacagcccgcgtgctgcagctggcctttggctgcaccaccttcagcctggtggcccaccggggcggcttcacgggcgtccagggcaccttctgcatggccgcctggggcttctgctttgctgtctccgcactggtggtggcctgtgagttcacacggctccacggctgcctgcggctctcctggggcaacttcaccgccgccttcgccatgctggccaccctgctgtgtgccacggctgcggtcctgtacccgctgtacttcgcccggcgggagtgtccccccgagcctgccggctgtgctgccagggacttccgcctggcagccagtgtcttcgccgggctcctctttctggcctacgccgtggaggtggccctgacacgggcccggcccggccagg

SEQ ID NO: 37094 - DNA, 669 bp, Macaca Mulatta
gaatggctcaacgagaacaaactaccagggctgctaaggaagcacaaaaggctaagcaagcatctaaaaagactgcaatgactgctgctaaagcacctacaaaggcagcacctgaacaaaagattgtgaagcctgtgacaatttcagctccctgagttggtggaaaacactaagctggtacatcagatttttaaataaagattggactataactctaaaaataataattcagacaagtgaaagcctcaccaaggcaatggctgtgaggatggagacaaggggacaatgtctaaatatattaagattcttcataacctataagtgaaggatgtgggatgattctaagttgggaactggttaaatggtggtgcaagttaacaaaataaaaaatagagacaaagaagggagctcaggaagaaagatgatgggttctgggttaactacgttgagtttgaaggacatgtagaaaattcaaggggagacctctagagcttagcaatggaatctgaataggagatactaactctaatgtcatctgcaggtaggtgatttgggctgtgataaaggaccagttcttagggctttttgactatttctccactaccaaagtaacattttctgaggatacctgacttttaaaaggaggctaagaataaaaagttgttatct

SEQ ID NO: 37095 - DNA, 635 bp, Macaca Mulatta
gcggcagctacagcggggacgcgagcggggcggtgacggtgtgggaggtggtctcactcttgggaaaactgctgggcaccgtcgccgcgctgaaggtggttctgtacctgctccgagtgtgcttagcgatggcctggaaatccggcggcgccagccactcggagctaatccacaatctccgcaaaaacggaatcatcaagacagataaagtatttgaagtgatgctagctacagaccgctctcactatgcaaaatgtaacccttacatggattctccacaatcaataggtttccaagcaacaatcagtgctccacacatgcatgcatatgcactagaacttctatttgatcagttgcatgaaggagctaaagctcttgatgtaggatctggaagtggaatccttactgcatgttttgcacgtatggttggatgtactggaaaagtcataggaattgatcacattaaagagctagtagatgactcaataaataatgtcaggaaggacgatccaacacttctgtcttcagggagagtacagcttgttgtgggggatggaagaatgggatatgctgaagaagccccttatgacgccattcatgtaggagctgcagcccccgttgtaccccaggcgcta

SEQ ID NO: 37096 - DNA, 688 bp, Macaca Mulatta
  misc_feature (1)...(688): n = A,T,C or G
gggnnnnnnnnnnnnnnnnnnnnnnnnnnnnnnnnnnnnnnnnnnnnnnnnnnnnnnnnnnnnnnnnnnnnnnnnnnnnnnnnnnnnnnnnnnnnnnnnnnnnnnnnnnnnnnnnnnnnnnnnnnnnnnnnnnnnnnnnnnnnnnnnnnnnnnnnnnnnnnnnnnnnnnnnnnnnnnnnnnnnnnnnnnnnnnnnnnnnnnnnnnnnnnnnnnnnnnnnnnnnnnnnnnnnnnnnnnnnnnnnnnnnnnnnnnnnnnnnnnnnnnnnnnnnnnnnnnnnnnnnnnnnnnnnnnnnnnnnnnnnnnnnnnnnnnnnnnnnnnnnnnnnnnnnnnnnnnnnnnnnnnnnnnnnnnnnnnnnnnnnnnnnnnnnnnnnnnnnnnnnnnnnnnnnnnnnnnnnnnnnnnnnnnnnnnnnnnnnnnnnnnnnnnnnnnnnnnnnnnnnnnnnnnnnnnnnnnnnnnnnnnnnnnnnnnnnnnnnnnnnnnnnnnnnnnnnnnnnnnnnnnnnnnnnnnnnnnnnnnnnnnnnnnnnnnnnnnnnnnnnnnnnnnnnnnnnnnnnnnnatgcatctcggttcacatcttcataccacaggttcctgactcccgtattatggatcccattctcttgtcggctctccccaaatataccctttcatcaaacttcttcggtttaacgcccgttgtatt

SEQ ID NO: 37097 - DNA, 655 bp, Macaca Mulatta
  misc_feature (1)...(655): n = A,T,C or G
cgagggaactcctaacctcaagtgatccacnntcgcctctgcctcccaagtgctgggatgacaggcacgagctaccacacccggcccattctggcctttttacttccaactctggctccttcaaattactaaggtttaactgaataaggttaacaatgatacagtgatgactcagggaaaactggggaccatattttttttgaaatttttgttttaggagcagttagtttctccttcttctcttaatgtttgctgcagagctcactttaatcctgatgcagaggacacagaagtcacattgctttcaggacctcctctagggcagcttcagctcccatttcctctaaccttccgattgcctgaactgacaaactcagcctccagagagactttcgatgaggttccaccccataactgcttgaaaaggagtgtgtttactcagcttaagtgcttcaggtcctcctgatccgttgttatgtacagatggttttattatcataaatcctgctgtactgcctgcttctttttcattctatgcctcttctacttgtctccacttcttatgagtaaatcaatttctagctccagactgataaactaaaatacggtgagggtttggttcatgtgtaattttttcnnnnnnnnnnnnnnnnnn

SEQ ID NO: 37098 - DNA, 369 bp, Macaca Mulatta
gtataaaatattgataactgtaatgttttatttttattcacagattattataagtataggcctcatgttttatgtagttcatcgagctcaagtggaattgaatgcagctattgtagcttgtgaaatggaactgaagtcctctctggttaaaggcaatcaaccaaataccagtggctcttcattctacaacaagaggaccctaacattttctggaggtggaatcaatgttgtatgattctaatgagatatgtgattgtcaagagcctagtgtgctgtctaaggtctagcagtcacttcactagtgggcagagacaagttctaattgtattacggcacaaacaaaactgactcgtttttaaattgcacaat

SEQ ID NO: 37099 - DNA, 599 bp, Macaca Mulatta
  misc_feature (1)...(599): n = A,T,C or G
gacttcagnnnnnnnnnnnnnnnnnnnnnnnnnnnnnnnnnnnnnnnnnnnnnnnnnnnntcttagaaaggctttctatttctacattttacattcagattcagaatctacctggcatttaagatttttcaatgtaatgtgaataagagttctacattttttcatttgtcccagtgtatcatatattgagtagcccaaagtcctttttccccagtactttaaaatgttaacttttaacacaatgaattcccataattgcttgggtatatttctgaactcttattttattaccatttgttcctgtgccactcgcatactgttaatttagttttatagcacgtgtatatatgttgctggcctagcgagtggttctttgcaagtcttcatttctcatttaaaaggtctttgcaatcaattttagaggaaccttcctcttgagtgtactttgtagtgtaatatttatggatcctctgctcttgaatgtgaaaactttaagatgtgggtattgtaagatgcaactactttatttctcaaaggcatagtaaagcatcttgtcagcttgaattgtgagagtagtcacaatttaattgggaaatgct

SEQ ID NO: 37100 - DNA, 826 bp, Macaca Mulatta
  misc_feature (1)...(826): n = A,T,C or G
ggnnnnnnnnnnnnnnnnnnnnnnnnnnnnnnnnnnnnnnnnnnnnnnnnnnnnnnnnnnnnnnnnnnnnnnnnnnnnnnnnnnnnnnnnnnnnnnnnnnnnnnnnnnnnnnnnnnnnnnnnnnnnnnnnnnnnnnnnnnnnnnnnnnnnnnnnnnnnnnnnnnnnnnnnnnnnnnnnnnnnnnnnnnnnnnnnnnnnnnnnnnnnnnnnnnnnnnnnnnnnnnnnnnnnnnnnnnnnnnnnnnnnnnnnnnnnnnnnnnnnnnnnnnnnnnnnnnnnnnnnnnnnnnnnnnnnnnnnnnnnnnnnnnnnnnnnnnnnnnnnnnnnnnnnnnnnnnnnnnnnnnnnnnnnnnnnnnnnnnnnnnnnnnnnnnnnnnnnnnnnnnnnnnnnnnnnnnnnnnnnnnnnnnnnnnnnnnnnnnnnnnnnnnnnnnnnnnnnnnnnnnnnnnnnnnnnnnnnnnnnnnnnnnnnnnnnnnnnnnnnnnnnnnnnnnnnnnnnnnnnnnnnnnnnnnnnnnnnnnnnnnnnnnnnnnnnnnnnnnnnnnnnnnnnnnnnnnnnnnnnnnnnnnnnnnnnnnnnnnnnnnnnnnacaaacgtaattttcccctccgcccactaataaaacatttgcaaaatccccgaccgggggtggaaaaatttttttaggctggggcttgggatacaacatttcagggggggggcaaacaattaaaattgggttccgctcaacacaaatatctttttagaagccccctaaggggttataaatccccctcccccaaattctatatagttgttagcggggggggtacataaaaaaaatagga

SEQ ID NO: 37101 - DNA, 311 bp, Macaca Mulatta
  misc_feature (1)...(311): n = A,T,C or G
ttaaaggtacaanggcctcaggctgcagtgagtccgttgcgacttttgggtacctgcgtcgggctctgcacaggtgactgggactgcaatcccnganagcactgtgtcagcaatgggtgtggtcatgantgtgttgcanaaataaggacagatgaanantnatcttaangatcatctntctctaanaataagcatcccttcnnggaatntcctatcnncnaaaatntnantgtntggaattnccttgactaaaaaaaanggatnaaaaattgggcnaacctgttggatanggactacagggagnggaangg

SEQ ID NO: 37102 - DNA, 445 bp, Macaca Mulatta
acggcctctccagggtgactgtggattcccagcgctctgtggaatatggttcacagaacacctgcatctgctgttgggatgcccccaaactgtaatagcagcacgctgaatctttcatcagaaagaaccatcttatcatctggaggctggtcaggaaaataaactcaaaagccagcgcccctcccttcagaactctgctcctgaggtcacctttcagtctgcataagtcctcccaacctgggcgccccagagcttctcagcggatccatcccctcttccattctctcccaaggtttcagctgcattctgctctgcatggtcttcctctcctcttcatacaaactagaccttcaccccctgcccgctacggcgctgcaaacgccactgagatacatttgtttgggtcccaatgtcttttgggggctccaaaaagcccagaaagagt

SEQ ID NO: 37103 - DNA, 844 bp, Macaca Mulatta
  misc_feature (1)...(844): n = A,T,C or G
ggaaatggaatacggagcacataatgtcttgcctctacatgtaattaaaaatagaagtaaaatttatctcagattaagatttttttttaagcagcctcaacatatattcagataaaacagattttaataaaattatatatgtcatctgtttcaaaaatgttagggctatttttagtctttataaagcagaacttacagttatagatagttgtctgtggttttaggaagctattctatttgttattccctccgtatcccttaaccccatgcctcaaattattgcagaatactttcccaataatttactaacttgttcttttgtattctaaaaatgtgaaaggtgttaaaagtttgtgtttcagtgcctttggaaacatttaaaaatggatcttttaaattgcatgtccaaaccagtatttctcaaaatgtgccatgatctgtttatagttgttgggcnnnnnnnnnnnnnnnnnnnncagttccctaactttgagacaagtccaggttaaacaaacttaaagttcctttactacgaagactttctcagcgcattttaatgttcctccctatgcatatccctctgcggtaacaattcttctttttcctaaactccaatctacccactttattaccaaaggaactgggtgtttcgacaagggaaaacataacctagaaaaaaaatggcgtggttctataaaatantcgtgtagaataaattttgaaacaacaaccctggattctcaaaataccccataaaatctgcccacataatactccttnttaaccaataagaaattgagttaaaacccctctcctttttgagagaggaaacaacaaaaaataa

SEQ ID NO: 37104 - DNA, 235 bp, Macaca Mulatta
gtgcactaataaataatagatgaataattatggaacatttagtctctcgttcgcaatgaattgtgcagacaaaaactgcactaaccttatctttgagggatactaggatacacgaattgaaacaagaattttgaactattttgtctcaagaaactaccgtatagttaatttgttttctttactttttacaaaatttactaattatgaataaactttttaaaatttatccccaaaa

SEQ ID NO: 37105 - DNA, 272 bp, Macaca Mulatta
  misc_feature (1)...(272): n = A,T,C or G
cagttgcctaagagatggtgagatgggaagctgcacttggaagacccntggagagatgcctgacaagaggatgtctgacccatgannnnnnnnnnnnnnnnnnnnnnnnnnnnnnnnnnnnnnnnnnnnnnnnnnnnnnnnnnnnnnnnnnnnnnnnnnnnnnnnnnnnnnnnnnnnnnnnatgcttgtcattgctggtggtatcctggcagccttgctcctgctgatagttgtcgtgctctgtctttacttcaaaatatacaacgcactaa

SEQ ID NO: 37106 - DNA, 499 bp, Macaca Mulatta
ctctaagcgctctcattccaggcgctggacccagccatgcaaccctccagaaaagacgaggagtaacaggcaggattcccacggcaccgcggatccagcatccctaccccgcagtctctgcagtcgcctccccgagcgggcggtaggcgggggccagctggcaagcctgacccgcgggggtggtcccaaggactgactcgatgtgtgtaaaggagttggccgaaggggcacccactggggcaggtttgtccactgccccacctctcctaaatcctccaacccacccccataactctggactggcaacgggcttcgagcgttccaggacgcgcagggaactgcacggctgcgggaactggcgcgggtctcagatgccgtgcgactgctccctggaagcaggagactccgaagggctgcgtctgggagtggggcatggaacggccccctagtcccatgcgtggcggcccagaagagggtcagcagctggggtgcagtgagt

SEQ ID NO: 37107 - DNA, 88 bp, Macaca Mulatta
ccccctggccaaggtgaacagggatcagtgctttacctccaaagtggtttctaaggtcctgaaacaagaggtggccaaccctgtcaag

SEQ ID NO: 37108 - DNA, 820 bp, Macaca Mulatta
ttgagtcctcggaatttcagccacttttccacacaacccattctgccttttcccctgacatacctccagcttgttcatgtcatatccttcctatctggaatttcctaaagcatgagtgttttctccagatgtgcatgcatatggaagggaaattttacagttactcaaatttttagaaaatgactaaataatcaacatttaatttttaaaataaattcataggagtatttacaatatggatacttaagtagcactcatgacaaaatctaccatcataatagctattttcttaaatacaccatggtcttagtcatgaatactctttaggacagtgtcggctcgcggttcagggatccggagagtcgtggaattcaaccagacacacctcattctagagttttacctccctcttctctatgcctgtcatttttaagcataaatctggcaaaagggtgaaacacctacatttatactgccaccctgagatttccctccttcgcctagacatctctagatgcagggccagacaggttcggaagaagcgggtagaagtcacggagggagtcccaaagcctccgcactccagggagagcataggtgcaggtgcacacagggaaagagggcgagacctgggagatgctcacagtgcgataagagccaagagtccccagataatccctttaaattattggacatgccatatcattatgtcaaattgcttggttttccttttgtttggaaaaagcattgttatccacgcaaagagaatgctgcttttcaacccacatttgatctctttcccaatcatccctccccacct

SEQ ID NO: 37109 - DNA, 693 bp, Macaca Mulatta
ctaagtagtatgtcaaccaaaccagattgtgagacaaggacaagcaatcctttaaattttactgtcttaaagccagaactacctttttggtctacaggacagacagcactattatgaattgatagacaagcagcaggccttaaagttccactactgattatcaaaaagactagaagaactcaaatgtgtccaaccctgcaattccgggtccataagtcattctataagcattttgatcagccagtgcctgagctttccccatcaaccaaaaacttatttgctcaactagctgaaaacatagctggcagcttaggaatttcctcatgctgtgtatgtggaggaactaatatggggggaccagtggccatgggaggcaaaggaattaatgccacaagatcacttcactttgcctaaccctgccagtgaaccaacagcctcagccagtgtttggttgttaaaaacctccataattggaaagtactgtattgcccgatggggaaaggctttcacagaggcagtaggagaaacaacctgcctagggcaacagtattatgatgagactaaaaacaaaactcaatggagaaacgcccagaacgactcctacttaccagatccaaaccctttctctcgattctctactctaagccacacttggaatcagctagaggctccaaatgcttggaaggtaccctc

SEQ ID NO: 37110 - DNA, 360 bp, Macaca Mulatta
  misc_feature (1)...(360): n = A,T,C or G
caggtgtcaacaggtgcctataagcgccaggtgcatgaggtccccctggggaagcaggtaactgaagccatggtcattgagaagatcacctgggcctcctggacaannnnnnnnnnnnnnnnnnnnnnnnnnnnnnnnnnnnnnnnnnnnnnnnnnnnnnnnnnnnnnnnnnnnnnnnnnnnnnnnnnnnnnnnnnnnnnnnnnnnnnnnnnnnnnnnnnnnnnnnnnnnnnnnnnnnnnnnnnnnnnnnnnnnnnnnnnnnnnnnnnnnnnnnnnnnnnnnnnnnnnnnnnnnnnnnnnnnnnnnnnnnnnnnnnnnnnnnnnnnaagtatgtggtcagcactggaggagacgactgca

SEQ ID NO: 37111 - DNA, 651 bp, Macaca Mulatta
tcccgtcataccacggcctccctcgctcctgggcaacggtgcccacaacggcggtacgtgtctagctttgggagcggctcccacaagcaggcatcgggttatccgctcccgcgcccaggaaacggctcactgtcatggacgctctatcagaagcaaacggcacctttgcattaaaccttttgaaaaagctaggggaaaacaactcaaacaacatatttttttcacccatgagcatgtcgtcagccttggccatggtcttcatgggagcgaagggaaacactgcagcccagatgtctcaggcactctcttttagtaaaattggaggtgaagatggagatattcaccaaggttttcagtcacttcttgctgaaattaacagaactggtactcagtacttgcttaaaactgctaacaggctcttcggagaaaagtcttatgacttccacacatgttttacagattcctgtggcaaattctaccaagcaaagctaaagcagcttgatttcctgaatgatacagagaagtccagaacacacataaataactggattgctgaaaaaactgaaggcaaaattacagagatgctctctccagattcagttgattcattgactaagctgattctcgtgaatgccatctacttcaaaggaa

SEQ ID NO: 37112 - DNA, 359 bp, Macaca Mulatta
actctagggcttttgggtgactctagggcttttgggtgactctagagcttttaggtggctctagggcttttgtccacatggtcagaactgtctcagtgactctgagcagtcccttccaagagactgcagaacagatctgcttaaatctggagtaggagcaaggaggtgatgcaccatgaacaggagagcagctgacagagaggcagagggaagaggagaactgaatgagcctggggcaaggaaaagtggttgatgtcatggccctgccactcagcgttataagcttccttcaacagtggcttgaaactggatcagaaaggtccagagacctcgggaactatctcacttactcccctacc

SEQ ID NO: 37113 - DNA, 845 bp, Macaca Mulatta
  misc_feature (1)...(845): n = A,T,C or G
gggaccacaagaatgtttattgaatgttggtttttctacaagtagacctgtataaagaaaactttattagttttaattgaaattctacaattttctggatttaaaattttttatttagggcatttttttcaagtcttttatttttattgagctaaaacttacatgtgtataatacacagatcttaattttataattcagtaagctttgatcaatgtgtatgcttgtataattaccacttctgtaaagatacagagtgtttccatcacttttttcttttgttcctcttctaggcagttcccaactctcagaggtgaacactgttttgattttctgtcaccatagactagtgttgcttgttcttgagtttcatgtaaaatagtacagtagtatagtcaggcttgtttcacttgtcataacgtttttgagatttattcatgctgttttggtatttatttgtttattgctaagtagtattccaccatgcaaatatactacgatttgattatctcttcctgtgttgatgaacatttggtcnnnnnnnnnnnnnnnnnnngctttttactcctgtgaataaagcctgcttatagactttattgtccaacgtgtcctttggggaaacaatatttttcttatctttgggcatattcccaagggaaagggtgtacaccacgccaatacggcgcgagcgtccccttcttttacctctgccaaaaaatttgcccaaacaccttcctcccccgacacattttcgaaagaagcttcccagcctcgcgccccataaatccccgggacgcatggcatccactcctctctagagggcgcttatcccgtcttctatcctatc

SEQ ID NO: 37114 - DNA, 772 bp, Macaca Mulatta
ggtcgaactagcaaaagccgcatgtccatgaagttgcgtcgttcctctggctcagccaataaatcctaaggagacagcccaacagtgatcagcagtagccaccttagcacgaacatagggttaaccctttcagtcctttgtgtctgccataacatgcatgtttcttcctgtacatttatttgagaaaacactggatttaaataattttaaataatttgtagcttaatattaaagatttgggttatttattgtttcatttttttcccacagtccaagctgccatattttgagggcaggggggagttttattctacaccctttaccttcctagataattatgtctaagtagttttatctttaatttcatggttaactttgagccaaaatacaattggacaactagtctcattatttattgtgccccattgcaactttatggttcaataaatatataattttttacaaatataaaattttaaatttaagcatttgtaaagttacagcaaaagatgtacctgttaatacacagaatgtgtacagattatttatgttatgacaataaaacacgcaaaataaatggtctttagcatctcaaaattcaactgaaatcattttagtgttaaacttttcttcccaaagcaatgtctcatttcttggctgtgccagtgaatgccatgttttatcccaataactaggaaaaatcacttgtgctgaaaatttggatttatgttttagctttccaaggaaatttttccaatggttttgcattttc

SEQ ID NO: 37115 - DNA, 561 bp, Macaca Mulatta
acaggtgttgttcaggaagatgattatgaaaatgaagttgaagactttggtgagcttcgtcctagaaggcgttctcggaaatgtggaaagcagagaaaatactaatgtccatacagctgctgcctcctcatccttcggaacattccattctgacttagaattctgagtgctgtggcagaggacaaaaacaatgtgacttagcattttaaaaagtaggggagtctaataacatcattgctttttgttctcattacttctctttcagtggcttaggatctggttgctccctcacctctaaagtgtttccaagtagagtctagcagtattagttccccccacaagcaagttcaggtagaggagttgtagttaaagggaatgttgggactcctcactgcatggtccctggggtgcctggctcatccccatcatgacatgagttggtagcagaggactaggtgttaagacaagactttcctaacctcagttgctgctgctctgggccaggaaatctccctgtggattccctcatctcctgccacactgctgcagcatcaagtgtgc

SEQ ID NO: 37116 - DNA, 331 bp, Macaca Mulatta
gaattctggacccctcaatgttccagagggagccattgcctctctcaactgcacttatagtgaccgtggttctcagtccttcttctggtacagacaatattctgggcaaagccctgagttgctaatgtccacatactcaagtggtgacaaagaagatggaagatttacagcacagctcaataaagccagccagtatgtttctctgctcatcagagactcccagctcagtgattcagccacctacctctgtgccgtaaattatggcggtagtggaaacaagctcatctttggaactggcactctgcttctggctgttcagccaaatatccag

SEQ ID NO: 37117 - DNA, 772 bp, Macaca Mulatta
ggaagcaaaacctgttttgaccacagaatatacttgtaggagtcagagttcttactagtgttaagatgatagtactggtttgaatttctgttccacctttactagctttgtgatcgtgggcaagttatttaacctctctgaatctcagttttactaatctataaaatgggaatattttccttataggattattataatgagataatgtataaatatgctttttataatgcctatacattctagacactcaaaaaatgaaaaccaccatttgttactgttatttctactactattatttttactactaccattgttattcttactatatttactatattgttgtttacaataatgttctttctcattccttaattttagttgatacaaaaattttgaaaaagtcatgatagtgaaaaacagcagtagtaggcatttctttggataggtagagtaaaaatggagacaaggtcatgtttctattcataggaacaaacagaaccaagaacctgaatctgtgaggcagtattcattggtcatccaatatgtaagaaaatgtgcatgtatcatattatgttttccattgtatactacttaaatgaagttgtaaaattgtgtattacatatacacgtagataagacctaaagcaaactggacttgcttataaaaagttctgatttgccttttctttattccttgatgttttataaacacgttatctcaaaaaaagcattttttttctttagctgtcttatttaaaagctatgttaatgc

SEQ ID NO: 37118 - DNA, 871 bp, Macaca Mulatta
cgcaggcgaggtttctttcatctctcccacataaggggtttcagcgcaagtcttgggcaacaggccctttttcggacatacgcccaggaaccggggccaaattcggtggaggatgtatccacccggtcccaagttttccgtttttcgatcaaaacttttggatcgggcctttccttcacggttttcttaattctttcaaaccttctgggataaaatgaactctccactggctgcccaaatactaacgctggtgtggttgtgtaataatccactgcagcttgagcatcctctgtggttgccatttcaataaatgcctcattaattttatttagaatcagatgatttgaaatgactccaaatggttctaccagctgtaatagctggtatctcaagtttttccctcgttgaaaatccatgatgtgaacaactctgctagtttccactctgcctttttgcatgtgtctaggtccttgcaggtttccatttccagcacccagatttcctcttggtccaactgctggtcccccaagatgaaacgagggaggtggcggtcccagaattcctggtgctggatttgtagactgctgcaacatgaatggatcacccattgtgtgtcctgtatcattgtcaggattccattctgggtagatttcaagaagaagctggcatcgacgactgtgacttgctccattgatatgttgactccactcctgtagtcaaagccatatgggagactgaggcaagaggatcacttgaggtcaggagctcgagaccagcctggtcaatatgacaaaaccccatctcttagggaaagggagagggaaaaggagaggtacctctctcccagcgagcgggacgcggaggctccccc

SEQ ID NO: 37119 - DNA, 821 bp, Macaca Mulatta
  misc_feature (1)...(821): n = A,T,C or G
ggggtctcccgcagtgaagtggacatgttgaaaattaggtctgaattcaagagaaagtacggcaagtccctgtactattacatccagcaagacacgaagggcgactaccagaaagcgctgctgtacctgtgtggtggagacgactgaagcccgacacagcctgagcatccagaaatggtgctcgccatgcttccagctaacaggtctagaaaaccagcttgcgactcacagtccctgtgaaggtgacattagcattgcccccaacctcattttagttgcctaagcattgcctggccttcctgtctagtctctcctggtagccaaagaaatgaacattccaaggagctggaagtgaagtccatgatgtgaaacactttgcctcctgtgtactgtgacaagaacagatgaaataaactgaatttgttccgtnnnnnnnnnnnnnnnnnnnnnnnnnnnnnnnnnnnngcggccggcctcgggcccttaaaaaaacctttctaaaaaccatttcgttttggcgtcgccggggcccaattaaggtaaattgaaacatgggtcccatgacctggttctccctaagaaaacatcctgggtccacgaaataaagtgcattggcaattttctaccttatataataaacagtcacaggtggggcaaaacccaatcgtttttctggaaccaaaatccccaaaaggggagttttttggaagagctcataataaagtgagaacctttaacgaaaggaggtaccctccccacgcgatcgcctctcgtttttattatcagtttattaccctccccgcgcccacttattccaacan

SEQ ID NO: 37120 - DNA, 3903 bp, Macaca Mulatta
  misc_feature (1)...(3903): n = A,T,C or G
agggtctctgggaatccaacctcagtctgttgggcttacaaagtgaccaaagtcaaatgctgatctgtgagagaaagaggaggcagacacattgggggaccgagaagtactttgaagcaccccgctcaccatggtattgggaggaatttggccacatccctgccaaccgctccttcttttggactcggaaagggtcagttgcttgtttctatcagattcatgaacactaccaagaaaagagcccggtctgagacatttaatattggttgaaacacagaggtttaactgatgattgacgtacatagggtgataggaagagtatgaacttgagaatctgatggattttgtttaaagttaggactcggctactgactacccaccctgctaattgtcttggagaagttatttaacctctctgaannnnnnnnnnnnnnnnnnnnnnnnnnnnnnnnnnnnnnnnnnnnnnnnnnnnnnnnnnnnnnnnnnnnnnnnnnnnnnnnnnnnnnnnnnnnnnnnnnnnnnnnnnnnnnnnnnnnnnnnnnnnnnnnnnnnnnnnnnnnnnnnnnnnnnnnnnnnnnnnnnnnnnnnnnnnnnnnnnnnnnnnnnnnnnnnnnnnnnnnnnnnnnnnnnnnnnnnnnnnnnnnnnnnnnnnnnnnnnnnnnnnnnnnnnnnnnnnnnnnnnnnnnnnnnnnnnnnnnnnnnnnnnnnnnnnnnnnnnnnnnnnnnnnnnnnnnnnnnnnnnnnnnnnnnnnnnnnnnnnnnnnnnnnnnnnnnnnnnnnnnnnnnnnnnnnnnnnnnnnnnnnnnnnnnnnnnnnnnnnnnnnnnnnnnnnnnnnnnnnnnnnnnnnnnnnnnnnnnnnnnnnnnnnnnnnnnnnnnnnnnnnnnnnnnnnnnnnnnnnnnnnnnnnnnnnnnnnnnnnnnnnnnnnnnnnnnnnnnnnnnnnnnnnnnnnnnnnnnnnnnnnnnnnnnnnnnnnnnnnnnnnnnnnnnnnnnnnnnnnnnnnnnnnnnnnnnnnnnnnnnnnnnnnnnnnnnnnnnnnnnnnnnnnnnnnnnnnnnnnnnnnnnnnnnnnnnnnnnnnnnnnnnnnnnnnnnnnnnnnnnnnnnnnnnnnnnnnnnnnnnnnnnnnnnnnnnnnnnnnnnnnnnnnnnnnnnnnnnnnnnnnnnnnnnnnnnnnnnnnnnnnnnnnnnnnnnnnnnnnnnnnnnnnnnnnnnnnnnnnnnnnnnnnnnnnnnnnnnnnnnnnnnnnnnnnnnnnnnnnnnnnnnnnnnnnnnnnnnnnnnnnnnnnnnnnnnnnnnnnnnnnnnnnnnnnnnnnnnnnnnnnnnnnnnnnnnnnnnnnnnnnnnnnnnnnnnnnnnnnnnnnnnnnnnnnnnnnnnnnnnnnnnnnnnnnnnnnnnnnnnnnnnnnnnnnnnnnnnnnnnnnnnnnnnnnnnnnnnnnnnnnnnnnnnnnnnnnnnnnnnnnnnnnnnnnnnnnnnnnnnnnnnnnnnnnnnnnnnnnnnnnnnnnnnnnnnnnnnnnnnnnnnnnnnnnnnnnnnnnnnnnnnnnnnnnnnnnnnnnnnnnnnnnnnnnnnnnnnnnnnnnnnnnnnnnnnnnnnnnnnnnnnnnnnnnnnnnnnnnnnnnnnnnnnnnnnnnnnnnnnnnnnnnnnnnnnnnnnnnnnnnnnnnnnnnnnnnnnnnnnnnnnnnnnnnnnnnnnnnnnnnnnnnnnnnnnnnnnnnnnnnnnnnnnnnnnnnnnnnnnnnnnnnnnnnnnnnnnnnnnnnnnnnnnnnnnnnnnnnnnnnnnnnnnnnnnnnnnnnnnnnnnnnnnnnnnnnnnnnnnnnnnnnnnnnnnnnnnnnnnnnnnnnnnnnnnnnnnnnnnnnnnnnnnnnnnnnnnnnnnnnnnnnnnnnnnnnnnnnnnnnnnnnnnnnnnnnnnnnnnnnnnnnnnnnnnnnnnnnnnnnnnnnnnnnnnnnnnnnnnnnnnnnnnnnnnnnnnnnnnnnnnnnnnnnnnnnnnnnnnnnnnnnnnnnnnnnnnnnnnnnnnnnnnnnnnnnnnnnnnnnnnnnnnnnnnnnnnnnnnnnnnnnnnnnnnnnnnnnnnnnnnnnnnnnnnnnnnnnnnnnnnnnnnnnnnnnnnnnnnnnnnnnnnnnnnnnnnnnnnnnnnnnnnnnnnnnnnnnnnnnnnnnnnnnnnnnnnnnnnnnnnnnnnnnnnnnnnnnnnnnnnnnnnnnnnnnnnnnnnnnnnnnnnnnnnnnnnnnnnnnnnnnnnnnnnnnnnnnnnnnnnnnnnnnnnnnnnnnnnnnnnnnnnnnnnnnnnnnnnnnnnnnnnnnnnnnnnnnnnnnnnnnnnnnnnnnnnnnnnnnnnnnnnnnnnnnnnnnnnnnnnnnnnnnnnnnnnnnnnnnnnnnnnnnnnnnnnnnnnnnnnnnnnnnnnnnnnnnnnnnnnnnnnnnnnnnnnnnnnnnnnnnnnnnnnnnnnnnnnnnnnnnnnnnnnnnnnnnnnnnnnnnnnnnnnnnnnnnnnnnnnnnnnnnnnnnnnnnnnnnnnnnnnnnnnnnnnnnnnnnnnnnnnnnnnnnnnnnnnnnnnnnnnnnnnnnnnnnnnnnnnnnnnnnnnnnnnnnnnnnnnnnnnnnnnnnnnnnnnnnnnnnnnnnnnnnnnnnnnnnnnnnnnnnnnnnnnnnnnnnnnnnnnnnnnnnnnnnnnnnnnnnnnnnnnnnnnnnnnnnnnnnnnnnnnnnnnnnnnnnnnnnnnnnnnnnnnnnnnnnnnnnnnnnnnnnnnnnnnnnnnnnnnnnnnnnnnnnnnnnnnnnnnnnnnnnnnnnnnnnnnnnnnnnnnnnnnnnnnnnnnnnnnnnnnnnnnnnnnnnnnnnnnnnnnnnnnnnnnnnnnnnnnnnnnnnnnnnnnnnnnnnnnnnnnnnnnnnnnnnnnnnnnnnnnnnnnnnnnnnnnnnnnnnnnnnnnnnnnnnnnnnnnnnnnnnnnnnnnnnnnnnnnnnnnnnnnnnnnnnnnnnnnnnnnnnnnnnnnnnnnnnnnnnnnnnnnnnnnnnnnnnnnnnnnnnnnnnnnnnnnnnnnnnnnnnnnnnnnnnnnnnnnnnnnnnnnnnnnnnnnnnnnnnnnnnnnnnnnnnnnnnnnnnnnnnnnnnnnnnnnnnnnnnnnnnnnnnnnnnnnnnnnnnnnnnnnnnnnnnnnnnnnnnnnnnnnnnnnnnnnnnnnnnnnnnnnnnnnnnnnnnnnnnnnnnnnnnnnnnnnnnnnnnnnnnnnnnnnnnnnnnnnnnnnnnnnnnnnnnnnnnnnnnnnnnnnnnnnnnnnnnnnnnnnnnnnnnnnnnnnnngtgttgaggactttcattttgttttaaatgtgtctggtattaagcagcatctttagtgaaatgactttaaacttaagtaggaaatacagctccatttcacatgtgaattttgtctgcatttacatctctgcaggccttacatgccatgacaccagacatttttttaattaagatatgaagtgctcattttttgtgtgtgtggacctgctgtattctaacaaatttactacacgtctcagaaaacacatagctttgccaaagttggtgagtagcccagcatggtttatctccagcccacagctctttccctgaattcaatactgcaggcacaatttaatgcaaacccaatttatgacttaatgctctagggaccgtagtgggagattgttacattattcttttctaatcctatttgtgttttaatttgctaagtctgtaatgaggtgcatgccttgaatattcaagatctttcacattgcttttgactttgtttaatataatagattttatagtttgcattaaatacccaggtgcttcggtcagtattatctctttattttctcaactagagtgaataaaattacacgatgaaagt

SEQ ID NO: 37121 - DNA, 749 bp, Macaca Mulatta
ggctattatttttcctttgcgttctgaaataatggctctaatattttccctgtcatgccttcattctagacattgaatttatatcttctttttttcagatacggagcaaatagcatccttaacctatgaataatggtgttgcctagattcttgtcacacgcacagaagaccctttgtacctagtaacattcatcctctcgatttccggtgaatacggttaaattcatgcacatttgttcttgtttctgaaaatgagatcaatttatttgttatccagcaaattgaaaattctattattagagtactgcagtttttgctctgcttatatgtatatgaactggaaatctgaatttttaaatttagatctttaaatcaaattatttttatgcatattttcatttaatatagagtatatcaatcgactgaagtctttcacgactagtaggctgagccttttcttctttaagagagtgaattagtttctgagaagtcaatccattgtgaaaagtttcagatgagattattttcggtccctttagtctttttaagtatcaccatatgtattttaattagaagccattaaactaaagagagtgtttcctttgaaatgaacaaggttttaattttgcccacccaaggccaaaaccaaaatggagccattgggatagaagaaaaggcctcccccccttgggtaatggttaacctgaaatggatacacttcccccgacatacacctggggtttttggaa

SEQ ID NO: 37122 - DNA, 759 bp, Macaca Mulatta
  misc_feature (1)...(759): n = A,T,C or G
gggagtcggaggtactaatatacttgtgagtccctcaattaccctgtgcaagataaattcttttaggtatgattagggtatcctaagttagaaactcctctttcatatcttttttatgaagtgaaatgagatactgtacagacaagaagtattattctgttcattaataatcaacctttcactcaattttaatattttagtctatggaaaaaaattttataacacttctttttaaaatggggaaaaattgtacaagtaagtatgatcaaacctctcttaaaannnnnnnnnnnnnnnnnnnnncgtgnnnnnnnnnnnnnnnnnnnnnnnnnnnnnnnnnnnnnnntacaaggtccatctgaaggaaaatagcaaatttcactggcctcacagacagagaaggagccatcatctttcgtcatgaggtcaatgccacacacatccatcccaaggatattagacacctggacagctagctccttcctttgttcactctgagcacattatccccacaccacttagtgagcagttgctttgcatccttccatctattgaacatctatgccaaccatacagcctcccatgacaatggaacatatatcctgtccatganactcttctagcttctggaatgggtacagagcttcatgatgattaagatggcttagatcagccaaataaatggtgcttatctggagccaagaaaacagctttacctctgtgaccctgtgtattcttcactaccattggtaactccaa

SEQ ID NO: 37123 - DNA, 729 bp, Macaca Mulatta
  misc_feature (1)...(729): n = A,T,C or G
gtccctacatataaaaagcttcctgagaatgtacagcccaggttcctggaagatgaaggcctttacactggggtaagaccagaggtggcacgcaccaatcagaacatcatggagaacagattgctgatgcaggatcccgnnnnnnnnnnnnnnnnnnnnnnnnnnnnnnnnnnnnnnnnnnnnnnnnnnnnnnnnnnnnnnnnnnnnnnnnnnnnnnnnnnnnnnnnnnnnnnnnnnnnnnnnnnnnnnnnnnnnnnnnnnnnnnnnnnnnnnnnnnnnnnnnnnnnnnnnnnnnnnnnnnnnnnnnnnnnnnnnnnnnnnnnnnnnnnnnnnnnnnnnnnnnnnnnnnnnnnnnnnnnnnnnnnnnnnnnnnnnnnnnnnnnnnnnnnnnnnnnnnnnnnnnnnnnnnnnnnnnnnnnnnnnnnnnnnnnnnnnnnnnnnnnnnnnnnnnnnnnnnnnnnnnnnnnnnnnnnnnnnnnnnnnnnnnnnnnnnnnnnnnnnnnnnnnnnnnnnnnnnnnnnnnnnnnnnnnnnnnnnnnnnnnnnnnnnnnnnnnnnnnnnnnnnnnnnnnnnnnnnnnnnnnnnnngacaaacgagaaaattccgtgatgctgaacaagaaaaagatcgaacattgcttaagaccatcataaaagtttggaaagagatgaaatcccttcgagagttccagagatttacaaatactcccttgaaacttgttttgagaaa

SEQ ID NO: 37124 - DNA, 642 bp, Macaca Mulatta
  misc_feature (1)...(642): n = A,T,C or G
cgaggctgaaaggnnnnnnnnnnnnnnnnnnnnnagaaggagtcttgctctgttgcacaggatggagtgcggtggctcnnnnnnnnnnnnnnnnnnnnnnnnnnnnnnnnnnnnnnnnnnnnnnnnnnnnnnnnnnnnnnnnnnnnnnaggactacaggcacaagccaccatcgttgggttattttttgnnnnnnnnnnnnnnnnnnntgtttcgctgtgttggccaggtnnnnnnnnnnnnnnnngnnnnnnnnnnnnngcccacctcgannnnnnnnnnnnnnnnnnnnnnnnnnnnnnnnnnntacgcctggcctggaaggtgtattttaacaaattttcagagaacttaagatcaaaacaccatgcttcacaacttttcacccaaaagatacacattcaacgcaaaaagttttaaaaatataacaagaatggattatttaaaaacaacaattaatgagatagcatggggtgagactagacacagagagctcaattaggagatgatttcaataatccaggcaagagatattgttgagggggggcccggtacnnnnnnnnnnnnnnnnnnnnnnnnnnnnnnnnnnnnnnnnnnnnnnnnnnnnnnnnnnnnnnnnnnnnnnnnnnngcgttaccaactt

SEQ ID NO: 37125 - DNA, 405 bp, Macaca Mulatta
atgatgaagtgttcacaggctttactagcgatcttttggcttctactgagctgggtgagcagtgaagacaaggtgatgcaaaaccctctatctctggttgtccacgagggagacactgtaactctcaactgcagttatgaagtggttaactttcgaagcctactatggtacaagcaggaaaagaaagctcccatatttctatttacgctaacttcaagtggaattgaaaagaagtcaggaagactaagtagcatattagacaagaaagaccttttcagcatcctgaacatcacagccacccagaccagggactcggctgtctacctctgtgcgtgtagtcgggagggaaactacaaatacatctttggaacaggcaccaggctgaatgttttagcaaatatccag

SEQ ID NO: 37126 - DNA, 471 bp, Macaca Mulatta
attagactttttgggtttatgttttcatgggagctactgtaggtgttggcaagcgatgcacagctggagcaccagactctggggccactacagttgggaacccagcaggcatggctcacctgggtactctggtgtggttcaacataagcctggctaagacctccaattatgattgtaagatgaatcaattatgatttaaccaatgacctaaattggggagaaatgattaagagatgacctagatttattgatatctaaattcgaattttacataaggggcagtaagttcattatatttactaagatgaaccatgtaaagctgataatcaagtagtgctttaaccaggcaaaactgaagaaccatatgtaaccagccctggagcagatgaaagcaggaccagattaaccacacctggaaaatcaggcaagtggggttggaagaaattggtcgcaactgtagctcaacgtaag

SEQ ID NO: 37127 - DNA, 678 bp, Macaca Mulatta
  misc_feature (1)...(678): n = A,T,C or G
ggggtcctgtcacagtgaccccaacggttggctgaggacaactccctgagccttaacaaaacaggagccctccgtggcagtgcctcagtgtcgaggcaccagcctgaccaatccagggagtcgtaaaaacacaggacactacgctacacggagggctgaccaggatgcagaaacagcagacagagtacaaggaaagcagagcggaatcccagactcaggcctcccggacggcattcaggcggctgcgaaaattgttactttgtagcacaggcaccatcccgtgcccgggaaaattaccaactgacagcgcaggtgcaacatgacgttcgaccagagaaaccaatacctacttggtcacgccctctgcgatgagatcatctccgcctctggcccaaccccttcccctccatgtgtatataaggcactgcattaccgccattaaacgagacttgatccnnnnnnnnnnnnnnnnnnnnnnnaacaaaaaaacacancanaacaacacaactaaataacaatcaaccacactaacttcccccacaaatataaaaaataaaaaatcctttcnnnnnnnnnnnnnnnnnnnnnnnnnctttttttggcccggcccaaagaagaaaaggtaaactttccaaaaaactggcaaaaggttggttcccaaaaaacccggggcacatg

SEQ ID NO: 37128 - DNA, 1028 bp, Macaca Mulatta
  misc_feature (1)...(1028): n = A,T,C or G
agtttcgccatgggtgacttcggcctgagatgcgctccatggagcagattctggagttgctggtgctggaacagttcctgactatcctgtcccaggacatccacagcagggtgcagaagctgcaacaggcgagctgtgaagaagctgtaactcttttaaagtatatgtatgacttttaaaagatagagcttgtgaaagtgagggaataggnnnnnnnnnnnnnnnnnnnnnnnnnnnnnnnnnnnnnnnnnnnnnnnnnnnnnnnnnnnnnnnnnnnnnnnnnnnnnnnnnnnnnnnnnnnnnnnnnnnnnnnnnnnnnnnnnnnnnnnnnnnnnnnnnnnnnnnnnnnnnnnnnnnnnnnnnnnnnnnnnnnnnnnnnnnnnnnnnnnnnnnnnnnnnnnnnnnnnnnnnnnnnnnnnnnnnnnnnnnnnnnnnnnnnnnnnnnnnnnnnnnnnnnnnnnnnnnnnnnnnnnnnnnnnnnnnnnnnnnnnnnnnnnnnnnnnnnnnnnnnnnnnnnnnnnnnnnnnnnnnnnnnngggcctgattggttgagaaccaagtgaagtcatggttactatgattactcataacctctctcagaacctaatgccaacagtctgcaagattcaaatgctggcaaccatcacctggcttcctnnnnnnnnnnnnnnnnnnnnnnnnnnnnnnnnnnnnnnnnnnnnnnnnnnnnnnnnnnnnnnnnnnnnnnnatggctcaggcacactctgaagttggtcccagcacatctgcacggagcatcaggagaaaggcggacgaatacttgagatgccagcctggcctctaaatctgtgctgagcgttttactcagtagacagcttgggaatcatagaaacgatgtggatctgacagagtggctgtggacactgacacaaaccacaccagggtggacctggcctttgccaacacgccatacaatcaacccacctttgcaccctggggaggatagaaaatccaagaaaatggtgtggatcaataaatccttcccctg

SEQ ID NO: 37129 - DNA, 2059 bp, Macaca Mulatta
  misc_feature (1)...(2059): n = A,T,C or G
ngcagatgccagaggaccagcatgggagggctgttctgcaaccaggacacctgccgtggtgccccactttctccaggaaacaaggacacccgcacggagtgcccgcgcgagagtcagcaaccagcctcggctgtggggttcctgcaacgtgtgttcctgccggggttctccttcctgccattccgagctacggtggggatcacgcacnccatacgtggagcccagggacagcgcagcccggggagtgcccccccagccaggaagtctgaccttcagagaacggggaagaccatcttccactttacgctgcctgggcgactgtaaacgtggattccaccgtctcagacagtagacgattcccagtctnnnnnnnnnnnnnnnnnnnnnnnnnnnnnnnnnnnnnnnnnnnnnnnnnnnnnnnnnnnnnnnnnnnnnnnnnnnnnnnnnnnnnnnnnnnnnnnnnnnnnnnnnnnnnnnnnnnnnnggaggggaggctttcctctccccacactgggaattcaggttctagccccagggtcctggtcgtgtccagcatcccaggagcatgagcgagacgctgttgtgtccacctgctatgtgcagtcagggaccagctgcagagtgcactgtgcatcatttagactctgcaggctcaggtgaaaacctagctctgccactgctctctggatgaccttgtcacctccctctcctcctttgaaaagtgtgggaaatgctgcttttcatcatttccaagtcaccatgtattgtggcttaaacagcagtgttatttctttctacagtgacacataacatattgccgtgtttttcaacagactgcagtgttggatgcagtgaagtctggcgatggctgtttcannnnnnnnnnnnnnnnnnnnnnnnnnnnnnnnnnnnnnnnnnnnnnnnnnnnnnnnnnnnnnnnnnnnnnnnnnnnnnnnnnnnnnnnnnnnnnnnnnnnnnnnnnnnnnnnnnnnnnnnnnnnnnnnnnnnnnnnnnnnnnnnnnnnnnnnnnnnnnnnnnnnnnnnnnnnnnnnnnnnnnnnnnnnnnnnnnnnnnnnnnnnnnnnnnnnnnnnnnnnnnnnnnnnnnnnnnnnnnnnnnnnnnnnnnnnnnnnnnnnnnnnnnnnnnnnnnnnnnnnnnnnnnnnnnnnnnnnnnnnnnnnnnnnnnnnnnnnnnnnnnnnnnnnnnnnnnnnnnnnnnnnnnnnnnnnnnnnnnnnnnnnnnnnnnnnnnnnnnnnnnnnnnnnnnnnnnnnnnnnnnnnnnnnnnnnnnnnnnnnnnnnnnnnnnnnnnnnnnnnnnnnnnnnnnnnnnnnnnnnnnnnnnnnnnnnnnnnnnnnnnnnnnnnnnnnnnnnnnnnnnnnnnnnnnnnnnnnnnnnnnnnnnnnnnnnnnnnnnnnnnnnnnnnnnnnnnnnnnnnnnnnnnnnnnnnnnnnnnnnnnnnnnnnnnnnnnnnnnnnnnnnnnnnnnnnnnnnnnnnnnnnnnnnnnnnnnnnnnnnnnnnnnnnnnnnnnnnnnnnnnnnnnnnnnnnnnnnnnnnnnnnnnnnnnnnnnnnnnnnnnnnnnnnnnnnnnnnnnnnnnnnnnnnnnnnnnnnnnnnnnnnnnnnnnnnnnnnnnnnnnnnnnnnnnnnnnnnnnnnnnnnnnnnnnnnnnnnnnnnnnnnnnnnnnnnnnnnnnnnnnnnnnnnnnnnnnnnnnnnnnnnnnnnnnnnnnnnnnnnnnnnnnnnnnnnnnnnnnnnnnnnnnnnnnnnnnnnnnnnnnnnnnnnnnnnnnnnnnnnnnnnnnnnnnnnnnnnnnnnnnnnnnnnnnnnnnnnnnnnnnnnnnnnnnnnnnnnnnnnnnnnnnnnnnnnnnnnnnnnnnngtctattctctttcaagtcatcccccttgagccagccctccagtccaggccaaatcccagcctgccctcggtccgctgttgttgggcctgcacccgagccatgagcacacacagtgattgtggcagcagaagcttaatctgggctcagacttaggctgatgctgcgcgtcaggacctgcc

SEQ ID NO: 37130 - DNA, 835 bp, Macaca Mulatta
ggtgtccctgagcacgagctgtgaggggattcacttgtgtgcggaattcctcggaactatggcgtccctttcccttgcacctgttaacatcttcaaggcaggagctgatgaagagagagcagagacagctcgcctgacttcttttattggtgccatcgccattggagacttggtaaagagcaccttgggacccaaaggcatggacaaaattcttctaagcagcggacgagatgcctctcttatggtaaccaatgatggtgccactattctgaaaaacattggtgttgacaatccagcagctaaagttttagttgatatgtcaagggttcaagatgatgaagttggtgatggcactacctctgttaccgttttagcagcagaattattaagggaagcagaatctttaattgcaaaaaagattcatccacagaccatcatagcgggttggagagaagccacaaaggctgcaagagaggcactgttgagttctgcagtcgatcatggttccgatgaagtaaaattccgtcaagatttaatgaatattgcgggcacaacattatcctcaaaacttcttactcatcacaaagaccactttacaaagttagctgtagaagcagttctcagactgaaaggctctggcaacctcgaggcaattcatattatcaagaagctaggaaggaagtttggcagattcttatttagatgaaggctttctgttggatataaaaattgggagtcaacaaccaaaccacttgacacgctaaaatctattgcactccgcctggatacgcacactaacaattgggcccgggaaatggtcaaccgcagtccgcac

SEQ ID NO: 37131 - DNA, 761 bp, Macaca Mulatta
gggtactttcaagtacaaggtcaatacataagccagagtgaatgattctacaagttgagcatctctaattcaaaaatctgaaatccagaagcttcaaaatctgaatctttctgagcactgacttgaccccacaagtggaaaattccccacctgacacctttgctttctgatggttcagtttaaacggattttgtttcttgcacaaaattattaaaaatgttatataaattactttcaggctatatgtataaggtggatgtgaaacctgaattatgtaattagtcaggtcccattgtatatatgcagatattccagaatctgaaatccaaaacacttctggtccctagcattttggataagggatactcagcttgtacctacatattcatatatattcactgttgttagaaatttttaagttgctgttttgtgatgaatccaaatcttttgtcttgctaccaagctattgtcactgcagtgcattataccaaagagcaaagtgtcagtgccattgaaaatacagaacccattaatatcgtgactatatgattgcatttatattccaaggtgaaccttttttatactaaaaattttgggggaatatggttttgggatgtattataagagcttgaaactctaaccctccttaatagtttttatagaaatttaaaaaatttttttgatacaggtttaccccaaatttgggtgaataacaaatctttaaagccttttttaatgtccaaatttaattttaaaatatt

SEQ ID NO: 37132 - DNA, 633 bp, Macaca Mulatta
  misc_feature (1)...(633): n = A,T,C or G
gggtcttcatagctatcatttgcctacaataaattattgtagcagtttgcaataccaaaatattttttatggactttatatttttcctttcgataaagggatgctgcatagtaaagagttggtataattaaactatctcagccctttccctgctttcctttctgctccatatgcctcattgtccttccagggagctcttttaatcttaaaattctacatttcatactcttagtcaaattctgttacctttttaataactcttcccactgcatatttccatcttgaattggtggttctaaattctgaaactgtagttgagatacaactattgaatatttctgggagatgtgcatccctcttcttttggttgcctaagatattttgcataatgaaactctttgaaattgcctcaaagagtttaggcaaaccctggccctgggccgtgggaatcctgggnnnnnnnnnnnnnnnnnnngggttaaactaacctccccctaaaagccttgaaccccccttttaactgnnnnnnnnnnnnnnnnnnnnnntgnnnnnnnnnnnnnnnnnnnnnnnnccgggtgttagaaagcccatttttcccctttgtggtttcccccttcccggaaccaaaaaaaa

SEQ ID NO: 37133 - DNA, 518 bp, Macaca Mulatta
  misc_feature (1)...(518): n = A,T,C or G
ctcacacctgtaatcccagcactttnnnnnnnnnnnnnnnnnnnnnnnnnnnnnnnnnnnnnnnnnnnnnnnnnnnnnnnnnnnnnnnnnnnnnnnnnnnnnnnnnnnnnnnnnnnnnnnnnnnnnnnnnnnnnnnnnnnnnnnnnnnnnnnnnnnnnnnnnnnnnnnnnnnnnnnnnnnnnnnnnnnnnnnnnnnnnnnnnnnnnnnnnnnnnnnnnnnnnnnnnnnnnnnnnnnnnnnnnnnnnnnnnnnnnnnnnnnnnnnnnnnnnnnnnnnnnnnnnnnnnnnnaggtgaaatgctgagcctcggtgtaggaatcttggttggctctgtctgacttctgctggccgtttttttcatggctagaaggatccagaagaagaggctggaaaatcagaagagtgtggtcatcacctcagtatgagccaccactgaggcataaactccctctcagataccttggctatggatgccttcctcttgtgcctccaggggtgctttcaaatcatgtctcacc

SEQ ID NO: 37134 - DNA, 799 bp, Macaca Mulatta
  misc_feature (1)...(799): n = A,T,C or G
ggggcacttttgttaaaaaacaatggatcataaaagtgggttttatttctggactctcaattctactcactgatttatatgtccatctttacattagtaccacactattttgattatcaacacttagagaactttaaatggtttatgaggagagagtagctttggacttccctgagggttatgtcttgcaaaaccagaagctcggctatggtactgttacaggaatttttggctcacaggaattactggctcttgtgtgatgtgagacttgtaatccagggtgactcccacatctatcaaatgtggacactggtttatcttctggagggtcaaggagaattatttatgaatgactgtattgactgttgaacatattctcattgaagaggaatacctaatgctgccctgctaagatgctgttcttatgccttctgttctcagaatggatctgatgccaagtatgggctatggtcatcttgtgagtttgaatgttgaggagagccaaagatgcangctaggttcgtgtctagacatagaaatagggtgtaaaagtgtttaaaatacttggcatttgtctgtgaggaagtgtattcacacgtatttgcagagtctgtttgcagttaggcaaatgtaggtcactggcattgatctgctgtgaactaattgatctacctttgaacaaccctttaaccacctgagccacaaccttcctctaactgtaaaaatttagaagacctagcaatttgataagtcctctaatcccttttatgccggaaatccgaagcattcctattggact

SEQ ID NO: 37135 - DNA, 836 bp, Macaca Mulatta
  misc_feature (1)...(836): n = A,T,C or G
gggccnnnnnnnnnnnnnnnnnnnnnnnnnnnnnnnnnnnnnnnnnnnnnnnnnnnnnnnnnnnnnnnnnnnnnnnnnnnnnnnnnnnnnnnnnnnnnnnnnnnnnnnnnnnnnnnnnnnnnnnnnnnnnnnnnnnnnnnnnnnnnnnnnnnnnnnnnnnnnnnnnnnnnnnnnnnnnnnnnnnnnnnnnnnnnnnnnnnnnnnnnnnnnnnnnnnnnnnnnnnnnnnnnnnnnnnnnnnnnnnnnnnnnnnnnnnnnnnnnnnnnnnnnnnnnnnnnnnnnnnnnnnnnnnnnnnnnnnnnnnnnnnnnnnnnnnnnnnnnnnnnnnnnnnnnnnnnnnnnnnnnnnnnnnnnnnnnnnnnnnnnnnnnnnnnnnnnnnnnnnnnnnnnnnnnnnnnnnnnnnnnnnnnnnnnnnnnnnnnnnnnnnnnnnnnnnnnnnnnnnnnnnnnnnnnnnnnnnnnnnnnnnnnnnnnnnnnnnnnnnnnnnnnnnnnnnnnnnnnnnnnnnnnnnnnnnnnnnnnnnnnnnnnnnnnnnnnnnnnnnnnnnnnnnnnnnnnnnnnnnnnnnnnnnnnnnnnnnnnnnnnnnnnnnnnnnnnnnnnnnnnnnnnnnnnnnnnnnnnnnnnnnnnnnnnnnnnnnnnnnnnnnnnnnnnnnnnnnnnnnnnnnnnnncctggcataaaccccaaaccggaatcgaaaaacctcaccccaaaccctaaacagccaggccttagcaaggccaaaaacaagccccaggctacactttcactgggtaaacccaaaccagggattgcccccaagggaaagggttaaaaaaaagttaaaagggaacc

SEQ ID NO: 37136 - DNA, 356 bp, Macaca Mulatta
agccaaagttcctctaggtcccgaagtcgtggcaggaggaggtcgggtaataaagacagaactgttcagagtcccaaatctaaataaactagttttgttcttaaatgattgtatatcttatttattatggttgctacatactcggatagaaggctatgaacgcagacgggtttgcaagtctggctgaaccctatgtagcctgaaattctatttaaaaatattttttattcttttataatcatgaagtatggttagtatagaaaacataaaatacataaataacaacatgaaaattacttgtaatcctaaccctgagagcgaactaaacattggagcattgttttcgtgtgtacact

SEQ ID NO: 37137 - DNA, 643 bp, Macaca Mulatta
ttaaatagatgcctagaaaatctgtgtttgctgtttacattttagtgtactttgccacattagcagtaccacacttctttttctttcatccttctaagaactaatgaaagataacttgctattagccttgacatgctgcacatgccattatgttgttctctaagaacaactaaattctctccagtgttcatgtgtgattcctttttcatcattattactttaatgtggatgaatactatttctaggaacttgtcactgaacagattgcatatgtaaatgcagataattcttcagcaatatagtgaaaatgatttcacaaaaaaaaagaaattccatatgtactgtatacatcttcctgaatccaaaattctcttgttatccacacagtctgaaatctcatattaaacagtggtaaatttttaaacattaggacattagctggctgcttctataaatgtacctgtattgtctgcctgctccttttgtggagatgtgtttttgtattggatgtttgggccaatgggaggcttcaagctacaacatattttcccagtttaaataatatttaacatatgacaaaccccagacaaggcttttaatatgtatcaagaactgcagtgttaggtggttcatttgcaaaccg

SEQ ID NO: 37138 - DNA, 773 bp, Macaca Mulatta
  misc_feature (1)...(773): n = A,T,C or G
ggacagcaatacagtgaatgagtcatacagctgagtcagagcccactcagcccctttcagggctctgacgaaggctgtgccagcacagaggcattcttccagccttgccccttccctgcaaacacacacacccacacacatacacacacgcccccctacagaccagtgacctcacaacatgcttctctgactgctagccttacttacttcacaggttcagtgaaatcctactgagtctcccatgtaacaggctttcttcatgctcacactcattcatccattcactgttcaggtactggaataaaaactcagtccttgtcttcaaagagctctccacccagcagaggaaatagtctccaaacatgccttgtcactgtagagggagcaacgcacggccatgggagagcctcacacaccatcagtatccgggctgatagaggagggaatgagggacacagcccctcaaagtgggatgggtcaagaagtcactgttctaaacatctggtcccaggactcccaagcctggtagcctctacttcccagtgggaacaccaagcctaaaggtgcagctacacaggttcaaacaacattgtttccgttttctntcaattaacgtggatactttgacatatgtaggaatagcctaagctaatggtcacagaacaggttctgggtctgatctgttttcaatgtgaagactgaatttttggctttgaatcagcagcagaagccaccttgatatataaggaaaacatacaatatcaaaaactggg

SEQ ID NO: 37139 - DNA, 944 bp, Macaca Mulatta
  misc_feature (1)...(944): n = A,T,C or G
ggctgctcttggagaagtcactcattcccttggcttcagcagtgctgggcctgcccagcctccatctccaggccctcgggtcctcccaggagcccaggttttgcgcttcattttctggatctcccgggcatttaaggtctttccacgtcccagtaccgggcgagaggaagcagatgtgcgaggagccatggagtaagaggaacagctgcttgtgtgcaggcggttgagcgtggtgcaggttcatgggagggtatctgggtgccccagactcgtcccaagcttgggggctgggataaaaaagtcccaagggggcaggcgtgnnnnnnnnnnnnnnnnnnatctcaccacctttgaaaggccaaaggtgggccgatccccttggggccgggaatttcaaaacattctggcccaaaaatggggaaaaccccctacctcnnnnnnnnnnnnnnnnnnnnccccgggaccggggagcctcttcccgtgaaattccaaaaactttggagaggcgcccgggcgggccgagaccgtgatgcatttacgacgacctcgtaaactttgtgtggtcttcgccagtgcccggaccgcctacccctcctccctcgccgcggaaacacaacgcaccccagccgcaatgaccgccgccccctctcccccatactaccgcgcgccgccgcgttcgcatctacctcatcgtatccgccgatacgggcgcggccacgggtaaatgactccaccgcggtttacaatcgctagtctggacctcattacgactcacggccccgccccgtccgccgcatattcctatctcgcatgcgccgcggggccacacaccccgcatacgatcccgcgagatcaccgctcgccgcagtcggttcatcggcgcctgaatgcaccttcaccaactcactctctgggcccccctgcgcagcgcatcgttacggctn

SEQ ID NO: 37140 - DNA, 765 bp, Macaca Mulatta
ggaatgaagtttttttacagcagttatttatccttattcgaattcactggagaaatgtttgtgtgtttttgataaatacaactaccttaaaaactataagatgtttagtaaaaacttttgttttaaattgagttttcattgcagaatatactacggtagttatagtggaacaatgaatatggtataaaaataatatcagcaaaatatcccaattattgacgataaaagtttcttcatatactgtgctttaacatagatacaagtttgtgtgttttaaaacttagaggttctttttcccaagtttgaccctgaggcaaattttaggacttaatcatctatgtaatgagcaattggacccttttatttttaactggttcttctctgtttcttgttctatatcactcacaaatgatgtatttctacagaacttgggagattcaagtctgtttcccttttaggaaaaaaaatagtagacaaaagagatcttcattttggtcgaatctatcaaacagtttaacattgtttatgaaatataattacatcatcatctgaagtggtattgtgtttgatctctatgtgaattttgcacccaaaggggaagacaggtggggggtagaatccagcttcctaatacactttgtaaaggctttgtaatattcgttttgtggtttacgaattagagatgctaattttataaaattagcataatgggaaaagaataatagcatgtaagctgtttaaactttgaagcagtagtgggtggca

SEQ ID NO: 37141 - DNA, 485 bp, Macaca Mulatta
  misc_feature (1)...(485): n = A,T,C or G
gggtgattcaactgttcctacatttaattgcagttttattattatgccttttggggttaaatgatgtgaagtgtttccacctactgataaataccatatgaaaacgtgacctaaaagactgatctaagaaacttttttgttgttatttttaaaaatatgaattgcaaaaaaaatgttctcaaagacacatgcatttgttttaaattcaaaaaattcttatgaatttattattgcttgtactttaacttttttttattgtagacactcctaagtgaataatgtctcatgggagaatccacatgatatgtgcttgtatttgtgtaatctgatcatgcactccatgggttggaaaaggcactccattggctaganaataaccagaaaccaatatgtcgattcttaaatcctggtttatgtaccaacggcatatggggaatgcctaactttttcaagaaataaaatggttattttttgtccttataaan

SEQ ID NO: 37142 - DNA, 673 bp, Macaca Mulatta
aaactctttctctacgggcacttaattgagctgtctgtgccctctttctctttccttagaggtgatcaaactatttctgaaggtttatgtatgtatttatttattgcatggtctgaatctgatatgtacttgtcaagactaaatctgtgtgttgagcactgactccatatttgaggctagaaagatgttaatgaaggctctctgttctctgcttgtaacctgaagctgccagtcaacagaatgaatcagagagtttccaggcaacgacactaaggtccctatgtaaggaggatcacacgcaatttttgtctttgcagaattcctctctgtataattattcttttgatcatgccacacatgaaaagaaaggcaactggggtatgaattatgtccttgttacacttggcattaacaatagagacagggtgaggagactgtgagaactgctggtctgagggaggtggttctccattcgtaattgacaaatgctgtgcgtgtccacaacggtgtcctcagagccgacctcaaactgtatatattacattgaccagtcaacatgggtaactacaattctgggtatgatactgcagtaagtgcaggctgaactgtctctactgtgcatgtgggaacagttcattgttctcaacaaataattcagacacatgtgattcca

SEQ ID NO: 37143 - DNA, 2971 bp, Macaca Mulatta
  misc_feature (1)...(2971): n = A,T,C or G
cctacaacggtcactgtgaagccttgaagacactggcagagacgctggtgaatctggacgtaagggaccacaagggccggaccgcactcttcctggccacggagcgcggctctactgagtgtgtggaggtgcttacggcccatggcgcctctgccctcatcaaggagcgcaagcgcaagtggacgcccctgcacgctgctgngctgcctctggccacactgactccctgcacttgctgatcgacagtggggaacgagctgacatcacagatgtcatggatgcctatggacagnnnnnnnnnnnnnnnnnnnnnnnnnnnnnnnnnnnnnnnnnnnnnnnnnnnnnnnnnnnnnnnnnnnnnnnnnnnnnnnnnnnnnnnnnnnnnnnnnnnnnnnnnnnnnnnnnnnnnnnnnnnnnnnnnnnnnnnnnnnnnnnnnnnnnnnnnnnnnnnnnnnnnnnnnnnnnnnnnnnnnnnnnnnnnnnnnnnnnnnnnnnnnnnnnnnnnnnnnnnnnnnnnnnnnnnnnnnnnnnnnnnnnnnnnnnnnnnnnnnnnnnnnnnnnnnnnnnnnnnnnnnnnnnnnnnnnnnnnnnnnnnnnnnnnnnnnnnnnnnnnnnnnnnnnnnnnnnnnnnnnnnnnnnnnnnnnnnnnnnnnnnnnnnnnnnnnnnnnnnnnnnnnnnnnnnnnnnnnnnnnnnnnnnnnnnnnnnnnnnnnnnnnnnnnnnnnnnnnnnnnnnnnnnnnnnnnnnnnnnnnnnnnnnnnnnnnnnnnnnnnnnnnnnnnnnnnnnnnnnnnnnnnnnnnggaccccccttcacgccgctgccttcgcggacaatgtctctgggctccggatgctgctgcagcaccaagccgaggtgaacgccactgaccatactggccgcactgcgctcatgacggcagctgagaacgggcagaccgctgctgtgnnnnnnnnnnnnnnnnnnnnnnnnnnnnnnnnnnnnnnnnnnnnnnnnnnnnnnnnnnnnnnnnnnnnnnnnnnnnnnnnnnnnnnnnnnnnnnnnnnnnnnnnnnnnnnnnnnnnnnnnnnnnnnnnnnnnnnnnnnnnnnnnnnnnnnnnnnnnnnnnnnnnnnnnnnnnnnnnnnnnnnnnnnnnnnnnnnnnnnnnnnnnnnnnnnnnnnnnnnnnnnnnnnnnnnnnacagtgctggctgtggatgaagaaggtnnnnnnnnnnnnnnnnnnnnnnnnnnnnnnnnnnnnnnnnnnnnnnnnnnnnnnnnnnnnnnnnnnnnnnnnnnnnnnnnnnnnnnnnnnnnnnnnnnnnnnnnnnnnnnnnnnnnnnnnnnnnnnnnnnnnnnnnnnnnnnnnnnnnnnnnnnnnnnnnnnnnnnnnnnnnnnnnnnnnnnnnnnnnnnnnnnnnnnnnnnnnnnnnnnnnnnnnnnnnnnnnnnnnnnnnnnnnnnnnnnnnnnnnnnnnnnnnnnnnnnnnnnnnnnnnnnnnnnnnnnnnnnnnnnnnnnnnnnnnnnnnnnnnnnnnnnnnnnnnnnnnnnnnnnnnnnnnnnnnnnnnnnnnnnnnnnnnnnnnnnnnnnnnnnnnnnnnnnnnnnnnnnnnnnnnnnnnnnnnnnnnnnnnnnnnnnnnnnnnnnnnnnnnnnnnnnnnnnnnnnnnnnnnnnnnnnnnnnnnnnnnnnnnnnnnnnnnnnnnnnnnnnnnnnnnnnnnnnnnnnnnnnnnnnnnnnnnnnnnnnnnnnnnnnnnnnnnnnnnnnnnnnnnnnnnnnnnnnnnnnnnnnnnnnnnnnnnnnnnnnnnnnnnnnnnnnnnnnnnnnnnnnnnnnnnnnnnnnnnnnnnnnnnnnnnnnnnnnnnnnnnnnnnnnnnnnnnnnnnnnnnnnnnnnnnnnnnnnnnnnnnnnnnnnnnnnnnnnnnnnnnnnnnnnnnnnnnnnnnnnnnnnnnnnnnnnnnnnnnnnnnnnnnnnnnnnnnnnnnnnnnnnnnnnnnnnnnnnnnnnnnnnnnnnnnnnnnnnnnnnnnnnnnnnnnnnnnnnnnnnnnnnnnnnnnnnnnnnnnnnnnnnnnnnnnnnnnnnnnnnnnnnnnnnnnnnnnnnnnnnnnnnnnnnnnnnnnnnnnnnnnnnnnnnnnnnnnnnnnnnnnnnnnnnnnnnnnnnnnnnnnnnnnnnnnnnnnnnnnnnnnnnnnnnnnnnnnnnncctagcctggcccctaaccacgcactttaaccttgcttctttcttttatcttcttttgggagggcagagcctgtggccattcctgccctggctctcctttccttgaactttgaggcttgtcatgaatttttaagtaaatgttttatcctttaggggaagaaacaaattaatttcctgcccatttcaaaaccacagccctagtatgtccactgtgtttcaggcatgtgtttgcatgtatatggagggagggaccatgttcttcctcctgtgcccccaagcccatagtttatctgtgctcccgatctgccaccaccttccgttatgtccaagagtacccactgccccagtcactcctgatctgaagccaaagatggtaggaggggcagggccgacaagggaccgtggctactcgggacccaggcttcccctccagtgtgaggaagaagctctgacctagagagagatgaataggtactggggcttggtccctgccttcccagcagggaggaaagatgggattgagctaggggctgcattggtaagatttctaaaagtcgcaccccaaaagccaaactgggctggagtgaagagggggcagttttctctctaaatgtagcattgaatttggccctggtccctttaagtgctctgtccacccatctcctagtgcagcctcctggacagttggacccactcctgcagcccagtgttcccttcctcacactcaatacctcagccaggggccaagacacagaacttgaatagaggtcatgccccctccgcccc

SEQ ID NO: 37144 - DNA, 493 bp, Macaca Mulatta
  misc_feature (1)...(493): n = A,T,C or G
gggttgaatttgtagctctgtcaactacaaaatcaccacacttttctcaaatataataggaattcagtgtcattacagataagatctctctaatgaccagatgaagacaattgaaggtttggtagaacttctgcaaaagttaggtaaagaagaataaatccagtttgtcagctttgttcatattctttttctgagtgatctaaatttttcttgcttgtgatcatgagccaagacaaggagtgttaaaggttttctgaatgcaaacacgtatacatttctgcatttcagaaatcagtcttaatagtaaatcctacaaactctcaactttctgcattgtattttaagtctatacaatgttagggcacatggtaatgtgggacagagttgattatatgatagcataagaaatttgcacttgttgtgttacaaaccaatgatttaaccagcatactcaccaaannnnnnnnnnnnnnnnnnnnnnnnnntgtcggcc

SEQ ID NO: 37145 - DNA, 630 bp, Macaca Mulatta
gtcagcagcctcccctttgagccccctcacttcccgacattccatccccgctgcctgccttctcccgccacctctgccttccgcagcccgtttccatcgaggaaaaggaatcatatcgtaagttcgctatccaggacctccactctttcaattcctttgctgatgcaagtaagggtgatgacctgcttcctgctggcactgaggattatatccatataggaattcaacagagaaatggcaggaagacccttactactgtccaagcgattgctgatgattatgataaaaagaaactagtgaaggcgtttaagaagcttgcctgcaatggtactgtaattgagcatccagaatatggagaagcaattcagctacaggatgaccaacgcaagaacatatgccagctccttgtagagcttggactggctaaggacaatcagctgaaggttcacgggttttaagtgcttgtggctcactgaagcttaagtgaggatttccttgcactgagtagaatttcccttctgtcccttgtcacaagtttaaaaacctccacagctggtataatgtaaccatttggggtctgcttttaactgggcctagtgtaactccttcatgcaataaactgaaaagagc

SEQ ID NO: 37146 - DNA, 927 bp, Macaca Mulatta
agactctcgagggaacctgagtgaccgcgctccgctactacaaccagagcgagggggggtctcacaccctccagtggatgtacggctgtgacctggtggcccgacgggcgcctcctccgcgggtatgaacagttcgcttacgacggcaaggattacatcgccctgaacgaggaccttcgctcctggaccgccgcggacatggcggctcggttcacccagcgcaagtgggaggcggcccgtgcggcggagcagctgagagcctacctggagggcaagtgcctggagtggctccgcagatacctggagaaccagaatgagtcgctgctgcgcgcggatcccccaaagacacacgtgaaccaccaacccgtctctgaccatgaagccaccctgaggtgctgggccctgggcttctaccctgcggagatcacactgacctggcaccgggatgcggaggaccaaactcaggacaccgagcttgtggagaccagtgccaggaggagatggaaccttccagaagtgggcagctgtggtggtgccttctggagaagagcagatatacacgtgccatgtgcacccagacggattgccggagcccctaccccgcagatgggagccctctacccagcgaaccaatcacatcgtgcgcattgccgctggcctggctgaccaccactcgtggtcccggcgctgctgtcacgtgccacgtgacgagaacaccccgtcgacagcacaaccaatcccgcatccccaccacgtaccagatctagcaccacatcactaaaacaacaatgtctcatgactcaaaaatactatccacataacaccccactaccaacacaaaatccacgaccctaacatccaccgctagccatcgaacatcccccatagcaccacaaatcacatcatctccactcttcccatcataca

SEQ ID NO: 37147 - DNA, 828 bp, Macaca Mulatta
  misc_feature (1)...(828): n = A,T,C or G
atttaacaggagctcttaaaccctcacaatgtgtcgaggacccgatggatggcgtacaccgtgtttttaagagcaattacggagaaatagggcaaaaattatacccgtggagacttctttgtattgcagggaattttatatgtcacagaggaatttaggagaagtttttttacaaaaaattaggggagttttcccaaaaaaataatattccggtaatttttattgaatggaaaaaacattgcccaattaaggggaccctgccccagctttaaaacccattgttgtttaggattcaaatggtgttttcttttggacccattagagaggagggttgcataaatcgggttttcaataacttcggtcggtattccttcnnnnnnnnnnnnnnnnnnnnnnntgagacagggtcttgccgcattttcacaggcagtgatccctcttctgatcagcatgagaatttttgacttgctttgtttcctgccttggctagttcacccctccttaggcgacctgatggtccctgactctcaggaggtcaccatatcaatgccaaacttagccgatcgacatagtgcactacagcccagaactgggctcaagccatccatcccaacttagtagctgggactgcaggtgcacggcactgtgccaggcttggtgtctgnnnnnnnnnnnnnnnnnnnnnnnnnnngaagtcttgctcttgtctcccaggtttgagtgcaatggctttnnnnnnnnnnnnnnnnnnnnnngnnnnnnnnnnnnnnacnnnnnnnnnnnnnntnnnnnnnnnnnnnnnnnnnnnnaggcgcctgtcaccacgcc

SEQ ID NO: 37148 - DNA, 203 bp, Macaca Mulatta
atgtctgggcgcggcaaaggtgggaagggtctgggcaaaggaggcgctaagcgccaccgcaaagtcctgcgcgacaatattcagggtatcaccaagccagccatccgacgcctggcacggcgagaaggcgttaagcgcatctcaggccttatatacgaggagacaaggggagttcttaaggtgttttggagaatgtgatccgc

SEQ ID NO: 37149 - DNA, 418 bp, Macaca Mulatta
atggagaagaatcctttggcagccccattactgatcctctggcttcatcttgactgcgtgagcagcatactgaaggtggaacaaagtccccagtcactgcatgttcaggagggagacagcgccaacttcacctgcagcttcccttccagcagtttttatgccttgcactggtacagattggaaactgcaaaaatccccaaggccttgtttgtaatgactttaaatggggatggaaagaagaaaggacgaataagtgtcactcttaataccaaggagggttacagctatttgtacatcaaaggatcccagcctgaagactcagccacatacctctgtgcctttgaaggggagggaaacgtgcaaatacacatttggagggggaacaaggcttaatgttttagcaaatatccagaaccct

SEQ ID NO: 37150 - DNA, 1715 bp, Macaca Mulatta
  misc_feature (1)...(1715): n = A,T,C or G
cgagatctccacgggatcctcaggattacgccaacttctctgtaacaaaagagctcaaagacaccatgagaacttcacacagcctgaggaggcacccgagtttcactgcaaactgtgacctgcccagctcctggacaagcacttggcaggtggcagacgacctcacccagaacactttggacctggagtatctgcgttttgcacataagctaaaacagaccataaagaatggggattctcagcattctgcctcctccgccaatgtctttccaaaggagttaccgacccagatctccattggtgctttgcctttgacaaaaatatctgaggcctcaattctgcatcctgcacctaggagcagaagcccccttctggtaacagttgtggagtcagatcccagaccacaggggcagcccaggagaggctacacagccagcaatctggacaactcttcctcttggagagagagatgtagtcataatagagatcttacaaattctcaaagaaatcagactgtttcattccaccttaacaaactgaaatacaacagcactttgaaggaatctcggaatgatatctcacttattctcaatgagtatgccgaattcaacaaggtgatgaagaatagcaaccaagtcgttttccaagacaaagagcttaatgatgcttctggagaagccactgctcaagtgatgtatctgcctttcccaggacggtcaatctcctttgaagacataatcatagacttgtgcaccaatttgcacatcaaactaagaagtgttgtgaaagaggcttgtaaaagtaccttcctgttctaccttgtcgaaacagaagacaaatcattctttgtaagaacaaagaaccttctgaggaaaggaggccatacagaaattgaacctcagcacttctgtcaagctttccacagagaggatgatacattaatcatcatcatcagaaatgaagatatatcatcacatttgcatcagattccttctttgctgaagctgaagcatttccccagtgtcatctttgctggagtagacagccctggagatgttcttgatcacacctaccaagaactgtttcgtgcaggaggctttgtgataacagatgacaagatattagaagccgtaacattagttcaactgaaggaaattatcaaaatcctggaaaaactaaatggaaatggaaaatggaagtggttgcttcactacagggaaaataaaaagctaaaagaagatgaaagagtggattcaactgcacataaaaagaacataatgttgaagtcatttcagagtgcaaatatcattgaattgcttcattatcaccagtgtgactctcgatcatcaacaaaagcagaaattttgaaatgtttgctaaacctgcaaattcagcatattgaagccaggtttgctgtcttcctaacagacaagcctactatccccagagaagtctttgaaaatagtggaatccttgttacagatgtaaataactttatagaanacatagaaaaagtagcagctccatttangactagctattggtgacacaactacagcctgcctggatatggatgatgccaataaaaaattattattttcccctttggaaaacttgtgaacatgtgaatacacatggtgaacagtcttatatttgnaaaatcaatgttctacaaccctggaaaagttttcattttcctgtaattttgcctgaaa

SEQ ID NO: 37151 - DNA, 786 bp, Macaca Mulatta
gggagtggagtgaggggtaacaagatggcgaccgaaacggtggagctccataagctgaagcttgctgaactaaagcaagaatgtcttgctcgtggtttggagaccaagggaataaagcaagatcttatccacagactccaggcatatcttgaagaacatgctgaagaggaggcaaatgaagaagatgtactgggagatgaaacagaggaagaagaaacaaagcccattgagctacctgtcaaagaggaagaaccccctgaaaaaactgttgatgtggcagcagagaagaaagtggtgaaaattacatctgaaataccacagactgagagaatgcagaagagggctgaacgattcaatgtacctgtgagcttggagagtaagaaagctgctcgggcagctaggtttgggatttcttcagttccaacaaaaggtctgtcatctgataacaaacctatggttaacttggataagctgaaggaaagagctcaaagatttggtttgaatgtctcttcaatctccagaaagtctgaagatgatgagaaactgaaaaagaggaaaggagcgatttgggattgtcacaagttcagctggaactgggaccacagaggatacagaggctaagaaggaggaaaagagcagagcgctttgggattgcttgatgaaaagttctttgatactatctggttctccagtgttttccattttctctcatttcttctctgggtcaccatattatgcccttaaatgcaccaggttcacggtgcccttacgttcccttgcctcgca

SEQ ID NO: 37152 - DNA, 606 bp, Macaca Mulatta
  misc_feature (1)...(606): n = A,T,C or G
ggggggtagcaaagcatcggaatgattactcaaaaatgcatattcctggtggggatggaggaagaaggaattagtaaaaggttaatcagaagttacagcttaaccgcattcatataggaataaatcaagtgagcagttccagactttagcataatatttttactatgatgctgttttattaatattttctaaatttcaaaacaaaaagtgaatgttagaaattgctgggtcccgatgttggtggctgttggagttttggaccactcgctagcagtgatttgaagattataattagctaaaatccaaaacaaaaaacccacaacaaaaattgtatggtgcagaacatgcaccctgacaatggtacttgttatcctataaacacgttaaaaaagattcattttgccagaacaccctcctccatcccccatttcatttcactaaattccttaaaacatggtgtttttccgggannnnnnnnnnnnnnnnnnnnnnnnnnnnnnnnnnnncaagggaaaaaaccaatgggcggttttccaaacccagggttttcctttnnnnnnnnnnnnnnnnnnnacctttgggaaaagnnnnnnnnnnnnnnnnnnn

SEQ ID NO: 37153 - DNA, 740 bp, Macaca Mulatta
  misc_feature (1)...(740): n = A,T,C or G
agcagtggtgtgatctcgcttcactgtaacctccacctncntgggttcaaatgattctcntgcttcagcctccggagtagctgagattacatgagcnnnnnnnnnnnnnnnnnnnnnnnnnnnnnnnnnnnnnaaaccggtttcaccatgtttgtnnnnnnnnnnnnnnnnnnnnnntnnnnnnnnnnnnnntctcctcagcctcnnnnnnnnnnnnnnnnnnnnnnnnnnnnnnnnnncacctggctcaggacactttcttcaatttaaaaaactatcttctttctaatatttgcattttgtaagataaataatgtatgttttgtccattttcttaaaaaaccattttcctcatatttccaacatctttgttttctacatgcttcatatgttatcaaattagatcttcagcaatgtctagtctattacttagttctcgatagaatgtttacttaagtaaccatgtattatcttgaattccaaggactttcttggtctctgattaccctttttcactgcagttttttgttatggttggtggatccactgccctctgtaacctccaaggatactcgtaacttacccttctgtttcctacattatctgtttgaggatcaactgttttgtttgttcatgctgtcccttcttatctgtaatccacttgattttcctcaaatctctggatttcttttcatattgatacagggaaaaattcatttttcagcggttttgtggagagt

SEQ ID NO: 37154 - DNA, 886 bp, Macaca Mulatta
  misc_feature (1)...(886): n = A,T,C or G
tcagccatggtcaatcccacggtgtccctcgacatcgccctcgatgatgagcccttgggctgcatctcctttgagctgtttgcagacaagtttccaaagacagcataaaactttcatgctctgggcactggagagaaaggatttggttgtaagggttcctgctttcacagaattattccagggtttatgtgtcagggtggtgacttcatatgccataaaggcactggtggcaagtccatctatggggagaaatttgatgataagaactttatcctaaagcatacgggtcctggcatcttgtctatggcaaatgctggacctaacacaaacggttcccagtttttcatctgcactgccaagagtgagtggttggatggcaagcatgtggtctttggcaagatgaaagaaggcatgaatattgtggaggccacggggcgctttgggtccagaaatggcaagaccagcaagaacatcaccattgctgactgtggataacttgaatagtttgacttgtgttttatcgtaaccaccagaccattcattttgtagctcaggagagcaccctccaccccatttgctcgcagtgtcctagaatctttgtgctcttgctgcagttccctttgggttccatgttttccttgttccctatgcctagctggattgaaatagttgagtaagtttatgattatganatttaaactacataacaactataaaaaattagccccattttggggttctggtggcagatgctaaggggcagcatcaagcagtgactgggatagcatcaagtcaggaagtggatcccatgtactcactactcttccctggtcagctgatcatgaatggagagagttcagttttctgggtgctagagatttcatcc

SEQ ID NO: 37155 - DNA, 3546 bp, Macaca Mulatta
  misc_feature (1)...(3546): n = A,T,C or G
agtatggaaccacccctttagtttgggctgcacgaaagggtcatttggaatgtgtgaaacatttactggccatgggagctgatgtggatcaagaaggagcnnnnnnnnnnnnnnnnnnnnnnnnnnnnnnnnnnnnnnnnnnnnnnnnnnnnnnnnnnnnnnnnnnnnnnnnnnnnnnnnnnnnnnnnnnnnnnnnnnnnnnnnnnnnnnnnnnnnnnnnnnnnnnnnnnnnnnnnnnnnnnnnnnnnnnnnnnnnnnnnnnnnnnnnnnnnnnnnnnnnnnnnnnnnnnnnnnnnnnnnnnnnnnnnnnnnnnnnnnnnnnnnnnnnnnnnnnnnnnnnnnnnnnnnnnnnnnnnnnnnnnnnnnnnnnnnnnnnnnnnnnnnnnnnnnnnnnnnnnnnnnnnnnnnnnnnnnnnnnnnnnnnnnnnnnnnnnnnnnnnnnnnnnnnnnnnnnnnnnnnnnnnnnnnnnnnnnnnnnnnnnnnnnnnnnnnnnnnnnnnnnnnnnnnnnnnnnnnnnnnnnnnnnnnnnnnnnnnnnnnnnnnnnnnnnnnnnnnnnnnnnnnnnnnnnnnnnnnnnnnnnnnnnnnnnnnnnnnnnnnnnnnnnnnnnnnnnnnnnnnnnnnnnnnnnnnnnnnnnnnnnnnnnnnnnnnnnnnnnnnnnnnnnnnnnnnnnnnnnnnnnnnnnnnnnnnnnnnnnnnnnnnnnnnnnnnnnnnnnnnnnnnnnnnnnnnnnnnnnnnnnnnnnnnnnnnnnnnnnnnnnnnnnnnnnnnnacacttgtctcctactgaaacagatggtgacatgcttgggtatgatttatatagcagtgccctagcagatattctcagtgagccgaccatgcagccacctatttgtgtggggttatatgcacagtggggaagtgggaaatctttcttactcaagaaactagaagnnnnnnnnnnnnnnnnnnnnnnnnnnnnnnnnnnnnnnnnnnnnnnnnnnnnnnnnnnnnnnnnnnnnnnnnnnnnnnnnnnnnnnnnnnnnnnnnnnnnnnnnnnnnnnnnnnnnnnnnnnnnnnnnnnnnnnnnnnnnnnnnnnnnnnnnnnnnnnnnnnnnnnnnnnnnnnnnnnnnnnnnnnnnnnnnnnnnnnnnnnnnnnnnnnnnnnnnnnnnnnnnnnnnnnnnnnnnnnnnnnnnnnnnnnnnnnnnnnnnnnnnnnnnnnnnnnnnnnnnnnnnnnnnnnnnnnnnnnnnnnnnnnnnnnnnnnnnnnnnnnnnnnnnnnnnnnnnnnnnnnnnnnnnnnnnnnnnnnnnnnnnnnnnnnnnnnnnnnnnnnnnnnnnnnnnnnnnnnnnnnnnnnnnnnnnnnnnnnnnnnnnnnnnnnnnnnnnnnnnnnnnnnnnnnnnnnnnnnnnnnnnnnnnnnnnnnnnnnnnnnnnnnnnnnnnnnnnnnnnnnnnnnnnnnnnnnnnnnnnnnnnnnnnnnnnnnnnnnnnnnnnnnnnnnnnnnnnnnnnnnnnnnnnnnnnnnnnnnnnnnnnnnnnnnnnnnnnnnnnnnnnnnnnnnnnnnnnnnnnnnnnnnnnnnnnnnnnnnnnnnnnnnnnnnnnnnnnnnnnnnnnnnnnnnnnnnnnnnnnnnnnnnnnnnnnnnnnnnnnnnnnnnnnnnnnnnnnnnnnnnnnnnnnnnnnnnnnnnnnnnnnnnnnnnnnnnnnnnnnnnnnnnnnnnnnnnnnnnnnnnnnnnnnnnnnnnnnnnnnnnnnnnnnnnnnnnnnnnnnnnnnnnnnnnnnnnnnnnnnnnnnnnnnnnnnnnnnnnnnnnnnnnnnnnnnnnnnnnnnnnnnnnnnnnnnnnnnnnnnnnnnnnnnnnnnnnnnnnnnnnnnnnnnnnnnnnnnnnnnnnnnnnnnnnnnnnnnnnnnnnnnnnnnnnnnnnnnnnnnnnnnnnnnnnnnnnnnnnnnnnnnnnnnnnnnnnnnnnnnnnnnnnnnnnnnnnnnnnnnnnnnnnnnnnnnnnnnnnnnnnnnnnnnnnnnnnnnnnnnnnnnnnnnnnnnnnnnnnnnnnnnnnnnnnnnnnnnnnnnnnnnnnnnnnnnnnnnnnnnnnnnnnnnnnnnnnnnnnnnnnnnnnnnnnnnnnnnnnnnnnnnnnnnnnnnnnnnnnnnnnnnnnnnnnnnnnnnnnnnnnnnnnnnnnnnnnnnnnnnnnnnnnnnnnnnnnnnnnnnnnnnnnnnnnnnnnnnnnnnnnnnnnnnnnnnnnnnnnnnnnnnnnnnnnnnnnnnnnnnnnnnnnnnnnnnnnnnnnnnnnnnnnnnnnnnnnnnnnnnnnnnnnnnnnnnnnnnnnnnnnnnnnnnnnnnnnnnnnnnnnnnnnnnngattactgagagccaatcagattagtttcaactgggacaggcttgctagctggatcaacctcaccgagcagtggccataccggacttcatggctcatattatatttggaagagactgaaggtattccagatcaaatgacattaaaaaccatctacgaaagnnnnnnnnnnnnnnnnnnnnnnnnnnnnnnnnnnnnnnnnnnnnnnnnnnnnnnnnnnnnnnnnnnnnnnnnnnnnnnnnnnnnnnnnnnnnnnnnnnnnnnnnnnnnnnnnnnnnnnnnnnnnnnnnnnnnnnnnnnnnnnnnnnnnnnnnnnnnnnnnnnnnnnnnnnnnnnnnagatgttcgcgctgccagagagcagatcagtatcggaggactggcgtacccgccgctccctctacatgagggtcctcctagggcaccatcagcgtacagccagcccccatctgtgtgctcttccacgtccttcaatgggcccttcgcaggtggagtggtgtcaccacagcctcacagcagctattacagtggcatgacgggccctcagcatcccttctacaacaggnnnnnnnnnnnnnnnnnnnnnnnnnnnnnnnnnnnnnnnnnnnnnnnnnnnnnnnnnnnnnnnnnnnnnnnnnnnnnnnnnnnnnnnnnnnnnnnnnnnnnnnnnnnnnnnnnnnnnnnnnnnnnnnnnnnnnnnnnnnnnnnnnnnnnnnnnnnnnnnnnnnnnnnnnnnnnnnnnnnnnnnnnnnnnnnnnnnnnnnnnnnnnnnnnnnnnnnnnnnnnnnnnnnnnnnnnnnnnnnnnnnnnnnnnnnnnnnnnnnnnnnnnnnnnnnnnnnnnnnnnnnnnnnnnnnnnnnnnnnnnnnnnnnnnnnnnnnnnnnnnnnnnnnnnnnnnnnnnnnnnnnnnnnnnnnnnnnnnnnnnnnnnnnnnnnnnnnnnnnnnnnnnnnnnnnnnnnnnnnnnngtactagaaatgagaaacgcagaaagccaggtggtccctgaagacccacgtttcctcagtgagagcagcagtggcccagccccacacggtgaacctgctcgccgcacttcccacaatgagctgcctcacactgagctctccagccagacgccctacacactcaacttcagcttcgaagagctgaacacgcttggcctggacgaaggtgcccctcgtcacagtaatctaagttggca

SEQ ID NO: 37156 - DNA, 806 bp, Macaca Mulatta
  misc_feature (1)...(806): n = A,T,C or G
gaatttagaagctccagagatgccagtatattctgtaaagggccataaagaaattataaatgccatagatggcgtaggtggactaggaattggagaaggagcacctgaaattgtgactggcagccgagatggnggaactgtgaaggtgtgggacccaaggcaaaaagatgatcctgttgctaatatggaacctgtacaaggagaaaacaagagagactgttggactgtggcatttggnnnnnnnnnnnnnnnnnnnnnnnnnnnnnnnnnnnnnnnnnnnnnnnnnnnnnnnnnnnnnnnnnnnnnnnnnnnnnnnnnnnnnnnnnnnnnnnnnnnnnnnnnnnnnnnnnnnnnnnnnnnnnnnnnnnnnnnnnnnnnnnnnnnnnnnnnnnnnnnnnnnnnnnnnnnnnnnnnnnnnnnnnnnnnnnnnnnnnnnnnnnnnnnnnnnnnnnnnnnnnnnnnnnnnnnnnnnnnnnnnnnnnnnnaggctcataaatctactgtgtggcaggtccgacacctgccgcagaacagggagctcttcctgacagctggaggcgccggcggccttcacctctggaagtnnnnnnnnnnnnnnnnnnnnnnnnnnnnnnnnnnnnnnnnnnnnnnnnnnnnnnnnnnnnnnnnnnnnnnnnnnnnnnnnnnnnnnnnnnnnnnnnnnnnnnnnnnnnnnnnnnnnnnnnnnnnnnnnnnnnnnnnnnnnnnnnnnnnnnnnnnnnnnnnnnnnnnnngtgctgagagcacagaagttttctgctgtctttgaaatattgtctgcaaacagc

SEQ ID NO: 37157 - DNA, 360 bp, Macaca Mulatta
  misc_feature (1)...(360): n = A,T,C or G
ggcctcagtgctcagagaggctagtgccagggccatggtgcctatagccctgacctgccacacgctggannnnnnnnnnnnnnnnnnnnnnnnnntgggccctggcagagagcacctggaggaaacctcaatgggtggccccgcctctgaggccaggtgagtgtccagccccgcctgggcctcatcccctgaactatcatcaggccctcacccatgccctgtccccacagttgcgtccaagtctcagctgaagggctggacgtggctcaagaagcagctgctggaggaggcccaggagcctccatgcccggagtggcagcagagcctgcagccagaggtgcccgcccccacggagcagga

SEQ ID NO: 37158 - DNA, 576 bp, Macaca Mulatta
  misc_feature (1)...(576): n = A,T,C or G
ggcatgaaacccgggaggcgnnnnnnnnnnnnnnnnnnnnnagannnnnnnnnnnnnnnnnnnnnnnnnnnnnnnnnnnnnnnnnnnnnnnnnnnnnnnnnntctgcagttagagccaaagctggtggtggccagagggtgctgaagatgcaggctagtggggataggagccatgagcccccgaatgtcttccgctctggtgctccccggactaagcctccctggcacactgggagtgaggggcagcctgagcgtgtaggggaactcagaccacaggccagcagatttcccagtagtctgtcactggccaccgtgtagccagattctgttccgtccacactggggtgaagagtacttggaatgtctgccatcctgtatgatcacctcacccccccaccggccccctccactccatccatcagtagataataagggttgggtacaattcataagagaatagttcaaagccttctcctctcatgcctaccatggtataggggcgatctgttcacatatgggctcagcaacgcacaagtgaggtcagccatggcactaagtcattcccattttagccaa

SEQ ID NO: 37159 - DNA, 576 bp, Macaca Mulatta
tctaacacatccctgtgcctctttttggtccaggtcagaatcccattgatgtttgcatgcgtaattctgtagactaagtgaagcatccagaatacctgactgttccatccacctccctgcataagcactcttcttgacactgaccctgaattgttccaccctcattgagttctccttgaaggcagaggttggagaggagtagactgggcttggaaaaggccaatatccaatgcaaacataagaagtgactcttctcagttgtttgtctaaggatgttcaagttttcacttgaggtgaaatgtcttttccagtttcccacataagtacatagtttgttttcaaggcttaatgtgggaaaatgaaaaattaaattgattacaaacatattattttctgccaagcaatcaaggacagaaggtggaattatagcttcagtgggagagttgctcagggcctcccagaaagctccagaataggacatcgtggttgggctacagaagttattttcactggaggtggggtgggaaagagagtattgccataactaagcttgcactagctcttctcccctctacc

SEQ ID NO: 37160 - DNA, 933 bp, Macaca Mulatta
ggggctttccgcgctacctacagaagggtccatacggcgttgttctggattcccgtcgtaacttaaagggaaactttcacaatgtccggagcccttgatgtcctgcaaatgaaggaggaggatgtccttaagttccttgcagcaggaacccacttaggtggcaccaatcttgacttccagatggaacagtacatctataaaaggaaaagtgatggcatctacatcataaatctgaagaggacctgggagaagcttctgctggcggctcgtgccattgttgccattgaaaaccctgctgatgtcagtgttatatcctccaggaatactggccagagggccgtgctgaagtttgctgctgccactggagccactccaattgctggccgcttcactcctgggaaccttcactaaccagatccaggcaaccctttcggggagcaccgggcttctttgtggttactgacccgcagggcctgaaccgccaagccttcttacgggaagggatctttatgtttaaccttacctaacccatttgcttctgtggcgaacacaagaaattctccctctgccgcctatgttgggaaattttgccctttcccatggcaaacagaaaaggggaaggttccactccaaggggggtctttgcaagtggcgggggcctctgcccacaccggccaaaattcctgaggaccggggcgtgggagacccatttggcacggggagaaaactcggagcccagcgatcctcgcctcggaaacggcccccgtgctataaaaaaacatcttacggagcaacgccctgaataaaacacacaagacgcgcgggtgcccgcctggaataatagcggcaccaaccccctaggcgccatcctctccgacgggcctgcacagcgtgatatgccccccacaccactccgcagacgtccagtcggct

SEQ ID NO: 37161 - DNA, 135 bp, Macaca Mulatta
gaacccctatcctttgtcctcagatctgccaggctggaccatgctgtccctctctgtcctggggctcctggcttccagggctgtgtctgcactcagcagcctctttgcagctgaggtcttccccacggtgatcag

SEQ ID NO: 37162 - DNA, 553 bp, Macaca Mulatta
tttaatccagttcttatgtatgtgaacagttttggctataattgcgttgtgttttatataatataccaaccctaaagagatactttatatctgaataaaaaagttataaataaccacggaaatataaaggcaataagtatatttttctgacaaagtaatagtaactaaaactggtccttattgcagttctagttgtatgtctacctgttaacatgtttgccatgtagtacctttattagtgtacgataaatacatatggtttcagggtgttggaatatagtatgagtattactgagtcccttgaattgacataagtttggaaatggttttagctagtttggaagcaagaaacatgttcccatttttatttttttcagagcttttcagatgatgttttgactcatgattttacaacatgatcaacgatcattttgtgtgaaatattaatatttagttacagagaaatagtaaggtatttaagatagactgttgaaatatacaagacagttaatagatttaggatgcaaacatgtatggatactagtgttacctg

SEQ ID NO: 37163 - DNA, 652 bp, Macaca Mulatta
  misc_feature (1)...(652): n = A,T,C or G
cacgccggccgccatcgccttcgcgcctggctggcgggggcgctgtcctccccggnccgtccgcgccgctccctggagctcggcggagcgcggcagccaggaccggcggaggcgcgaggagccgggnnnnnnnnnnnnnnnnnngggggccatgaccgtggagcagaacgtgctgcagcagagcgcggcgcagaagcaccagcaaacgtttttgaatcaactgagagaaattactgggattaatgacacccagatactacagcaagccttgaaggatagtaatggaaacttggaattagcagtggctttccttactgcgaagaatgctaagacccctcagcaggaggaggcaacttactaccaaacagcacttcctggcaatgatagatacatcagtgtgggaagccaggcagatacaaatgtgattgatctcactggagatgataaagatgatcttcagagagcaattgccttgagtttggccgaatcaaacagggcattcagggagactggaataactgatgaggaacaagccattagcagagttcttgaagccagcatagcagagaataaagcatgtttgaagaggacacctacagaagtttggagggattctcgaagacccttatgatagaaaaagacaggacaaagc

SEQ ID NO: 37164 - DNA, 389 bp, Macaca Mulatta
  misc_feature (1)...(389): n = A,T,C or G
gggtgagtgaggccacagaaaactctgccccactgcttcttacctcacaggggtggttttcagggattcttaaggcagcagattaaaatcttgccacagtcgagaaattgacaacaagcttccatgctgtacatggttctctttttctctcttttatttttaaaatgaaaacccagaaagatgcgccagatttgtataaatgagggtatgccagaaggtggccagttttgctttatgatcttatgaaggaagatttgtgaccctannnnnnnnnnnnnnnnnncatacatatatatatcccgaaccaacaatgggactttgtttatattgcaaataaatattattttttctcnnnnnnnnnnnnnnnnnnnnnnnnnnnnnnnnntgtc

SEQ ID NO: 37165 - DNA, 287 bp, Macaca Mulatta
tgcgtccgtgctgcgtgagttttctggggctcactccaggcaaggcgagacatcatcacacgacctcaccccatgcccaggtgctttttgggaggtgggactccagttctggttaccatggagagtggaaggaattttggatagacacctcctgtggtcccacttctggtctcacctctgcaccaactgtccccaaacctttagggggagaattgatgctgcgatgctcttgtgtcccagcgtccacctgaagaaaaggttaacaggctcgtccaccaatttccatt

SEQ ID NO: 37166 - DNA, 736 bp, Macaca Mulatta
ggggacttggtgtggctttgggcagcttgaggctgaccacatacctacggtgaaggcttcctgcatctggtcttcaaacactggagctttcagccaatgaagcttccctcctaagtgggctctgacttaggaattttccttgcattcaaaacataagaaaatgcccgttccacatcataaggtggcaattttgggggtcatcagcagttttgagtcctccccatctcccctacacggccactgctggtcttagctgtgttctgtttccagagtaactgtgctgctgaggggggtggtagcaccctaacctgagaactgaccctgaggaaggcagatgctagtcacctggtctattctcactactttctaaatgaaattcaaggatttgttttgaacttggtgcctgagggatcttctaccttacctatcaatatatttcctagtagagcacaagatagtttaagacatcctgaagtggatgaaagacaaattgtcaaaatgaaggtaaaacatgatctttgcaatcaggtttctggaaaaggatcacaggtatggcttggggtttgtgaagaccaacttgccttttactgaggtgcaatcaactatcattccataaagttctttactaaggggagggcattgtccaatcgtctaacatggctatgacagggaagtctctttaaatgtgggcctccctgtatagtacaatggagcccagaactgttcccattggaaa

SEQ ID NO: 37167 - DNA, 788 bp, Macaca Mulatta
ggctaagtttataaaaatctttatcggtttttccaagggccatttggtatcattttattgacaaatcattctcatttaaagccagtgtcactttgccatccttgttgattttctcgcttccatttttactgatctcacacttctgaatcctctttcaacatgactttgagtgtgaccgaagctgttctcaaatattattttcattcattgtataaaccctgtgtcctgaaaattcattaggaaatcgatttgcttgattcgacttttattgtttgtttgcattttatgtctgtacagatttaaagtcatggcactaaggaggagaggggttctcaaattggcactaatttcattagtagcagtatcattcttgcatggatttgtttggctttctcacttaggaaacctaataattatggtatcctgttagaaggaacctgtgaacactgatccggatagcttcaaagatgcgatttctgagcagttgtctcaggaaagatctcaaatcatcattactttgttctggcactaagtccgtgtgtacctgaggatgtttgcatgttcttgtttaaatgtatttttcatttactgttaagctctaggacttggtttcagaagatctgggtttaagttcttttcaagtaagatggctgtattacttttagcaaagtcaacttaacctgcaaagaatttcccatttttcttacctaattaaggtgggggaataaaaaatacatgtttaataccaagaacctatttagagaagaatcaaatggaaaattaaatta

SEQ ID NO: 37168 - DNA, 774 bp, Macaca Mulatta
  misc_feature (1)...(774): n = A,T,C or G
ggcatggtggcgggcgtctgtaatcccagtnnnnnnnnnnnnnnnnnnntcagaattgctcgactccannnnnnnnnnnnnnnnnnnnnnnnnnnnngnnnnnnnnnnnnnnnnnnnnnnnnnnngagcaaaactgcgtctcaaaaaaacacaccaaaaaatgaggaaccactgaaaataactataaaccgtcctttgtgctagtgtcatcacatcgtttccccgtatgtatgttgcacaaggagcaatctgccgagtggagcacttaaacagtagtccagatgagtaattccaaacccctgacctaccttgttctgagaaataggtcaatgttatcatcattctagctgaggaaactgaggaataagagctcttagcaggacctggatgagaagccagtttagaacccaaggccttccccatttggattccttagctactctgtatactagcagacatacaaatgtaaacagagcagaaaagatgcaagggccctcttacaaccctactgacccacctagcacatccaggcctccaagagccaggctgtgatcttttggggaatatacactgatgtcacaattttgaagtctaaaattcaggtcttgtcaatacctggaaccctcggactccttggtggctttctacccactccagcccctctggctttgggaggggcttcatctataccatcaggccatannnnnnnnnnnnnnnnnnnnnnntaaaacnacagctgggtatgggtgcctttacacctgttaattcccaaca

SEQ ID NO: 37169 - DNA, 842 bp, Macaca Mulatta
  misc_feature (1)...(842): n = A,T,C or G
ggggcccagaatatccaaggtcaatgcnnnnnnnnnnnnnnnnnntnnnnnnnnnnnnnnnnnnnnnnnnncaaaatatctcttgttgcctaggttggagtgcacttgcacaatcttggctcactgaaacctccattctcccctgacctgttttttttttgctaaaaagtcttctgtaagtctgacgagattttctttacatgtcatctgacattttattttagctacctttacaatttttttaaaggcaggcacagtgactctgatctgtattttcatttctttttgatacacatacatgtctatcactttaatttacgaacttgaagatcttcttcttaaaaacgcttgatcactgttcttctttcaaatgtcctaattacaattgggatggctacaaaattcttctgtatatgctaaatcagtgtgatagccgcgcttattttttcgatttcacaactcatcttacaattaatgcgttataaacaatgataccattataaatgtcatgacatttcataaaaaactgaatcaagccnnnnnnnnnnnnnnnnnnnnntattatgtcaatactatttttcacctttattttattattacatttctttcttacatattaatgtagtatttattctgcacttcatctttatataaattattataagaccttaatcattaaaaaattgaggaaaacataatatcaactaactactactctactacatagttgatatactcttgatttctaatagacaacattggtatattgttgcttgaattaaatatatctcttcctcttaataagtgtgattgtctgttatactatgtgataaatacatatt

SEQ ID NO: 37170 - DNA, 808 bp, Macaca Mulatta
  misc_feature (1)...(808): n = A,T,C or G
ggcatccattcttttttcaaggtttttagtttgtttgtgctgggtaagtagttcctcctttagctctgagaagtttgatcgactgaagccttgttctctcaactcgtcaaagtcattctccgtccagctttgttccgttgctggcgatgagctgcattcctttggagggggagatgtgctctgattttttgaatttccagcttttctgcactgctttttccccatctttgtggttttatctgcctttggtctttgatgatggtgacgtattgattgggttttggtgtggatgtcctttcnnnnnnnnnnnnnnnnnnnnaacggtcaggacgttcagctgcaggtctgttggagtttgcttggggtccactccagaccctgtttgcctgggtatgagcagtggaggctgcagaagatagaatattgctgaacaacgagtgttgctgtctgattcttgctctgaaagcttcgtctcagagatgtacccagccctgtgaggtgtgaggtgtcggtctgtgcctcagttgaaaatgcaaaaatcacccgtcttctgtgtcgctcacactgggagctggaggctgggacctgttccctattcggtcatcttgggcgccccccccgtccctaatattctttaggacaccattaggaataatcccctgattgaagggaaaaatccggaataggatggaaaagccaaatggcttaaattccatcaattaaaaaattaaaccttggatttttaaaataaatttatggttggggccttaatttaaaataaaggaaaaaattatccggaggtaaaaac

SEQ ID NO: 37171 - DNA, 304 bp, Macaca Mulatta
ctggccctgggcaacaaaaggaagggcctgtcttaccacagtctccccagcatctagctcagggtagatgactgactgggaaattccggttggataaaatggcttttccacatggcaactttgcatctctattagcaaaatttagattgaacctctcctctacgtgatgcttagtttgaggacaggtaaacagttttcacaactttagagggtcttagagtgtgttatacagtaaccttgaagtttgagatgaaacaaggtgtcagagcttttgaatctttcaaaggaattgccttttacagat

SEQ ID NO: 37172 - DNA, 560 bp, Macaca Mulatta
tcttctaagcaaagattgaacatactgtatttccttctgtttcatggcggagagaagataccaacaacggagcatattgccagaaggaggttatggacttgtctctgggaatctttggaatggggatgggtaactatattgttagtaaaggtgaagtgaagaattagatgatttatgtggttctcctttagtggaaaaaccagggaactgagtcaaatggcctcaccagtctgatggtgtgtcttaacatgtatctgtaaatgtggaatatcagattcccttattaagcatttcaacagtgatatcttctaaagaaaagcaaattctgaatttgggatgttgaaagccccacaattgcttaaaatgcaagatgcttcatctttataaaactttatggaaacgtttatgtttaaagcttgagtttaacttgcagtttctagttttctcaatttagtatacaatttccagtatagtgttagatctgtcttaggttatttttgcatcatgtctgaccaatctatgcagtataaatagtataatcttaaaaggcagtgcctgta

SEQ ID NO: 37173 - DNA, 689 bp, Macaca Mulatta
  misc_feature (1)...(689): n = A,T,C or G
ttatattaatactctattttagtaattctatttcaccgttctttactagttacatataatggttgtcctcagttttacaatatacatctttaattttttaacagtctacataaattatgccacttcacatatggtgcgataaccttacaacaggttatccctaccatcttttatactgttgttagcatacatttgatgtttatgtatataatctccacaataccttgttagatgggcagatggcaaatatcttctcccagcctgtcttttaacatgtttcatggtaagtgttgcataaacattaaacattttttaattaannnnnnnnnnnnnnnnnnnnnnnnnnnnnnnnnnnnnnnnnnnnnnnnnnnnnnnnnnnnnnnnnnnnnnnnnnnnnnnnnnnnnnnnnnnnnnnnnnnnnnnnnnnnnnnnnnnnnnnnnnnnnnnnnnnnnnnnnnnnnnnnnnnnnnnnnnnnnnnnnnnnnnnnnnnnnnnnnnnnnnnnnnnnnnnnnnnnnnnnnnnnnnnnnnnnnnnnnnnnnnnnnnnnnnnnnnnnnnnnnnnnnnnnnnnnnnnnnnnnnnnnnnnnnnnnnnnnnnnnnnnnnnnnnnnnnnnnnnnnnnnnnnnnnnnnnnnnnnnnnnnnnnnnnnnnnnnnnnnnnnnnnnnnnnnnnnnnnnnnnnnnnnnnn

SEQ ID NO: 37174 - DNA, 460 bp, Macaca Mulatta
  misc_feature (1)...(460): n = A,T,C or G
gggattnnnnnnnnnnnnnnnnnnnnnnnnnnnnnnnnnnnnnnnnnnnnnnnnnnnnnnnnnnnnnnnnnnnnnnnnnnnnnnnnnnnnnnnnnnnnnnnnnnnnnnnnnnnnnnnnnnnnnnnnnnnnnnnnnnnnnnnnnnnnnnnnnnnnnnnnnnnnnnnnnnnnnnnnnnnnnnnnnnnnnnnnnnnnnnnnnnnnnnnnnnnnnnnnnnnnnnnnnnnnnnnnnnnnnnnnnnnnnnnnnnnnntgataagctggctgaagagcatgcgtcgtgaggggtccttgtcctctgtactgtccctctccttgcccctaacccaaaaagcttcatttatctgtgttggctgcacaagagccttgattgaagatatattctgtctgaacggtatttaaggtttccaataaaatgtacaccccccatnnnnnnnnnnnnnnnnnnnnnnnnnnnntgtc

SEQ ID NO: 37175 - DNA, 650 bp, Macaca Mulatta
cagctcccccacctctcccgtcgtcacctgtccctggagccctacttgtgacaaaggcagtgccatgctggccttctgcctcaaggtcctgagccgcaagggctgtgtgtgggtcaatgggctgacgctaaggtacctggagcaggtcaccctgagtcccgtcaacaggctcttcttctcaggcatccagatgctggttcgcgtagaagaaggcacatccctggaggcctttgtctgctatttccatgtcagcccttcacccctgatttacagacctgaggctgaggaaactgacgaatgggaaggcatctcccaggagcagcctccccctggttcagggcagcagacttcaggttgcctggggtttctccacggcccgtcccagacttgggacagccctccccagccaagacctggaggaggaacagaaatacagctccagagggaacccccagacagtacactctgctagccctgccactagagcaagtctttgctagatgaaacaggacttgaagtatttgaactacatcatgcaagcttgacaagcaaaacccactggctgccttgctcataatgaaccaattctgcaaacactgaacaaacagtccggggtggagaagcaccctctgtggccagagttatgcaaa

SEQ ID NO: 37176 - DNA, 130 bp, Macaca Mulatta
aacgcgcaacccctctccccacaagacttcctgttatgatcctcattggagctggctagttacagaaaacatgtgtaccagttcacaaggagagagagagacatggatatccttctgtttacaagcggtc

SEQ ID NO: 37177 - DNA, 610 bp, Macaca Mulatta
  misc_feature (1)...(610): n = A,T,C or G
gcacgaggcgtctcgannnnnnnnnnnnnnnnnnnnnnnttgtggaatgtgagactttagccacttccttttctggcagtggataaaaccaaaatggttctagcttgaatttcacatctttctaatctactggacaggagggaccagagacaccgattaccaatgagtcacaagaacagacaaaaaattgttagtaggttttgacaaccaggaacaaaggtgtttttaaaaaacatgtacttgatgcaaagtatattaggagtgcaccatagaaaacattgtcaaagtgttagaaaaatggagcccctgtccaggtggccttgtgagatttcacccataacttaatataccctgtttaataaaaataatagttctaggtcttcttgaaggattgtttagaagtctccaagaaaaataatgagatctaaaatagagctgtttgattttatgtggaacttcaatttgagctcattgtatatcctggtatcatgtaagtttttggactatttgtctaatgttttatttactatactctcatgctttaatatcattcattcatttcacttaacagtttctcattaaagcacttaaatagtgacaactattttct

SEQ ID NO: 37178 - DNA, 750 bp, Macaca Mulatta
gggcacatagcatatgtttccattaccaatttggaaatttttcccagtggcatcagcatttgagaaatactgattttgaaattagagtactagggaaaaatgcttcaaaaatgaagactacttaaatagaaactggctttaaataaagctttggggatctgtacttgactaaaaaatattttctttaaactttggtctttgaaaactaaagtgtgtgtgcatgtgttcattaaaatgacctgtagcatgaacattttccatactggagtgtgacatactgcactcattttgaactttagaaccaagtgcatcctttagcatttgatgagctactatatatttccagctttattttcttgccaaataaagtaccaaagctcagcctgacatttggtaacccctgacttggtcccaacctaattttacagcttgctcactctcagtcactctccttttcaaactgcttcagtcacataaaacatcaaggaccaatttcattctgcatgtgggtatgcagttttcccaacaccatttattgaagagattattttttcctcattatgtcttggtagccttgtcaaagatagttgcgtggggttattttctgggatctaatctgttcctttggtctatgtgtctttttagggaaaacaatgctgttttgattactataactttgtaatataattttgaagttgggtgggggtggatgttcttcagcttggttcctttttgccttggcccactcaa

SEQ ID NO: 37179 - DNA, 829 bp, Macaca Mulatta
  misc_feature (1)...(829): n = A,T,C or G
nnnnnnnnnnnnnnnnnnnnnnnnnnnnnnnnnnnnnnnnnnnnnnncaggtggattacgaggtcaggagatggagactatcctggctaacacggtgaaaccccgtgnnnnnnnnnnnnnnnnnnnnnnnnnnnnagcgacggcaggnnnnnnnnnnnnnnnnnnnnncgggaggctaagnnnnnnnnnnnnnnnnnntccgggcnnnnnnnnnnnnnnnnnnnnnggatcacgccactgcactccagcatgggccactgagtgagattctgtctcagaaataaataaatacataaatacaataaaaattaagaagttgtattctgctcacacgtcccattcactttctagactttggcttaaagacacactggccaaagatgttctttcaaaagaggctgtctttgtattctcttaatagatcttgcattcaattttgtttgtttagagtacttgacgattgagtttctttttctttccattcccgtctttcnnnnnnnnnnnnnnnnnnnnnaaaaacccaaccaagaaggccnccccncnccccccccccacccccccnacccnctaaannnnnnnnnnnnnnnnnnnnnnnnnnnnnnnnnnnnnnnnnnnnnnnnnnnnnnnnnnnnnnnnnnnnnnnnnnnnnnnnaannnnnnnnnnnnnnnnnnnnnnnnnnnnnnnnnnnnnnnnnnnnnnnnnnnnnnnnannnnnnnnnnnnnnnnnnnnnnnnnnccacaaccaaaaaannnaaaaaaacnacacaccaaaaaacnanccacaaaaacacataaacaaccaaaaaccacccccccaaacacncaaca

SEQ ID NO: 37180 - DNA, 795 bp, Macaca Mulatta
  misc_feature (1)...(795): n = A,T,C or G
gggaggaagacgtatcttctaaagtagaaaaggcttatgttccaaaattaacaggaactgttaagggtagatttgctgaaatggagaaacaaagacaagaggaacaaaggaagagaacggaggaggaacgaaaacgcagaattgagcaggatatgttagaaaagaggaaaatacagcgtgaattagcaaaaagggctgagcaggaaggagatgattcactacttataactgtggtacctgttaaatcatataaaacatctggaaaaatgaaaaagaattttgaggatctagaaaaagaacgtgaagagaaagaaaggatcaagtatgaggaagataaaagagtaagatatgatgaacaacgacgatctctcaaggaagcaaagtgtctttcattagttatggatgatgaactagaaagtgaagcaaaaaaagaatcactttctcctggaaaattgaaactaacttttgaagaactggagcgacaaagacaagaaaaccgaaagaagcaagctgaagaggaagcaaggaaacgtttagaagaagagaagcgtgcttttgaagaagcaaggcggcaaatggtaaatgaagaagaggaaaaccaagacacagcaaanattttttaagggtacccgccctggtaactcaaactcagttttgaagaaatagaaaggccaagaagagaagatgaaaaaaggaaagcagaangagaaagcccgaaggagaatagagggagaanaagaagcntttgctgaagcaagggagaaacatggntagtagatgatgacctccccagag

SEQ ID NO: 37181 - DNA, 2574 bp, Macaca Mulatta
  misc_feature (1)...(2574): n = A,T,C or G
gggtttctgcagcccctggctcagggctgactcactgtggctgaatacttcgagttctggggccagggcgcnnnnnnnnnnnnnnnnnnnggtgagtctgctgtctggggatagtggggagccaggtgtactgggccaggcaagggctttggcctcagacttggggacaggtgctcagcaaaggaggctggcaggagggcggagggtgtgtttttgtatgggagaagcaggagggcagaggctgtgctactggtacttcgatctctggggccctggcaccccaatcaccatctcctcaggtgagtccccctgcagccccctcccagtcttctctgtccaggcaccaggccaggtctctggggtctgcagctggtctaggtctggcctgaggccacaccagctgccatccctgggatctctgccatgggctgcatgccagagccctgctgtcacttagccctggggccagctagagcccccaaggacagtcagggaccccgctgggcttcagccccatcagggaccctccacagatggcaagcaggccgggggcagggatgggaaggagaagttgtgggcagagctggggccagggctgggaacatcacccctcccagcctgggtctcagcctggtgatctgtgtgactggggacagggacaccggctgcctctgctctgtgcttgggccatgtgagccattcgagtgtcccgcatggggacgggtttgtgtctgggcaggaacagggactgtgtccctgtgtgatgcttttgatttctggggccaagggctcagggtcaccgtctcttcaggtaagatggctttctttctgcctccttgctctgggtccagcgtcctctgtcctggagctgggagataatgtccagtggctccttggtctgtgcagggccacgttcagcagaaggcctttctttgggaattgggactctgctcctgggacaaagggtgggcagagtcatgcttgtgctggggacagaatgaccttgggacacggggctggctgccacagctggcccaggacagtcggagagtagggtttttgtgcaccccttaatggggcctcccacaatgtgactactttgactannnnnnnnnnnnnnnnnnnnnnnnnnnnnnnnnnggtgagtcctcacaacctccctcctgctttaactctgaggggttttgctgcatttttgggggaaaacaagtgtgcctgggtctcttgccaagaaagccctggagcagccgggggggctcaggaggacgccctgaggcgacagcggccacacagacaaggggcaagggctccagacgctccctcctcctgagcccagcagcaggggtctctctgtggtcagggccaccctgggcctccggggtcccttagcccaacaacccctgggccctccacgggctccgtctgagagggtcccagggacttagcgggtgccagttcttgcctggggtcctggcattgttgtcacaatgtgacaaccggttcgatgtctggggcccnnnnnnnnnnnnnnnnnnnnnnnnnggtgagtcctcacaacctctctcctgctttaactctgaggggttttgctgcatttttgggggaaaacaagtgtgcctgggtctcttgccaagaaagccctggagcagccgggggggctcaggaggacgccctgaggcgacagcggccacacagacaaggggcaagggctccagacgctccctcctcctgagcccagcagcaggggtctctctggtcagggcaccctgggcctctggggtcccttagcccaacaacccccgggccctccatgggctctgtctgagagggtcccagggacttagcgggtgccagttcttgcctggggtcctggcattgttgtcacaatgtgacaactcattggatgtnnnnnnnnnnnnnnntnnnnnnnnnnnnnnnnnnggtgagtccctcaccaccccctctccgagtccacttaggagactcggcttgccggggtctcagggtcagaggcctggaggcactttggaggtcaggaaagaaagccagggagagggtcccttcaaatgggaacccagcgtctcctccccaagtccagccacagatgtcggcagctggggggttcctttggctggtctggggtgaccactctttgcttcatttggagcattctcaggggctgtggtgacgattgtgtggtaggactctgtcccgctccaaggcacccgctctctgggatgggtgcccgccggggtgtttggactcctgggggtgactttgtcagccgtctgcttgcagttggatgtcccaggctgacagtggtctggcttctgaggggtcaggccagaatgtggggtacgtgggaggccagcggagggttccatgagaagggcaggacagggacacggacagtcggcttccatgtacgcctggagacagaaggtctctgggtggctgggaacaacgtgagccgggcgcccagggtttttgtggggtgaggatggacattctgccattgtgattactacggtttggattcctggggccaaggggtcgtcgtcaccgtctcctcag

SEQ ID NO: 37182 - DNA, 896 bp, Macaca Mulatta
  misc_feature (1)...(896): n = A,T,C or G
cacctactgagctccttgtggcccgtcgtggccgccgtgtcgcttcacctgctaccggctctcctgctgctggtgctcagtgccctgcctgccctcctcttcacggcctccttcctgctgctcttctccacactgctaagcctcgtgggcctcctcacctccatgactcacccaggctacactcaggatttggatcaatagaagggcaaccccatcccactgcctgtgtctgttgagccctggcctagggcctgagaccctgtggggagagggagggcaatgggataagggccccctgccttggcaggccccagacccccagtcccgaacaggtagactggcctgaccccggactccttcctcaagtcaatgctgcaggttcctggtgtgaggggctggggcctttgagaagagcgggcagaacagatggcttagccattggtggaaattgcttagccaggggcagagcttgaccaagccactgacagtgcccatatggatgtgatgatacccgtggggccctcttggcaactgacagcatctttttttcacagtcactcagctgtctcagcttcagactcactgaaaacttctacctgggcacccctggccttgccattcctcccagcaattcccttttttcatttccaggagaaccacagactctagagagggtcccagtgacaaaaatctatcagggagaaggctggccagaagccaggagacctcaactccctcgcctccaaaccttgcagcccaggcatcctcctccctagacttcctacttcctgcctcagtccgcatccccaagtctgagaaatgngccaactggggtcagacagtacctactcactctctaagaatcccaaggtctgttatgggaaaatgatcaagaa

SEQ ID NO: 37183 - DNA, 536 bp, Macaca Mulatta
agactattatgcatttaacattgtttaagcaggttgaactagctgtgaaaatagcttttgtgagccttccaattcctaaatgtctgagaccatttcagtggcacctgaggtgttatactgatctagcattcctgagactctttctatgcaactgactcccccacacccgtgttataaaagtaatacacacttgtgaaacagacagacacacttgtagagcgtatggatcaagggctcaaaattgagattacattagccataatcctactgaccagtggaaaagattgtttccattttaatgcagttccttacagccttttttcctccacttttgcattttccactctaagacacatctaaaacaggtaatctcagtaaaaactggcctttttgctgagatttttatgtgggagactaaaatattagacgagatgattatgtgtacagaattttatttaaaatacatctgagagaaggattcagatttcacctacttgggcagtgttaaaggatgaaggatatatctgggggtattt

SEQ ID NO: 37184 - DNA, 3119 bp, Macaca Mulatta
  misc_feature (1)...(3119): n = A,T,C or G
gaagttccatttctaaaccagatgtgattacgttacttgagcaagagaaagagccctggatggttgtaaggaaagaaacaagcagatggtatccagnnnnnnnnnnnnnnnnnnnnnnnnnnnnnnnnnnnnnnnnnnnnnnnnnnnnnnnnnnnnnnnnnnnnnnnnnnnnnnnnnnnnnnnnnnnnnnnnnnnnnnnnnnnnnnnnnnnnnnnnnnnnnnnnnnnnnnnnnnnnnnnnnnnnnnnnnnnnnnnnnnnnnnnnnnnnnnnnnnnnnnnnnnnnnnnnnnnnnnnnnnnnnnnnnnnnnnnnnnnnnnnnnnnnnnnnnnnnnnnnnnnnnnnnnnnnnnnnnnnnnnnnnnnnnnnnnnnnnnnnnnnnnnnnnnnnnnnnnnnnnnnnnnnnnnnnnnnnnnnnnnnnnnnnnnnnnnnnnnnnnnnnnnnnnnnnnnnnnnnnnnnnnnnnnnnnnnnnnnnnnnnnnnnnnnnnnnnnnnnnnnnnnnnnnnnnnnnnnnnnnnnnnnnnnnnnnnnnnnnnnnnnnnnnnnnnnnnnnnnnnnnnnnnnnnnnnnnnnnnnnnnnnnnnnnnnnnnnnnnnnnnnnnnnnnnnnnnnnnnnnnnnnnnnnnnnnnnnnnnnnnnnnnnnnnnnnnnnnnnnnnnnnnnnnnnnnnnnnnnnnnnnnnnnnnnnnnnnnnnnnnnnnnnnnnnnnnnnnnnnnnnnnnnnnnnnnnnnnnnnnnnnnnnnnnnnnnnnnnnnnnnnnnnnnnnnnnnnnnnnnnnnnnnnnnnnnnnnnnnnnnnnnnnnnnnnnnnnnnnnnnnnnnnnnnnnnnnnnnnnnnnnnnnnnnnnnnnnnnnnnnnnnnnnnnnnnnnnnnnnnnnnnnnnnnnnnnnnnnnnnnnnnnnnnnnnnnnnnnnnnnnnnnnnnnnnnnnnnnnnnnnnnnnnnnnnnnnnnnnnnnnnnnnnnnnnnnnnnnnnnnnnnnnnnnnnnnnnnnnnnnnnnnnnnnnnnnnnnnnnnnnnnnnnnnnnnnnnnnnnnnnnnnnnnnnnnnnnnnnnnnnnnnnnnnnnnnnnnnnnnnnnnnnnnnnnnnnnnnnnnnnnnnnnnnnnnnnnnnnnnnnnnnnnnnnnnnnnnnnnnnnnnnnnnnnnnnnnnnnnnnnnnnnnnnnnnnnnnnnnnnnnnnnnnnnnnnnnnnnnnnnnnnnnnnnnnnnnnnnnnnnnnnnnnnnnnnnnnnnnnnnnnnnnnnnnnnnnnnnnnnnnnnnnnnnnnnnnnnnnnnnnnnnnnnnnnnnnnnnnnnnnnnnnnnnnnnnnnnnnnnnnnnnnnnnnnnnnnnnnnnnnnnnnnnnnnnnnnnnnnnnnnnnnnnnnnnnnnnnnnnnnnnnnnnnnnnnnnnnnnnnnnnnnnnnnnnnnnnnnnnnnnnnnnnnnnnnnnnnnnnnnnnnnnnnnnnnnnnnnnnnnnnnnnnnnnnnnnnnnnnnnnnnnnnnnnnnnnnnnnnnnnnnnnnnnnnnnnnnnnnnnnnnnnnnnnnnnnnnnnnnnnnnnnnnnnnnnnnnnnnnnnnnnnnnnnnnnnnnnnnnnnnnnnnnnnnnnnnnnnnnnnnnnnnnnnnnnnnnnnnnnnnnnnnnnnnnnnnnnnnnnnnnnnnnnnnnnnnnnnnnnnnnnnnnnnnnnnnnnnnnnnnnnnnnnnnnnnnnnnnnnnnnnnnnnnnnnnnnnnnnnnnnnnnnnnnnnnnnnnnnnnnnnnnnnnnnnnnnnnnnnnnnnnnnnnnnnnnnnnnnnnnnnnnnnnnnnnnnnnnnnnnnnnnnnnnnnnnnnnnnnnnnnnnnnnnnnnnnnnnnnnnnnnnnnnnnnnnnnnnnnnnnnnnnnnnnnnnnnnnnnnnnnnnnnnnnnnnnnnnnnnnnnnnnnnnnnnnnnnnnnnnnnnnnnnnnnnnnnnnnnnnnnnnnnnnnnnnnnnnnnnnnnnnnnnnnnnnnnnnnnnnnnnnnnnnnnnnnnnnnnnnnnnnnnnnnnnnnnnnnnnnnnnnnnnnnnnnnnnnnnnnnnnnnnnnnnnnnnnnnnnnnnnnnnnnnnnnnnnnnnnnnnnnnnnnnnnnnnnnnnnnnnnnnnnnnnnnnnnnnnnnnnnnnnnnnnnnnnnnnnnnnnnnnnnnnnnnnnnnnnnnnnnnnnnnnnnnnnnnnnnnnnnnnnnnnnnnnnnnnnnnnnnnnnnnnnnnnnnnnnnnnnnnnnnnnnnnnnnnnnnnnnnnnnnnnnnnnnnnnnnnnnnnnnnnnnnnnnnnnnnnnnnnnnnnnnnnnnnnnnnnnnnnnnnnnnnnnnnnnnnnnnnnnnnnnnnnnnnnnnnnnnnnnnnnnnnnnnnnnnnnnnnnnnnnnnnnnnnnnnnnnnnnnnnnnnnnnnnnnnnnnnnnnnnnnnnnnnnnnnnnnnnnnnnnnnnnnnnnnnnnnnnnnnnnnnnnnnnnnnnnnnnnnnnnnnnnnnnnnnnnnnnnnnnnnnnnnnnnnnnnnnnnnnnnnnnnnnnnnnnnnnnnnnnnnnnnnnnnnnnnnnnnnnnnnnnnnnnnnnnnnnnnnnnnnnnnnnnnnnnnnnnnnnnnnnnnnnnnnnnnnnnnnnnnnnnnnnnnnnnnnnnnnnnnnnnnnnnnnnnnnnnnnnnnnnnnnnnnnnnnnnnnnnnnnnnnnnnnnnnnnnnnnnnnnnnnnnnnnnnnnnnnnnnnnnnnnnnnnnnnnnnnnnnnnnnnnnnnnnnnnnnnnnnnnnnnnnnnnnnnnnnnnnnnnnnnnnnnnnnnnnnnnnnnnnnnnnnnnnnnnnnnnnnnnnnnnnnnnnnnnnnnnnnnnnnnnnnnnnnnnnnnnnnnnnnnnnnnnnnnnnnnnnnnnnnnnnnnnnnnnnnnnnnnnnnnnnnnnnnnnnnnnnnnnnnnnnnnnnnnnnnnnnnnnnnnnnnnnnnnnnnnnnnnnnnnnnnnnnnnnnnnnnnnnnnnnnnnnnnnnnnnnnnnnnnnntattgtaattgctttgggatacctcacatcctgcccataaaagatggtaaacctagttgatacttgtgggtttggaaggaattgtcaaatatacaaccatatacccccacctagattcaaaatt

SEQ ID NO: 37185 - DNA, 745 bp, Macaca Mulatta
ggccttcagatgtatttgaccaaccacaacctgtaggtaataaaagaattgaattccatatatctactgacatgccagctgcatttaagaaagatttagagaaggaacaaaattgtgaggaaaaaaatcatgatttacctgctactgaagttgatgcatccaatataggatttggaaaaatcttccccaaacctaatttggacatcgcagaggagattaaagaagactctgatgaaatgccatcagaatgtatttccagaagggaattggaaaagggcagaatttctagagaagaaatggaaacactttcagttttcagaagttatgaacctggtgaaccaaactgtagaatttatgtaaagaatttagctaaacatgttcaagaaaaggaccttaaatatatttttggaagatatgttgacttttcatcagaaacacagcggatcatgtttgatatacgtttgatgaaagaaggtcgtatgaaaggacaagctttcattggacttcctaatgaaaaagcagcaacaaaagccttaaaggaagctaacggatatgtgctttttggaaaacccatggtggttcagtttgctcgatctgctagacaaaaacaagatcctaaggaaggaaaaagagtttaaaaatttaataaagaagcatttcctgcgtaaaataactggctgtaaatactggtccatgccaaagtggtatccctttttcttgttcgttaatccctttttttgggggg

SEQ ID NO: 37186 - DNA, 727 bp, Macaca Mulatta
ggattccctttgaagactatagggccaaaggaaacatcctccgataaaaaagagaacgaagctttctgagaaacttttttgtgttctgtgaaatcatctcacagagttacagctttcccttcaagaagcctttcgctatgacagtttttgtggaatttgcaaagtgatatttggaagcccataagggctatggttgaaaaaggaaatatcctctgatgaaatctggaaagaagctttctgagaaactgctcagtgttctgttaattcatctcacagagttacatctgtatttcgtagatctctttgctcgccttatttctgtggaatctgagaacagatatttcggatcgctttgcacactatagggccaaaggaaatatcctccgataacaaagagaaagaagctttctgtgaaactcctttgtgttctgtgaaatcatctcacagagttacagctttcccctcaagaagcctttcgctaagacagttcttgtggaattggcaaagtgatatttggaagcccttagagggctatggtgaaaaaggaaatatcctcagttgaaattttgaaagaagctttctgagaaactgcttagtgttctgttattcatctccagagtactctgatttcgtgatgcttgcagcctatctgtgatcgaacaatatcgatctgactaagcagatctcaaaaaactcgactgcaccactcactatgatgcgaacaata

SEQ ID NO: 37187 - DNA, 486 bp, Macaca Mulatta
agttaatacattaaaatacataatggtgagtagactctgtagtctggagataagactgtaccacacagaagtagaaataaagtagaaataaatgtatgtttccactttccatgtctccgctccagaactcctgccctccaacctctgatcttttgggctcatcaagccagctcttctgggagcccatgaaagtccatgacatccgctggaactttgagaaatttctagtggggcccgatggagtccctgtcatgcgctggttccaccgggctccagtcagcacagtcaaatcagacatcctggagtacctaaagcagttcaatgcccactaggaagggttagcgactggcagaagtaactaccgtttcccacctgcaggaatgtctaacaaagtgtccatcttcctccatctttgctccacactcctgcctacccagcctcctgatgaccaaaccatcttgtactacccaagcagctgcttagcat

SEQ ID NO: 37188 - DNA, 320 bp, Macaca Mulatta
cattgcttcatggcaggcatgttttgtataatttaaaacttggtaacattaactttgagaaatgtgggtgcttagcagacccttgggatgtccacactgactggtaccgagcagtataccgtctctgagctgttttcattttgatttgaatattaagtagatggcttgttgagataggccaatgccagaacatgccaaggataggctgaagaaacggccagatgatatgaatttgtgtggtcaccattcatgagagaccagggacactggggctgatgatgacctgtgtaactccgaagcaaaagtaaattaattggcaa

SEQ ID NO: 37189 - DNA, 811 bp, Macaca Mulatta
ccagcctccacaagcccatgtacttctttctgatcaacctctccaccttggacatccttttcaccacaacaactgtccccaagatgctgtccctattcttgcttggggaccgcttcctcagcttttcttcctgcttactgcagatgtacctcttccaaagttttacatgttcagaagccttcatcctggtggtcatggcctatgaccgctatgtggctatctgccacccactgcactaccctgtcctcatgaacccacagaccaatgctaccttggcagccagtgcctggcttactgccctcctcctgcccatcccagcagtagtaaggacctcccagatgacatacaacagaattgcctacatctaccactgcttctgtgatcatctggctgtggtccgggcctcctgctctgacaccaccctccagatcctcatgggcttctgcatcgccatggtggtgtccttcttcccccttctcctggtgcttctctcctatgcccacatcctggcctcggtgcttcgcatcagttcccgagaaggacgggcaaaagccttctccacctgcagctcccacctcctggtggtgggcacctactactcatctattgctatagcctacgtggcttacagggttgacctgtcccttgacttccacatcatgggcaatgtggtatatgccattcttacaccaattctcaaccccctcatttacactctgagaaacagggatgtaaaggcagccatcaccaaaatcatgtctcaagacctaagctggacaggagcatttgacctttaaatgcagctaattct

SEQ ID NO: 37190 - DNA, 364 bp, Macaca Mulatta
  misc_feature (1)...(364): n = A,T,C or G
acccctacaaaaaannnnnnnnnnnnnnnnnncagcaagggtagttttcatctggtgtcttttatttaacgtttttttacagcttacagaaaagctggtgacatatttatacgtttttgtgcaaaaataaatgaatggcaatagattttaaaaaatcttatgtacttctgtgtgaaaaagtctgtataatatttcccttaaatatgcattatattttacttcgtgagttttttactgaattaatctgaaatgtacaagccctggatttgctacagagtgagaagnnnnnnnnnnnnnnnnnnnnnnnnnnnnnngaaattctgcagaaatcagaaactcttaccataggtttggaaacaaaaaa

SEQ ID NO: 37191 - DNA, 648 bp, Macaca Mulatta
  misc_feature (1)...(648): n = A,T,C or G
gggngaagaagcacaaaaaaatagatttagttaacccaggaaacatcaatttttttagtagttccaattttatatcacagttttattttcttatgaaatcaaaaaatgcattgatattaatgcaaattcattatttaacatcaatatcagagtaatcttcaaggtctgaaatgagaaagatactgactttttaaaattttaacagtgtacttcttaggctttcattaccagctctaaagaactttttggaataattccatattccgtagtgtgtggtttatgagttgtgggtttcatcactaacacagtaaccatgagaaaagtctctctccctctgtctctctttctctctgtctctttctttcataagccagtagcaatgttgtgttcacagtctactttccaaaagaacatcaataaaaaagagagcatgtttcaattgaaatggaacttnanngagaactgaaactacttacatacttcagtgccacccgataacttaagtttttaccaccaaaatgcttgttaaacattaaaatcatttttgaaaactccttggatggaaaaggtgcccatggtaaaatggtaaaatacaaaaagggattcccttaccttaaccttcccaaatttaagggcccccaaccagac

SEQ ID NO: 37192 - DNA, 748 bp, Macaca Mulatta
  misc_feature (1)...(748): n = A,T,C or G
ggtttatatggctataattctggagtctcctgattcattaactatagaggtgcttgagaaggtctgcagatgttcatagtaatcacctgtgaggttgggctgccgcggactgtaggtgagggaggaagccgctgcgtgggaagtggaggcaagggggagtttagaggcgtgtggcggctgctgatagaattgaagtgcagcaatcacatgacaattcagttaggaattggtgatccctgcgctggttggctttgaggttgtgtctgtttggatcataaaagaaaagagaaccttacggccgggtgnnnnnnnnnnnnnnnnnnnntnnnnnnnnnnnnnggcccaggcaggcggatcacaaggtcaggagagcgagatcatcctggctaacacgnnnnnnnnnnnnnnnnnnnnnnnnnngaaaaattagccgggcatggtggcgggcnnnnnnnnnnnnnnnnnnnncggaggccgaatcaggagaatggcggnnnnnnnnnnnnngnnnnnnnnnnnnnnnnnnnnnngtgccactgcgctccagccttggccacaaaggcnnnnnnnnnnnnnnnnnnnnnnnnnnnnnnnnnnnnnngggcgccggtggctcaagcnnnnnnnnnnnnnnnnnnnnnnnnnnnnnnaacggggctggatcacgaagtccaggaagatctgagaaccatccctgggtttaaacacgggtggaaaacccctgttctccctgcctaaaaaaaaaaat

SEQ ID NO: 37193 - DNA, 390 bp, Macaca Mulatta
cacgcctgagttctctaaatgggccaatgacgagatgccatccaccagcaatggggaaagcagcaagcaggaggccatgcagaagacctgcaagaacagcgacatcgagaaaatcaccgaagattcagctgtgaccacgtttgaggctctgaaggctcgggtcagagaacttgaacggcagctatctcgtggggaccgttacaaatgcctcatctgcatggactcgtactcgatgcccctgacgtccatccagtgttggcacgtgcactgcgaggagtgctggctgcggaccctgggtgccaagaagctctgccctcagtgcaacacgatcacagcacccggagacctgcggaggatctacttgtgagctatctgccccaggcaggcctc

SEQ ID NO: 37194 - DNA, 174 bp, Macaca Mulatta
ctccaggtttggaggacttcggccaagtgcgcgaacctcttagaggaggaacggctgggcagtaatgggggctttgcccaccactttagctcaggactctcagccccccttttaaaatgaggtgcaaaataagtttgagggacttgaactcagggaacacttttttgtagttgt

SEQ ID NO: 37195 - DNA, 1442 bp, Macaca Mulatta
  misc_feature (1)...(1442): n = A,T,C or G
aagaggcatttctggggaggaggaagacgatgagcctgattgctgtaacgatgagcggtactggccagctggacannnnnnnnnnnnnnnnnnnnnnnnnnnnnnnnnnnnnnnnnnnnnnnnnnnnnnnnnnnnnnnnnnnnnnnnnnnnnnnnnnnnnnnnnnnnnnnnnnnnnnnnnnnnnnnnnnnnnnnnnnnnnnnnnnnnnnnnnnnnnnnnnnnnnnnnnnnnnnnnnnnnnnnnnnnnnnnnnnnnnnnnnnnnnnnnnnnnnnnnnnnnnnnnnnnnnnnnnnnnnnnnnnnnnnnnnnnnnnnnnnnnnnnnnnnnnnnnnnnnnnnnnnnnnnnnnnnnnnnnnnnnnnnnnnnnnnnnnnnnnnnnnnnnnnnnnnnnnnnnnnnnnnnnnnnnnnnnnnnnnnnnnnnnnnnnnnnnnnnnnnnnnnnnnnnnnnnnnnnnnnnnnnnnnnnnnnnnnnnnnnnnnnnnnnnnnnnnnnnnnnnnnnnnnnnnnnnnnnnnnnnnnnnnnnnnnnnnnnnnnnnnnnnnnnnnnnnnnnnnnnnnnnnnnnnnnnnnnnnnnnnnnnnnnnnnnnnnnnnnnnnnnnnnnnnnnnnnnnnnnnnnnnnnnnnnnnnnnnnnnnnnnnnnnnnnnnnnnnnnnnnnnnnnnnnnnnnnnnnnnnnnnnnnnnnnnnnnnnnnnnnnnnnnnnnnnnnnnnnnnnnnnnnnnnnnnnnnnnnnnnnnnnnnnnnnnnnnnnnnnnnnnnnnnnnnnnnnnnnnnnnnnnnnnnnnnnnnnnnnnnnnnnnnnnnnnnnnnnnnnnnnnnnnnnnnnnnnnnnnnnnnnnnnnnnnnnnnnnnnnnnnnnnnnnnnnnnnnnnnnnnnnnnnnnnnnnnnnnnnnnnnnnnnnnnnnnnnnnnnnnnnnnnnnnnnnnnnnnnnnnnnnnnnnnnnnnnnnnnnnnnnnnnnnnnnnnnnnnnnnnnnnnnnnnnnnnnnnnnnnnnnnnnnnnnnnnnnnnnnnnnnnnnnnnnnnnnnnnnnnnnnnnnnnnnnnnnnnnnnnnnnnnnnnnnnnnnnnnnnnnnnnnnnnnnnnnnnnnnnnnnnnnnnnnnnnnnnnnnnnnnnnnnnnnnnnnnnnnnnnnnnnnnnnnnnnnnnnnnnnnnnnnnnnnnnnnnnnnnnnnnnnnnnnnnnnnnnnnnnnnnnnnnngtgctcaataaccacgtgtggccaggggttgctgtattggacagcacaggtatagaacatttccatcaacacagaaagttccattggacagtgttggtatagagacccttgctgggaagaactggatatgtgctaagcaagagggctttatttcactcagaaaatctttcagtttattcagatgttggaaaactatttaatgtatagattccacagctcattctgactgattctctgag

SEQ ID NO: 37196 - DNA, 800 bp, Macaca Mulatta
  misc_feature (1)...(800): n = A,T,C or G
gggctcacaccacggtgacgcaagtctcgtgtgggcacaggcctggctacctcatcttgttagtggctctctcctcttccacaggatgggggcccacagctgcagcaaccggccccatagttgagcacatgtggttatcctatagagcttttcccaaggagggtgtttgaacttagagtcttaataaaatcttaccaaataaattttgagtagaataatcgtcttttgcaatgtacattttaaaaatttcacaagttcttttttgtatataaagaacagtagactgggcacaatggtnnnnnnnnnnnnnnnnnnnnnnnncagaggccgaggcgggcggctctcttgagcccagggnnnnnnnnnnnnnnnnnnnnnnnnggggagaccctcatctctacnnnnnnnnnnnnnnnnnnnnnnntatggtggtgcatgcctgtcatcccagctgacttggaaagctgaggtgggaagatcannnnnnnnnnnnnnnnnnnnnnnnnnnnnnnntgtgattgcgacactgaactgcaacctgggacagtgagaccgtgtctcnnnnnnnnnnnnnnnnnnnnnataaatgcccattaaaaaaaaaagccaaagcagggagttttaaaaaagtaaaattccccccaaggttcccaaggaaccttagaataaccccccttttggtgcctaaatacccctccggtgtcaaaatgggacccccnnnnnnnnnnnnnnnnnnntaagttttccccgccctcttttttcgccacccaactttttttccccggttaaaatttggaaag

SEQ ID NO: 37197 - DNA, 329 bp, Macaca Mulatta
gtcttcttcctctactattctctgtagttggtggcagtgaaccttttcggtcctactcggaaacgtacctatccaagggattgctgcttatctttgtggtggattcagcagatcacggccgattacctgaagccaagaaataccttcatcagctaattgcggcaaacccagtacttcctctggttgtgtttgcaaacaaacaggtaaaaatctgtgcaaatataaattgtactcagtagttttgtatttaatacaaaaaatgtatatgtgtaatagctagtcaacaataagctatatatttaattcagtttatgtttattagagctctt

SEQ ID NO: 37198 - DNA, 996 bp, Macaca Mulatta
  misc_feature (1)...(996): n = A,T,C or G
ggattctagaggccgaggcgcccgacatnnnnnnnnnnnnnnnnnnnnnnnnnnnnnnnnnnnnnnnnnnnnnnnnnccctccttactctttgggtggtgttgcttttcctttccttttccctttgagannnnnnnnnnnnnnnnnnncaattttgtattttactgatattaccaagatagtttactctccttctatctttctgcttaccgcacactggataacacttcacgtactctcccaccataatgctcatgaacccaatccggaaaaggttccggctgggtcccctgcccctccccacattcttgctatatcctcccgatggtggatgactgggatggggaaatagtgagatcccttgtgtatgacctttccagcttcttccctagcccggcttgaccgggtagtattattaatccatgttctagcccccttgattttcaatgccgcgtggtgtcttacgtaccttcttgggaggctcgcccttttccaatttagcgccttttgatgaataagagggatattggggcgtgttcagttaattgttttctaaattatattactcacttctttgctgtttcgatagtatttgaatactactctatcttatatttatgtcgtggtgatttctcttttcatactattcttatcaatctgtttggtggatgaagcgaaccgtctgttcttatcattaacacaactattatattcagcattattagtacatcctcctacagatacttcttagtatgataaactctatgatcccaaatgaacctgtctcataaattatgcactcctccccattaggtatactcattattatggatgccgtaaagttgagtatatgtttatcaatataaattgtcgacttttattattactaaagtaagctactccatgataaggatcctagttactcttacagttgttcgatgatgtttgggtgtagttatagctattgcgtgtgtgttttgttgttttttgtacttcg

SEQ ID NO: 37199 - DNA, 904 bp, Macaca Mulatta
  misc_feature (1)...(904): n = A,T,C or G
ggttgctttctgcaatggagagcactgcttctttagagaaaatgcctgctgcgttttccctttttgaacattatgatgacagctcggcaagaagtgaccagatgttaaaacaagtggctgnnnnnnnnnnnnnnnnnnnnnnnnnnnnnnnnnnnnnnnnnnnnnnnnnnnnnnnnnnnnnnnnnnnnnnnnnnnnnnnnnnnnnnnnnnnnnnnnnnnnnnnnnnnnnnnnnnnnnnnnnnnnnnnnnnnnnnnnnnnnnnnnnnnnngagttggtagaagaatacagactgacagtgaaagaaagctactgcatttttgaagatctggaacatgaccgatgctatcaagtgtgggtgatggctgtgaacttcaatggatgtagcctgcccagtnnnnnnnnnnnnnnnnnnnnnnnnnnnnnnnnnnnnnnnnnnnnnnnnnnnnnnnnnnnnnnnnnnnnnnnnnnnnnnnnnnnnnnnnnnnnnnnnnnnnnnnnnnnnnnnnnnnnnnnnnnnnnnnnnnnnnnnnnnnnnnnnnnnnnnnnnnnnnnnnnnnnnnnnnnnnnnnnnnnnnnnnnnnnnnnnnnnnnnnnnnnnnnnnnnnnnnnnnnnnnnnnnnnnnnnnnnnnnnnnnnnnnnnnnnnnnnnnnnnnnnnnnnnnnnnnnnnnnnnnnnnnnnnnnnnnnnnnnnnnnggaaccagatttctcttgttgagagaaacagctcatcctgctctacacatttcctcaagtgggacagtgatcagctttgctgagaggagacggctgacnnnatcccgtcagtgctgggtgaggagctgccttcctgtggccagcattactgggaaaccacagtcacagactgcccagcatatcgactcggcatctgctccagctcggc

SEQ ID NO: 37200 - DNA, 611 bp, Macaca Mulatta
  misc_feature (1)...(611): n = A,T,C or G
aaaactgtacagcaaaaagttaaaacaagtacaaaaacacattcggccaaaaaagttagcactacagctaaacaagcattgaggaagcagcaaacgaaggcatggaagaagctacaacaacaaaaagaacaggaaagacagaaagaagaggatcagcggaaacaagnnnnnnnnnnnnnnnnnnngaaaagagaggaagaaatcagaaaaattcgagatctctcaaatcaggaagaacagtacaatcgattcatgaaattggttggtggcaagaggagatcaagaagtaaatcttcagatcctgacctgaggcgatccttagataagcaacctactgatagtggaggaggcatttatcagtatgataactatgaagaagttgctatggatacagatagtgaaaccagttctccagctccttcaccagtgcaaccgccatttttctctgaatgttcattggggtatttttctccagcaccatctctttctttgcctccaccaactcaggtttcttctctgccacctttgagccagccttatgtggaaggcttgtgtgtatctcttgaacctctacctcctctatcaccattaccacctcttcccactgaaga

SEQ ID NO: 37201 - DNA, 665 bp, Macaca Mulatta
  misc_feature (1)...(665): n = A,T,C or G
tgatcatacagcaacctgtgaggtgtcccggtggaaagcacacggtggggatgtgcgtttgttccactcaactgttttatcacaaaatgtcgtaaacacgggagatgaaagctgaactctcgacacccagctacaaacccacaatggccctaaaaatctggggtattcattggtgtgggctgccatggaggaattttnnnnnnnnnnnnnnnnnnnnnnngttgctctgtttacaaatcaggagagcccccgtttttatatgctaggaaggtccttgcgatagaccgaagaggtgtgaaaacgggagagtggaaggcccgagccctgtctctcaggaccacggcagcctgccccgcacacagttctgcttcccgtccagagcaaggtttcctggcagattcctgccagactctgaacggagctccccatgaccctataaaaggggctgtttgtccccataacaaactactgagcatcaaaactcgctccacatagacggaaagtaggacaaatgctagcaaatgtcggcaaacggacgaacaacgagacacaggaatgcctaccataaacacaagacacagaagatagcagaagaagaacacaagaaacatgcaaacaaaataaaataaggaggcatctccacagagagacagaatgaacggaat

SEQ ID NO: 37202 - DNA, 855 bp, Macaca Mulatta
  misc_feature (1)...(855): n = A,T,C or G
ggcatagaattccgtagaagtgagtcaccaatttcagcccatactcagtgggtggggaattaagcccctcacttaaatggacagccaccaaactgatttgtgaatgtattttaaaaccaccacacatgattttgtaattcagaagaaaggtttgggctggaaataagacatcaggagttttgcgcatagatgctgtggagtgagtagatgagtgaccacttagtaaaagagagaagaggtccaagactgatcctttaggaaatctgacttatagaggatctgctgtgtaggagtggaggagaaagaagaaatggaatctgggaagatgagaagaatttttcaggcagggagtgttctactcagtggaagcctactggaatgtgtatttgattttcatttttaagaatttattctctanatgaatgaagaacgaataaataaatgtcatgtatatgttcaaaattttaattctaagtatggttattattggaatgctttataaattaagagcagaaatcagcattagggaatgcataataccagggctgggaagtattgttaaaattattttattgtccagacaataaaataacctatgcaagctttaaaatgaccatttattaaaggatgtgccctttcaataaaaaacagatttattatggatcttttaaataacctatcaaattatttttggtaacggaaaaaaggccgaccaccaattggctttagggagggaaattattttaaaacccgcgtcaaaaacgggggttatcctccgggcggaaaaaggggaaaaatggggggggacttaacacttttcctcttccatttgagccttgggtctcaaaatctcta

SEQ ID NO: 37203 - DNA, 445 bp, Macaca Mulatta
tctgggagaatgtggagacatttgaacaggctccttctctggagcgtattttcttctgtcacatgtagaaaagctgtattggattgtgaggcaatgaaaacagatgaattcccttctccatgtttggactcgaagactaatgtggttatgaagggtcaaaatgtatctatgttttgctcccataagaacaaatcactgcagatcacctattcattgtttcgacataagacacacctgggaacccagaatggaaaaggtgaacctgcaatttttaacctaagcatcacagaagcccatgaatcaggaccctacaaatgcaaagcccaagtttacagctgttcaaaatacagccgtgacttcaacttcacaattgtcgacccggtgactgccccagtgctgaacattacggtcattcaaacagaaacacaccgacatataacattac

SEQ ID NO: 37204 - DNA, 792 bp, Macaca Mulatta
gattgagaccaatccaatatttcagctttgtttgctttgcaattacgggttggcttgtggctacggtgccactggggcaaatctgcaaccgctcgctttctcctctgcactcggggctggtggaggaagcgacccgcggagtcactgcagggaggagagggggacgcgcgcggggggaagcggcagaggttggaggagcctcgcttgcaccccagggccgcgggcaggcagagctgtgttgaaggacacatttttcagttcctgacagtcactgagctatacgcaataataaagcgcgtgatttgcgtgtggaaaccagtgtcgtgtcctcaccagcttccttttctgcccaccttctctctctcttctacctccgtttcgcttttcttcagtgtatgttagtggtttggtggatttctcttctcccttgctgttcaactgctagcatgatttgttatattttccacagctgtttattcttgtttgactttttgtacaaagtcacttcaaatctgctgcagaaagaataaagctcctaaccctttggatgggctcctgcaggcgtatggctgtccccggcccacttttaattctttggagatggctcttctgtgtaaattagctgctggatgcgttcggtcacttcgtaggccagcctagtttgtatcagcagaacagtagtgaactcaaatcaggtcgtaagccttatatttcacagacaattaaatcttggctgctgttgaacaaaactgtaatatttactctgctctataccaaggagcacttttaaag

SEQ ID NO: 37205 - DNA, 752 bp, Macaca Mulatta
  misc_feature (1)...(752): n = A,T,C or G
gggacagacccgccgctgacttccacccctccagatctggcagagtgtccgctgcgctcctgatccagcaaggtgcccattgccgcccctgattgggctaaaggcttgccattgttcctgcatggctaagtgccccggttcttcctaatcaggctgaacactagtcaatgggttccatggttctcttctgtgacccatggcttctaagagagctataacactcaccgcatggcccaagattccattccttggaatccgtgaggccaagaatcccaggtcagagaacaagaggcttgctgccattttgagagcagctgccaccatcttgggagctctaagaaaaaggaccccccccccccagcctgctgccaccggtaatgttttggcaaccacgaagggacctccaaagtgtttgtctcttccagaatcgaagctgtaaaactacaaatcattcttcaaatggagccccatctgcagtccacgatgaagttctaccacggacccctggaccagcctgctagcccatgctccaatgttgatgacatcaaaggcacccctcctgaggatatctcaactgcacaacccctactatgccccaattcagcaggaagcagttagagcagtcatcagccaaactccccaacagcacttggattttccttatgagaagggggactganagacaggactagctggatttcctangcagactaaagaatcccttaacccaacctggggaaggtgacccnctt

SEQ ID NO: 37206 - DNA, 682 bp, Macaca Mulatta
agcgtggcgtgtgttgggttcttcttggtccagagggcctgtccacacacgggtggtcaggacaagatcttcctatctgtccagcccagcgctctggtgcctcagggaggacacatgactcttcggtgtcactatcgtcgtggcctttacaactttaccaacttcactctgtacaaagacgacagaagccacgttcccatcttccacaacagaatattccaggagagcttcctcatgggccctgtgactccggcagacgcagggacctacagatgtcggggttcatacccgcactcccccactgagtggtcggcactcagtgaccccctggcgatcatggtcacaggtcccctggtgaaatcaggagagacggtcaccctacaatgttcatcagataccgtgtttgagcacttctttctgcacagtgagacgtctgaccttgcagagacctacagatgctacggttctgtcactcactccccctatgtgttgtcagctcccagtgaccccctggacatcgtgatcacaggactctgaagaacaagaccctcaggaggtgacatacgcacagttggatcactgcgctttcacacggggaaaaatcactcgcccttctcagaggcccaagagacccccaacagataccagcgtgtacatagagcttccagatgctgagcccaga

SEQ ID NO: 37207 - DNA, 321 bp, Macaca Mulatta
aaggtgagtgaggaggtgtcggcacacacgcctctggatccacccatgcgagaagccctcaagttgcgtatccaggaggagattgcaaagcgccagagccgacactgaccatgctgaaggcgttctctccaggctggattcactgcactcggaagaattctgtccaggaaatttagtgtgggggtaccaggaccagtttgtctgatcttgagacccccagagctgctgcatccatagggtgttgcaggactatacctggcctgccttgcagtcattctttcttgtatgttgacccatttacccagcctgatattctggaat

SEQ ID NO: 37208 - DNA, 5485 bp, Macaca Mulatta
  misc_feature (1)...(5485): n = A,T,C or G
ccgcgtccccggaggagctcgcatccacaaaagagcaagcgtgccaagaagagcccgcggcgaagtcaaaccgagccgcgcgttaggcatgaggaccacgcgtcccccgaggagcccggagaggccgcgcccgagcccccggggttcggggcggtgtacggggagccggacctggtgctggaggtgtccgggcgccggctgcgcgcgcacaagactgtgctggcggcgcgcagcgactacttnnnnnnnnnnnnnnnnnnnnnnnnnnnnnnnnnnnnnnnnnnnnnnnnnnnnnnnnnnnnnnnnnnnnnnnnnnnnnnnnnnnnnnnnnnnnnnnnnnnnnnnnnnnnnnnnnnnnnnnnnnnnnnnnnnnnnnnnnnnnnnnnnnnnnnnnnnnnnnnnnnnnnnnnnnnnnnnnnnnnnnnnnnnnnnnnnnnnnnnnnnnnnnnnnnnnnnnnnnnnnnnnnnnnnnnnnnnnnnnnnnnnnnnnnnnnnnnnnnnnnnnnnnnnnnnnnnnnnnnnnnnnnnnnnnnnnnnnnnnnnnnnnnnnnnnnnnnnnnnnnnnnnnnnnnnnnnnnnnnnnnnnnnnnnnnnnnnnnnnnnnnnnnnnnnnnnnnnnnnnnnnnnnnnnnnnnnnnnnnnnnnnnnnnnnnnnnnnnnnnnnnnnnnnnnnnnnnnnnnnnnnnnnnnnnnnnnnnnnnnnnnnnnnnnnnnnnnnnnnnnnnnnnnnnnnnnnnnnnnnnnnnnnnnnnnnnnnnnnnnnnnnnnnnnnnnnnnnnnnnnnnnnnnnnnnnnnnnnnnnnnnnnnnnnnnnnnnnnnnnnnnnnnnnnnnnnnnnnnnnnnnnnnnnnnnnnnnnnnnnnnnnnnnnnnnnnnnnnnnnnnnnnnnnnnnnnnnnnnnnnnnnnnnnnnnnnnnnnnnnnnnnnnnnnnnnnnnnnnnnnnnnnnnnnnnnnnnnnnnnnnnnnnnnnnnnnnnnnnnnnnnnnnnnnnnnnnnnnnnnnnnnnnnnnnnnnnnnnnnnnnnnnnnnnnnnnnnnnnnnnnnnnnnnnnnnnnnnnnnnnnnnnnnnnnnnnnnnnnnnnnnnnnnnnnnnnnnnnnnnnnnnnnnnnnnnnnnnnnnnnnnnnnnnnnnnnnnnnnnnnnnnnnnnnnnnnnnnnnnnnnnnnnnnnnnnnnnnnnnnnnnnnnnnnnnnnnnnnnnnnnnnnnnnnnnnnnnnnnnnnnnnnnnnnnnnnnnnnnnnnnnnnnnnnnnnnnnnnnnnnnnnnnnnnnnnnnnnnnnnnnnnnnnnnnnnnnnnnnnnnnnnnnnnnnnnnnnnnnnnnnnnnnnnnnnnnnnnnnnnnnnnnnnnnnnnnnnnnnnnnnnnnnnnnnnnnnnnnnnnnnnnnnnnnnnnnnnnnnnnnnnnnnnnnnnnnnnnnnnnnnnnnnnnnnnnnnnnnnnnnnnnnnnnnnnnnnnnnnnnnnnnnnnnnnnnnnnnnnnnnnnnnnnnnnnnnnnnnnnnnnnnnnnnnnnnnnnnnnnnnnnnnnnnnnnnnnnnnnnnnnnnnnnnnnnnnnnnnnnnnnnnnnnnnnnnnnnnnnnnnnnnnnnnnnnnnnnnnnnnnnnnnnnnnnnnnnnnnnnnnnnnnnnnnnnnnnnnnnnnnnnnnnnnnnnnnnnnnnnnnnnnnnnnnnnnnnnnnnnnnnnnnnnnnnnnnnnnnnnnnnnnnnnnnnnnnnnnnnnnnnnnnnnnnnnnnnnnnnnnnnnnnnnnnnnnnnnnnnnnnnnnnnnnnnnnnnnnnnnnnnnnnnnnnnnnnnnnnnnnnnnnnnnnnnnnnnnnnnnnnnnnnnnnnnnnnnnnnnnnnnnnnnnnnnnnnnnnnnnnnnnnnnnnnnnnnnnnnnnnnnnnnnnnnnnnnnnnnnnnnnnnnnnnnnnnnnnnnnnnnnnnnnnnnnnnnnnnnnnnnnnnnnnnnnnnnnnnnnnnnnnnnnnnnnnnnnnnnnnnnnnnnnnnnnnnnnnnnnnnnnnnnnnnnnnnnnnnnnnnnnnnnnnnnnnnnnnnnnnnnnnnnnnnnnnnnnnnnnnnnnnnnnnnnnnnnnnnnnnnnnnnnnnnnnnnnnnnnnnnnnnnnnnnnnnnnnnnnnnnnnnnnnnnnnnnnnnnnnnnnnnnnnnnnnnnnnnnnnnnnnnnnnnnnnnnnnnnnnnnnnnnnnnnnnnnnnnnnnnnnnnnnnnnnnnnnnnnnnnnnnnnnnnnnnnnnnnnnnnnnnnnnnnnnnnnnnnnnnnnnnnnnnnnnnnnnnnnnnnnnnnnnnnnnnnnnnnnnnnnnnnnnnnnnnnnnnnnnnnnnnnnnnnnnnnnnnnnnnnnnnnnnnnnnnnnnnnnnnnnnnnnnnnnnnnnnnnnnnnnnnnnnnnnnnnnnnnnnnnnnnnnnnnnnnnnnnnnnnnnnnnnnnnnnnnnnnnnnnnnnnnnnnnnnnnnnnnnnnnnnnnnnnnnnnnnnnnnnnnnnnnnnnnnnnnnnnnnnnnnnnnnnnnnnnnnnnnnnnnnnnnnnnnnnnnnnnnnnnnnnnnnnnnnnnnnnnnnnnnnnnnnnnnnnnnnnnnnnnnnnnnnnnnnnnnnnnnnnnnnnnnnnnnnnnnnnnnnnnnnnnnnnnnnnnnnnnnnnnnnnnnnnnnnnnnnnnnnnnnnnnnnnnnnnnnnnnnnnnnnnnnnnnnnnnnnnnnnnnnnnnnnnnnnnnnnnnnnnnnnnnnnnnnnnnnnnnnnnnnnnnnnnnnnnnnnnnnnnnnnnnnnnnnnnnnnnnnnnnnnnnnnnnnnnnnnnnnnnnnnnnnnnnnnnnnnnnnnnnnnnnnnnnnnnnnnnnnnnnnnnnnnnnnnnnnnnnnnnnnnnnnnnnnnnnnnnnnnnnnnnnnnnnnnnnnnnnnnnnnnnnnnnnnnnnnnnnnnnnnnnnnnnnnnnnnnnnnnnnnnnnnnnnnnnnnnnnnnnnnnnnnnnnnnnnnnnnnnnnnnnnnnnnnnnnnnnnnnnnnnnnnnnnnnnnnnnnnnnnnnnnnnnnnnnnnnnnnnnnnnnnnnnnnnnnnnnnnnnnnnnnnnnnnnnnnnnnnnnnnnnnnnnnnnnnnnnnnnnnnnnnnnnnnnnnnnnnnnnnnnnnnnnnnnnnnnnnnnnnnnnnnnnnnnnnnnnnnnnnnnnnnnnnnnnnnnnnnnnnnnnnnnnnnnnnnnnnnnnnnnnnnnnnnnnnnnnnnnnnnnnnnnnnnnnnnnnnnnnnnnnnnnnnnnnnnnnnnnnnnnnnnnnnnnnnnnnnnnnnnnnnnnnnnnnnnnnnnnnnnnnnnnnnnnnnnnnnnnnnnnnnnnnnnnnnnnnnnnnnnnnnnnnnnnnnnnnnnnnnnnnnnnnnnnnnnnnnnnnnnnnnnnnnnnnnnnnnnnnnnnnnnnnnnnnnnnnnnnnnnnnnnnnnnnnnnnnnnnnnnnnnnnnnnnnnnnnnnnnnnnnnnnnnnnnnnnnnnnnnnnnnnnnnnnnnnnnnnnnnnatattttcagtccttaaatatcaaactcatatcctattatcactgtgattttacttgtgaaatcattcctgtaacgtttattgtttgaaactgcaatgtggaaattgggcttccagagtaacactgtccccgcaagaggatatgagaagtggnnnnnnnnnnnnnnnnnnnnnnnnnnnnnnnnnnnnnnnnnnnnggctttccagcatttcatttagtgaaggaatgcccacactagacgtagcacagcctcctgtggggccccggcagcaaagccccaggtactccctgtcacctcacaacaaaatgcacgaagaaacctaaagaataagagaaaggaattaataccaaccattaaaggatgtccagccaacctattgtggaaatatatagaatagtgtacaccatgtttctaaatagtgatatcacatagaaacacatactagaggacctgccacaccatgagccacgtttttgcttttggggggccggtccctggggtgtggagctgctagggtttgcacccatgaaacaacgagaaaagccacaccctctaaggctttgattctgggactgctgcggggagggcagaggcattgctgagactgcctggcgccggcggatgccccaggtagggtcttttcgaattcaaagtgatggtctaagtgtgcgtccaacgctgtgtaggaaaaaggttgatgcaaaaatatttctggtcatccacccgttaaaagagttagatgaggctggtgccttgataacagctatccacacttcccatgaaattacctatatgctgnggcgtttccaatgtctgactcatgaaattaacccatatgcaggggctttccaaatgtctgnnnnnnnnnnnnnnnnnnnnnnnnnnnnnnnnnnnnnnnnnnnnnnnnnnnnnnnnnnnnnnnnnnnnnnnnnnnnnnnnnnnnnnnnnnnnnnnnnnnnnnnnnnnnnnnnnnnnnnnnnnnnnnnnnnnnnnnnnnnnnnnnnnnnnnnnnnnnnnnnnnnnnnnnnnnnnnnnnnnnnnnnnnnnnnnnnnnnnnnnnnnnnnnnnnnnnnnnnnnnnnnnnnnnnnnnnnnnnnnnnnnnnnnnnnnnnnnnnnnnnnnnnnnnnnnnnnnnnnnnnnnnnnnnnnnnnnnnnnnnnnnnnnnnnnnnnnnnnnnnnnnnnnnnnnnnnnnnnnnnnnnnnnnnnnnnnnnnnnnnnnnnnnnnnnnnnnnnnnnnnnnnnnnnnnnnnnnnnnnnnnnnnnnnnnnnnnnnnnnnnnnnnnnnnnnnnnnnnnnnnnnnnnnnnnnnnnnnnnnnnnnnnnnnnnnnnnnnnnnnnnnnnnnnnnnnnnnnnnnnnnnnnnnnnnnnnnnnnnnnnnnnaagatcttagtagagcaaatgtaagcaaaagtgcatttttgtgttcttgttaattttagatgctttcctagcttacaaaacgttttatttttgggttaaaaatcaatcaactttctgatttttccccttctgcaatgttattattcataagaagataacacgagctgaaaatggaaatctgcggttgtttcagttgccttgaatttctttcagtggccacatcatttccacgttttccacatccgggaggaagtctgggctgtgcagccttcaggcacccggcacatattttatgctggcaggtgcttcagacacgcctagtgaatggatttggatggaacgcacataaaacaggagacgggttctcatgtgagatcaaagctcctccaaagcctattcaagctctaaacgattctcaaatgttaccatttattaaaggtacactacacctgttgaaggccaagttcaggccagctgttgtgatctgcgtaatgtatttattaatgcttgagttttaaaatcctgggcataaatagtgcagagccttgtatgtctgtcagttcatgccgagatgaaataaatcatgcagaaagtgccagt

SEQ ID NO: 37209 - DNA, 677 bp, Macaca Mulatta
gccagcccagccccttgcctggtggatcaccacttctgtctcctgctgctctgccccctgccccaggcctgagaaacctgggaggaccctcagggagggtcagggatgtgtgatgccagcaggagaccagcgagttccctggcaggaagcacactgcacagggagcctgctgccatgctgccacccgcatgcacctgtcaggccgcaaggagtgatgcccagggcggggcgggcagtggctgctgtgggggaggcgctctgggcagtgctgtttcctgagaaactgcagccccaaggggcctaggcagagcctggcctgagtggggttgagggggaggtagggtggggatgccctatgatgtgaggcctgttgcgccctggggaggagacccagtgcggtggggcccaagctccagcgttcagactgcgtggaagccctgaggctccctcaccccgcaggacaccccatcctgtgtggaggggagagtagggtgggccagaaggcccacctggacaactgaggcccctccccgcctgctaccccatctgcttgggcccaggaagggaggggccaaggcagacccctcaacatacgtgccaaagcccgatgtggagccgcccacacaccaggagcccagattctggcattcagcattttttctgacatcaaaagagtc

SEQ ID NO: 37210 - DNA, 803 bp, Macaca Mulatta
  misc_feature (1)...(803): n = A,T,C or G
acacannnnnnnnnnnnnnnnnnnnagagtaaaagggttttttccggagaaactttcagggaaaaaccttgggaaggcctctcttgagacctttttctttcctttccnttttgggaggaattatttttggacaaattttggaagaaattctggaaaatttccataaggaaaagttaggtgggggatatttttttataattttaatttattaaaaaaagtcattggaaattttgataggggattgcattgaaatctgtatgtcacttttacaggaagtctttcttaattatttatctcttgcttaatttcttttaagaatgtttggccaagtgcagtggttcacacccnnnnnnnnnnnnnnnnnnnnnnnnnnnaccagcagatcacntgagctcaagaacttgagaccaacctggacaacacgatgaaaccccatctctacaaaatatacaaaaattagacaggcctagtggcacatnnnnnnnnnnnnnnnnnnnnnnnnnnnnnnnnggcaagatcgcttgagccttggaggtcaaggctacagtgagcagtgatcacagtccagcctggatgacacagtgacactccaaagagaaaagtctaatccagtagatctgggacagaggctgacaataggcatttccagcaagcttccagttgattctgaggaccttgatgcgtgagggtctgcagcttcattcttgaagtcggtgagaccaagaacccaccaagttcggacacagtaccaggtcattccatatccaagtccgcgccccactaactccagtcccgcacctccc

SEQ ID NO: 37211 - DNA, 727 bp, Macaca Mulatta
  misc_feature (1)...(727): n = A,T,C or G
cagtttgcttcagtgtccccaacagttcctgaattcttgaaaactcctccaactgcagatcagcctccccctcggcctgcagctcctgtcctccccacaaacactgtgtcctcagcaaagtctggcccagcgctggtnnagcaaagccatcccaagaatccaaatgacaaacaccgtagcaaaaagtgcaaagatcccaaaccacgggtaaagaagttaaaataccaccaatacattccaccagatcagaagggtgagaagaacgagccgcagatggactccaactacgcccgcctgctccagcagcagcagctgttcctgcagctgcagatcctgagtcagcagaagcagcactacaactaccagaccatcctgcctgcaccattcaagtacggcggggcccatgctgtcctcgacgcgggtttttctgtgntttatgaggaactataagttaccaaaagttgaatattgtcatttatttgtgctcagtgatgattttcatttctttgttatcagagcttatcatacagtgtctgaagtccacatggtgagaatggcctgcattccagtccagtttctgtcctccaaaataggttctgaatttttacaagttagaaatgccttttcacaattattcatccagatttgcctgttattagaacaccaaaatagtactagatgctctgagaaaagcataagtagtgtaagacctgtgataaacagctaa

SEQ ID NO: 37212 - DNA, 680 bp, Macaca Mulatta
cctaaaactatgacactcattatagcttcccccatactccaataatagacagtttttcccatcatctcccttgtacctagagcaaactttcagttgtttttgacaatatgaatggaatggtaaagcctggaaagtccagtaaaatatattataactgagtttttctcatcaaatttttaaccacatctgctattgacaggtaaacaaattttaactgattgccttttgctttccatggtaacatgcaggtgagcgcgcaaataagtggtaaaagaccaatgaagcagttcaaagaaatagacaaagtaaccaacaaactaaagaactcatttctgaatatttttctatccccctaccctcccttatgaactccttgttggcagtaactgtcttattcttccgtaaatgacagacacatcagctggggtagttcatttaagccagtgtaggtgatttagggtggcaactttaaaatagctgccatgaaatgttgtcattagtttgctagcagcagggaaaacaaaatgaaacaggaatatacaaaaggaggtaaagagtctctcttaccttacataagccttatgtttgagggtaggaggcaaacctttaaaaaagtatattactttatttatttagagacagggctttggcatgttggccgggttggtcttgaactcccg

SEQ ID NO: 37213 - DNA, 851 bp, Macaca Mulatta
  misc_feature (1)...(851): n = A,T,C or G
gggggccgcgggggcgcaatgggagcggcgcgcgtagggttggtggactgtcactgccacatctccgccccggactttgaccgcgatttggatgatgtgttggagaaagccaagaaggccaatgttgtggcccttgtggcagttgctgaacattcaggagaatttgaaaagattatgcaactttcagaaaggtataatgggtttgtcctaccatgcttgggtgttcatccagttcaaggactttcaccagaagaccaaagaagtgtcacactaaaggatttggatgtagctttgcccattatcgagaattataacgatcggttgttggcaattggagaggttggactanatttctcccctagatttgctgggcctgatggaccgcaggaagagcaaagacaagtcctaatcagacagatccaattagccaaaaaactaaatttgcctgtaaatgtgcactcacgctctgctgggaaaacctacccatcacccttttttacaaagccagggcgcttgacaagggtactacctgcttgccctttggattggtccgccatcctggcatcccatgggaaggcacccagaacctggggtacctttcctcctaaatttccccctttcctcccttcgaaatcggcccccacccataaaccctggggaaacagttggcctttaactctctccatgctccacaaacccaatccttcctcccctagggatcccaaataacccgtttcggtaacgagcccccggaaaggttttatattttccgcccaaactttatcccccgcgtgggacacgggatctcctctgcgcaccaacttgtttcccactggtcccaccgccaacgt

SEQ ID NO: 37214 - DNA, 796 bp, Macaca Mulatta
  misc_feature (1)...(796): n = A,T,C or G
gggaatgcaagcagtgtgggaaggccttcagttatctcccctcccttcgactacatgaaagaattcacactggcgagaagccctttgtatgtaaacaatgtggtaaagcctttagatccgccagtacttttcaaatacatgaaaggactcacactggagaaaaaccctatgaatgtaaggaatgtggggaagcattcagctgcatccccagtatgcgaagacacatgataaagcatactggagaaggaccttacaaatgtaaggtatgtgggaaaccctttcattctctgagtccatttcgaatacatgaaagaacnnnnnnnnnnnnnnnnnnctatgtatgtaaacattgtggtaaagctttcgtttcttcgacatcaattcgaatacatgaaagaacnnnnnnnnnnnnnnnnnnctatgagtgtaagcaatgtgggaaagccttcagttatctcaactcctttcgaacacatgaaatgattcacactggtgagaaactctttgaatgtaagcgatgtggtaaagcctttagatcttctagttcctttcgactacatgaaaggactcacactggacagaaaccctatcattgtaaggaatgtggggaaagcctattcttgnccgtgccaggctttcaaagacacatgttaacacaccgctgaagaatggacaactttataaaatgcatggtggggaaacccntttaatgcttctggggttttcatgttcagaaacactttaaaaattactcacctgaaaggagaaagcccctattgaaatgtgaaaggtaaag

SEQ ID NO: 37215 - DNA, 781 bp, Macaca Mulatta
  misc_feature (1)...(781): n = A,T,C or G
ggcttttcaatgtatgtgttttgttaaggggcaaaaaatagtaaaaatgtttcattttttagtatggacacagattaagttaattggtattaattatccaattttatgaattaactatatcttttatctttcaatttggcagaagtaaaaagggagagaaaacaaaatttttgtaagctaaatactatgaatacgagaagctgagttttacttttttcatttagaagtgtcttgcttagnnnnnnnnnnnnnnnnnnntttctgttatgaaggggatccaatcatatttgccaacattagtttccaggctgtacagagaattatttgtgatgattttcatttaaatggattatattccattaattgacagacatttgttttactaaagttttaatagtaaagttgcttagataattatttaataaagtggtagtcaggagtttgtgtgccctaagacagaattaagaaaattacagttgattaaaagatgtataaaactgttagaaaaaggagaggagtgtttcaatgaggctactacaatgtgcacagagagtattttcagaaattacatattacttaggattttaagctgataataaagaatattatgcaaacgataaaatttatagaaaattttncaactagcatgtttaggcccagtgtgatgacccacannnnnnnnnnnnnnnnnnnnnnnnnctgaaatgggaagactgctncagcccaagcgtttccagaccagccctgggcagcatagggaagaccctgttctgtacaaaac

SEQ ID NO: 37216 - DNA, 656 bp, Macaca Mulatta
aacgccacataaagcagctcctaatgacatgggcaaagtacagcagatagcaactctttgctccgtatgacaacagtgaacacttaatgaaagaatgtggctttcttcagtcaaatcattttattatccacatgatagctaagtggataatttaaaagcttagtaatgtctggtcatcactgatttgtgatgtcataggatggcaccttggaaagaaaaatgaagaacaactttatcaaggaagctagtatttaaaaacaaattcatgagcaagctgcaaatgagaatgtgttatatgccaaggaacaatgaagtagaatataatgtatactaagggatttcaagtggcagaatttatgagtagttgcttacatgaagctcaagatacctgtagaaagaaatatggtatatttatatagttattaatagaaagatctacgtttataaaccagcacttggccaaaaacaaaattgtcaaggaaatttaaattctggagaattctacagggttgctctaagaactgtcttctcagcagttgatccagctgtacggaaatttagggtatttaaacttacaggatcatgagctggttcttgggcgatgactgttcttaatcagaaacctgacagtggaagtctcacttctggggaaaaca

SEQ ID NO: 37217 - DNA, 900 bp, Macaca Mulatta
  misc_feature (1)...(900): n = A,T,C or G
aaaggaaaattgcgcctgtcgggcgtgtgttcagaaatttgagtatggttatgcggggatccaccaagatcggggggaaggttaaattaaggtagtaacggggaggcagcgcaatgtgggtacggggacgcccggtatttgtcgcggggggagtggaagagttaatagacccatgtttccacattgtcacctgagaggggggcccctgatgagcggcggggaggaatgggcgatgaaaaaggttatatgaaggggggaagagggatgacatggagcagtgggagggggttcttgggggggtgcgcgttgtttttgagggggatttgaagggtaatgggagcgctaccattttggccaggatcaggggtatttttcgtgcgttaagctttttgagttaggttggaattgcaggcatttgttttgccacgcctgggtaattttttgtattttaaatggaaacgggtnnnnnnnnnnnnnnnnnnnnggttctcaaactctgggcttttggtgatccacccactnnnnnnnnnnnnnnnnnnnnnnnnnnnnnnngtgaggccccccacacctgaccatcnnnnnnnnnnnnnnnnnnnatcaattagatgatcatgtggtttgtttctcttgtttctcttctgttagtgtggtatattacattgattgatgtttatatgtagaaccatccttgtagtccaggaataaaccctagttggtcatattttatagtcttcttattttttaattatttannnnnnnnnnnnnnnnnnnnnnngnnnnnnnnnnnnnnnnnnntggtcttgttatgtttcccagactggtctcaaactcgtgatctcaaacagtctgcccgcccnnnnnnnnnnnnnnnnnnnnnnnnnnnngatgagccaccctgcc

SEQ ID NO: 37218 - DNA, 3891 bp, Macaca Mulatta
  misc_feature (1)...(3891): n = A,T,C or G
aggtccgtaacactgtgcaggaggacgaagcaacagcaaaagtcaaagctgaagaaacccaagcaatagctgatgatgctcaaagagatcttgacgaggcactacctgcactggatgctgccaacaaagcactggattccttagataaggcagatatatctgaaatcagagtttttacaaagcccccagatttggtcatgacagtaatggaagcaatctccattctcttgaatgccaagnnnnnnnnnnnnnnnnnnnnnnnnnnnnnnnnnnnnnnnnnnnnnnnnnnnnnnnnnnnnnnnnnnnnnnnnnnnnnnnnnnnnnnnnnnnnnnnnnnnnnnnnnnnnnnnnnnnnnnnnnnnnnnnnnnnnnnnnnnnnnnnnnnnnnnnnnnnnnnnnnnnnnnnnnnnnnnnnnnnnnnnnnnnnnnnnnnnnnnnnnnnnnnnnnnnnnnnnnnnnnnnnnnnnnnnnnnnnnnnnnnnnnnnnnnnnnnnnnnnnnnnnnnnnnnnnnnnnnnnnnnnnnnnnnnnnnnnnnnnnnnnnnnnnnnnnnnnnnnnnnnnnnnnnnnnnnnnnnnnnnnnnnnnnnnnnnnnnnnnnnnnnnnnnnnnnnnnnnnnnnnnnnttttatccaatgtatagaatgtattttcattagccttctaggatcaaataagaactcatgtgttttatatattcaacatcctgtacctgaacaagccttactggagcatgttacattaaaacacaaaacagtatgtgaatttgatccagaaactaaatactacaaggatacagaaaacactgtcttcannnnnnacgtctagtacgtgctggaaagctgacggcagcattggaagatgagcaggttcgatgggaagaaagcatacagaagtttgaggaagaannnnnnnnnnnnnnnnnnnnnnnnnnnnnnnnnnnnnnnnnnnnnnnnnnnnnnnnnnnnnnnnnnnnnnnnnnnnnnnnnnnncttatagagtgttggatccaggactgtcagtctctggagatcccaatcaatccttccttcagtctcattaacattcttggagatccctatgagatacggcagtggaacactgatgggctgccccgtgacttgatatcaacagaaaatggcattttggttactcaaggcagacgatggcctttgatgattgatccccaagatcagnnnnnnnnnnnnnnnnnnnnnnnnnnnnnnnnnnnnnnnnnnnnnnnnnnnnnnnnnnnnnnnnnnnnnnnnnnnnnnnnnnnnnnnnnnnnnnnnnnnnnnnnnnnnnnnnnnnnnnnnnnnnnnnnnnnnnnnnnnnnnnnnnnnnnnnnnnnnnnnnnnnnnnnnnnnnnnnnnnnnnnnnnnnnnnnnnnnnnnnnnnnnnnnnnnnnnnnnnnnnnnnnnnnnnnnnnnnnnnnnnnnnnnnnnnnnnnnnnnnnnnnnnnnnnnnnnnnnnnnnnnnnnnnnggtatgcattaaagttaccattatcaatttcactgtaacaaaatcaggtctggaggatcagttgttaagnnnnnnnnnnnnnnnnnnnnnnnnnnnnnnnnnnnnnnnnnnnnnnnnnnnnnnnnnnnnnnnnnnnnnnnnnnnnnnnnnnnnnnnnnnnnnnnnnnnnnnnnnnnnnnnnnnnnnnnnnnnnnnnnnnnnnnnnnnnnnnnnnnnnnnnnnnnnnnnnnnnnnnnnnnnnnnnnnnnnnnnnnnnnnnnnnnnnnnnnnnnnnnnnnnnnnnnngctggaagaagcagagtccactgagcagatgatcaatgtggctcgtgagaagtatcgcccagtggccactcaaggctctgtaatgtactttgtcattgcaagcctctcagaaatagatcctatgtaccagtattcattaaaatattttaaacannnnnnnnnnnnnnnnnnnnnnnnnnnnnnnnnnnnnnnnnnnnnnnnnnnnnnnnnnnnnnnnnnnnnnnnnnnnnnnnnnnnnnnnnnnnnnnnnnnnnnnnnnnnnnnnnnnnnnnnnnnnnnnnnnnnnnnnnnnnnnnnnnnnnnnnnnnnnnnnnnnnnnnnnnnnnnnnnnnnnnnnnnnnnnnnnnnnnnnnnnnnnnnnnnnnnnnnnnnnnnnnnnnnnnnnnnnnnnnnnnnnnnnnnnnggatcttttgagacttatattaacccacaggaatgggaaggctatcctaaaatgaaatacgaagagaaacacatgagacaggaaaaggaggccgcacacgaggatccgtggagtgcaggattgagttctttccataagctaattcttattaaatgttgtaaagaagaaaaggtnnnnnnnnnnnnnnnnnnnnnnnnnnnnnnnnnnnnnnnnnnnnnnnnnnnnnnnnnnnnnnnnnnnnnnnnnnnnnnnnnnnnnnnnnnnnnnnnnnnnnnnnnnnnnnnnnnnnnnnnnnnnnnnnnnnnnnnnnnnnnnnnnnnnnnnnnnnnnnnnnnnnnnnnnnnnnnnnnnnnnnnnnnnnnnnnnnnnnnnnnnnnnnnnnnnnnnnnnnnnnnnnnnnnnnnnnnnnnnnnnnnnnnnnnnnnnnnnnnnnnnnnnnnnnnnnnnnnnnnnnnnnnnnnnnnnnnnnnnnnnnnnnnnnnnnnnnnnnnnnnnnnnnnnnnnnnnnnnnnnnnnnnnnnnnnnnnnnnnnnnnnnnnnnnnnnnnnnnnnnnnnnnnnnnnnnnnnnnnnnnnnnnnnnnnnnnnnnnnnnnnnnnnnnnnnnnnnnnnnnnnnnnnnnnnnnnnnnnnnnnnnnnnnnnnnnnnnnnnnnnnnnnnnnnnnnnnnnnnnnnnnnnncgttttttgaagaaaatatacttggaaaaaaatggaggcaaataatatttggcatttgtttcttccatgcgattattcagnnnnnnnnnnnnnnnnnnnnnnnnnnnnnnnnnnnnnnnnnnnnnnnnnnnnnnnnnnnnnnnnnnnnnnnnnnnnnnnnnnnnnnnnnnnnnnnnnnnnnnnnnnnnnnnnnnnnnnnnnnnnnnnnnnnnnnnnnnnnnnnnnnnnnnnnnnnnnnnnnnnnnnnnnnnnnnnnnnnnnnnnnnnnnnnnnnnnnnnnnnnnnnnnnnnnnnnnnnnnnnnnnnnnnnnnnnnnnnnnnnnnnnnnnnnnnnncaggtatctattttgcacccatggctgacagcctacaagagggtaaggactacattgaaaatctgcctttgatcgatgacacagaaattttggaatgcatgaaaatgccaatctagtcttccannnnnnnnnnnnnnnnnnnnnnnnnnnnnnnnnnnnnnnnnnnnnnnnnnnnnnnnnnnnnnnnnnnnnnnnnnnnnnnnnnnnnnnnnnnnnnnnnnnnnnnnnnnnnnnnnnnnnnnnnnnnnnnnnnnnnnnnnnnnnnnnnnnnnnnnnnnnnnnnnnnnnnnnnnnnnnnnnnnnnnnnnnnnnnnnnnnnnnnnnnnnnnnnnnnnnnnnnnnnnnnnnnnnnnnnnnnnnnnnnnnnnnnnnnnnntcagacttctctggaaacactcaacaaagccatcgctggattcgtggtgatgtctgaagaaatggaaaaagtgtataacagtttcctcaacaaccaggttcccgctctgtggtccaacacagcctacccatccctgaagccactagggtcgtgggtcaaagaccttatcctgaggacctcatttgtggatnnnnnnnnnnnnnnnnnnnnnnnnnnnnnnnnnnnnnnnnnnnnnnnnnnnnnnnnnnnnnnnnnnnnnacaggaactcttcaaaatcatgctcgaaaatacaatttgcctatagatgagctaagtttcaaatacaacgt

SEQ ID NO: 37219 - DNA, 347 bp, Macaca Mulatta
gggttgcttggtagacaaaggaaccttttatttacaaagatactgtagaaagcatgtgaacagctctctgctttattaagatgccataatattgccgtatttgcagtgtgggttaagacaaactatcaagaagcttttccccccttcccgttccatagcgtagaagcccgcaggtgtagaactccctcttaaaaacttaagtaggaaacccagtttttcttgtgcaatggattggcccacaaaaaccaataataattttggaaggtccccccagaaaccgccctggaaaagccccccccgttctttccaaaagccatttccccggttttgaaaattccttaccccat

SEQ ID NO: 37220 - DNA, 644 bp, Macaca Mulatta
gtcacaaatatgatttcctgaatgcaatcctgaaagaggtgaatttccaaataggtgcttttgccaatggatatcaagtctaaattgcctgtaaaggagattgttagaaactaaaataatttccctctttaagtgaaatgagcttggacattggaatctgaaagccctgagtaggaatttttgctatgcccttcacaggctttccaatcttggagaaattatttaatctctctttgtatgtttcctcttctgtacagcaaagataatacctacttcaagggtttaatgtggaggttcaacagataacatttttaatgcctggcagttagtaagcatgataacattatatgtcaattatataccttttctttcctatttaaccaacacaattttttacagtttatttcttctgtttttagaaagaattctattttagtatggtacctcaagttaggacagaagtctccaaacaccgataaattcttattcttaagagtaaacttcaattatttcacaataaccaagatgtacaaataaccaaaatgtccattgacagatgaatagaagaagaaatgtagtatatacccatgatggcatactactccagcctttacaaaaccggaaatcctgcaatatgtgacaac

SEQ ID NO: 37221 - DNA, 648 bp, Macaca Mulatta
  misc_feature (1)...(648): n = A,T,C or G
gggnnnnnnnnnnnnnnnnnnnnnnnnnnnnnnnnnnnnnnnnnnnnnnnnnnnnnnnnnnnnnnnnnnnnnnnnnnnnnnnnnnnnnnnnnnnnnnnnnnnnnnnnnnnnnnnnnnnnnnnnnnnnnnnnnnnnnnnnnnnnnnnnnnnnnnnnnnnnnnnnnnnnnnnnnnnnnnnnnnnnnnnnnnnnnnnnnnnnnnnnnnnnnnnnnnnnnnnnnnnnnnnnnnnnnnnnnnnnnnnnnnnnnnnnnnnnnnnnnnnnnnnnnnnnnnnnnnnnnnnnnnnnnnnnnnnnnnnnnnnnnnnnnnnnnnnnnnnnnnnnnnnnnnnnnnnnnnnnnnnnnnnnnnnnnnnnnnnnnnnnnnnnnnnnnnnnnnnnnnnnnnnnnnnnnnnnnnnnnnnnnnnnnnnnnnnnnnnnnnnnnnnnnnnnnnnnnnnnnnnnnnnnnnnnnnnnnnnctaaatttctactacccgaaaacaactacgtggcccccccttttattatttttatcaaagaacctgatttcccctttggggggctttaacctgtttccttttttcagggcacaccgaaacaaacttggcaaaccccttttcatttattttggggggaattaacctttttccaaaattcttgggggtggaa

SEQ ID NO: 37222 - DNA, 541 bp, Macaca Mulatta
gcaatatatgtctgtttctgattaataaacttgattcctgtatctttgcagtgttgttataagtcagtaaattcactgttttagcttcacaagaacttaatactcgaaacaaaactgaccttgggcagataggtggtgagtcatgtaatgtgactttaggagtaaaagcctctctgtccccctacctaaaattaaccacaagcaatcacatcttttttgctgacaaatgattgtctcctctcttaacatgcatgtaagcctggaaagatcatctcgcttaaaaagtatgaaggaaattctacagcactcataagtgggaaatagaacatatatcaagcatcacagcttaaggtttatatatgcttgaactacacaaatgttttgagaatttcaaatgagtataggttttgttttcactctttaaagaacagttggataccaattggcttaaattacaaattcaaatacttaataatgttttccaatacagaacaagtgtgcagaatactggccgtcaatggaagagggcactcgggctttt

SEQ ID NO: 37223 - DNA, 656 bp, Macaca Mulatta
aaggagaccatagtgtacccttccaccgtcctcaggctgtcaatgggcatgaatggtatgaaacagatgattttgtcattgattgctgtactagtttggttgcaagtgattgttggtttttcaggatggcaggaatttcccatttaagaactattgacaagcaggaggggattatgccacgtggagcatcaccccagatacctccatccagctgtactggaaatggtttgtctctcacttcagatcgaacctagaagaaaaatatcagaaaaaaattgaagtaaaggtaaaatccctaatgcctgggccaaaatcacaaagtaggatatgcttgaagacttgaaaaaacaataatactcaatgaccacaaaagagccccagtgtctgaagaaaagaggcagtgtacctgaacaatccaaaaacaactactccttaaaattaaaaccttcaccatttccatttttaaaatgaagtgtgtaaaaagcaatcagttaacacattaagagatgaaaatttccagtaaaagaagttcatttctctctgcctcaattcctctagtttaaaaacaacttactaaaatctgttaatatatgatgaaatcaaataacattcattttagaaacttatttcgtattttaaactattagtctagatac

SEQ ID NO: 37224 - DNA, 675 bp, Macaca Mulatta
  misc_feature (1)...(675): n = A,T,C or G
acaagctgcatgtgcgatccgttacttcaggctcctgcggaaatgtgctggtgactgttttggcaatcnnnnnnnnnnnnnnnnnnnnnnnnnnnnnnnnnnnnnnnnnnnnnnnnnnnnnnnnnnnnnnnnnnnnnnnnnnnnnnnnnnnnnnnnnnnnnnnccccctgcccacgatgcagagctttcaaggataggctttattctgcaagcaataaaaacaataaatctattctgctaagcgatnnnnnnnnnnnnnnnnnnnnnnnnnnnnnnnnnnnnnnnnnnnnnnnnnnnnnnnnnnnnnnnnnnnnnnnnnnnnnnnnnnnnnnnnnnnnnnnnnnnnnnnnnnnnnnnnnnnnnnnnnnnnnnnnnnnnnnnnnnnnnnnnnnnnnnnnnnnnnnnnnnnnnnnnnnnnnnnnnnnnnnnnnnnnnnnnnnnnnnnnnnnnnnnnnnnnnnnnnnnnnnnnnnnnnnnnnnnnnnnnnnnnnnnnnnnnnnnnnnnnnnnnnnnnnnnnnnnnnnnnnnnnnnnnnnnnnnnnnnnnnnnnnnnnnnnnnnnnnnnnnnnnnnnnnnnnnnnnnnnnnnnnnnnnnnnnnnnnnnnnnnnnnnnnnnnnnnnnnnnnnnnnnnnnnnnnnnnnnnnnnnnnnnnnnnnnnnnnnnnnnnnnnnnnn

SEQ ID NO: 37225 - DNA, 807 bp, Macaca Mulatta
  misc_feature (1)...(807): n = A,T,C or G
tttctgcacaagggggggaacacaaagggtggtttgaaattcccccgcccgggggatattcaagggtttccattcactggccgctttttggaagggggtttcccaatttgggccggaaagggttaaatggaatttccaaccctttttccgaatagtgggccagggcgggggggaaatttgatttttggggtccggcntggactccctttgaaagatcccggaaaggccttagaactccatttggaattttttagaaagctcggtttccccccggggtttttttttggtgaggattccagcccttgttctggcccgggttttcttgggaacaggtatggccctgttccctttcctaatgggcccccgggcccaaagaatggtttagaaaggtttttggggggcgggggggccgnnnnnnnnnnnnnnnnnnnnnnnnnnnnnnnnnnnnnnnnnnnnnnnnnnnnnnnnnnnnnnnnnnnnnnnnnnnnnnnnnttcaaatagtttatttataatctttccaatacagcactgaccgcttagataaaaatcttaagttatttatttctatgttttaaacataaatatgtttacttgtgacttagctttgaagcaaatttagctaagttatcaacttagccaaatgtactctagtagactagaaccattctttgtgaaatgtcaaaatatgactgtggtttcaggaactttaaaatcggttttattttactttaaatagagatgtagcagtatctcatctgctaatatttataatgatgacttactctttttttgtttgaattgtaccc

SEQ ID NO: 37226 - DNA, 2481 bp, Macaca Mulatta
  misc_feature (1)...(2481): n = A,T,C or G
ggaggagctccggaagctgcgagaagaaaccaatgcggagatgctgcggcaggagctggaccgggagcggcagcggcggatggagctggagcagaatgtgcannnnnnnnnnnnnnnnnnnnnnnnnnnnnnnnnnnnnnnnnnnnnnnnnnnnnnnnnnnnnnnnnnnnnnnnnnnnnnnnnnnnnnnnnnnnnnnnnnnnnnnnnnnnnnnnnnnnnnnnnnnnnnnnnnnnnnnnnnnnnnnnnnnnnnnnnnnnnnnnnnnnnnnnnnnnnnnnnnnnnnnnnnnnnnnnnnnnnnnnnnnnnnnnnnnnnnnnnnnnnnnnnnnnnnnnnnnnnnnnnnnnnnnnnnnnnnnnnnnnnnnnnnnnnnnnnnnnnnnnnnnnnnnnnnnnnnnnnnnnnnnnnnnnnnnnnnnnnnnnnnnnnnnnnnnnnnnnnnnnnnnnnnnnnnnnnnnnnnnnnnnnnnnnnnnnnnnnnnnnnnnnnnnnnnnnnnnnnnnnnnnnnnnnnnnnnnnnnnnnnnnnnnnnnnnnnnnnnnnnnnnnnnnnnnnnnnnnnnnnnnnnnnnnnnnnnnnnnnnnnnnnnnnnnnnnnnnnnnnnnnnnnnnnnnnnnnnnnnnnnnnnnnnnnnnnnnnnnnnnnnnnnnnnnnnnnnnnnnnnnnnnnnnnnnnnnnnnnnnnnnnnnnnnnnnnnnnnnnnnnnnnnnnnnnnnnnnnnnnnnnnnnnnnnnnnnnnnnnnnnnnnnnnnnnnnnnnnnnnnnnnnnnnnnnnnnnnnnnnnnnnnnnnnnnnnnnnnnnnnnnnnnnnnnnnnnnnnnnnnnnnnnnnnnnnnnnnnnnnnnnnnnnnnnnnnnnnnnnnnnnnnnnnnnnnnnnnnnnnnnnnnnnnnnnnnnnnnnnnnnnnnnnnnnnnnnnnnnnnnnnnnnnnnnnnnnnnnnnnnnnnnnnnnnnnnnnnnnnnnnnnnnnnnnnnnnnnnnnnnnnnnnnnnnnnnnnnnnnnnnnnnnnnnnnnnnnnnnnnnnnnnnnnnnnnnnnnnnnnnnnnnnnnnnnnnnnnnnnnnnnnnnnnnnnnnnnnnnnnnnnnnnnnnnnnnnnnnnnnnnnnnnnnnnnnnnnnnnnnnnnnnnnnnnnnnnnnnnnnnnnnnnnnnnnnnnnnnnnnnnnnnnnnnnnnnnnnnnnnnnnnnnnnnnnnnnnnnnnnnnnnnnnnnnnnnnnnnnnnnnnnnnnnnnnnnnnnnnnnnnnnnnnnnnnnnnnnnnnnnnnnnnnnnnnnnnnnnnnnnnnnnnnnnnnnnnnnnnnnnnnnnnnnnnnnnnnnnnnnnnnnnnnnnnnnnnnnnnnnnnnnnnnnnnnnnnnnnnnnnnnnnnnnnnnnnnnnnnnnnnnnnnnnnnnnnnnnnnnnnnnnnnnnnnnnnnnnnnnnnnnnnnnnnnnnnnnnnnnnnnnnnnnnnnnnnnnnnnnnnnnnnnnnnnnnnnnnnnnnnnnnnnnnnnnnnnnnnnnnnnnnnnnnnnnnnnnnnnnnnnnnnnnnnnnnnnnnnnnnnnnnnnnnnnnnnnnnnnnnnnnnnnnnnnnnnnnnnnnnnnnnnnnnnnnnnnnnnnnnnnnnnnnnnnnnnnnnnnnnnnnnnnnnnnnnnnnnnnnnnnnnnnnnnnnnnnnnnnnnnnnnnnnnnnnnnnnnnnnnnnnnnnnnnnnnnnnnnnnnnnnnnnnnnnnnnnnnnnnnnnnnnnnnnnnnnnnnnnnnnnnnnnnnnnnnnnnnnnnnnnnnnnnnnnnnnnnnnnnnnnnnnnnnnnnnnnnnnnnnnnnnnnnnnnnnnnnnnnnnnnnnnnnnnnnnnnnnnnnnnnnnnnnnnnnnnnnnnnnnnnnnnnnnnnnnnnnnnnnnnnnnnnnnnnnnnnnnnnnnnnnnnnnnnnnnnnnnnnnnnnnnnnnnnnnnnnnnnnnnnnnnnnnnnnnnnnnnnnnnnnnnnnnnnnnnnnnnnnnnnnnnnnnnnnnnnnnnnnnnnnnnnnnnnnnnnnnnnnnnnnnnnnnnnnnnnnnnnnnnnnnnnnnnnnnnnnnnnnnnnnnnnnnnnnnnnnnnnnnnnnnnnnnnnnnnnnnnnnnnnnnnnnnnnnnnnnnnnnnnnnnnnnnnnnnnnnnnnnnnnnnnnnnnnnnnnnncagcaccgcgtctgtaaggacccgcccgccgctctcagcctgacacgccagccaggaggtctgtagtcggtgaccagtaagggcacgggatggtgcaggtaaaagcacatctttctcacaccttgctctttggaaggcccaggagaacatctgtgaaggccgttggaggtgctctgagcaccgtggcatgtctggcacgtggtctccaggctgcagttgcccgggttggttggggaagggagtgggcaggagtgttccgggtccatggtggcccaggctgcagccgcctttgggccatgccagaagctctctggcagcccctgtg

SEQ ID NO: 37227 - DNA, 258 bp, Macaca Mulatta
cctaagcacagctatatattttgttaattaatggagtctgatagatgcaaattattgcatgtaagaaatttagtgaaatatttattgaaacaatatttaggtaactgagttgataaaatatgttattttttagactcttagcctctgaaagggcccaaagaattcatataccagcctctcatctgatataggaattgctcctgcattagtaatagatcatccagtttctgtatgaatatattccatgatgaaagagtt

SEQ ID NO: 37228 - DNA, 453 bp, Macaca Mulatta
tcttctctccacttttaatatcggaaatctcttttctatactctccttgaggattatactattttgcaacacttaaattggctcattgcatgcgagttagcacctaagaaatgccttttgtttactgaactctgtattaggcccaagagatgagtaagatgaggctccgtgccttccattcttttcttggtaggctaaatgagtttttctgagcaagagtgtttctggctggaacaaggggcaggtgatggtataaaggttgaggaacattttctctttagttacatgagcagacttattaaagataaaaggtagataccttgttgccaatgctaacataatcttccagcccttcaggaggttggttggtcaggaagatcataaaccctccttttcatatacatgtatgtacataagagaagccctcatgcaagaattttctgtgctctgctg

SEQ ID NO: 37229 - DNA, 346 bp, Macaca Mulatta
agcctgccactgcccacagagctgcagaagagagagagctgtctgtggggccaggggagatgacaccaggagactacaggatgccagcagggactgagacagtgtgagaagcaggacttggttgggggtggtgtaggcctggggagcaggtgggaggatgagcagcgggggagggtcccgctggcagcagcctcacggcatctgactctagcctgtatgggttactggcttcatttattgcaagtctctgtcctttcatgactcccagagctattatggctctgcccaacaagttcctgttgactcccagtggattggtccagccttcttcttggcaccaagtcca

SEQ ID NO: 37230 - DNA, 758 bp, Macaca Mulatta
  misc_feature (1)...(758): n = A,T,C or G
ttggatttcaaatttataaattcacttgctctatgggtagctatcaggaactagatcattttcccacctttgcttgtcgtatttcttaattttaggttttatacctgggaaagctgtgactctgttagagctttgaatcttttcctatccttttatctttactcctacagggaatggcctcagctcccttctcttttagaattaaacaagtaaaaactaagagttaactttttaaaaaaactgactccaggcaaaggactaccaatagcnnnnnnnnnnnnnnnnnnatgggacctaaaatgcttacaggtattagcaatacatgtcagatagcaaagacttttcctttcagacccaactaaatgatctcctctctgcttttgatactcttctccttctttctctttcatccctgcctgtcacctcacagatggattctttctcatttctcttgcctcacttgcccaggtttattgactagcatcagtttaaggagctggacttcctgggacctccttggcatcttgtagggtgattggagtggcctgagtactcagctcttcagaggtcaggtgacccactttctttggttaatgaaatgttactgtctccaggttagtagctgtcatgaacaggaaaggtggcaaaatggaagaccagttccattgttcttttcgtttaggggattcattttttatcttgtaatcttaagatttcctctcccctcaactttatagcagccttaggccacctgcccc

SEQ ID NO: 37231 - DNA, 600 bp, Macaca Mulatta
ttaaaactacatatttctttcttagatttaacaaaatcaaaccatgagattctcttttgtgtaacttatctcaggatgtaaagcttttggatggtcctataactccatagctttatctcttgaaatgcaatgctttactagaaatgtaaatcttactggtctatagtgaacagaggataaggtaaaaaatgtccatttcactttttcaggccttacttggcattaaatttgtatagttaagctatgaatttgaccaaataagtttgttccacaattttctgatgcagtatcataaatatgatgccttgttatatttagcttgtttcattttcataaggacaacaggaggcattagtaaacacctatagaccttttagtttaatgtctaataaaactaaaaccacatgatgttaggattagagagttaatctcatctagccccatgagtcatatttttaaaactgcttctttaatgctagaaatatctctgttgcttgtagagtttatatgttacagggccaggaatcaaaacctatcaattttgcctctactggttttgcctgtagtacctgtaactgtagagatatgcttttactccaa

SEQ ID NO: 37232 - DNA, 662 bp, Macaca Mulatta
  misc_feature (1)...(662): n = A,T,C or G
ccctctgctcagtcctgcatctgcccactgccctcctactgtccaccatggccctgctgcactccgtccgcgtcctctccgggatcgcccgccaccttccacctgggccttgctgccacggcctcagccagagacagttcctgatggacccatgtagaaatgggacctccagatatctttctgggagtcattgaagcctttaagagggacagcaatagcaaaaagatgaatctgggagttgatgcctaccgggatgataacagaaaaccttatgtgctgcctagcgtccgcaaggcaaaggtccagattaccacaaaaaggttggacagggaatccttgcccattgggggcctggctgaattttgcaaggcatctgctgaactagccctcgtgagaacagcgaagtcttgaaaagtggccggtttgtcnnnnnnnnnnnnnnnctggaactggagccttaaggattggagccagttttctgcaaagattttttaaggtcatctgagaggtctttctgcccaaaccaagctggggaaatcacacatccgtcttcagggacactggcatgcagctacaaggttattagttttatgaccccaagaataggagttttgacttcacaggtgctgtgaaggacctctcaaaaagaccagagcaaaatg

SEQ ID NO: 37233 - DNA, 447 bp, Macaca Mulatta
ttcgctcagctgcattcctctcttcctcccacagatcaaggaactagagacagagctggacggggaacagaaacagcacgcggagacagtcaagacgctgcgtaagaacgagcgtcgcctcaaagagctgatcttccagacagaggaggacaacaagaccaaccagcgcatgcaggagctggtggagaagctacagaacaagctgaagatctacaagaggcagatcgaggaggcggtgggtgcctatgcgcctccctgctcctccttccctgacgcttgttttctcagtgcaggtccccagcctttctgggaattaaccacagggaaagaagcaagcgtaggccctaagatgattctgtgaggctcatgtccatggcgtctcctccttggaatccagtgggaggggcaaccagacactacataccagagataagaacttgtaaagag

SEQ ID NO: 37234 - DNA, 512 bp, Macaca Mulatta
tgtcatgacaaggaaagaaatggagagaggaaagagtaaatatgtcaaatattggcctgatgagtatgctctcaaagcatatggcgtcatgcgtggtaggaacgtcaaagaaagcaccactcatgactataagctaagagaacttgaactttcaaaggttggacaagggactatggagagaatggtctggcaataccactcttggagctggctgggccacggagtgcccagcgaccccaggggcatgctggacttcctggaggaggtgcaccataagcaggggagcatcatggatgcagggccgtttgtggtgcactgcagtgctggcattggccggacagggaccttcattgtgactgatatttttattgacatcatcagagagaaaggtgttgactgcaacattgatgttcccaaaaccatccacgtggtgtagtctcagaggtcaggaatggtccagacagaagcacagtaccgatttatctatatggcagtccagtattatattgaaa

SEQ ID NO: 37235 - DNA, 789 bp, Macaca Mulatta
  misc_feature (1)...(789): n = A,T,C or G
ggnnnnnnnnnnnnnnnnnnnnnnnnnnnnnnnnnnnnnnnnnnnnnnnnnnnnnnnnnnnnnnnnnnnnnnnnnnnnnnnnnnnnnnnnnnnnnnnnnnnnnnnnnnnnnnnnnnnnnnnnnnnnnnnnnnnnnnnnnnnnnnnnnnnnnnnnnnnnnnnnnnnnnnnnnnnnnnnnnnnnnnnnnnnnnnnnnnnnnnnnnnnnnnnnnnnnnnnnnnnnnnnnnnnnnnnnnnnnnnnnnnnnnnnnnnnnnnnnnnnnnnnnnnnnnnnnnnnnnnnnnnnnnnnnnnnnnnnnnnnnnnnnnnnnnnnnnnnnnnnnnnnnnnnnnnnnnnnnnnnnnnnnnnnnnnnnnnnnnnnnnnnnnnnnnnnnnnnnnnnnnnnnnnnnnnnnnnnnnnnnnnnnnnnnnnnnnnnnnnnnnnnnnnnnnnnnnnnnnnnnnnnnnnnnnnnnnnnnnnnnnnnnnnnnnnnnnnnnnnnnnnnnnnnnnnnnnnnnnnnnnnnnnnnnnnnnnnnnnnnnnnnnnnnnnnnnnnnnnnnnnnnnnnnnnnnnnnnnnnnnnnnnnnnnnnnnnnnnnnnnnnnnnnnnnnnnnnnnnnnnnnnnnncgtccattgggtgagatccttnnnaaananntaaggcgtggagagggaaaaaagggaagtcacttagtaggtgcacacaccgttttgctagggcggattaattaaaatacggtttcatacgcaaggggaaaaaacattacctgtacattattaatgtatgcattggggggcccctcccccc

SEQ ID NO: 37236 - DNA, 112 bp, Macaca Mulatta
tatttcttgttgctcacatctcctgaggcccaggaccctggaggggaagaagaggcggagagctcagcccggcagcccctcataagaaccgaggccccggagtcgaagccag

SEQ ID NO: 37237 - DNA, 553 bp, Macaca Mulatta
gcagaggacacagactcatcgaacattgcttgtaggactgcaaaatggtgcaatcctctgaaagtgactcagaatctagttaattttcataagcattttttgactcttcagttccccttttaggaatgtatatcaaaagatacagtggaaacaatacaaaattccattaaatagtgcttcttattgtggcactatctttaatagcaaacattggaaataacccaaatgtccatcactagaggacttgaagaaaaaaatagtatatccagagtatgtagtagtatgcagcaatgaaaaggatgcaaatatttctacatcaaatggcacattaatctacaggatatactgtaatatgagatacatgacttatatgctactatttaagaaatgagaggaatatacctattttcgactttagaacaatgtaaacatttcatgtaattttgaaacaaagttcatgttgagcagaagaaatttcaagatagctatatctccttagtgggttgtactttaatgacaaaaaggattgcaaaaaaatcagatttttaaaaag

SEQ ID NO: 37238 - DNA, 804 bp, Macaca Mulatta
  misc_feature (1)...(804): n = A,T,C or G
gttaagtcccctggggctggattccgccttccggcttttcccannnnnnnnnnnnnnnnnnnnnnnnnnnnnnnnnnnnnnnnnnnnnnnnnnnnnnnnnnnnnnnnnnnnnnnnnnnnnnnnnnnnnnnnnnnnnnnnnnnnnnnnnnnnnnnnnnnnaggtgccgagagtgaaaacgaagaggagagctatcggcaggaaagttctggggaggagatcatcatgggagacccgggtcagagtccagaatccaaggactccatagagatgtccctggagagaccctcccaggacccctctgtcacccagaaccccccaaccccactggctcactccaaccccttggaccaccagnnnnnnnnnnnnnnnnnnnnnnggaggttgtccctaccccatctgactggaccaaggcctgcgaggccagctggcagtggggcgctctcaccacatggaacagccccccggtcgtccccaccaaagagcctagcctgcgggagctggtgcagggccgcccggcgggggcggaaaagccctacatctgcaacgagtgcggtaagagcttcagtcagtggtccaagctgctgcggcaccagcgcatccacacgggagagcggcccaacacctgctcggagtgcgggaagagcttcacgcagagctcgcacttggtgcagcaccagcgcacgcacaccggcgagaaaccctacaagtgccccgactgcggcaagtgcttcagctggagctccaacctggtgcagcaccagcgcattaaaggggagagaagccctacaagtgcacggagtgcg

SEQ ID NO: 37239 - DNA, 643 bp, Macaca Mulatta
  misc_feature (1)...(643): n = A,T,C or G
ttcgcaaatatgatagtatggtggagaacctaagagcactcaattatacagtgctatttaattataattacccatcttgatgctctaatatgtaatgtttaattgctttatttataaagaagagctccttatgtaatctaatattaaatagtccatttacagtaaaaaaagtagaagttataaaaagaaaactaaaatattaaaaggcataaaatgagtcttaaatgaaaaaacaaccttcttggatagaaggcttcactgttacaaaatgcnnnnnnnnnnnnnnnnnnnnnnnnnnnnnnnnnnnnnttgcctaggctggagttcagttgtggaatctcagttcactgcagtctccacctcccaggttcaagtgcttcttctgcctcatcctcctgagtagctggtattacaggccagaaccaccttgtccagctaaacctttttttctttgtacactaagtataaagaataatagcgataaaacattttaaattacataagccgattctaagtttaagaaattaacatagaagaataggcaggacagttctttaaagaaaacaatgaaaacagactaaccacaataaatattaaaatatattacaaagttcaaagatttagaatcgtttcacatagttat

SEQ ID NO: 37240 - DNA, 1161 bp, Macaca Mulatta
  misc_feature (1)...(1161): n = A,T,C or G
ggacttgagcttttcttactactgccccaatttctgagttgtgcataaatacaatcactctcaatttttgaagggctaattatctactttgcgggtgtgttttgttttttcttttcaatgtgtaggccttgggctctgtttccttttattagcatgtcacntncttgnaangngttggggnaacaaaaacaaatttggaaaattaagaattggattggttttttatttttcttaataaaaggtaatttaaatttttcctttnnnnnnnnnnnnnnnnnngaaaaatccnnnnnnnnnnnnnnnnnnnnnnggtggcccacaaacactttaattatagcgtggttcttccaaaaaaaatcgcctgtacattttacgttgcgatataccctatctcagagtacatagtaagaacaaaataatataaatattataaattttttattaatgaatactatttatatcattaaacgaatatcatcaacgcaatataattcgattgtaagtggaatataatataatgacgagttatttaagcttacagtctcacgaatttgatataactcagcattatgtatcgacaatatttttttttgacctacgatactataacagtatcattagtattattatcaattggatctacaatcagaattatagaatcaaccagaagacgagagtatgtgattctgattgtatgtaatcgacagcacttcccacctacataacagacaatataacatgatgagggtggtgaatgaggcgcgcgacanttcatcacatactatcatctacatgatacgaattctacatagtaacaatcgcttactgtattctgctgcgttaatanatattacctaggacgncaactcntataaacgataatgtacttatcgatctatctttcctatgaaaccacatntatcgaagattactattcaancttatgtacatggtagcttattatgtatacnccgtccagatatagcatagccgaatacccaacacgatcatcctatactagtaatgatatatctncatcactattattaagagaccgtagtattacatttgagagaagagtatacacacctcnnnccaatagtataggaggaaacactcncacnctactctntntncntcttccatcaatagtagagtaag

SEQ ID NO: 37241 - DNA, 2249 bp, Macaca Mulatta
  misc_feature (1)...(2249): n = A,T,C or G
aatgtttggagtctggtttccaggttagtgttttggggggctttgggtgtggcggttgtcagaactgaaatcggctgcaccatgtcggccttcgagaagcctcagatcatcgcccatatccagaagggcttcaactacacggtgtttgactgtaaatgggtgccctgcagcgccaaatttgtgaccatgggcaacttcgcacggggcaccggcgtcattcagctgtacgagatccagcacggggacctgaagctgcttcnnnnnnnnnnnnnnnnnnnnnnnnnnnnnnnnnnnnnnnnnnnnnnnnnnnnnnnnnnnnnnnnnnnnnnnnnnnnnnnnnnnnnnnnnnnnnnnnnnnnnnnngaatttagaagctccagagatgccagtatattctgtaaagggccataaagaaattataaatgccatagatggcgtaggtggactaggaattggagaaggagcacctgaaattgtgactggcagccgagatggnggaactgtgaaggtgtgggacccaaggcaaaaagatgatcctgttgctaatatggaacctgtacaaggagaaaacaagagagactgttggactgtggcatttggnnnnnnnnnnnnnnnnnnnnnnnnnnnnnnnnnnnnnnnnnnnnnnnnnnnnnnnnnnnnnnnnnnnnnnnnnnnnnnnnnnnnnnnnnnnnnnnnnnnnnnnnnnnnnnnnnnnnnnntgtagcttggagtttgacagaaaagacataagtatgaataagttagtagccacatctctggaaggaaagttccatgtttttgacatgagaacacagcatccaaccaaaggttttgcctctgtttcagaaaagnnaggctcataaatctactgtgtggcaggtccgacacctgccgcagaacagggagctcttcctgacagctggaggcgccggcggccttcacctctggaagtnnnnnnnnnnnnnnnnnnnnnnnnnnnnnnnnnnnnnnnnnnnnnnnnnnnnnnnnnnnnnnnnnnnnnnnnnnnnnnnnnnnnnnnnnnnnnnnnnnnnnnnnnnnnnnnnnnnnnnnnnnnnnnnnnnnnnnnnnnnnnnnnnnnnnnnnnnnnnnnnnnnnnnnnnnnnnnnnnnnnnnnnnnnnnnnnnnnnnnnnnnnnnnnnnnnnnnnnnnnnnnnnnnnnnnnnnnnnnnnnnnnnnnnnnnnnnnnnnnnnnnnnnnnnnnnnnnnnnnnnnnnnnnnnnnnnnnnnnnnnnnnnnnnnnnnnnnnnnnnnnnnnnnnnnnnnnnnnnnnnnnnnnnnnnnnnnnnnnnnnnnnnnnnnnnnnnnnnnnnnnnnnnnnnnnnnnnnnnnnnnnnnnnnnnnnnnnnnnnnnnnnnnnnnnnnnnnnnnnnnnnnnnnnnnnnnnnnnnnnnnnnnnnnnnnnnnnnnnnnnnnnnnnnnnnnnnnnnnnnnnnnnnnnnnnnnnnnnnnnnnnnnnnnnnnnnnnnnnnnnnnnnnnnnnnnnnnnnnnnnnctcacagaatttaagataggttctggaatcctctgaccctcattgaacaaagctggatttggctgatgacaaaagcccccagacacaagcccctgggccagcctccagcctctcctggggcgtgtttgccgacttgcttgctgctgcgcgtggatatcagaagcaccgagtaaactgtctccagggccagtgcttttcttctcccttccatttctaagtcaatagttgtctataattaaacatatttcagatttgttctgtgtccgtgaagttccatattttatctttatgcttgtgttatgttttagtgtctatagtgttgtggtgggaatcatttcctttggtttaaaagagtttgccttggaaaaacggaattaaccttcagaaatacattttgagagatttcagtgtcagtttctggacataatattattgtataaaatatcaaaatggtgggccaggcatggtagctcacgcctgtaattccagcactttgggaggcttaggcgggcgaatcacgaggtcaggagatcaagaccagcctggccaacatggtgaaaccctgtctctactaaaaatacaaaaaattagctgggcatggtggcgtgtgcctgtagtcccagctacttgggaggctgaggcaggagaatcgcttgaacctgggaggcggaggttacagtgagctgatatcacgcccttgcactctagcctgggtgacagagtaagactccatctc

SEQ ID NO: 37242 - DNA, 1821 bp, Macaca Mulatta
  misc_feature (1)...(1821): n = A,T,C or G
tgcagatcaccatgacctcttaacagaaaccaaaaggccaatagatacagccatctctcagcaagctttttatagtggtgaatctatgtcagcaatggaaaagcaatacctgcataacagtaatctcacaccacaacaaaaaatagatgaactttatcatggatttactggtttagaccttgaagaacaatggatgtacccctcacgaagtgatcattctaactgtcacaatatgcagacaaatgatacagctaagacaacattccaagaatatccatttatcaaaaactgttttacaccacaaactggtctgtctgacatcatgaaagaatcaggagttgatatttacccttatggaagggacagaatatgtactaaaggtcttgaagcaccattacagcaaaaaagggcagagatgtttctttctcaatttaatagatacaatgaaaatgtagattattgtagatacccagaatatgttcatcctaataaggctaagcttaataaatgttcaaattttagtgtccaagatagcaaaaaattagccaatggcacacctgaaacaccaactgtagaagcagatacctacacaaagctatttcaggttaaaccagcaaatcagaaaaaaatggaggagacaatccctgaccagcagaatttcacatttccaaaaactactccacatctgacagagaaacagtttgcaaaggaagcagcattcactgctgattttggcttaacctcagaatatggactaaaacctcacacagcttgtcccgctaatgattttgctaacgtcacagaaaagcaacagtttgctaaacctgatcccccaaattctgagtattttaaatcagtgaatttattatcaaactcagcaacatcttcaggaggtatcaatttaaacagaccaacttggatgaatgttcaaacaaaaaataacactcctattccttatcgaaatcaaggtaacttgatgaaattaaatagtcatttaagtgcagcttcaaaaggttctaaccattcttcagatttcccccaactatcatccacaaacttaaccccaaatagcaatttatttcagaagtattgccaagaaaacccttcagcattttctagttttgattttagttacaatggtgcagaaagaatccaatctgtcaatcacatagaaggactaacaaagcctggagaagaaaatctctttgaattggttacagataaaaaaataaagcagccaaatggattttgtgataactattcagctcagcagtatgggataattgaaaatgtaaacaaacataattttcaagccaagccccannnnnnnncaagccccagagtggacattatgatcctgaggaaggttcaaagcatttagatggcttatcacaaaatacataccaaaatctactggagtcacagggtcattctaatagccacagaacgagaggtggagacagtattaatagccgtgtgaatcgcacacaagcgtcatgcttttctaataattatatgatgggagacttaaggcataatcagggttttcaacaacttggttcaaatgggtttcccctaagatccacccacccatttggccattcagttgttccactgttggattcctatgacttattttcttatgatgacttaagccatttgtacccttattttaatgatatgatgtatggtgataattctttttctggtctcgtgccaacttttggatttcaaagaccaattaaaacccgtagtggaccagccagtgaacttcatattcgtctagaagagtgctatgaacaatggagagcgttagaaaaa

SEQ ID NO: 37243 - DNA, 542 bp, Macaca Mulatta
ggaggcgcctccactggtcgaaggctgctatctcgaccattttccgcacctctccatcttcatctacgcagccatcgccttctccatcacctcctgcatctttacctatatccatttacagcttgcctgagtggccagcgcgggacggggtgggcgcaggaccgagcggggagggaaagggaaaacagggctcggcattttgtgttgtggaacacacccccttcatgtagctttcgatgcttctttccttctttgttgtcactatctttgtctatcagtaggaaagtacaaagtacctgcaggcaatgaaagaagggtgctgtttgcacctgcaggttaggggtgggggcgtttagaattctggggtgtgattgaaccccgtttataactaggagaatgtcgctggacccctaccactctgtgacgcgggggcacgcgcagggagcccatcattttgtgtttggggagctcagagtgcgcccaaccttggattctttaagggatgagccagacccagacccgcggccttctagagagggtcc

SEQ ID NO: 37244 - DNA, 4063 bp, Macaca Mulatta
  misc_feature (1)...(4063): n = A,T,C or G
caccacaggccagtctgtcctggtgttgtatgttaaaagtggagccacaaagaagccatcttacgtgggacgggcttgggtgtgaggccagagctgtgggtagcagcactttgggtcagaagtgaggagcagaggaaacactttccacctcttggatatgaattttatctgaccctgattcaggggatccccatctgttaagtaaggggaaagatgattttgttgtcttttgtttcagattctaatgtaggaactggtgagaagaaggtggttgaagctggatttctgaggatganaactcacataggataatgtcagataaactcacagtgatgcagctcccttctcccgagtctgaggaagtccatgagcccagattaggggagcttttgggaannnnnnnnnnnnnnnnnnnnnnnnnnnnnnnnnnnnnnnnnnnnnnnnnnnnnnnnnnnnnnnnnnnnnnnnnnnnnnnnnnnnnnnnnnnnnnnnnnnnnnnnnnnnnnnnnnnnnnnnnnnnnnnnnnnnnnnnnnnnnnnnnnnnnnnnnnnnnnnnnnnnnnnnnnnnnnnnnnnnnnnnnnnnnnnnnnnnnnnnnnnnnnnnnnnnnnnnnnnnnnnnnnnnnnnnnnnnnnnnnnnnnnnnnnnnnnnnnnnnnnnnnnnnnnnnnnnnnnnnnnnnnnnnnnnnnnnnnnnnnnnnnnnnnnnnnnnnnnnnnnnnnnnnnnnnnnnnnnnnnnnnnnnnnnnnnnnnnnnnnnnnnnnnnnnnnnnnnnnnnnnnnnnnnnnnnnnnnnnnnnnnnnnnnnnnnnnnnnnnnnnnnnnnnnnnnnnnnnnnnnnnnnnnnnnnnnnnnnnnnnnnnnnnnnnnnnnnnnnnnnnnnnnnnnnnnnnnnnnnnnnnnnnnnnnnnnnnnnnnnnnnnnnnnnnnnnnnnnnnnnnnnnnnnnnnnnnnnnnnnnnnnnnnnnnnnnnnnnnnnnnnnnnnnnnnnnnnnnnnnnnnnnnnnnnnnnnnnnnnnnnnnnnnnnnnnnnnnnnnnnnnnnnnnnnnnnnnnnnnnnnnnnnnnnnnnnnnnnnnnnnnnnnnnnnnnnnnnnnnnnnnnnnnnnnnnnnnnnnnnnnnnnnnnnnnnnnnnnnnnnnnnnnnnnnnnnnnnnnnnnnnnnnnnnnnnnnnnnnnnnnnnnnnnnnnnnnnnnnnnnnnnnnnnnnnnnnnnnnnnnnnnnnnnnnnnnnnnnnnnnnnnnnnnnnnnnnnnnnnnnnnnnnnnnnnnnnnnnnnnnnnnnnnnnnnnnnnnnnnnnnnnnnnnnnnnnnnnnnnnnnnnnnnnnnnnnnnnnnatgaatgtaacgagtgtgggaaagctttctttctgagttcataccttattcgacaccagaagatccacactggagagagagtgtatgaatgtaaggaatgcgggaaagcgtttctccagaaagcccatctcactgagcaccagaagatccactctggggacaggcccttcgaatgtaaagactgtgggaaagccttcatccagagctccaagctgcttctgcaccagatcattcacactggagaaaagccctatgcctgcagttactgtgggaaaggctttattcagaggtcaaacttccttcagcaccagaagattcatactgaagagaagctctatgaatgtagtcagtatgggagagattttaactcaactacaaactttaaaaataatcaaagtgttcaccaagagggactctccttgagtaaggcccccatacatttgggcgagaggtctgtcgatcaggggcaacacatagataacttataaaataattattctcccgcccaatgagtgatgtttggaaatgcgtggaattaggattcatgtggtttctaagatttggacatgtcagaattttgtgaatcatggatggagctgcttttggagtggatgccacctgccactgtgcagcactagcaggctcacccttctcctcagctgtgagcactgtcctcgggagagtcacagggcttgacacctgactctgagctggaacagtaggggcagggaggagacaggtctcaagaaaaggttttttaaaaattttatccacagtaacagtccatccttgagttaaatcccttttagagcagaacattgtatctaatcttnnnnnnnnnnnnnnnnnnnnnnnnnnnnnnnnnnnnnnnnnnnnnnnnnnnnnnnnnnnnnnnnnnnnnnnnnnnnnnnnnnnnnnnnnnnnnnnnnnnnnnnnnnnnnnnnnnnnnnnnnnnnnnnnnnnnnnnnnnnnnnnnnnnnnnnnnnnnnnnnnnnnnnnnnnnnnnnnnnnnnnnnnnnnnnnnnnnnnnnnnnnnnnnnnnnnnnnnnnnnnnnnnnnnnnnnnnnnnnnnnnnnnnnnnnnnnnnnnnnnnnnnnnnnnnnnnnnnnnnnnnnnnnnnnnnnnnnnnnnnnnnnnnnnnnnnnnnnnnnnnnnnnnnnnnnnnnnnnnnnnnnnnnnnnnnnnnnnnnnnnnnnnnnnnnnnnnnnnnnnnnnnnnnnnnnnnnnnnnnnnnnnnnnnnnnnnnnnnnnnnnnnnnnnnnnnnnnnnnnnnnnnnnnnnnnnnnnnnnnnnnnnnnnnnnnnnnnnnnnnnnnnnnnnnnnnnnnnnnnnnnnnnnnnnnnnnnnnnnnnnnnnnnnnnnnnnnnnnnnnnnnnnnnnnnnnnnnnnnnnnnnnnnnnnnnnnnnnnnnnnnnnnnnnnnnnnnnnnnnnnnnnnnnnnnnnnnnnnnnnnnnnnnnnnnnnnnnnnnnnnnnnnnnnnnnnnnnnnnnnnnnnnnnnnnnnnnnnnnnnnnnnnnnnnnnnnnnnnnnnnnnnnnnnnnnnnnnnnnnnnnnnnnnnnnnnnnnnnnnnnnnnnnnnnnnnnnnnnnnnnnnnnnnnnnnnnnnnnnnnnnnnnnnnnnnnnnnnnnnnnnnnnnnnnnnnnnnnnnnnnnnnnnnnnnnnnnnnnnnnnnnnnnnnnnnnnnnnnnnnnnnnnnnnnnnnnnnnnnnnnnnnnnnnnnnnnnnnnnnnnnnnnnnnnnnnnnnnnnnnnnnnnnnnnnnnnnnnnnnnnnnnnnnnnnnnnnnnnnnnnnnnnnnnnnnnnnnnnnnnnnnnnnnnnnnnnnnnnnnnnnnnnnnnnnnnnnnnnnnnnnnnnnnnnnnnnnnnnnnnnnnnnnnnnnnnnnnnnnnnnnnnnnnnnnnnnnnnnnnnnnnnnnnnnnnnnnnnnnnnnnnnnnnnnnnnntgagtcaagtgtgtgctctcagttgtgaaggagcacaggtgagggggtgactgatgtggcacagagctgggaaggcacagaagagtgacatttcagctgggccagagagatcagtagagatcagctaaagaaaataggatcggagagggaatccctgcagaaacatggagtcatgatagatggctgtttggctaggactgttcaaaagcaggcgaggtaaatagtggacagccacatcgcaaaactgtctttgcctctgaatttcatctgaacatgaactccaaaatctagttttgtaaccatatagtttttctttttctcatgaggccatattttgaattcttaaataactaccaatcctgaaaacctcgggacaagtaatttaaaaagatgtacattttctggaaaatgagcatgactagagatgtttcacatgtagatttttccagaccattttaatcaatgattcaatttttatatagtaaaacacctattttaagtgtacagggttttggaaaatccgtacacctgtgtaaccatcaccacctgtgtaaccaccaccaacagaaccaagaacatttctgtcacccaaaaagttcccttttgccttttcctagttaagcccagtccagccccaggtaaccactttctatccgtatagattagtgttgcttggtttagagccacatacaaatggattcgtttagtacgtgttcttttgtgtctgatgtctttcactgtggcatgtttttagactcaacccagctgtttcgtgtttcagta

SEQ ID NO: 37245 - DNA, 560 bp, Macaca Mulatta
ttactgtggctttggatttccttgtgtgtcttacaggttttgatagaaggggaggggagaagagatgcatacccgtttctcaactgctccatggattgaaaaagtaacagtttaaaaagggaaacaatgtgggaggaagaatcaccattgaccgcatcttggtttggttggtttttactggtgtaaagaaggtggggcctctggccatctcatagcccatgtcttgtgccctcccacacagaaagtgttagataaggaaactggcaaaaggaatagttaaatcaggaatggtactgcctatagaagagctttgagagaggtgggcccacgagtgcccctctcacccatttgtgtactctgggagtttaccagctttgccctggcctcttgcagtaccaggaactggcaaccttcacctcactcctgagggcccaggtctctgccttcattgttgctttttctggtaggggcaaggggaactggtatggatggaatgacaagaattagtccaaatggaaccccctgaaggataatgagaaaccacaaggcctgcctctgac

SEQ ID NO: 37246 - DNA, 611 bp, Macaca Mulatta
  misc_feature (1)...(611): n = A,T,C or G
ggggaggaagtggcgtacagcatgcgccggtggcgtgatggnnnnnnnnnnnnnnnnnnnnnnactgagaaacctgcgtgacttcctgttggtctacaatcggatgacagaactctgcttccagcgttgtgtgcccagcttgcaccaccgagctctggacgctgaggaggaggcctgtctgcacagctgtgctgggaagctgatccattccaaccaccgcctcatggccgcttacgtgcagctcatgcctgccctggtacagcgccgcatcgcagactacgaggctgtctcggctgtgccaggcgttgctgctgaacagcctggggtctcctcatcaggcagctagccttctccaaccccagaagggaaagccctggaaggacccccaaattgaaggaccccgggaacctagggttggggaatcccaaacggaaagaattcagggcccccgaaaatgggtggcctgccccttttcggggaccaaaaaccccctttttaccccggttgaattaaaccgggggaggaaaccttcacaatttttgggaaacccttgtttgggatttaacaattgggggttccccccnnnnnnnnnnnnnnnnnnnnnnnnnnnn

SEQ ID NO: 37247 - DNA, 542 bp, Macaca Mulatta
  misc_feature (1)...(542): n = A,T,C or G
ggggaagctgaggcagaaaatcgnnnnnnnnnnnnnnnnnnnnnnnntagtgtgccgagaatcannnnnnnnnnnnnnnnnnnnnnnnnnnagagcgaannnnnnnnnnnnnnnnnnnnnnnnnntatatactatcttgctcctcaaccagtgggaaaggagaggaggggaggcaaagaaagaaactgagcacagtaaacacagcattttttgtaggctcttatttaaagtgtannnnnnnnnnnnnnnnnnnnnnnnnnagtattgactaggaaacagagggaagccaatcaaaagtatactgtgcaattgagagaggctgacccaggatttaaaacttcttttgggtaatctaactgtgagtagataggaatcgggcatatggtgaaatgagatcaataggaaatgtgctttttgaggaaatttgattttagtaccaaatgttgcccgtgacaatcttcagttaagaaataagttattctgacctaaaattcttatctccgccactttggtttaaaaacaaaagctcttatatacatgaa

SEQ ID NO: 37248 - DNA, 783 bp, Macaca Mulatta
  misc_feature (1)...(783): n = A,T,C or G
ggccgcccgcgtcagcctcccaaaatgctggtnnnnnnnnnnnnnnnnnnnccatccggcctcagctgctttcatgctgtcctcaacaaaatactgcagacaaagatcacctggatgtgctgaaactctaatataattatggctccttgtggctcagtctctccaaagcatgaactaaaacttaaatctcaaccaagattttgccctgacagagcgctttcctctcttccacgtttctttccatctgtttcctggttcttcatcgccccatgtctgtgggctcactggcaggaatggggccggcagaagcacaggcattctctcagtgctgagaccttctgtggaaacacctcaagccacttaacttcctctaagatattcaaattcttagctttcaactactcgaaacctttcattgttagggcacaactgatgtgttttcaggcttaaaaaaaccctagttccacttgctctctaacaaagatggtgactgaggtctccttcagggtcactgactggtgagattctagatgtttagtccccattctgggacactggactcagtctatggaagctctttgttgttgttggttgcaaacatgatgttaggtggggaattccaagcttcatttttaacaggaaaaacttctggctggggcgcagtgggctcacgccaatgggccagccaacttttgggaaagcaaaggttgggcccgaatcattcttaaagtttggggaagttctaagaaacacacccttgaaccgggcaatgggaaaaaaact

SEQ ID NO: 37249 - DNA, 820 bp, Macaca Mulatta
  misc_feature (1)...(820): n = A,T,C or G
gggagccattttgtttttatgctcaaagggccgggtgggatgcttttgtagctcccatacattgttgctcatctgctgcctcatttgatggctgtggggcagcagctcggcctgtcaccgccactagatatttcttcagcttctccaaccccaaggctggcctccctttttaactacatgctctgtggacttcaggctacagcatctgacttgaagacaaaagagccttacccagatcacgtgacatgcctgcttccccttcaccttccaccgcaattgtaacattcctgaggccctcaccagaaaccgagcaggtgttggtgccatgcttgtacagcctgcagaaccgctcccacagaacatggatgaccaccatcacactgtttatgatgctgtattgcacttgactgctcatttgtcatccttataatgtgcagagtgccttggactgacaaactgaaatacattttgattaggcaacatgagcagaaggagtgtggggagagaactgtataaatctgttttactcaaccttgaaagaatgttaagtgttaattccctgcatcaaatagagtacaccaagtatatatgcagcgttcctgagagcttcttaatgaactgaaaaaacaaacaatctggaggtggggaagaaatacatnttcatcaaccccccttgaagcagcgatgaatttgccttcaaccttgtcatacataacttgaattctggatttaaaattagacaaatgggaactagtttggattatttttctttgatataagaaaaattggcctttttgttggtttaggaaaaaattttacc

SEQ ID NO: 37250 - DNA, 864 bp, Macaca Mulatta
atcagaccaatcacttgagttgcagtggcctcccacctctctcagaccagtatccaagagaagagatcaccagagtggtccgcagtgcagatccaatagccaattacctacaacaaataatgcaggaagccagacaaaatcttccacctaacctcccccctgggtccctggtgatgctctatgaacctaaatgggctcaaggtgtcccaggcaacttagagattattgaagacttgaacttggaggagatactggtctatgtagcggataaatgccgtttcctcttgcagaatggttattctccgagggatattgctgtgcttttcaccaaagcaagtgaagtggaaaaatataaagacaggcttctaacagcaatgaggaagagaaaaatgtctcagctcgatgaggaatgtgatttgttactacaggttggtgacgcattggatgttctgaccaatcacattgtgttggacagtgtctgtcgattttctggcctggaaagaaatatcgtatttggaatcaatgcaggagtaacccaacaagctggggtctacaatcttctgctctgtttggcttctagggcaaaaagacatctgtatattctgaaggcttctgtgtgacaggaaaacccaagcctaagaaacaattaagtgattctcatctctaattaactgtgaaaccatttgatccaaacatgtaggcacacactcacttactaagtcacatacttttctaggtgctggggattgaggacgaatcgatgtaagatttctcctttagggcagagacataccgctgacaagtacatagatagacaaggaatttcccatagtaataagggatatcagtaattagaggaccgtg

SEQ ID NO: 37251 - DNA, 286 bp, Macaca Mulatta
tctgacgggggagaaaagtggcagcattatgggtgttcttgagcttcagaatgcaaccagacatgtccttgaatgtcattaagatgaaatccagtgacttcctggagagggcagaactggacagcggaggcttcgggaaggtgtctctgtgtatccacagaacccagggcttcgtgatcatgaaaacagtgtacagggggcccaactgcagcgagcacaacgaggccctcctggagtaggcgcagatgatgaacagactgaggcacagccgagtggtaaagctcct

SEQ ID NO: 37252 - DNA, 879 bp, Macaca Mulatta
ttcccctggcttctctttgccctcgttctcctggtctttgtgacctctgtagccagcaacatggccatgatcattctcatccacacagactcccgcctccacacccccatgtacttcctgctcagccagctctccctcatggacatcctgtacatttccaccattgtgcccaaaatgctggtggaccaggtgatgagccagagagccatttcctttgcaggatgcactgcccaacacttcctctacctgaccttagcaggggctgagttcttcctcctaggactcatgtcctatgatcgctacatagccgtctgcaaccctctccgctaccctgtcctcatgagccgtagggtctgctggttggttgtggcggcagcctggctgggagggtctgtggatggtttcctgctcacccccgtcaccatgcagttccccttctgtgcctctcgggagatcaaccacttcttctgtgaggtccctgcccttctgaagctctcctgcacggacacgtcggcctacgagacagccatgtatgtctgctgcattatgatgctcctcatccctttctctgtcatctcagcctcgtacacaagaattctcatgactgtttataggatgagtgaggcagaggggaggcgaaaggctgtggccacctgctcctcacacatggtggtggtcagcctcttctatggggctgccatgtacacatacatgctgcctcactcttaccacacccctgagcaggacaaagctgtgtcagcattatacaccatcctcactcccatgctcaacccactcatttatagccttaggaacaaggatgtcacaggggccctacagaaggtggtggggaggtgtgtgtcctcaggaaaggtaacc

SEQ ID NO: 37253 - DNA, 483 bp, Macaca Mulatta
  misc_feature (1)...(483): n = A,T,C or G
agctaaaagaatatcagcagaggaacagccctggtgttccgccaggagcgaagacaaaaaagaagaaaactggcagtagccctgagacagccacttctggtggttgccactcacctggggatgccggtaccaagaactagcagtagctctggagtcaagctccacaacaatcaatcacctcaatgaaaacatagaatcattgnnnnnnnnnnnnnnnnnnnnnnnnnnnnnnnnnnnnnnnnnnnnnnnnnnnnnnnnnnnnnnnnnnnnnnnnnnnnnnnnnnnnnnnnnnnnnnnnnnnnnnnnnnnnnnnnnnnnnnnnnnnnnnnnnnnnnnnnnnnnnnnnnnnnnnnnnnnnnnnnnnnnnnnnnnnnnagaagagtccaaggatctggccggccgcctgcaatcctccttacagcgtattcaagaattggagcgggctctctctgctgtgtgtacacagcagcgggaagaggacag

SEQ ID NO: 37254 - DNA, 701 bp, Macaca Mulatta
  misc_feature (1)...(701): n = A,T,C or G
gggcttctctcgccaggcgtcctcgtggaagtgacatcgtctttaaaccctgcgtggcaatccctgacgcaccgccgtgatgcccagggaagacagggcgacctggaagtccaactacttccttaagatcatccaactattggatgattatccgaaatgtttcatcgtgggagcggacaatgtgggctccaagcagatgcagcagatccgcatgtcccttcgagggaaggccgtggtgctgatgggcaagaacaccatgatgcgcaaggccatccgagggcacctggaaaaacaacccagctctgggagaaactgctgccttcatatcccggggggaaatggtggggccttttgtggtccccccaaggaggaattttcccttgaaaattcggggaaaaatgtttgcttggccccaaaaaggggggcccactttggtttgccccggggtggtggggccccatgtgccccccgttgggaaaaacccctgggggcccccgnnnnnnnnnnnnnnnnnnnatccctcgggccnnnnnnnnnnnnnnnnnnnnnnnnnnnnnnnnnnnnnnnnggggggcnnnnnnnnnnnnnnnnnnnnnnnnnnnnnnnnnnnnnnnnnnnnnnnnnnctcccccccgaggggggggggggcggccccccccctctttggataaaaaaacaaaaaacccctccggcggggggga

SEQ ID NO: 37255 - DNA, 158 bp, Macaca Mulatta
  misc_feature (1)...(158): n = A,T,C or G
gggcaatcctacaacaatatgcctccagccatcttctctggacttgggtgccatgatctgcatacatcttacttctgcatatgttacacactcacttttgcttttaacagttcacttgccaccnnnnnnnnnnnnnnnnnnnnnnnnnnnnnnnnnnn

SEQ ID NO: 37256 - DNA, 567 bp, Macaca Mulatta
ggacaccatgggaggccaccacagtcctggaaaagaacctgatccaggcccttttggatcttcatgcctggggttctgcctacacagacccccatctctgtgacttcctaaagagcctcttcatagacgaggaggtgaaactcattaaaaagatgggcaaccacccgaccaacctctgcaggctgtctggcccccgggccgactggaccagtgtctctttgaaaggctcaaccttaagcacatctaggagcctactgaacccagcaactccagaagggccccctcaaagcatcagggcttctgcctgagcctctccctccagtcactgggcagctttttaaccaccctggagccctctccatgccttggaccaaatagaaataaaactttttgcaacagcaaaaaaagagggaggtgggggagaagaaaagaaaaaacaagaaagtaaagcaacccctcacgtttactctgttggataatcctgagttaatactttttgttgatgggtcctatgccaaaaatttggaaggaaaataataggtaagatatgccattcctacccaaaac

SEQ ID NO: 37257 - DNA, 795 bp, Macaca Mulatta
gggtttaacagagctttatgccaactaagacaaagctttaacaaagtttatagaatactgaaagtcataacaattacctctctacatgatgctgtaaggaatcttgctaatttggtaggaagaagaagcatttaggaaagggtttagtatctaccaaaagtacttgacctcaagtaaccaacagtaatgcaaacttgctttaaaggaaccaaaggcattgccaagtatttgccaaaaggaggcactttttatttaaaatttgagactaatgagatctcaaaaatcagtcccaaaaaggtattatccatctaaggttataattttcacaaagatgtagatatttctctattgttttcatgtaaaatagcatagagtcgttttgttggtttaagaataacattcagtagtaatacaaagtttttttctatgtagaaattagttttcttttcttgcttgcagtagaaatgcaatgtgataggtgtttctcttcttcttttcattgtcacattatgtcttagcatctcactttatgaaaaaaaagagaaagataccaatctgcagagccctgcttgctaaagcactcgttttatcaacacaaaattatggcaatcggggggtccattcatgtattgccttttatgttggtttttttaaaggaaaaaccatgatgccctttgtaatttgcggtttgcaccccctgaaatcaatttccatatcatgttttgaaatggccatacatttttgcacatgttactgttacttagggtaatgccataccggaattttttaaaaagg

SEQ ID NO: 37258 - DNA, 289 bp, Macaca Mulatta
tgttgtatgttcaaaaccaaactcctggtcttttccccaaacttgtgcctccctatgttgcccaatcagctattgacacctctaatccttgtacttgctgaggccaaaactcagtcatccctgattcttttactgctctcaaacccacatccagcctagaaatgccatcccctccaccttcaaaatgcatccgggccccgccctttctttgacacttggctgcccacaccctggtcctgtccacccttggctcctgtctggatgctcccagtagcctcctcgctgggct

SEQ ID NO: 37259 - DNA, 704 bp, Macaca Mulatta
aggaagaccagagcatccaagagcccaaagaggccaaatccaccactgcccagaagaagaggcgagggctccgaggttcccgcaggcgccataccaaccgccacagggacagcttcggggacagctttgccgcctatttcccccaggtgctgaagcaggttcaccagggcctcagcctttccccggagtccgtgagtgtcatggattctatggtccatgacatattggaccgcatcgccaccgaggctggtcgcctggcccgctacgccaagcgtgtgaccatcacctcccgggacatccaggtggccgtgcgcctactgctgccggggaagatgggcaagctcgctgaggcccagggcacgaatgccgccctcaggtacaccaaaagcaagtgcgctgtctcaggagcacttgagcacccgggaaacccaaaggctctcttcagagcctctgcaggtggccctaaagaccagtggctcgtcaagggaggggaccccaccggaggttggggtgggtggcaccctgccgacttggggggcatgtggcgtcctgtggtttatcaagcatttttcccactgtgcagaacactgtcaactccaatatatctgtagtgcaatatgctccaaggaaaagtagggggtgtttccgtgatcgggtttcatttcctcagtttcctaaatgtccgtttttattagttatctttc

SEQ ID NO: 37260 - DNA, 807 bp, Macaca Mulatta
ggcttcatggctgtgacctcgagctgctcacttcggtgctcaatggcctggggcccttcttggaggatgaggagatcccggtggtagtccccatgcagattgagcttctgaactccagcatcaccctaaaggatgatatcccccccatctatccaacatctccaggccccatccccatcactctggccatggaacatgttgtgctgaagaggagtgatgatggtgtgttccacataggcgctgctgctcaggacaaaccatcagctgaagtacttaaaagtgagaagagacagcccccaaaggaacaggtgtttttgatgcccacaggagaggtttttgaacagcaggtggaagaactgcctatcctacaaaaagaacttatagaaactaaacaagcattggccaatgccaaccaggataaagaaaaacttcttcaggagattaggaaatataaccccttctttgagctctgaaaccagtggctcagccatctgtgccaaggagagaggctatcaccagcagtagcaccacctaggacagagggcactgtccagtgctgaataagtcactacggatgccagaaggactggggagcacgcacttcacttgtgctttccactggctgttcttacttggatgggagacaaggggcaagcatgactgtatcccaggaaactgggggcttgcccctgtgtgtggcacaaagcatccatgtcttggccctgtatggaggcccttttgggccctccggtggtactaggttggaaatccttctcaacacctggtagggggccatttttcacctcc

SEQ ID NO: 37261 - DNA, 644 bp, Macaca Mulatta
  misc_feature (1)...(644): n = A,T,C or G
gaactgactttgcccagttagctgtggtagatatgttcactaaattggatgaactaaatctatagccataatttgaggcaattgagttgacaagtgataccttaaaaatggatgtccttaaagatggattttgataatcaaacagtgtatgacttttgacatgtaacttgtaaggagctcaaagactcaaggggagacagtactataacaagtctcacaacttggtaatgtgaaaaaggcttcttagcattnnnnnnnnnnnnnnnnnnnncaacacccaaaatagaaaatagacctagaattcatattgaacctgagtcttctagtggaaagccatattgatgcatgagatacatgaaataattggaggaggaaagggcagccctactcatttcactttcactaagatatgcttttcaagtaaacagatagtattaaaaaattaatatttatgtcttgcttgtcctgtactaatcattgtaatgatattacagaagaaaataaatgttaacctttacagccttatggattcaaaacattttaaagttttgaggnnnnnnnnnnnnnnnnnnnnnnnnnnccgaatttaattgcagaaaagtctggcaaggcgactcagttaaagaccagtaccacaaatatac

SEQ ID NO: 37262 - DNA, 796 bp, Macaca Mulatta
ggagcaggaggagaataaaaccttttaaagtgaaagatactgtgtcatagactgagggactctgacaagtccaagtgtcgtaagtcacagctttcaaagttatgaatttccaaatgtcagttgggctttctgcctaaggccatgattttgtgtggccggctattcctaggcagaagagcctggtgtgggtggctagctggaggcttccaagtacttattgtggtctcagtgggcttaagagacttaaggaccctgatgttacacatcccacattgcctgatgagggatgccaggtgctcccctgacatcctacctagcacagcataagctggaaagtcttagaaaagtagggtgaaagttgccggaaacacacactttataaacatattccttaatgtgtttgagttttgtttgatagttttgatatcagcattattttgtttgctttatgtatttgagtacgctgattatagtagtttttagggaaaagggtagttactaacctgatacttatgtgacagtcttcaaaaattggtaaacaccctacccatttggtcatgatttggaaagtctgggtatcctgacgtttttttttttatctcctgagtggagctcgaggggaaatgtgaatgaggagagaaggcacttatgtggcagaggagtaccccgcctcatggaatgggcttgtcaaaaatttttgggctgccacaaaaacttagaactctacgttgaacttctttctttccgcaagaagggtaagacttaaagtctcatggccttccaaactttcccagct

SEQ ID NO: 37263 - DNA, 643 bp, Macaca Mulatta
  misc_feature (1)...(643): n = A,T,C or G
ccggactggaacaaagaatgttcacccagaatgtcagtgttgccaaggntagaacatcctgcaatagatgcttatggcagagggtactggttgtcccccaatatccattctttcattcacatgtgttaatacacgcgccagcttttgttgttttataaacagctgccaaacataaagacaacattttccatctccttgtatgtaagtggaaataggtaggactgtcatgtggggccagtttctttttctcttcctctgacctgctgcttgaaacatagatgctgctatcttagatcatgaagttgaggccatgcaaagtgaagcaacaagaaggaggctgtgtccctgacgccataagcaccacacctgtcctgaattgctgtgaatgacaccagataactgcaatgcattgtctcaatgtcctggacataaataaaaagccataaatgtttgtcctatgcagcacaaaacctttgtatctttgccttttatgttgggatcttaattaaaaattatatcctctactgtcnnnnnnnnnnnnnnnnnnnnnnnnnnnnnnnnnnnnnnnnnnnnnnnnnnnnnnnnnnnnnnnnnnnnnnnnnnnnnnnnnnnnnnnnnnnnnnnnnnnnnnnnnnnnnnnntg

SEQ ID NO: 37264 - DNA, 837 bp, Macaca Mulatta
  misc_feature (1)...(837): n = A,T,C or G
gggtattagtccgttttcatgctgctgataaagacacactggagactgggaagaaaaaagtttaattggacttacaattctacatggctggggaggcctcagaatcatggcaggaggtgaaaggcattttttacagagtagcaagtcttcagagttcatgaagaaaaattaacaaaattagagaagtggagaattctacaaacatgattatagattttaaagctttctttgagctataaatataactaagagaaatttagcaaagacatagaaaattgaaaagcattaacaagaatccagacttaatttctttatatacatatgcacttcaaatgaaaactacatatttatctcaggtatggattggatatttttccccgggggaaaaactgtttttttttcgggggggcnnnnnnnnnnnnnnnnnnnnnnnnnnnnnnnnnnnnnnnnataaaatttccgagggagnnnnnnnnnnnnnnnnnnnnnnnnnctccccccttccccgagcgctggaaaaccggcgataattagcgaaagacatataatctaaaattgaaaaatgatgataaaaagcttatcatgcgtgctccgtcaatacggctaagaatttctcattactactgatataacagtaattcggcatattgtactccgtttcatctctggggtttcggccgccgtatcacgctactgattagaggttttgattattcacacatatttttttatctgtagtgttttgagtcgatcacagaagaacatagaaacgccccaccagctaatctcactagcactcacaccgacctagtctcattatgtgtcgaatatcaaata

SEQ ID NO: 37265 - DNA, 804 bp, Macaca Mulatta
  misc_feature (1)...(804): n = A,T,C or G
atacattttatatacatttcggtgcattttttctagtatggatttctatttgtttctctcttccatttgtttttttctgtgtcactcttgtatgtcctcttatctttcatacctcttgtgtagtctctagaagcagaacacccaagtcctgggtctggataatgaaaccctctgtctctggggcctctgaaaataaggaagcattggagctattgccatgttgagtaatgggcttcctagaactattgtcatctatcctgccagggttttatgttgtagctgtttttctttgacaggtgagttccagctatgttgttagtcatgatcctgccattattttctgtgttctgtaggatgtctccagactacttaaacatattttatgagtttgcaataaaattgttgaatcttgtatgatcaagtcactcctctgctcagaaatccacagtgacttcttagtaagcccctatattatatgcatacttgtttttttcttaactttacttccacttctacctaacagggacctcaacttaagtctcttcagttcttccaggcctggccttgttcctgattgctcaaaaaatcttgactctaaggccaatttttattgtctgtctctgaatccctataaagcttcaagtctgtatgacatattcttacgccaaaataatatattggtcttggtactgttccctaggctgggtacaatgtatattaatccttggtctcccctcatggagaatgtaaagctcccttaaggggcagggaaccatgntccttaattttttggaaccccaccca

SEQ ID NO: 37266 - DNA, 891 bp, Macaca Mulatta
  misc_feature (1)...(891): n = A,T,C or G
ggnnnnnnnnnnnnnnnnnnnnnnnnnnnnnnnnnnnnnnnnnnnnnnnnnnnnnnnnnnnnnnnnnnnnnnnnnnnnnnnnnnnnnnnnnnnnnnnnnnnnnnnnnnnnnnnnnnnnnnnnnnnnnnnnnnnnnnnnnnnnnnnnnnnnnnnnnnnnnnnnnnnnnnnnnnnnnnnnnnnnnnnnnnnnnnnnnnnnnnnnnnnnnnnnnnnnnnnnnnnnnnnnnnnnnnnnnnnnnnnnnnnnnnnnnnnnnnnnnnnnnnnnnnnnnnnnnnnnnnnnnnnnnnnnnnnnnnnnnnnnnnnnnnnnnnnnnnnnnnnnnnnnnnnnnnnnnnnnnnnnnnnnnnnnnnnnnnnnnnnnnnnnnnnnnnnnnnnnnnnnnnnnnnnnnnnnnnnnnnnnnnnnnnnnnnnnnnnnnnnnnnnnnnnnnnnnnnnnnnnnnnnnnnnnnnnnnnnnnnnnnnnnnnnnnccctcaatttaccattatttggctttaaaaaccagccaatcaaataagaaaaagcgttcaaagctccaacactaaccccacccgaataagaaagtgatcgcaaagttgaaacaatcatacctgtatgggcacgccaccggccactagaaaaaatttttacaagtaaccaatccatattggcctcctccgaaacaccattcagtgtaaacctaaaactcgggggcttaagcctggatgtcactaaagaaaaataccgggcctcaggaaacattaatgccattgaaaattcctcacccttaaataataaaatacctcccctggccatgccaaaacctctaagcattnccgtataatacaaatcccaccaatatgggatataccctgaaaggtctcattcaaccgtggatacacgatatcgat

SEQ ID NO: 37267 - DNA, 822 bp, Macaca Mulatta
  misc_feature (1)...(822): n = A,T,C or G
aagattttcaccaaaaacaagtggtaggttaaacttaccaccaaaacccctgtgggcacaatataagtttcccccaaaaaggaggcaatgttttttcannnnnnnnnnnnnnnnnnnnnnnnaaccccttggccaggagacttttgtgaaattaagtgtttgccttaaacttttacattggccatgggtttttatgcccattatttttatttacatacttaaaatattaaaaattgtaaaggcagctttgtcctaaagctaaaccacaattgtataggctcatgtttttaaattgcttgttggtgttttttcctaatgtatgtgaaattaatacataactagtaaaatgaaatgtggcatatatacgattattggttctcctgtaccacatttcaaaaaattcagttttataggaatataagaacagggataatgtgtttaatttagcttttctcttcgcttgggaggtaccaaaggagaaagataatgacatcagacttcctggaaaaatacctcattctttgagtggctttttaggtgagaagttagtggaatcccccatttgagtagactttaaagtccctttcctaaaatataatctccttgctggtatgtgcttaggtcattttagtaatcatgaattagccaatgtgtagtgtaggaagagacagtgatactgaaaattattttactcttacaaattgcccccttttctgtcaggggccagatagtatgtattttaggctatttgggtcttttttccaactctgcaactattcagtcattnnnncannaaagtagtcacaagctgctgtagtcccc

SEQ ID NO: 37268 - DNA, 657 bp, Macaca Mulatta
  misc_feature (1)...(657): n = A,T,C or G
aaggcaaaagactctagcagatagctatttccatcaacatgttaaatgttataaaagtctagaattattggtaacatgaaatgattccaagacggaatttctgtgttacagaatttactagaaaagtgctgtgaaaggagaatgaaaaaatgatcccttgaaataatgcggaaagataggacaagcttttggatatttacatagattagtgaattaggtgcaaaattctcctgaagttatacctagttcccattaaatcagtggacactctggatatgagtatatatacctttctttagaactgtattttgtgataaatccatttttacttacaggaatttacttaaacttatacacacattaattatatatactaaatgaaaacgaccttatctgaaacaaatacattgtataatatcaaaacgtttttagnnnnnnnnnnnnnnnnnnnnaagtgaaaaaacaacattagttacatcatttacatttggtatcccacctaatagatacacagcttttgaaatctacaatattttacattttggtcatcatttaatgctatttgcattcctcttgctttaacattttaatcgcatttgtgatatatcatgtttaactgaaagctttgggatatgtattgtaaaggaatatctcttt

SEQ ID NO: 37269 - DNA, 1892 bp, Macaca Mulatta
gccccctcctgcctcccctcccacaacagccacacagacaaatccacactctacacacacctgtgccctcagaactccttgctcaggatagagaagattctgaatgctcacagacggcacattcccagctcacagggacccaggccccgcccccgccgcgctcacctcgccgctgcactgtgaagctctcaccaaccccgtagttgtgtctgcagtaggtgtccaccgcggcccgcctctgctccaggatgtccttctggctgttccagtactcggcgttacgccgccccagctccgacaccgcccggtactccccgacgtcgctgtcgaagcgcgcgtactcctcctggttatagaagtatctgtccaggaaccgcacccgctccgtcccgttgaagaaatgacactcagacttagcctgctccaagaaacgtgctgtggggacacgaacgatccggtcacacgggcggcctcctgagaagacactgacagcaacgccgcaatccggggctcccgggcgggtgcgggcacggagaaccttaacccgccccacccgcaccgcccaccaccagcaacccaggggctcgttctccgtcttcctgaggcgaacgggggcctggggggaacagcgggaaaaccccttctgatccccgggcttttgggaccccctccctgcctccagcctgttctggagaactcaatgcaggaactggaggaggattctcccagcaacgcagcccctgccgcctcctcctgggagcctccaccccaaagacactctctgctccttccctcctcccacaactgtaccggttccttcaacagcacccaccgccttcatcctgtgaacacttccttagtgctgaacttgtgcctggcccgcgctgcctctaggaatccaaacaagggaaaacagatctctccactctgctaggggagaataaagagcagtgaaagtcgatagacaaaaaccaaacacacaagagcttagacaggaatgagaaatatcagaagtgtggagttctagaacagagaataatagtaagatgatctcaattacattagggtaccagagaaggaccctctgaagagtgacagttcagattgtacttgacaggttaagcacgtgtgagccaggggggcagagcagagccctgtgtgtctgttttgggaaccaaaacgcaggagacacatttcaggtttaggaaatcccatgtacaaaagcttgaatggatgaacttcttcaagaaactagaacaaagttcactaaagcagagaggctgaggggaaggagggtgaaagattagcttggagaaatcacaagaagccaggtattaagagtctcgtggatggcgttaggtttttggatttatactgaagacaatgggaaagtatcaaagagttttaaggagaataaaatcatgatctctgtaaatgtccataaatcttcttttgcatttccaaatccacaaagctcagaaattcagttaaaaaacttgtttccacaactcatttagcaaatctcatctgatgagggtaagtggtcaaaggtgtctcagggctcttactggtgacaagtgcttctgtagtttcaatacatataaacatacatacatatatgtgtgaaaatatacacatatgtaaaacattgtatatatttgtgatgtttttgtctttatgtttgaagtgtgaaaatgacaaaaataaaaataatcctgtgggtaaaagtgaaatgaataaatagaagcattttacattgtgaatcatatcaaatgtagaatcactacaaaaatctgaggcatattagtgaaaattaaatgcagcggtatcactatttgtgacttaaaaatgcaagttgttgaaagttaatagagacagtgatgaccaacaac

SEQ ID NO: 37270 - DNA, 777 bp, Macaca Mulatta
  misc_feature (1)...(777): n = A,T,C or G
ggggttggcattctgtcactattcgtttaaatcattttgttgtacatagtagtgttttccatcagttcatttttagaatttctcactttttcaataataagatactagtaaatggtgcccagaggtaatgtgatgtatttgctccttccccccattcacagcaatagcatttgcctgaaaatgagtaaatgctttgtgcaactaagttgcatcctgcacatggtattcaataaattaaaacataatgctctatgcaaatattaaagaaaacattatctgatatgttatggcattaaataaagcatttaatgctggcaagttcgctttgcctctgtggacaagatgattctaagaagcaatgtcatgtaagatatgaaattaaccaagttgagaggaaaaggaaagggaatggatgcattccagacagaggaaagtgatctgtacaaacaaaagtgataatgtgtctggaggatctaggaggacctgaaagattttattttacctggagagattgaaaaggtatatctggtagtnnnnnnnnnnnnnnnnnnngaatcttgagaggtacacagatgccagtaattggagcatctttcacatcaatttcagtagtatggtactcagannnnnnnnnnnnnnnnnnnnnnnnngcctgaccctcangtacatataagcaatccatataatctgtatgatgcacatccctcctgctattatnctgctttttgggtcttaaggcaaagggcctttcccacctttcacaccntttgctacagg

SEQ ID NO: 37271 - DNA, 611 bp, Macaca Mulatta
gctttacatgaacctgctccactgagaaaagccaggcagatcgatttttagagagatcaatttttacagtgctggcaacttggtggtgtgggatgctcctggctggagagggtttgctgctgggaaggacatgggtgtacgtgtgactgcaggggtcgtgtccagggaagccagagtcaccccagctgctgggctcctctgcctctctgcagcagaatgtctgtcctctgttgattgattggagaggaatagcagaacatttctcctgcccctcactgcaaaacgagctcgttttcctgagcctcagaaatcctcagcttcaaacatggggaaacaggccagagcattgcccggctgctgaattaaactctgttctggtgcctgagctcaggggttttcagagaatgaataagagactgtccagtgactggtgggtccctgggggccagctgccttctcatcctgggaggtggcccttcccaagcccatcagggcatgtgagcagactgatggggccactgcagcccctggccctcggtacccagctttttctggctaagagtatgcagcagagactgaggcatagccagcttcaaaagcggtctggcgtg

SEQ ID NO: 37272 - DNA, 620 bp, Macaca Mulatta
gaaaaatttaatagtaatatagtagagttatatactgtctgcatattagagttgtataaatagtcatatactgtcaatgtcctcttcccatgcaggaagttaataaaaacagatgaatctgtggtggacagagccaaggccaatgcctccctttgggaggccaggttggaaatcacagaactctctaggattgagtatcgtgatacttcacggacactggcaaaaagtaatgaggacttaaagaaaaagcaatgtaaaatggagaaagacataatgtcagtattaagttacctgaagaagcaggatcaggagaaagataatatggtaggtaggcagaaaacctcctcggcctcattaactacctctatggtgatactgatgtggttatgtatttctaagatgtttaattccttgaaatcttaacatatagttaagacatttcaattgaccttaactctccttgaagctagacactttttcagaatggttttactgttattggctctctaattttcaatcctcgttccatgttttcttctctgaagcaaacagagattgatgatcataagggaacattatgatccactttattttaaggacaagagcatggtatgtgatcg

SEQ ID NO: 37273 - DNA, 795 bp, Macaca Mulatta
  misc_feature (1)...(795): n = A,T,C or G
ggggtcaggctggtctcgagttcctgacctcatgtgatcgacccacctcggcctccaaaagcnnnnnnnnnnnnnnnnnnnnnnnntgcgcccggccgagggagctaagttttaatcagctgcaaaaaagtcatacagccaggggacataagagcggtatctcccctgccctcttctttttctatattctgcaatctttccataataaaatcctcgaatattgtgttaatggcatttgaggtttatctactttccacctgaagattatgccattctccgttttgcaaaagaagaaatgagcttgagagagctcaaaacaacttgcccgaggccagaaagccgtggatcatgggactccaaaccacgtgtgtcctcaagatggagaaattgcacattgtaaccaatcagtgtgctttgttgttgacattcttgtcagcactctggggcccttcactctgagatgattgattcatacctctttgaagatgaacatttctttcaagttgattcatgtaagcagaattgagtagcaatatagatactatcagagccggtgagcgaccacannnnnnnnnnnnnnnnnnnnnnnnnnnnnnnnnnnnnnnnnnnnnnnnnnnnnnnnnnnnnnnnnnnnnnnnnnnnnnnnnnnnnnnacaacggtttttnttaanataacaaaaacaccccaaaaacccctttttctttccctttaanggcaaantcaacaccaacaaaaaaggggaggcaccccccccactcattattttgcccggcttcttctattagcacaagaag

SEQ ID NO: 37274 - DNA, 631 bp, Macaca Mulatta
aagaagcgcgctgctgaaggaccagagacagctggggggagctgcctgtggccccaaggagctgaccgtgccggagcttgtttgtacctctcggaaattggctgggaccttggaggatcatgtctggcaccagcagccccgaggcggtgaagaagctgctggagaatatgcagagcgacttgcgcgccttgtcactggagtgcgagaagaaattcccacctgtcaaagaggctgctgaatcaggaataataaaagttaaaacaattgctgcacgaaacaccgaaattttggcagcactgaaagagaacagctcagaggttgtacagccttttttaatgggttgtggaaccaaggaaccgaagatcactcagctatgtttggctgctattcagagactcatgtcacatgaagtcgtgtctgagactgcagctggaaatataattaacatgctttggcagctaatggagaatagtcttgaagaacttaagctacttcaaacagttcttgttcttttaacaaccaataccgtagtccatgatgaggcactttctaaggcaattgttctttgtattcgactacacttcacgaaagataatattacaaataatacagctgctgctacagtgcgaca

SEQ ID NO: 37275 - DNA, 1157 bp, Macaca Mulatta
  misc_feature (1)...(1157): n = A,T,C or G
gggtatgaaaatctgcttgcctgtaaaatttgcatttataaatgtgttgccgatggatcacttgggcctgtacacataccaattagcgtgaccacttccatcttaaaaacaaacctaaaaaacaaaatttannnnnnnnnnnnnnnnnnnnnnnnnggactgtgggttgtatacaaactattgcaaacacttgtgcaaatctgtcttgatataaaggaaaagcaaaatctgtataacattattactacttgaatgcctctgtgactgatttttttttttcacttttaaataaaaacttttttgtgaaaagtatgctcaaagttttttttccatttccccagtccctagtaaccccactttcttacctcgtgactcgggtttcggaaaaatattaactggggaatcggaactccgcccataaaattaacagggtatcgtttacccccgcgaaaaaaggaaacgtcaaactattccaacccagcctgatgcggtacacctctaacaattaagagataaaatgaaaacacccaggcgatttcccgaatccgccggcctggactgtaaatttattggcaccaactattgggaataattagtatggtccaagggtatatatcgcattccgcaataaaaagaatttttgataggcgatgtacttctcccccaatctacgcatgactatttcaaaactacgggcgttcgatacttaaaacacaggtttgccgtacagcttccacactttgtactggccagttgagataattcgggtaaaaacagcccaaccactttaatcactagatttcgtatgacgaancatgctcaacaccacacacgcgcatttctctcgaacgggtctcgtccaccccattcgctatcactaactagcgcacgcgcagtagtatccactttttaacgctcattgttttaatcaggcaaaaacaacccccccattatagacaaattgagtagacacacttaaaaagcgaaactcactgtttcttatgagcgttatataatacctactcctcgatgtgataaatcataggatgagctggaactagcagggaaagcggatatggttatcgacagagcgatcgtattcgtctatctttctaccataaaaatcatataagtgatacactctcacggtccacccc

SEQ ID NO: 37276 - DNA, 300 bp, Macaca Mulatta
  misc_feature (1)...(300): n = A,T,C or G
ngaaatcatgactgaccaaggcagtggcaagaaaaggggttttgcctttgtaacctttgacaaccatgactccacatataagattgccaattcagaaataccatattgtgaatggccacaactatgaagttaggaaagccctgtcaaagcaagagatggctagtgctccgtccagccaaataagtcgaagtggttctggaaactttggtaatggtcgtggaggtggttttggtgggaatgacaactttggtcatggaggaaacttctgtggtcgtgttggctttggtggcagccatggtg

SEQ ID NO: 37277 - DNA, 741 bp, Macaca Mulatta
  misc_feature (1)...(741): n = A,T,C or G
aaattccccacttttcttagggaaaaataaacccttaacaacctttaagggaattggggaaaaaaagtaaaaaggacccggaaaaaactcatgtttatgcaaaccactaacccaaaagcaagtttttgctctttgaggaagacacggtcacaggtggtgcagagctgtggtccgcccgctcttgctctggcctcagcactgtttgctctggttgaggaacaagttagtcaggaagccttgcagcagccatggcnnnnnnnnnnnnnnnnnnnnnnnnnnnnnnnnnnnnnnnnnnnnnnnnnnnngctgtcacccaannnnnnnnnnnnnnnnntnnnnnnnnnnnnnnnnnnnnnnntcctccccnnnnnnnnnnnnnnnnnnnnnnnnnnnntnnnnnnnnnnnnnnnnnnnnnnacccgccaccacgcccggctaatttttgtagttttagtatggacagggtgtcaccttgttannnnnnnnnnnnnnnnnnnnnnnnnnnnnnnnnncgcctannnnnnnnnnnnnnnnnnnnnnnnnnnnnnnnnnnnnnnnnnnnnnncggctaatctgcagttttaatctggggtcatggagactttctaaggcctgcatagtcctggaggtgtcagtttccaggtcctccactgtctagtgtgctcatttctgaagccagcttccccgtgcacatgccgggaatgggtgtgtgggttttcctttctcgcccccccgcctccc

SEQ ID NO: 37278 - DNA, 774 bp, Macaca Mulatta
  misc_feature (1)...(774): n = A,T,C or G
tgttgggaattaacaggtgtaaaggcacccatacccagctgtngttttannnnnnnnnnnnnnnnnnnnnnntatggcctgatggtatagatgaagcccctcccaaagccagaggggctggagtgggtagaaagccaccaaggagtccgagggttccaggtattgacaagacctgaattttagacttcaaaattgtgacatcagtgtatattccccaaaagatcacagcctggctcttggaggcctggatgtgctaggtgggtcagtagggttgtaagagggcccttgcatcttttctgctctgtttacatttgtatgtctgctagtatacagagtagctaaggaatccaaatggggaaggccttgggttctaaactggcttctcatccaggtcctgctaagagctcttattcctcagtttcctcagctagaatgatgataacattgacctatttctcagaacaaggtaggtcaggggtttggaattactcatctggactactgtttaagtgctccactcggcagattgctccttgtgcaacatacatacggggaaacgatgtgatgacactagcacaaaggacggtttatagttattttcagtggttcctcattttttggtgtgtttttttgagacgcagttttgctcnnnnnnnnnnnnnnnnnnnnnnnnnnncnnnnnnnnnnnnnnnnnnnnnnnnnnnnntggagtcgagcaattctgannnnnnnnnnnnnnnnnnnactgggattacagacgcccgccaccatgcc

SEQ ID NO: 37279 - DNA, 666 bp, Macaca Mulatta
  misc_feature (1)...(666): n = A,T,C or G
gggagacacagcggcgaggcagccagtcaaggactaggaggagataacatcaagatgccgaagactgaggaaactgtgttccagaatgatcccagtgtagcagagaatggggcccctgagcctaaaacaccagggcagagccagaaaagcaagagtttctgtttacatgaccagtgtcctgagagcagacctgatgtcttttctgtcacagatctgatagagacagttaatgaagtttccaagctgagcatcgcacatganatcgtagtaaaccaagatttctatgtggaagagaccattttaccttcaaacagtgtagaaggcaggtttgcggaggcaatgtacaatgctttttggaccctctggaggaccactattgagtactccctccgacttcccctgggctcttgaacttctaaaagatgttaagggaaaccttgctatccctgcttataccaggggcaaaccgcctnnnnnnnnnnnnnnnnnnnnnnntgaaaccaattccctccagcgggaaccaaaatgggagccccggaagccccccactttttaaaacattttcaatttgagaaccccccagggccccctctgagaaaaggtacaaaataggggccatcaatccccaattttggggggcttccttgtttgcgccaaaaaaggaag

SEQ ID NO: 37280 - DNA, 789 bp, Macaca Mulatta
  misc_feature (1)...(789): n = A,T,C or G
gaccagtacctgagacaactgagactcaggctgtcttccccagcaggacgggatacctaggagaatgtgggctgggcaggagccgctgaagctatcttattaccacaagaggatggtctattggagagtgaagctgaaagaaaattatgacagtgaaggagatctggcctgaccaaatccatcttgcctttaacatccaagctgcctgtattagtccattttcacactgctgatgaagactgggcaatttacaaaagaaaggggttgaatggacttagagtcccacacggctggggagccctcacaatcatggcagaagacaaggaggagcaagtcacatcttatatggatggcagcgggcaaagagaaagagcttgtgcagggaaactcccnnnnnnnnnnnnnnnnnnnnattgttttttagatggagtctcgctctgttgcccaagctggagtgccgtggcatnnnnnnnnnnnnnnnnnnnnnncacctcctatgttcaagcaattcttctggccctaacctccccaatagctggtaattctggtgccccaccaccacccctggctaagtttttatgtttaaccccacccacaggggtttcccccctggttggcccgcccagtcctccacaccccccctacttcatatgaaaccccaccgtatgtcctcaccaaagcggtttgggaacctttgtctataagacccacagtgccccccgcccaataaagccaacttcattacaacctccccagcaaacaacccccttattcgccaactcagaatac

SEQ ID NO: 37281 - DNA, 437 bp, Macaca Mulatta
tcaagtaatgatttttccttattgctctgacttatgatcagtttatactaaatagtcactaaaataagaagaggaatatcctgttaggaatcaggagaccaagaattttcttatagagtctattagattttctaacattaatgggatttccagcatcagaattctcagaaatgtttctaattattctattttcgtgcccatggtaccaggaagactttttttcacttgtcattcttgtaatggttatagaggaatccacagcttgaaaaaagctggactcaaattggataaaaaccaatccgagtgttgatactttcttgagtggagtagacaggggctccagttttcagtgcctctggaggtcaggactgtgatggctaggaagagaggtctaaggagatagacatctttgtttttccattcactaatatttggcc

SEQ ID NO: 37282 - DNA, 767 bp, Macaca Mulatta
  misc_feature (1)...(767): n = A,T,C or G
ggcaaatacttcttatcttggagtttttctagccgtggttagtgggtcatagtgtcagctacgttgccaaatgggagctgaagtgtgttgtttggcgaagggtgaagacgctgtcagagaataagacaaagcccactagaactttaaaaacaagccagaaaaaaaacacatacccacacacacaccctgaagaggaagtcaggagtttgcaagccctagaaggtggttattgtgctaattaaagattgaaagctcactctcaagagagctgaaccaaatccctgggctgcctcaggatttgtgaaatcagtgccattgttctctggtcagttcagtccaggaggggctggcgtccaagggtcactcaagagttcatggctaggccaggcgtcgtggctcatgcttgtaatcctaannnnnnnnnnnnnnnnnncaggcgannnnnnnnnnnnnnnnnnnnnnnnnnnnatctggccagcatannnnnnnnnnnnnnnngnnnnnnnnnnnnnnnnnnnnnnnnnnnnnnnnnacnnnnnnnnnnnnntnnnnnnnnnnnnnnngnnnnnnnnnnnnnnnnnnnnnnccagaaggtggaannnnnnnnnnnnnnnnnnnacgnnnnnnnnnnnnnnnnnnncaacagagtannnnnnnnnnnnnnnnnnnnnnnnntttgtggctcatgcagccttagccggcaagagcagttgccacgaaaaagcattatttcttttctctttaggctaattgtggtaaaatacaca

SEQ ID NO: 37283 - DNA, 2586 bp, Macaca Mulatta
  misc_feature (1)...(2586): n = A,T,C or G
gtttacagatttcctccccttggactctagatttctggccagagtttctgggtccctttcaggccntgctgtgggaggcattggagtttactgttgatgtgtttggatttgaattcaaaatagatacaaattcagaggtcagagctttgccagaccctagcagggatggggcatcggtcctggctggtcttgtttactttgtcatggtaaattctgttttttggagcataaaccccagagttctagagccccttgtctcagcaggaatccccccctctgtcttctccaggggatccccacttctgcccacctgctctccttctgtggcattcgggacctccgacagctgaggcctggcttcctggagtttgtcacctctgggcatgcctgtcttgtgtccaggacacaagacatgcatcccttgtctggccccaggctgccatcactctcacaagaaacttgtagagtagagctggcctgaggtcacagtgctggtggtggtggaaaagcagggatggcctgttccactgtgatcttgcctcctgtgtcacctggattgggtctccgtccccctagacatgttagatcctgactttacgagagctgaaggggtctcctgcacacaggtcctaacactttgggctggggtcggccactgtagcttagtgggctaaagctggagtttgaatctgnnnnnnnnnnnnnnnnnnnnnnnnnnnnnnnnnnnnnnnnnnnnnnnnnnnnnnnnnnnnnnnnnnnnnnnnnnnnnnnnnnnnnnnnnnnnnnnnnnnnnnnnnnnnnnnnnnnnnnnnnnnnnnnnnnnnnnnnnnnnnnnnnnnnnnnnnnnnnnnnnnnnnnnnnnnnnnnnnnnnnnnnnnnnnnnnnnnnnnnnnnnnnnnnnnnnnnnnnnnnnnnnnnnnnnnnnnnnnnnnnnnnnnnnnnnnnnnnnnnnnnnnnnnnnnnnnnnnnnnnnnnnnnnnnnnnnnnnnnnnnnnnnnnnnnnnnnnnnnnnnnnnnnnnnnnnnnnnnnnnnnnnnnnnnnnnnnnnnnnnnnnnnnnnnnnnnnnnnnnnnnnnnnnnnnnnnnnnnnnnnnnnnnnnnnnnnnnnnnnnnnnnnnnnnnnnnnnnnnnnnnnnnnnnnnnnnnnnnnnnnnnnnnnnnnnnnnnnnnnnnnnnnnnnnnnnnnnnnnnnnnnnnnnnnnnnnnnnnnnnnnnnnnnnnnnnnnnnnnnnnnnnnnnnnnnnnnnnnnnnnnnnnnnnnnnnnnnnnnnnnnnnnnnnnnnnnnnnnnnnnnnnnnnnnnnnnnnnnnnnnnnnnnnnnnnnnnnnnnnnnnnnnnnnnnnnnnnnnnnnnnnnnnnnnnnnnnnnnnnnnnnnnnnnnnnnnnnnnnnnnnnnnnnnnnnnnnnnnnnnnnnnnnnnnnnnnnnnnnnnnnnnnnnnnnnnnnnnnnnnnnnnnnnnnnnnnnnnnnnnnnnnnnnnnnnnnnnnnnnnnnnnnnnnnnnnnnnnnnnnnnnnnnnnnnnnnnnnnnnnnnnnnnnnnnnnnnnnnnnnnnnnnnnnnnnnnnnnnnnnnnnnnnnnnnnnnnnnnnnnnnnnnnnnnnnnnnnnnnnnnnnnnnnnnnnnnnnnnnnnnnnnnnnnnnnnnnnnnnnnnnnnnnnnnnnnnnnnnnnnnnnnnnnnnnnnnnnnnnnnnnnnnnnnnnnnnnnnnnnnnnnnnnnnnnnnnnnnnnnnnnnnnnnnnnnnnnnnnnnnnnnnnnnnnnnnnnnnnnnnnnnnnnnnnnnnnnnnnnnnnnnnnnnnnnnnnnnnnnnnnnnnnnnnnnnnnnnnnnnnnnnnnnnnnnnnnnnnnnnnnnnnnnnnnnnnnnnnnnnnnnnnnnnnnnnnnnnnnnnnnnnnnnnnnnnnnnnnnnnnnnnnnnnnnnnnnnnnnnnnnnnnnnnnnnnnnnnnnnnnnnnnnnnnnnnnnnnnnnnnnnnnnnnnnnnnnnnnnnnnnnnnnnnnnnnnnnnnnnnnnnnnnnnnnnnnnnnnnnnnnnnnnnnnnnnnnnnnnnnnnnnnnnnnnnnnnnnnnnnnnnnnnnnnnnnnnnnnnnnnnnnnnnnnnnnnnnnnnnnnnnnnnnnnnaaatacaaaaattagctgggcatggtggtgtgcatctgtagcctcagctacttggagggttgaggtgggaggattgcttgagcccaggaggcagaggttgcagtgagctgagacagtgccactgtgctccagcctgggtgatggagccagaccctgnnnnnnnnnnnnnnnngacaagaaagaagtatggactccaccttcttgcccttttgtagattaaaaaatacctgcccttggcctctttcccgtccatctcgtattatgaaaggttgtttctggcacacccaggctcctctgcatgcttcctgggaagtgactgagggtcagaggaatggagcccctctgcagttggccgctggtatcttccctattgaacccttctttaggtttgctcgctctttttgatgggtgtctttccggagcaaactggggacctccctgattgagagacatggggctagttct

SEQ ID NO: 37284 - DNA, 710 bp, Macaca Mulatta
  misc_feature (1)...(710): n = A,T,C or G
atctaaaaggagggggggtgtaagaaagaggattcttcatagtcgcgagaatgttcccaacaaatttttattatttattttaggtattttgnnnnnnnnntgttcctttcattcctcccggattgcaaaaatttattaaaattggagacactgttttaatcttcttgtgccatgagactccatcaggctgtctacaaagaccannnnnnnnnnnnnnnnnnnnnnnnnncagaagtctgaggctgtagtaagcctcaaagggccactgcactccagcttggatgaggcaagaccgctttcaagcggtaaagctacatgcttgcttgctgtggtcattaaaaaccctagtttaggataacaggtctgcctgcatttcttcaagcatgaattctgagtcctttgcttctttaaaacttgctccacacggtgtagtcaagtcgactctccatacctttaaaaggtctccaaacatcggcaccagaaaaataaagctggtccagacaagttgcactccaccatttcaacttctaattttctgtctaatgcctgtatgccaatggcttgagttaggcttgctctttaggacttcagtagctattgtcatccctcctttgggacacaactgtccataaggtgctatcgagagccacattgcatctacacccagcaccatacctcacaccagtcggctcccacctcgaaaagacccc

SEQ ID NO: 37285 - DNA, 878 bp, Macaca Mulatta
  misc_feature (1)...(878): n = A,T,C or G
tccagcgctgtgtgtggtgttcagtatctttttaactggcgttgtttttatgctgatgtattatgcctatctttcatcccaatggacccagattcgggcagtcaccaagttgtgcttgtgaggacccagccgctgccttcactttgcccccagacgtggccacaagcaccctacggtccatctcaaacaaccgcagtgttgtcagcgagcgcgatcagaaattcgcagagcgggatgggtgtgtacctgtctttcaggtgagacccactgccccatccaccccatcatctcgcccaccacggattgaagaatcggtcattaaaattgacttgttcaggaataggtacccagcatgggagaggcatgttttggaccgaagcctccgaaaggctattttagcttttgaatgttccccatctcctccaaggctgcagtacaaagatgatgcccttattcaggagcggttggagtacgaaaccactttataaagcaaaaggagttgcaggacccacaacatccagatgaaggggtgacagcagggctgtggccataatgacacttcatcctagggcagggcagtgagctgtgaagttcctagagtgaccgtcatcaccattatcatttgatcctgttggctgggggcagctggtctccttccaaaacagctgcacccaagagtgtctgactccacctgaaagaatgacgctggcttagtaggactctccattgctaccaaactcctcctgcacggtcttgggtgcacccaccagagggtactattattatggaaaaatttgcctccaatcattanggntgtcttgatggtgctaactgatctttcccataagaatagatcagtcataccacatacacacacg

SEQ ID NO: 37286 - DNA, 225 bp, Macaca Mulatta
  misc_feature (1)...(225): n = A,T,C or G
acaggactggcctgcgcagccctgacatnnnnnnnnnnnnnnnnnnnnnntgagatcttttggccagctgaccctgtgtcccaggaatgggacagtcacagggaagtggcgagggtctcacgtcgtgggcttactgaccaccttgaacttcggagacagtccagacaggaacaagacccggatattccaggcgacggtcttgggtagtcagatgggattgaaagg

SEQ ID NO: 37287 - DNA, 779 bp, Macaca Mulatta
  misc_feature (1)...(779): n = A,T,C or G
ggcttttcatgtaatcaatttttttcttattgagatatgttaaaacaatctagtagaatcatattaatagcagaattagcaaaaagaaatagaatattgaactatccttacaagaaaatgtcctgacttggttatggtgtgcatttttaatgcacagctgaatttgttaatattttaattttggattttttaaatgtgcagctggattttgtaatattttattttggaatttttgcagttatatccataagttatacttattggcagtggcttttgtaatgtttacgtgtttaattttgatgctatctttgccaagttttaatgtcaacattgctctggttttatataaatgcaagagttttctttttctgtagtaaatagtttccacagatcatcagaactctcctgtgaaatcaaatgagcctgcagcatttgctgtagtcacacgtccataatgtttttccagttccttccagggtaatttgttcctgctaaatattctaatcttttgggtgggtcacattttgnnnnnnnnnnnnnnnnnnnnnnntccaaaggttttttcccgttttatttggaaataccttttggaattaaaacataacctttttataaatttccttacggcccgtaagacaacgaccgcacttaaatgtaaatagatcctttggttggcccggcccttcgggccctttagaaaaaagccttttcttaaaacccaatttctttttgggggccccccgggggccccattatgggggtaaaggtggaaaaccatg

SEQ ID NO: 37288 - DNA, 718 bp, Macaca Mulatta
ctttcccaccccagagtcagtgcactctgccaaggatggccttgggagcacagcagagagggctcgctgtgtggagggaagagggcttgccccctaagaatggctgacatcataccggaaggatttggtggggagcaagggaaaccccagccctaaaaggacccctgaacccaagggaagaggagaagaggctgctgaggaaacaatctgtaaaaaggggaggggtgaggtcaggatgggtcccagggccttaccactcctgtgcccaccaacccaggactggtacttcaagaccccactgggcaagaagagcatgaagcacaggatggaccagttggaggctgaggaggccaagctggccaaggagaagaagaaaagaaagtgatggctaaggcttgtgggtacctgagattagtggtgtgggacagggcagtggcccaagggtaaagggatggggcagaggcataaacgcccagatgacttggggacaaactcttcttgtccatccatgtccgtgtcttcctacccctccctctgtgtccccacctgtgcctggccctgtctagcccccacctctctcctgggccctggcccttgccagttcactgccgcctccctgctctggctcccagatccctgtcctcagcccccacttccaggtcttcatctccttgtcattgtcctatcctggttccctgactctcttcctccttgaggc

SEQ ID NO: 37289 - DNA, 664 bp, Macaca Mulatta
aaaagtcaacttttttgctgtatgtctagatttaaaactgtggacttctgtagcaattgaaccaacaaagcccattttacttagaaaggaggcatattttgataagctttctgaattatgccatttccaagatttttttgacacttaaaaaacaagctacaggttattcagtagcatttgtacaaagaacaatacctacttttgttgtgaataatcttttccctattttccatttgacttcttggagcagtatatgtcaggatgtgttgcaagaaagcgcagcactctggacatcttttctatgtctttttgtttggtttgtttttaagaatgaccccaaactgaaccatggtagagctgttagcttgtagggcccccagatggcataaactcgagaagcgattgtccacggaaatcaccagcagacttcagccccacgctgagttcaggaagtccagctgtcactgttgggaaacatctaggagtcttccttggatccataagaagctcttcccctgaggcagcacagctaattttactctctacctgccacaactcagtcaagaactggcacctgtagccatctgggtaagcctcgatgcttctttcagggatgtgacacaaatggcaactcagagctatttgttactgcttgtctgtcaag

SEQ ID NO: 37290 - DNA, 796 bp, Macaca Mulatta
  misc_feature (1)...(796): n = A,T,C or G
tttttaaaaggtaaatatttttcggtaaaaggggtttggggcaaaaaaaccaatggtnnnnnnnnnnnnnnnnnnnnaacccccccatttggccctttaaaataaaaaaagttaatggcctaaattataatttttttaaagtgggtttgggaggaagttaatttgtgttcctgtgttgtggtgtgtggggggtggtgtacattcaattttcttcccagtaaaattcaaagtgaagaaaaaggaatctttggtattacttttcctttggtgaatgaaagatcatgtaccttcataagttaaaatgtcctagtgtacttctatacagaaaccccatctgaaagttcaccaacatcaaagatgaaaggtagataaatccacgaagatgaggaaaaaccagtgcaaaaaggttgaaaattccgaaaaccagaatgtgtcttcccctccaaaggatcacaactcctcgccagcaagggaacaaaactggacagggaatgagtttgatgaattgacagaagtaggcttcagaaggtgggtaataacaaagtcctctgagctaaaggagcatattctaacccaattcaaggatgctaagaaccttgaaaaaaggttagaagaattgctaactaggatacccagtttagagaagaacataaatgacccgatggagctgaaaaacacagcacaagaacttcatgaagcatacacaaggaacaacagccaaatcaatcaagcagaagaaaggatatcaaagattgaagatcaacttaatgaaataaagcatgaggacaagattacc

SEQ ID NO: 37291 - DNA, 700 bp, Macaca Mulatta
  misc_feature (1)...(700): n = A,T,C or G
agaacaacatatttgaagtctattcntttanaatgccctactcagctgtgtaatatttagaaaagtagaaggagtctgtattttaaatatttctaggcaattattgtgggacattgtcttatggtgtcatgatgtatgtggggnnnnnnnnnnnnnnnnnnnncatgtgtctgtgcgtgtgtgaggaagagacagagaaatgtatgtttcactgaaaagtttgaaatgaccaatttcactttattctgcctgtaaaatgttagnnnnnnnnnnnnnnnnnnnnntatnnnnnnnnnnnnnnnnnnnnnnnnnnnnnnnnnnnnnnnnnnnnnnnnnnnnnnnnnnnnnnnnnnnnnnnnnnnnnnnnnnnnnnnnnnnnnnnnnnnnnnnnnnnnnnnnnnnnnnnnnnnnnnnnnnnnnnnnnnnnnnnnnnnnnnnnnnnnnnnnnnnnnnnnnnnnnnnnnnnnnnnnnnnnnnnnnnnnnnnnnnnnnnnnnnnnnnnnnnnnnnnnnnnnnnnnnnnnnnnnnnnnnnnnnnnnnnnnnnnnnnnnnnnnnnnnnnnnnnnnnnnnnnnnnnnnnnnnnnnnnnnnnnnnnnnnnnnnnnnnnnnnnnnnnnnnnnnnnnnnnnnnnnnnnnnnnnnnnnnnnnnnnnnnnnnnnnnnnnnnnnnnnnnnnnnnnnnnnnnnnnnnnnnnnnnnn

SEQ ID NO: 37292 - DNA, 1180 bp, Macaca Mulatta
  misc_feature (1)...(1180): n = A,T,C or G
aaggttgtgggccctaaacaaatccaagtagctgaagctcaaaacgtccttaaaattgcgcgacaaagactggctgagaaacaaagaggtttacagctnnnnnnnnnnnnnnnnnnnnnnnnnnnnnnnnnnnnnnnnnnnnnnnnnnnnnnnnnnnnnnnnnnnnnnnnnnnnnnnnnnnnnnnnnnnnnnnnnnnnnnnnnnnnnnnnnnnnnnnnnnnnnnnnnnnnnnnnnnnnnnnnnnnnnnnnnnnnnnnnnnnnnnnnnnnnnnnnnnnnnnnnnnnnnnnnnnnnnnnnnnnnnnnnnnnnnnnnnnnnnnnnnnnnnnnnnnnnnnnnnnnnnnnnnnnnnnnnnnnnnnnnnnnnnnnnnnnnnnnnnnnnnnnnnnnnnnnnnnnnnnnnnnnnnnnnnnnnnnnnnnnnnnnnnnnnnnnnnnnnnnnnnnnnnnnnnnnnnnnnnnnnnnnnnnnnnnnnnnnnnnnnnnnnnnnnnnnnnnnnnnnnnnnnnnnnnnnnnnnnnnnnnnnnnnnnnnnnnnnnnnnnnnnnnnnnnnnnnnnnnnnnnnnnnnnnnnnnnnnnnnnnnnnnnnnnnnnnnnnnnnnnnnnnnnnnnnnnnnnnnnnnnnnnnnnnnnnnnnnnnnnnnnnnnnnnnnnnnnnnnnnnnnnnnnnnnnnnnnnnnnnnnnnnnnnnnnnnnnnnnnnnnnnnnnnnnnnnnnnnnnnnnnnnnnnnnnnnnnnnnnnnnnnnnnnnnnnnnnnnnnnnnnnnnnnnnnnnnnnnnnnnnnnnnnnnnnnnnnnnnnnnnnnnnnnnnnnnnnnnnnnnnnnnnnnnnnnnnnnnnnnnnnnnnnnnnnnnnnnnnnnnnnnnnnnnnnnnnnnnnnnnnnnnnnnnnnnnnnnnnnnnnnnnnnnnnnnnnnnnnnttagatgatgaagaaattatagataccttaagaaaatccaaaatgacatcaaatgaaatttcaaagcgcattgaagcaacaaaaaaagctgaaagtgaaatccaagcaatacgtaaaaactatctccccattgcaacccgaggtgccctgctctactttctagtagctggtctcacgcaaatcaactacatgtaccagttctccctagactggtttcatcaggtttttgttttgtcagtagtttccaaaagcaaagaaca

SEQ ID NO: 37293 - DNA, 760 bp, Macaca Mulatta
  misc_feature (1)...(760): n = A,T,C or G
gnnnnnnnnnnnnnnnnnnnnnnnnnnnnnnnnnggccaaaagataggttttcttacaagatttttcttcagaattgtttatcaggcttaggaactgttatttgtgtctgtctgtgcttaatttttctgtttaaannnnnnnnnnnnnnnnnnnnnnacccaaactaagacaagttttctttgaggtcatgtttctttctcttagtattcaacatgtgtgagaggattttctgtttggaaagaggaaatttcaagaaaagcaggggactaaagtagaattttgtttgtttgcttgtttttgtttgagatgcagtcctgctctgttgcccagactagagtgcagtggcacagtcttgactcgctgcaacttccacctcccagatttaagcaactctcctgcctctgcttcctgagtttctgggattacaggcatgtgccaccacannnnnnnnnnnnnnnnnnnnnnnnnnnnnnggggattttnnnnnnnnnnnnnnnnnnnnnnnnnnnnnannnnnnnnnnnnnnacccacttcggcctcccagaatgctaagattacaagtatgggccatagcgcctggctgactnnnnnnnnnnnnnnnnnnnnnnnnnnnggagtctcactctattgcccnagctggagtgcantggcgtgatcttggctaactgncagctccgcctcccaggttcacgccnnnnnnnnnnnnnnnnnnncctgagtagccgggggactacaggcactcacccaccatgccccan

SEQ ID NO: 37294 - DNA, 179 bp, Macaca Mulatta
gactgtaggaggtcgagacaggtacaggaggcaccacactacgctattgacacagcctggatccagagttcagcagaacttgagacaatgaaaacaaatttagtaataatcatttttcaatcatcgcagtacttattgatttggacaaaaatcagttaatgtcaaacacttaaagtgaa

SEQ ID NO: 37295 - DNA, 820 bp, Macaca Mulatta
  misc_feature (1)...(820): n = A,T,C or G
ggtgatttgtatcgtatgattaaggatctaaggtacaatatttgtcactgttctattagactttttactgaaaatgaataatggggtaatagttctcctggggctgtcacattttataggtcagagtgtgacttcttaatacggtgctgacatttttgtgtcaatgacttgaaactggcaagattaacaaaattaggcagggcgtnnnnnnnnnnnnnnnnnnnnnngnnnnnnnnnnnnnnnnnnntgggcannnnnnnnnnnnntnnnnnnnnnnnnnnnnnnnnnnnnnnnnnnnnnnnnnnngcnnnnnnnnnnnnnntnnnnnnnnnnnnnntgtggtggtgggtgnnnnnnnnnnnnnnnnnnnnnnnnnnnnnnnnnnnnnnnnnnnnnnnnacctgggaggtggaaggttggagttgagcttgagatccgtgccatttacactttcagccctggggaaacagagcgaagaatcctgttctcagagagcagaaaaaaacgaaaattaattgttgacctaaaagaacagggaaacccttatgccaggacccgagttacgcccccgattttttgtttagctggaacttccttgatggccacttgttgttaatgggacctctaaaaaagcggggactttagattgggaaaacaatattccccaaattatcccaggcaaggccaaagtggtgtgggaaaaaaagaaaggggcaatgtaaaacagtgctccatttgggcgagaatacctccaaggagagctctatttccttgcacgcccgggcacataagaaaacacgtcccatgcttgataatgatg

SEQ ID NO: 37296 - DNA, 807 bp, Macaca Mulatta
  misc_feature (1)...(807): n = A,T,C or G
gggtaagtatatatatggaaagaggtgtaagtacttgccacctgaatctattctctcctgttttctgcttacacctttcatctcataacattactactatagaatagcctaggactggagtgggcataagtttgagcgttctcttagctcagtgtaacagccccacttagaaaaagaaagtgattttgatattagcaatattaaaatttcttgattaatactccagaggattcggataaacactcaagtgcttcgtttttttagcacaatagacaaagaagaaaatgttaaccacggtataaaataaagattttggtagtttcatgctctttatttgctttgattaatccgtggannnnnnnnnnnnnnnnnnacttatttaaatgggcagaaaagactaacggtaggttgattcttatttctgctaaccacagtgtaaactggttgtcacgaatcctgttcaccaaacatttccggctctgcctacctggcacatggtaggattgttccttttggcctctcgtgatctggtcccagccatgggatgtcctgggcgtgagttctgagcattttttttccaaacctaacaacatgaaggtgggttgtgctttgaatgaccgtaatgaaaaccccatgaacgttgcaaggatgccaaagtaattgtgaaaaaagaaaataagcccttttttaattggggacccaggcttaaacctgccctaacccggactggaaaccttaaagaaatgggtaaggcccaaggcgcgggtgggccccatgccttgtaaacccccaccaccttttgggaag

SEQ ID NO: 37297 - DNA, 726 bp, Macaca Mulatta
  misc_feature (1)...(726): n = A,T,C or G
tgcacaagttcagtaagcatcatactacttataacaggacacatatgaaaacattggttatattaccaaggctttgactgggaagttctatgtgagaatacacatagaataaacccatagggaatgcaggcaaagtctaaagttggccttggtttggcttcctagcctcaagaggttttaaaagtttgatctgagattcttataaaacttctatcnnnnnnnnnnnnnnnnnnnnnnnnnnnnnnnnnnnnnnnnnnnnnnnnnnnnnnnnnnnnnnnnnnnnnnnnnnnnnnnnnnnnnnnnnnnnnnnnnnnnnnnnnnnnnnnnnnnnnnnnnnnnnnnnnnnnnnnnnnnnnnnnnnnnnnnnnnnnnnnnnnnnnnnnnnnnnnnnnnnnnnnnnnnnnnnnnnnnnnnnnnnnnnnnnnnnnnnnnnnnnnnnnnnnnnnnnnnnnnnnnnnnnnnnnnnnnnnnnnnnnnnnnnnnnnnnnnnnnnnnnnnnnnnnnnnnnnnnnnnnnnnnnnnnnnnnnnnnnnnnnnnnnnnnnnnnnnnnnnnnnnnnnnnnnnnnnnnnnnnnnnnnnnnnnnnnnnnnnnnnnnnnnnnnnnnnnnnnnnnnnnnnnnnnnnnnnnnnnnnnnnnnnnnnnnnnnnnnnnnnnnnnnnnnnnnnnnnnnnnnnnnnnnnnnnnnnnnnnnnnnnnnnnnnnnnnnnnnnnnnnnnnnnnnnnn

SEQ ID NO: 37298 - DNA, 546 bp, Macaca Mulatta
  misc_feature (1)...(546): n = A,T,C or G
ggagttcgagaccagcttgggannnnnnnnnnnnnnnnnnnnnnnnnnnnnnngnnnnnnnnnnnnnncatggtggcaggnnnnnnnnnnnnnnnnnnnnnnnnnntctgaggcatnnnnnnnnnnnnnnnnnnnnnnnnnnnnnnnnnnnnnnnnnnnnnntgnnnnnnnnnnnnnnnnnnnnnnnnnnnnnntgacactctgtctcnnnnnnnnnnnnnnnnnnnnnnnnnnnnnaactgtaaaacagcctccaggcagtttccccttcaggacctttttttgggaggttatcccgggaaaaaagggcaactgttcggtccattaaaatgaaccagcctggtaaaagttgtttaactggccccccctgaaaaaaacccttttccaagtgggggggaacaaaaaaattgttgggaaagggnnnnnnnnnnnnnnnnnnntggaaccatttgggaaattgaaacccccctgggaaaccccctttggttggcccaaaaacccccctttaaggggcccataaaacccggttttggggagagagccccn

SEQ ID NO: 37299 - DNA, 627 bp, Macaca Mulatta
  misc_feature (1)...(627): n = A,T,C or G
gactctacataccnttccttgnaattcagaaatggatgcaaacacatacgaannnnnnnnnnnnnnnnnnnnnnnngatgcatgaaaaaattttgacttgtggattacattaattattagtagctgttagattctgccgacttgtattacagtagggtcttatttctttnnnnnnnnnnnnnnnnnnntcatgccccacttaatgatgagggaaacattcagagaaatgcatccttaggttattttgtcattgtgtgaacgtcacagagtgtatttaacacaaacctagatggtacggcctctacccacctaggatatatggtctagcctattgctcctgggccgcaaacctgtacagcatgttactgtactgaacactgtaggcagttgtaacacaatggtatttctgtatccaaacattttagacatagaaaaggtacagtaaaaatatggtataatcgtatgggaccatcatggtatatgtggtccatcattgatggaatcgttgttatgcagcacatgactctatataatcaaacgactgtactttgttgttttcgtatgtagtgtatttgctttacacatttgatagggaacatagaacttgtgacctttcatttcagtgga

SEQ ID NO: 37300 - DNA, 784 bp, Macaca Mulatta
  misc_feature (1)...(784): n = A,T,C or G
gggctggatgcagtagcatgtacctgttagtgnnnnnnnnnnnnnnnnnnnnnnnnannnnnnnnnnnnntcccagaagtctgaggttactatgatcnnnnnnnnnnnnnnnnnnnnntgcaacagggcaagaccctgtcttaacaacaaaagagcgaagtgtgtttgtgtggtgtgggcttttgctcaaagtcatggcttgattgatttcctgattgctaccagcggtggattgatgtagttctcaagtatgagatgtacagatgggcaggcagtgcacacacaaaggctcctgggctgaggaggggactgaaatcatccagcgttccccttagtcaagctgtgagtcctggtacgtactgcctcagatgggaggaagaggcgcatttttgtaattccaccacccaaacaaaggtgggaggagtgctttgggcaactcactggcacccacagggtgcctttttgtgattcccacaaaggcatcatatgttctagaagtgatcccagagttttgatacacaaagcctggaactacccaaattttgtccttctagtttcttccctgacttcttcctggttatggtgggggtttttaagtatagatctgtaggccaggtgcgggtgccttnnnnnnnnnnnnnnnnnnatttggggaggcccagggcagnnnnnnnnnnnnnnnnnnnnnnnnnntgaaaacagccctggccaaacatggcgaaacccccatctctaactaaaaataccaaaaattacctgggccttgcctgaccccccaccctgc

SEQ ID NO: 37301 - DNA, 544 bp, Macaca Mulatta
tatccctgtgacatttcgcctctgacaatactggtataattgtaaataatgtcaaactccattttctagcaagtattgagggagctgtgtctgaaatggcactgtcttgtcagtcatttctgtttaccttttctgcccagagtatatttgtgaagagtctcttaatagttatgtttcgtggaaatcaacacataaccacaacgacttttaagcacaggatcattagtctatgtttttaataaacatatcgattaagaaaaattgggtttctatttttcttatcctactttttgctgcaatcactagtgagactattataatattgagattattgcaagcttcagtaagttcgtcttattttggactagagaatttgccaatcctgatgaagcgtcattgtgttttattgccaggcagtcttaatgaaaggtagcattactgcttgatgctgagtatatgaaatattagtaccaccaaaggaaaaaagtactatatttttaagccaaatagttctccaagtttgttgtgtcggtggggggatagt

SEQ ID NO: 37302 - DNA, 288 bp, Macaca Mulatta
ccagcagacggcccaggccagggtaggcagtgcctgcttctgctccatcaggtgcaggggatttggctgaaggcatgcatagttcctgggcacaaacttcctgagcttctgaaatcggaggctcatcaatttcagaccaacctcttttcaacccttcaacccatcatagcacgctcaaggtgtgccttttacttccacctgtacatcccccattccttcaattctttcattccctaaccagtgagagttcctggtggaagtgtggtgaataaactgacatgcatgcta

SEQ ID NO: 37303 - DNA, 1094 bp, Macaca Mulatta
  misc_feature (1)...(1094): n = A,T,C or G
cagcctaactcaaggggccttggctcattctggaaaccctgtatcaaaaggagttcatgaagaccatcaactggataccgaggctggggccccacgctgtgggacgaatccacagcttgctcagnnnnnnnnnnnnnnnnnnnnnnnnnnnnnnnnnnnnnnnnnnnnnnnnnnnnnnnnnnnnnnnnnnnnnnnnnnnnnnnnnnnnnnnnnnnnnnnnnnnnnnnnnnnnnnnnnnnnnnnnnnnnnnnnnnnnnnnnnnnnnnnnnnnnnnnnnnnnnnnnnnnnnnnnnnnnnnnnnnnnnnnnnnnnnnnnnnnnnnnnnnnnnnnnnnnnnnnnnnnnnnnnnnnnnnnnnnnnnnnnnnnnnnnnnnnnnnnnnnnnnnnnnnnnnnnnnnnnnnnnnnnnnnnnnnnnnnnnnnnnnnnnnnnnnnnnnnnnnnnnnnnnnnnnnnnnnnnnnnnnnnnnnnnnnnnnnnnnnnnnnnnnnnnnnnnnnnnnnnnnnnnnnnnnnnnnnnnnnnnnnnnnnnnnnnnnnnnnnnnnnnnnnnnnnnnnnnnnnnnnnnnnnnnnnnnnnnnnnnnnnnnnnnnnnnnnnnnnnnnnnnnnnnnnnnnnnnnnnnnnnnnnnnnnnnnnnnnnnnnnnnnnnnnnnnnnnnnnnnnnnnnnnnnnnnnnnnnnnnnngcatttgcacaatatacacaaaagaatatggggttgtaatgatcctgaatagctcaaaaaaggttttagcatggtcaaacaggcttatggtttaaactgtattattctcttctttgggaattagctaaatgatgcaataaacctgttttgttttagaatttctaggaattaaacactttatgtttacaaattgagttgcagaaagtgcaagacatgccaatttgagacacacagtcttctaagactggaggataaatttaatgcatttcagaaactaaacatcacagcaagctctatctctgagctataatttgtttttaatacaaagacactagtttgataatatatactgtaatcctgaaacatttgtgttacttacctttggaggtagaaattataccaataaatta

SEQ ID NO: 37304 - DNA, 315 bp, Macaca Mulatta
tatttcagtttttctaagacagtgcgggtggttcttgcttacctgtctcctaactttgtctttggagttcttccatgaatccatctgctgcagttttcaatacaaaaaatccttccatgcgctcagttttattctttaaagtgctgtcaaactggtatagatagcaaaactcactctggatcccagtctggtgtgttgtcaatgacaaggccctacacttggtccgtgagcaaatatgaatcctaggtaccccgtgatgtatgtgggcgtgattggtttattccatcaaataaatacttttactgccaaagccct

SEQ ID NO: 37305 - DNA, 903 bp, Macaca Mulatta
aacaggggtaccggcctgtgtatcgacaaacggtgggaaggggaggaagcgtggaacgagtgacatggatcggcggggcgccagacggaggaggacctggcgagaggggtgtacgacgacagggaccggcgtcgaaacggcggtgcgacaaccccggaaccgggcggacgcggcatgggagaagggtaaggggcaggaggtagggggggagtcacgcaggggaggtgccaagaaagttgccaggtcagcggccgagcgcgctgaataagacatttgtgggggaacccgcagacggcgatggcacgagggaagaagaccccccagggaagcgagcacagagacaataaggtcaagaactcgaaaaggaggttccgtgagaagtggcagaaggtcgaaatgaggcgcataaagaacagcgggtagcattgtgatacggtcgggaggtatcgagcgggagaaatcaggaggccatgtagggtagcataaacaaaattcgtgggaataaatggaacaccaaggcagtaaaagaattgtacactgaaaactatgaaacactgatgaaagaaagacacaaataaatggaaagatatcccgtgctcatggatcagaataatattgttaaaatggtcacactacccaaagcaattcagaatcaacgcaatcctatcaaaattccaatggcattatttacacaaatagaaaaaaaatcctaaaattcatatgtaaccataaaagacctgaataggcaaaacaatactgaggaaaaaaagttggagacatcacatttcctaattataaattatattacaaagctatagtaatcaagacagtatggtactggcataaaaacacatacatagaacagtgggatagaagaaagaacccagaaataaatccaaaccc

SEQ ID NO: 37306 - DNA, 806 bp, Macaca Mulatta
  misc_feature (1)...(806): n = A,T,C or G
ggtctgtctatgtgtttatatgtgtggtgtgtatgtgatgtttcactaccaaaatatattaaagggctctaattaattggcttaaagaaaaaagtaagtgcttaaatcaaatgtgttaacacaaaaatagaaactttaattcaaatgcctcatagttcacatgactttactaatctttagtaaattaagacaatttaaaaattattggtaaaataaaaaaagtcttcagaatttaatttagacattttgtctgagtctattgatcagatactatctctactagatgttttaaggcataaaacttgcttgtatgatttgttttgatacctaacttgtatataagcttatgtctttagatttgtttatttgtttaatttttttggtgatgcagtcttgctctgtttgttacctacgctagagtgtggtggtgtgatcttannnnnnnnnnnnnnnnnnnnnttgggttcaagcannnnnnnnnnnnnnnannnnnnnnnnnnnnnnnnnnnnagtgtatnnnnnnnnnnnnnnnnnnnnnnnnnnnnnnnnnnnnnncacannnnnnnnnnnnnnnnnnattggctggacttnnnnnnnnnnnnnnnnnnnnnnnacccgcttcagccctcccaagtgctgtnnnnnnnnnnnnnnnnnnntgtgcccagccctatgtctttagaatttagtttttaggatatgacaaaggcctagcttcaaggcattgtccttttgttcttggacttttgcatcttggtacattaattaaaaactggcttaacttccctgggtttttttcacctaaa

SEQ ID NO: 37307 - DNA, 740 bp, Macaca Mulatta
  misc_feature (1)...(740): n = A,T,C or G
actctccacaaaaccgctgaaaaatgaatttttccctgtatcaatatgaaaagaaatccagagatttgaggaaaatcaagtggattacagataagaagggacagcatgaacaaacaaaacagttgatcctcaaacagataatgtaggaaacagaagggtaagttacgagtatccttggaggttacagagggcagtggatccaccaaccataacaaaaaactgcagtgaaaaagggtaatcagagaccaagaaagtccttggaattcaagataatacatggttacttaagtaaacattctatcgagaactaagtaatagactagacattgctgaagatctaatttgataacatatgaagcatgtagaaaacaaagatgttggaaatatgaggaaaatggttttttaagaaaatggacaaaacatacattatttatcttacaaaatgcaaatattagaaagaagatagttttttaaattgaagaaagtgtcctgagccaggtgnnnnnnnnnnnnnnnnnnnnnnnnnnnnnnnnnngaggctgaggagannnnnnnnnnnnnnannnnnnnnnnnnnnnnnnnnnnacaaacatggtgaaaccggtttnnnnnnnnnnnnnnnnnnnnnnnnnnnnnnnnnnnnngctcatgtaatctcagctactccggaggctgaagcangagaatcatttgaacccangnaggtggaggttacagtgaagcgagatcacaccactgct

SEQ ID NO: 37308 - DNA, 1739 bp, Macaca Mulatta
  misc_feature (1)...(1739): n = A,T,C or G
ggacatttctgattcatttgcatccttgaagagcatctgtagaagaggaagtaaaagaagggtgtgaaaacgtttactcatagctcctcttcccacagccaggaaatgctggaaagctaaatatgctgcgaaatgnnnnnnnnnnnnnnnnnnnnnnnnnnnnnnnnnnnnnnnnnnnnnnnnnnnnnnnnnnnnnnnnnnnnnnnnnnnnnnnnnnnnnnnnnnnnnnnnnnnnnnnnnnnnnnnnnnnnnnnnnnnnnnnnnnnnnnnnnnnnnnnnnnnnnnnnnnnnnnnnnnnnnnnnnnnnnnnnnnnnnnnnnnntacacagccactctatcaattaacacagaaaatattattgatgttctagcagcagccagctatatgcaaatgttcagtgttgccagcacttgctcagagttcatgaaatcaagcattttatggaatacacctaacagccaacccgaaaagggtctagatgctggacaagaaaataattctaactgcaattttacttctcgagatgggagcatttctcccgtgtcctcagagtgcagtgtggtagaaagaacgattcctgtctgccgagaatcccggagaaagcgcaaaagctacattgttatgtctcctgaaagtcctgtaaagtgtagcacacaaacaagttcaccccagatattgaattcttcagcttcctactcagaaaatagaaaccaaccagttgactcttccttagcttttccctggacttttccttttggaattgatcgaaggattcagcctgagaaagttaagcaagcagaaaatacccggactttagaattacctggcccatctgagaccggtagaagaatggctgattatgtgacttgtgagagcacaaaaactaccttgcctttaggtaccgaagaagatgtccgggtcaaagtagaaaggttaagtgacgaggaggtccatgaggaagtgtcccagcctgtcagtgcatctcagagttccctgagtgatcagcagacagttccaggaagtgagcaagtccaagaggaccttctgattagtccacagtcttcctctatagnnnnnnnnnnnnnnnnnnnnnnnnnnnnnnnnnnnnnnnnnnnnnnnnnnnnnnnnnnnnnnnnnnnnnnnnnnnnnnnnnnnnnnnnnnnnnnnnnnnnnnnnnnnnnnnnnnnnnnnnnnnnnnnnnnnnnnnnnnnnnnnnnnnnnnnnnnnnnnnnnnnnnnnnnnnnnnnnnnnnnnnnnnnnnnnnnnnnnnnnnnnnnnnnnnnnnnnnnnnnnnnnnnnnnnnnnnnnnnnnnnnnnnnnnnnnnnnnnnnnnnnnnnnnnnnnnnnnnnnnnnnnnnnnnnnnnnnnnnnnnnnnnnnnnnnnnnnnnnnnnnnnnnnnnnnnnnnnnnnnnnnnnnnnnnnnnnnnnnnnnnnnnnnnnnnnnnnnnnnnnnnnnnnnnnnnnnnnnnnnnnnnnnnnnnnnnnnnnnnnnnnnnnnnnnnnnnnnnnnnnnnnnnnnnnnnnnnnnnnnnnnnnnnnnnnnnnnnnnnnnnnnnnnnnnnnnnnnnnnnnnnnnnnnnnnnnnnnnnnnnnnnnnnnnnnnnnnnnnnnnnnnnnngtgatttcctagtaccggactacttaaaccaggaacaagaagagacccttgttcaatatgatcttggagaacacggttttgaaagcaactcctctgttcaaatgcctgtaatttcacag

SEQ ID NO: 37309 - DNA, 822 bp, Macaca Mulatta
ggggttgtctggccacgagagccaggcagtcacctagctgctcttacactgcatgcctgtgtctgagtactcatttcatccatcggccggggtatgcaggtcagacccaacaagagcccagctaagatgaactgacttgcctacacaaccaccccagaatcggtttatttacttctgggaccgtcacagaactgccgccaatgcacatcgctgccttttgttgctgtcagaaggggaagtggtgaagatttcaggcagatggtgggaaatctagaggcaattgtacgtcctgtaatccttggccaggcacttcttcttcctgctgccatgtgaagaaggacgtgtttgcttccccttacatcatgatttctcctcttggagttgaagcaacagagaagaagaaagacttttgtgggatatttttttcaacctctctctgcagtcatcaaaggagaaattgaactgccacaggtgcacagtgatgtgtttggtggtcaggagggtggtgagacacggagattcattgagcattagcagatgaccctgaagcttcttaccacaggaccatctgcagaattttcttcctcaatgaactgcaccatcttccaccaatttacaaaagtcaggaacaatggtgatccttaacacctctcttttctcccacgaataatccattgctgatccccattgatttgacttcttaaacatttctggaatcaatcaactctccacctccatcatcactcccaggccaactgatcattatcacctgctggactactgaactttcctaattggcccttttactgattatgccatcac

SEQ ID NO: 37310 - DNA, 757 bp, Macaca Mulatta
  misc_feature (1)...(757): n = A,T,C or G
ggggagttatttctagaagtcctagaattaatgatctcatatatgtttttgcagccagtggcaactttagaaatgttaatattagaaagagtctcatagtgcttatgtgatatcattctttgcctaaagcttttgtacctactgtaatgaagctaaacttcttggcacaggatataaagctcacgatctggcctggcctcattttcactcccatattcagttatcccctaattccccaacagtcagtccccaaagatgccatatgctttcacttctccatgcccttgctcatttctctcattgcctgaaataatccttttatttcatcaaattgctgctcatcctcaaggccctgcccaagtcacctttcctccttgcttcctcccccttgcctactctttccactaccctaagaaaattcatccctcccccttcattaatatcatgcacatgcttgttactatatttaacacattgtatattaggtatttgttttgcttatccgatttttatcccatganattgtgaacaatttgttgaataattgaataatcacatatcaaaatgcagagagattatttgtcctgtaggactcctataatccctgtaggactccattttcaggcagtggtctgataagaatccccctcactggggggttgggaagtccgttttctcccaccacctgaaacctcctttatatttaacctccctcacttcctcacccccctttggtttccgttctccttgggcacta

SEQ ID NO: 37311 - DNA, 341 bp, Macaca Mulatta
ttagcaacttttattgaagtggccagtggcgcacagcagcaacagaggtgctgctccttgcagagcagggctgcgccataggctgtgtgcccagagtagcagctcagaggcagttctgcagtcctgtttgtacccacttttaattatatgcaaattaaggggcagttaatgcagacatttccagggcgagggtggtaacttctgggttgtcgggtcgttgccatggaaaggggcggtaacttctcggccgttgccagagccacggtgaactgacttggcacaggtgggtgtgtcctgtggaaactggcatctgcatggaccctgttttagctaatgctcag

SEQ ID NO: 37312 - DNA, 772 bp, Macaca Mulatta
  misc_feature (1)...(772): n = A,T,C or G
ggtgcctttgcactannnnnnnnnnnnnnnnnnnnnnnnnnnnnnnnnnnnnnnnnnnnnnnnnnnnnnnnnnnnnnnnnnnnnnnnnnngaaaatgagaccagtgacttcaactggctagtgttaggttgaatcaatataattcctatcaagttcttaatatattgctgggtaagtgaaccataaatgtgtctctggttggtggtgttgtagcccttcagagtcagctggagaaatacttcacaaagctttccttgactgtctttattatatacttagtttttgtttctctatgtttctacttcactagttcatgcttcccttatataaccctttttgtcttctagtttcatactctaagctccttgaaggaaggccttatgccttttcattcacgtatttcaatgcctaatacagtatctgcatcgaactaatgctcagtaaataatttttgaatgaatcctcaaatgaattttacatcttgtgaactgaaatttgttcttagtcaatttttggtctgtatctgcatccacacttgcatctgaggctgtagaggcattgtttgatataaatagcttttagtagcttaatatgctatagccacgagggagataactctggaagcagaattgccctacgaagcacaaattntcacctaaaatttttgttccaactcaaaggaacataatttaatttcccaattcttttgtaatataccaaagaattgtaaaatgaaggcacccaaaaattaacctccttttgtaatttaaaa

SEQ ID NO: 37313 - DNA, 730 bp, Macaca Mulatta
  misc_feature (1)...(730): n = A,T,C or G
ggaccagaataattttggttacctatttacattttgaagacatttacactttattaataatttttgagactgattttattttttaaagattaaagttacataaactgaaaggtaccacagccnnnnnnnnnnnnnnnnnnatttaagcacttatttttaattagagctttttaaaatagacattacacacacaacacgtgtataaccacacaggaaaaaaaaaagatttagtagttataagattttttatttgccaacttttaactggattattggcctctgggtaaagccttttagggacaagactagaaatacagtttttatttacaggtctaggaatacagttgttagggattttatgagnnnnnnnnnnnnnnnnnnngatttgtgcttttcttgtttttaagaagttttaggccaccagagatgactttagggccttttangaatggagtaagaatgacagggcacagtggagaaaattaatttagttgaccggagaagacactaaatctacttccctgtttctgtggttttgcttgccccgaaaaccccaatcctttgcctctttggtttcccccagggcttgggaagccgccaattgggcccccgggttttccctgtcctgccactggaccaccctctcttggcccttgtccctgggcgcttgtcaaacatgggaactgttcctccccttgcacccctttacaagccctctcccctatgcgac

SEQ ID NO: 37314 - DNA, 824 bp, Macaca Mulatta
  misc_feature (1)...(824): n = A,T,C or G
ggctttagtaacagtaaattttctcaccttgatgattgctgatcagttcttttttagagtagatgagaatataaattgtcttatcttacccacaacagatttttggtggctgtattctattggccggagatggtagcacacatctacnnnnnnnnnnnnnnnnnnnnnnnnnnngggaggatagtnnnnnnnnnnnnnnnnnnnnnaagcttgagcaacatggcaagatcctgtctctacnnnnnnnnnnnnnnnnnnnnnnnnnnntatggtggcacatgactgtggtcctagctacttgggaggctaagatgggtggacctggaaagttgaggatacagtggtaaactgtggctgtgattgtgccccagcacctcagcctaggtaacagaccaagatcctgtctcannnnnnnnnnnnnnnnnnnnnnnnnnnnnnnnctattctatttatttaaataaataaaatatttatcaatccatttattatgtgtgaagacaccgggnnnnnnnnnnnnnnnnnnnnnnnnnncaaaggactttcatggatctagaaggatccagccaatttaaaagccttagtaatccatatttgtatttttagagaattagcccaaaaaagggaagcatttattttttcctcggccatggcaatcccaaaaatggttttccctttttaaaagttaaccggggaaaccccctcaatcatttccttccgggctcaaccataactccattataccttccttatactccgaaaggaaaaaggccaaaatttcctttacagggggtcccataaaatggcccgggcactgaatttgaacc

SEQ ID NO: 37315 - DNA, 157 bp, Macaca Mulatta
agatggtggcttagcaagtcgcctacagcagattcaagtgcatgtgttagaaagagaggtctgtgaacacacttactattcggcccatccaggagggatcacagagaagatgatctgtgctggcttagcagcatctggagagaaagatttctgtcag

SEQ ID NO: 37316 - DNA, 803 bp, Macaca Mulatta
  misc_feature (1)...(803): n = A,T,C or G
ggcaattgattacataaaccatgatctatccnnccnttcgcaatgttatatgaccatatttagttttctattggtgctgtaacaaattaccacaaacttagtgacttaaaataacacaaatttattatcctacagttcttcagctcagaagtccgaaatgggtcttaaagagctaaaatcaaggtgctggcattgctgtgttccttctgaaggctataggagagactctgttccatgccttttccagcttctagaggttgcctacattccttggctcacagtcacatcagtccatcctctgcttctgtcaacacatttcctgtggcttcaacccttctgcctccctttttcccttataagtacctttgagataacattgggctcaatgcataatctacccagttaattaaggataatctccgtaatttcaatcacatctgcaaagttcctttcaccatgcaacgtaaacatatttacaagttctgggttttaaaacctagatgtccttgggaaccattactctgtctactgacctaccgaagagaaaagaaacaaggaaagaaaatggggaaaatactattaattactgtactnnnnnnnnnnnnnnnnnnnccggaataccatccctaatagnnnnnnnnnnnnnnnnnnnnnnnnnnnnnnttttaataatttaacattttttatatattttattaagggaaaaaagggattttaatttaccatccattcctatgggaaaaatcaaaaaggcnnnnnnnnnnnnnnnnnntttttccctagaaaggccagtttaaaaaagg

SEQ ID NO: 37317 - DNA, 492 bp, Macaca Mulatta
  misc_feature (1)...(492): n = A,T,C or G
gcacgaggatgctcctcagntatggacagcaaagtgtgagtggttactgccaacagtgnccaacagccatattacagccagcagccgcagcccccacacctcccgccccaggcgcagtatctgccgtcccagtcccagcagaggtaccagccgcagcaggacatgtctcaggaaggctatggaactagatctcaacctcctctggcccccggaaaacctaaccatgaagacttgaacttaatacaacaagaaagaccatcacgtttaccagttgaagtcttggcctcggaggatacagcctttggactcaaggatctgtctggctccattgatgacctccccacgggaacggaagcaactttgagctcagcagtcagtgcatccgggtccacgagcagccaaggggatcagagcaaccccgcgcagacgcctttctcaccacatgcgtcgcctcatctctccagcatcccggcgggcccatctcactctcct

SEQ ID NO: 37318 - DNA, 1496 bp, Macaca Mulatta
  misc_feature (1)...(1496): n = A,T,C or G
agaccttcacaggttattcaacatcagagcatgcaccgtggactgaagccatacaaatgtgatgcatgtcaaaaggcctttaggtttctctcatccctctctatacatcagaggtttcatgttggcaacagactaaacctgactcggcaacaaaaaactcattctcaaaggaagcccttttcctgtaacttttgtggaaaaacctttcactgtttctcagaaaaaactcgacatcgatcaattcatactagaaagaaatactatccatgtaattattgtgaaaaggaattcaatccatactccaaatttattctacatcaaagaactcacacaggagagaaaccccacaagtgtgatgtttgtgagaaatcctttaaaagcatctcaaatcttaataaacatcagaaaactcacactggagagaagcccttttcatgtaatgaatgtaaaaaaacctttgcccagcgcacggatcttgctcgccaccaacaaatccataccggaaagaaatcttttatttgtagtagttgtaaaaagacctttgtccgtctgtcagatctaacacaacatcaaagaactcatacccggagagagaccttaccaatgtacgacttgtgaaaaaacctttaaaaatcagtcaaactttactaaacatcagaaaactcattctatagggaggccctttgcatgtaatgaatgtggaaagaccttttgccttaactggaaacttaatcaacataaaaaaattcatactggagagaaaccctatgaatgtggtgaatgtgggaagcgttttaacaataattcaaatcttaataaacacaagaaaatccatacaggagagaaacactttgtatgtaatcaatgtggaaaagcttttagcttaaactcaaagctttctcgacatcagataactcacaataaaaagnnnnnntcctttaaaagcatctcaaatcttaataaacatcagaaaactcacactggagagaagcccttttcatgtaatgaatgtaaaaaaacctttgcccagcgcacggatcttgctcgccaccaacaaatccataccggaaagaaatcttttatttgtagtagttgtaaaaagacctttgtccgtctgtcagatctaacacaacatcaaagaactcatacccggagagagaccttaccaatgtacgacttgtgaaaaaacctttaaaaatcagtcaaactttactaaacatcagaaaactcattctatagggaggccctttgcatgtaatgaatgtggaaagaccttttgccttaactggaaacttaatcaacataaaaaaattcatactggagagaaaccctatgaatgtggtgaatgtgggaagcgttttaacaataattcaaatcttaataaacacaagaaaatccatacaggagagaaacactttgtatgtaatcaatgtggaaaagcttttagcttaaactcaaagctttctcgacatcagataactcacaataaaaagaaa

SEQ ID NO: 37319 - DNA, 811 bp, Macaca Mulatta
gccaaggcgtggttcttgaaattccctggccctcaagggggatcccccccggccttgcccttcccaaaagttcttgggatttacaggaggggagccccccggggcccgggcctgtccttccagtataattagtccggttctccttatggtcagatattttttggagtgttttcaaaattttcattaaatgtaaatagccacggatgtggacattcttatacatgtttccctgaggggggtatgaggggtatttgcatttctctggggacatgacgtgagagtggaatttcggtgtgatagcacgtgagtgtctttcactccaaagttgtcttcacctttactcgatagtacacattgctttacacagtagtcagattacattccctctgcattgtactggtaattttattgagctgcatcttttccagtactttatattgtgaaacttttgagtttttgctcatctgttgatgtagaagtgataccttattgtttctaactttaatgctgcattttcctgattggagtgaggctgaatatcttttcacgtatttattggcctttcaggctttttctttttgagctgcctatttataacatgtcctcttccttccctcctcctttatgggtgacagggactcaggttcggagaagtagattcatcataatccttgattcacaacccattattatcattgatgtttgcatggcccttttatttgctttatttataatataatgaacacctatgagctcatcaggctctgagacattaccagcagcttcctgtacttctccccactccatctcc

SEQ ID NO: 37320 - DNA, 648 bp, Macaca Mulatta
  misc_feature (1)...(648): n = A,T,C or G
attaaaatttggtactnttgaggtataacagtcttttaaatatattagaagcactgtcttattggtttaaacttccatatatggaaaataatctatttctgtttgtcttctatacaggttgaatagccgttaccagaaatgcttggaaccagaggtgtttcagatttcaaatgtttttggatttttgaatacctgcattagacttacggttgagcgttcctactctgaaatgtgaaatgtttcaaagaacatttcctttgagtgtcacattagtagccaaaaagttttgaattttggagcatttcagactttgaattttcagattagggggctcagcctgtattaaaaatagttgagttcaataaagtaatgaaaacaagttgatgaaccagaactctgtgactgaattataaatctctggctaggcaaagattagtggctagctgtagatgactttaaactaaatatgaggctgtgccaaattgagattcccagggatttgtagaggactcatagaaagagagaaaaggaagaaatcttgttttgctatcagggcagagccagatcttaaggacacaaaggtacagcaatatcccacgattcagccttccagtttatgaggactcaactcctagagtccgagagcac

SEQ ID NO: 37321 - DNA, 3085 bp, Macaca Mulatta
  misc_feature (1)...(3085): n = A,T,C or G
aggtattacctgtataacctgatgttccagacctggaagacctacgtgcgtcagcagcaggagatgaggaacaagtacattagagccgaggttcatnnnnnnnnnnnnnnnnnnnnnnnnnnnnnnnnnnnnnnnnnnnnnnnnnnnnnnnnnnnnnnnnnnnnnnnnnnnnnnnnnnnnnnnnnnnnnnnnnnnnnnnnnnnnnnnnnnnnnnnnnnnnnnnnnnnnnnnnnnnnnnnnnnnnnnnnnnnnnnnnnnnnnnnnnnnnnnnnnnnnnnnnnnnnnnnnnnnnnnnnnnnnnnnnnnnnnnnnnnnnnnnnnnnnnnnnnnnnnnnnnnnnnnnnnnnnnnnnnnnnnnnnnnnnnnnnnnnnnnnnnnnnnnnnnnnnnnnnnnnnnnnnnnnnnnnnnnnnnnnnnnnnnnnnnnnnnnnnnnnnnnnnnnnnnnnnnnnnnnnnnnnnnnnnnnnnnnnnnnnnnnnnnnnnnnnnnnnnnnnnnnnnnnnnnnnnnnnnnnnnnnnnnnnnnnnnnnnnnnnnnnnnnnnnnnnnnnnnnnnnnnnnnnnnnnnnnnnnnnnnnnnnnnnnnnnnnnnnnnnnnnnnnnnnnnnnnnnnnnnnnnnnnnnnnnnnnnnnnnnnnnnnnnnnnnnnnnnnnnnnnnnnnnnnnnnnnnnnnnnnnnnnnnnnnnnnnnnnnnnnnnnnnnnnnnnnnnnnnnnnnnnnnnnnnnnnnnnnnnnnnnnnnnnnnnnnnnnnnnnnnnnnnnnnnnnnnnnnnnnnnnnnnnnnnnnnnnnnnnnnnnnnnnnnnnnnnnnnnnnnnnnnnnnnnnnnnnnnnnnnnnnnnnnnnnnnnnnnnnnnnnnnnnnnnnnnnagcggctacaggccagagcggatggtcatttccagcagagagccctgcctgctgccttccacacatggaagagactctggcgatggcgccagcaggacaatgtcctcaatgcaagagcaacacgtttccacaggnagggagacattagagaagcaagtattttctatctggaggcagaagacgtttcagcatcaagaaaaccgcctggcagagagaatggnnnnnnnnnnnnnnnnnnnnnnnnnnnnnnnnnnnnnnnnnnnnnnnnnnnnnnnnnnnnnnnnnnnnnnnnnnnnnnnnnnnnnnnnnnnnnnnnnnnnnnnnnnnnnnnnnnnnnnnnnnnnnnnnnnnnnnnnnnnnnnnnnnnnnnnnnnnnnnnnnnnnnnnnnnnnnnnnnnnnnnnnnnnnnnnnnnnnnnnnnnnnnnnnnnnnnnnnnnnnnnnnnnnnnnnnnnnnnnnnnnnnnnnnnnnnnnnnnnnnnnnnnnnnnnnnnnnnnnnnnnnnnnnnnnnnnnnnnnnnnnnnnnnnnnnnnnnnnnnnnnnnnnnnnnnnnnnnnnnnnnnnnnnnnnnnnnnnnnnnnnnnnnnnnnnnnnnnnnnnnnnnnnnnnnnnnnnnnnnnnnnnnnnnnnnnnnnnnnnnnnnnnnnnnnnnnnnnnnnnnnnnnnnnnnnnnnnnnnnnnnnnnnnnnnnnnnnnnnnnnnnnnnnnnnnnnnnnnnnnnnnnnnnnnnnnnnnnnnnnnnnnnnnnggtcctggtccagtggcgggaagctgtgtcagtgcagatatattaccgacagcaggaggactctgccatctgggnnnnnnnnnnnnnnnnnnnnnnnnnnnnnnnnnnnnnnnnnnnnnnnnnnnnnnnnnnnnnnnnnnnnnnnnnnnnnnnnnnnnnnnnnnnnnnnnnnnnnnnnnnnnnnnnnnnnnnnnnnnnnnnnnnnnnnnnnnnnnnnnnnnnnnnnnnnnnnnnnnnnnnnnnnnnnnnnnnnnnnnnnnnnnnnnnnnnnnnnnnnnnnnnnnnnnnnnnnnnnnnnnnnnnnnnnnnnnnnnnnnnnnnnnnnnnnnnnnnnnnnnnnnnnnnnnnnnnnnnnnnnnnnnnnnnnnnnnnnnnnnnnnnnnnnnnnnnnnnnnnnnnnnnnnnnnnnnnnnnnnnnnnnnnnnnnnnnnnnnnnnnnnnnnnnnnnnnnnnnnnnnnnnnnnnnnnnnnnnnnnnnnnnnnnnnnnnnnnnnnnnnnnnnnnnnnnnnnnnnnnnnnnnnnnnnnnnnnnnnnnnnnnnnnnnnnnnnnnnnnnnnnnnnnnnnnnnnnnnnnnnnnnnnnnnnnnnnnnnnnnnnnnnnnnnnnnnnnnnnnnnnnnnnnnnnnnnnnnnnnnnnnnnnnnnnnnnnnnnnnnnnnnnnnnnnnnnnnnnnnnnnnnnnnnnnnnnnnnnnnnnnnnnnnnnnnnnnnnnnnnnnnnnnnnnnnnnnnnnnnnnnnnnnnnnnnnnnnnnnnnnnnnnnnnnnagaggccacaggctcctctgcttcagggagctctgggccgcctggctgctgaggagccccacgcccnnnnnnnnnnnnnnnnnnnnnnnnnnnnnnnnnnnnnnnnnnnnnnnnnnnnnnnnnnnnnnnnnnnnnnnnnnnnnnnnnnnnnnnnnnnnnnnnnnnnnnnnnnnnnnnnnnnnnnnnnnnnnnnnnnnnnnnnnnnnnnnnnnnnnnnnnnnnnnnnnnnnnnnnnnnnnnnnnnnnnnnnnnnnnnnnnnnnnnnnnngtcaagcacccctggcccaaagcagatccggacggcaagcacaggcccggagttgctgctgctgcctccttcctccttcgtgccctgcggggcagctgcaccagccagggnnnnnnnnnnnnnnnnnnnnnnnnnnnnnnnnnnnnnnnnnnnnnnnnnnnnnnnnnnnnnnnnnnnnnnnnnnnnnnnnnnnnnnnnnnnnnnnnnnnnnnnnnnnnnnnnnnnnnnnnnnnnnnnnnnnnnnnnnnnnnnnnnnnnnnnnnnnnnnnnnnnnnnnnnnnnnnnnnnnnnnnnnnnnnnnnnnnnnnnnnnnncctcaggtcctgtcagcggcaagcgagcagcctgcgcaggtggctggagctgagcagagaggagcccggacctgaggaccaggaagtagagcagcaggtgcagaaagagctgcaagaggt

SEQ ID NO: 37322 - DNA, 834 bp, Macaca Mulatta
  misc_feature (1)...(834): n = A,T,C or G
nnnnnnnnnnnnnnnnnnnnnnnnnnnnnnnnnnnnnnnnnnnnnnnnnnnnnnnnnnnnnnnnnnnnnnnnnnnnnnnnnnnnnnnnnnnnnnnnnnnnnnnnnnnnnnnnnnnnnnnnnnnnnnnnnaatggtaggagtctccagatagcacngcatgtgaacccttntcaaacgaaagtacggcagtgggcctggtcagtactcggaggtgggcagagatcgctgagcctggagttgaggtgcaggagccttgattgnnnnnnnnnnnnnnnnnnnnnnnnnnnnnnttgagaccctttctcnnnnnnnnnnnnnnnnnnnnnnncaccaaacaaaaagaatatattgcctttaggtgtttattaacatgaccacagatattctggtaagtcagattggtgagacatttatgcagtttccttttctccttgagtaggatgccagcatatgctgaaaaaagctgagcttggaagagatctgaacatttctctatttctgacgttctggttactagggttgtcatataaactccctattggcccattactttggggtttgatttttctcagacattttaactgttgaagtatttcactgcattgttagagtaaagctctgtctcagaattttaaagcattttatgcccttcagggataggactacaaatgggcattatctgcttttgtattactctcacaatgctttacacttttgacaaaacactctccacactggaaaatgtcaaaatgtgtacaggagaaaaaagcaaaccaaagcacaatttgtctttacacaagttgttttaataaatgaactctgcaaaaaaccccc

SEQ ID NO: 37323 - DNA, 1936 bp, Macaca Mulatta
  misc_feature (1)...(1936): n = A,T,C or G
agctgacagctgtgctcggaaaagattctcggatccaggctcatctccacacaggagaacacacaggcagcacaggccatggggcccctctcagcccctcgctgcacactgcacatcacctggaaggagctcctgctcacagcatcacttttaatcttctggaacccgcccaccactgcccaagtcacgattgaagctcagccaaccaaagtttctgaggggaaggatgttcttctacttgtccacaatttgccccagaatcttattggctacatctggtacaaagggcaaaaaacggacctccaccattacattacatcatatgtaatagacgctgaaacaattatatttgggcctgcatacagtggacgagaaacagtatattccaatgcatccctgctgatccagaatgtcaccaagaatgacacaggatcctacaccatacaaatcataaagcgaggtgataggactaaaggagtaactggacatttcaccttatacctggagactcccaagccctacatctccagcagcaacttaaaccccagggagggcatggagactgtgatcttatcctgtgatcctgacactcaggatgtaagctacctgtggtggataaatggtcagagcctccctatcagtcacaacgttgcagctgtccaaaaacaacaggaccctcactctatttggtgtcacaaaggatactgcaggaccctatgaatgtgaaatgaagaacccagtgagttccagccgcagtgacccagtcaccctgaatctcctctatggtccagacgtccccaggattttctcttcattcacctattaccgttcaggagaaaacctctacttgtactgcttcgcggactctaacccaccggcagagtattcttggacgattaatgggaagtttctgcaatcaggacaagagctctctatccccaaaattactacaaagcatagcgggctctatggttgctctgctcgtaactcagccactggcagcgaacgttccacattcaagacgatcaaagtctctgctcctttaggaagaggacatctatcctggaattgatctgatatagcaactgtgatgtcatttctgtatttcaggaagtctggcagacagttgctttgattcttcctcgaagtatttacagtcagctacagtccaaaattgctttttcttcaaggagatatatggaaaagactctgacaaagactcttgaatacaagtttctgataacttcaagatcataccactggactctctgagaactttcaaaattttaatgaacaggctgataccttcatgaaattcaagacaaagaagaaaaaaactcagttatattgggcttaataatcaaaaagataatgttttcataattttttatttgaaaatgtgctgattctttgaatgttttattctccagatttatgaactttctctcttaagctctttatactttacaacaatttggtaaattatacttttgtaaacaaaaatgaaaacatttgcttttgctcccaatctgagtgccccagaattgggaaactattcatagcatgagtattcatttgcttagggtaataaagatatttgcacaagttcagtagagaatctactctctttataacatgacacatttgaaaacattggttatataaccaaggctttgactgggatattctatttgagaatatacacagaataaacccatacggaatgnnnnnnnnnnnnnnnnnnnnnnnnnnnnnnnnnnnnnnnnnnnnnnnnnnnnnnnnnnnnnnnnnnnnnnnnnnnnnnnttggacgtcgttttacaaagtcgtgactgggannnnnnnnnnnnnnnnnnnnnnnnnnnnnnnnnnnnnnnnnnnnnnnnnnnnnnnnnnnnnnnnnnnnnnnnnnnnnnnnnnnnnnnnnnnnnnnnnnt

SEQ ID NO: 37324 - DNA, 800 bp, Macaca Mulatta
ttctgaaggtatttagggagacctaggcagggggtaggaaggccgaaggagggtaagggcacaagtacgaatggcatgggaagaaggcaggagttccaggctatagagtcaggcattgggtgtggatggaacagctctaacctgggtactgcacatgtgtgttgtgggtagaaaggtcagggagtgtttttgctcacaaattcacgtgcttctgtgtatgtgcgtgcaatgagagggtgtatgaaagagtgtgagtatattgtccttccaaacctggttcatccaaaactgtgtgaggtttttctccagtgccataattgcatttcatttactactgaactttattgctaagtaaatttgtacttgtttgaagagctctgcttgctcaacacttgctttatgtcatatagctctctttcatttcatatggattaattcatcggtattattgaaacatttcatggttactaattattattgattatcaatcttcacacttattaaccatcagggtggaaatatattttcacatttctcttatttaggatactaatgctgtcacaaataaaatcattaaatgcaatcagtcacatctgactcatcaatactttttaatttccccattcaacttctatcagaagaattaaagacatagcattaattttaggaaataggtgacaaggagcaaaaaggttcattgcaaggattctgtgtcttttacaaattatacaccagttggggcacgttattttccccaaataaatttaggttaattgatagagactattgatatttgtttt

SEQ ID NO: 37325 - DNA, 776 bp, Macaca Mulatta
  misc_feature (1)...(776): n = A,T,C or G
ggaaacccagggttcagcatatgtaatgaaacacaaacacctggacctgcaaaatcagtggcttctgtgttacatcaaatgcagtctaacgtggaaagcagagattgccatggttttatgccactaagccttaggaagacaggaaaaaaggagatgccacatagcaaagcacacagagcagtaaaaagctttatcttagccaacatcatgcaaatcaaactaagttttaactaatagctatggcaaggcttctcagtattattcacagtaaagccaaagggtatgtttaggctattctgatcagctaaataccataaatatttttttcaaggtgcaaggagagaaccaaagcagctgctgctaaaataacttagacaacctgaccttgattgctgttgcccagactgctagttaaacaacaggtgctaggagaacatcagtcatcagccctcaaatatctaaaaacaggctaaaacgaggttgtacctccagcaaaggagggctcagacagtacttgtaaaattaataactctggnctgggagtnnnnnnnnnnnnnnnnnnnnnnnnnnnnnnnnnnnnnntangtgggcggatcacgtgaggttnnnnnnnnnnnnntnnnnnnnnnnnnnnnnnnnnnnnnnnnnnnngcnnnnnnnnnnnnnnnnnnnnnnnntgttgtgggcannnnnnnnnnnnnnnnnnnnnnnnnnnaggctgaaagtaaaagaatcacttgaatcnnanaancngaaggtttgaattgagctaagaa

SEQ ID NO: 37326 - DNA, 886 bp, Macaca Mulatta
ccggtgttgtaacgtttaaaagggattgtgggttttcctgagagcaagtttttaggttttgggggtgtaaagccaagttcggaaaaatatttaaattgtccccttttccaggaaaaaggaatggtgggctggaagaaattaacctttaatttttccaataaaggggtttggttaatgaaaggattaaagggctttcttaaattttggaggttcccaaccaaaggtaatgctggtggaagaataaggggaaaaactggattttggatttaactaaaacaattctctttttcaaaagaatattattttggtaacaagaatttttaagattttttgagaaagtttttaattttttcccttctaaatttttattcattaatagcaatttaaaatgaaagtttggggtgttttctaaacggaatgataaaaaggggaagcagccacaccatagactgaaccgccaatcccacagagggagacatgattagaggggagtggtgggtagcaggagagtctggaatatttcttccatgtggtcctcttaaacccaaacagtccattttaataagaattctcataagcttcgtaagtggtaaatttaaaaatttggtgtattatctgtttggcagaactggagctatgtctttaatttcttcatggtacccagctctcctctttggaattttcagaaaatattcatttattacttcattttcttctaatttaatgtactttccttaaaccattcaagaaacagagttggtggtggtgggtggattgggggggttcattgtttgatttttttcagtggattatttggtacagttttaatagctgtatgctatttttcattacaaataaactttcagaatttcttattgggtaaacc

SEQ ID NO: 37327 - DNA, 756 bp, Macaca Mulatta
  misc_feature (1)...(756): n = A,T,C or G
ggcgtggtggtgnnnnnnnnnnnnnnnnnnnnnnnnnnnnnnnnnnnnnnnnnnnnnnnnnnnnntaggaggcnnnnnnnnnnnnnnnnnnnnnntgcannnnnnnnnnnnnnnnnnnnnnngaagagcaagagtccgtctcaaaaataaataattttaaaaaatgtggccgggtgtggtggcttnnnnnnnnnnnnnnnnnnnnnnnagaggcccaggcagatggatcacttgagatcagaaattcgaggtcagcctannnnnnnnnnnnnnntnnnnnnnnnnnnnnnnnnnnnnnnnnnnnntgtggtggtgnnnnnnnnnnnnnnnnnnnnnnnnnnnnnnaggggcaggagagttgcttgaacccagaaggtggaannnnnnnnnnnnnnnnnnnnnnnnnnnnnnnnnnnnnnnnnacgatggagggagcttccatctcaaaataaataaatgaacgaatgaatgaatgaccatangcatagagactaaaatggaatatggcatcctagattaaatcctggaacagaaaaaggcattagaaagaaaaactgggtaaatcagaatacagtgtttattaatacttttgaatcaatgttaatttccttggttttgacaaatgtactacgaatctgtagggataccacatgatggcaatctggagaaggggctatgagaactcctgaaccatcgttgccaccttgcctataaatctaaaattaattctgaataaaaattcttactttttaaaag

SEQ ID NO: 37328 - DNA, 612 bp, Macaca Mulatta
cctgctgcccgtgagaagctggctgagggtactgggctccggcgacgagggaggagcgctaggtcggtgttggaccgagattagggcgcgcgccagctccgggaggccgcggtgaggggccgggcccgagcagccgacccgagccaatcgtcagggttgccagcgcctctgtggaggagcagcagtagtcggagggtgcaggatattagaaatggctactccccagtcacttttcatctttgcaatctgcattttaatgataacagaattaattctggcctcaaaaagctactatgatatcttaggtgtgccaaaatcggcatcagagcgccaaatcaagaaggcctttcacaagttggccatgaagtaccaccctgacaaaaataagagcccggatgctgaagcaaaattcagagagattgcagaagcatatgaaacactctcagatgctaatagacgaaaagagtatgatacacttggacacactgcttttactaatggtaaaggacaaagaggtagtggaagttcttttgagcagccatttaacttcaattttgatgacttgtttaaagactttggcttttttggtcaaaaccaaaacactcgatccaa

SEQ ID NO: 37329 - DNA, 761 bp, Macaca Mulatta
ggggagtgcaggtcaagggagaatactagctgctcttttttcaccacctttaccaatttcctatttgatggtttataagtagacaggcaaggcaaatgattattaccctcagaaaggtcgcatctccgtaggagtccagcgcttcctgtaatgaaatccactctctgtgtgtgggaaaagagacaggaaggaatgaagagagctctgaatcgagaatcctagatgaaccacacgctttactaagcctcagcttctccatctataaagtgaagggtttaacagcatgaatccccaagctcctctagctgcaggaccactgatgagcctttcacaggcaggacccatttttgcagatagctatgatttgtggcaatcaggcttcatagcttggggaggtagagttacctgacacgtaccatgtaataacagcctttgagacttgacaccactatgttgcttgagaatgaaaatctaaatgattgaagttttaaatcccagtaggaagttggttttgctttgccctggtttaaaaattactgttactcacaaagttttgcagttctctggatacctttcaatccctaacctctcactggggggattcttgatctccaagggggtttatttttttccaagtccagcataaggcttgcgcccaaccgaattcctcccttcaaattgggcttttgcccaaaacaaattttttaagtattaacggcggaattaactttttaatcccagttgggaatttaggaagggaa

SEQ ID NO: 37330 - DNA, 784 bp, Macaca Mulatta
gggctctctttccctaagcggaaggggtaatctgtgaaaatggttcgctattcacttgacccggagaaccccacgaaatcatgcaaatcaagaggttccaatcttcgtgttcactttaagaacactcgtgaaactgcccaggccatcaagggtatgcatattcgaaaagccacgaagtatctgaaagatgtcactttacagaaacagtgcgtaccattccgacgttacaatggtggagttggcaggtgtgcccaggccaagcagtggggctggacacagggtcggtggcccaagaagagtgctgaatttttgctgcacatgcttaaaaatgcagagagtaatgctgaacttaagggtttagatgtagattctctggtcatcgagcatatccaagtgaacaaagcacctaagatgcgccgacgaacctacagagctcatggtcgcattaacccatacatgagctctccctgccacattgagatgatccttactgaaaaggaacagattgttcctaaaccagaagaggaagttgcccagaagaaaaagatatcccagaagaaactgaagaaacaaaaacttatggcacgggagtaaattcagcgttaaaataaatgtaattaaaagggacaaaaataataagaaatacaaaaaaatttatatcacctaaattaaaaaaagataatgtgtgtttgggcggccattgggtacccccaaaaagccttttataaaacccattaattttgggagccgacgggaccccaatttggggaaagtgacaaactgg

SEQ ID NO: 37331 - DNA, 546 bp, Macaca Mulatta
  misc_feature (1)...(546): n = A,T,C or G
taatttagattttgcaccccgatgtcacatgcaacctgttcgtgtcgtcattctggatgaccttggagaaccagtgctggagggaattgagaaatttgaactggtgcttcgtatgcctgtgaaggcagcccttggcgagcccagcaaagccacagtctccataaatgactctgtctccgattnnnnnnnnnnnnnnnnnnnnnnnnnnnnnnnnnnnnnnnnnnnnnnnnnnnnnnnnnnnnnnnnnnnnnnnnnnnnnnnnnnnnnnnnnnnnnnnnnnnnnnnnnnnnnnnnnnnnnnnnnnnnnnnnnnnnnnnnnnnnnnnnnnnnnnnnnnnnnnnnnnnnnnnnnnnnnnnnnnnnnnnnnnnnnnnnnnnnnggtgagactgaaaagccttgcatccttgagctgatggacgatgtgctctatgaggaggtggaggaactccgcctggtactcggcactccacaaagcaactctccctttggggctgcagttggtgaacaaagcggaaactcntcgtaaggatccgagatgatgctgat

SEQ ID NO: 37332 - DNA, 5137 bp, Macaca Mulatta
  misc_feature (1)...(5137): n = A,T,C or G
gaagaccctgctgttgattaggcacagctgaggaggtgattgagctgagtgatgacagtgaggatgatctgacttttggagagaatgacaatcgggagaataaggccatgccctgccaggtgtgcaagaaagttctagagcccaacattcaactgatccggcagcatgctcgggaccatgtggacctgctgacgggcaactgcaaggtctgtgagacccacttccaggaccgaaactcccgggtaacccatgtcctgtcccacattggtattttccttttctcctgcgacatgtgtgaaactaagttctttacccagtggcagctgacccttcaccgacgggatggaatatttgagaacaacgtcattgtccaccccaatgatcccctgccagggaagctgggtgtcttttcaggagcagcctccccagagctgaaatgtgctgcctgcgggaaagtattggccaaagatttccatgtggtccggggccacatccttgaccacctaaacttgaagggccaggcctgcagtgtctgcgaccagcgtcaccttaacctctgcagcctcatgtggcacacgctgtcccatctcggcatttcagtcttctcctgttctgtctgtgccaacagctttgtggactggcatcttctagagaagcacatggctgtgcaccnnnnnnnnnnnnnnnnnnnnnnnnnnnnnnnnnnnnnnnnnnnnnnnnnnnnnnnnnnnnnnnnnnnnnnnnnnnnnnnnnnnnnnnnnnnnnnnnnnnnnnnnnnnnnnnnnnnnnnnnnnnnnnnnnnnnnnnnnnnnnnnnnnnnnnnnnnnnnnnnnnnnnnnnnnnnnnnnnnnnnnnnnnnnnnnnnnnnnnnnnnnnnnnnnnnnnnnnnnnnnnnnnnnnnnnnnnnnnnnnnnnnnnnnnnnnnnnnnnnnnnnnnnnnnnnnnnnnnnnnnnnnnnnnnnnnnnnnnnnnnnnnnnnnnnnnnnnnnnnnnnnnnnnnnnnnnnnnnnnnnnnnnnnnnnnnnnnnnnnnnnnnnnnnnnnnnnnnnnnnnnnnnnnnnnnnnnnnnnnnnnnnnnnnnnnnnnnnnnnnnnnnnnnnnnnnnnnnnnnnnnnnnnnnnnnnnnnnnnnnnnnnnnnnnnnnnnnnnnnnnnnnnnnnnnnnnnnnnnnnnnnnnnnnnnnnnnnnnnnnnnnnnnnnnnnnnnnnnnnnnnnnnnnnnnnnnnnnnnnnnnnnnnnnnnnnnnnnnnnnnnnnnnnnnnnnnnnnnnnnnnnnnnnnnnnnnnnnnnnnnnnnnnnnnnnnnnnnnnnnnnnnnnnnnnnnnnnnnnnnnnnnnnnnnnnnnnnnnnnnnnnnnnnnnnnnnnnnnnnnnnnnnnnnnnnnnnnnnnnnnnnnnnnnnnnnnnnnnnnnnnnnnnnnnnnnnnnnnnnnnnnnnnnnnnnnnnnnnnnnnnnnnnnnnnnnnnnnnnnnnnnnnnnnnnnnnnnnnnnnnnnnnnnnnnnnnnnnnnnnnnnnnnnnnnnnnnnnnnnnnnnnnnnnnnnnnnnnnnnnnnnnnnnnnnnnnnnnnnnnnnnnnnnnnnnnnnnnnnnnnnnnnnnnnnnnnnnnnnnnnnnnnnnnnnnnnnnnnnnnnnnnnnnnnnnnnnnnnnnnnnnnnnnnnnnnnnnnnnnnnnnnnnnnnnnnnnnnnnnnnnnnnnnnnnnnnnnnnnnnnnnnnnnnnnnnnnnnnnnnnnnnnnnnnnnnnnnnnnnnnnnnnnnnnnnnnnnnnnnnnnnnnnnnnnnnnnnnnnnnnnnnnnnnnnnnnnnnnnntggcagctagatccatactagggacagagctttctatttaggtcagaaagctttgggatgaatccctgccagccagaagaggtgtcttgcggtgccgccagaagtggcagcctggatggacaggagaggtttctcttttctcctaatttccaaagaaacaggattttatggcgtgctggcccgggacgtctgaccttctgtggggcagagaggatagggaaccacttgatacagtcatctgttttggccacttctgttggctgtgaatgagtgtcctggtggagaggtggggatgtctctgacagcagcagccttgccttaatttatatctggtctcctgcccagaagtgtttggcccgtggtttagatgagctgactccatgaagtggtggagtcgcagactgcgagcccttcagaattaaagggacctgagtaactggtggtgtgtagcagggtgtgcgttctgactgtctgtcctagtcgggtaacctgttgtttactttgtgctaacagtgccggagctttggcagctcacctttgacctgctggaatttatcctgatctgtcgttgccattacctccaggggttgctgttggatggcagctggttcaggccctccgtgggtggctgcagagtgtgccggcccagcccacacagctggttagctccactcttacttggttttctaaggggctttgcccaaagagngacttgagggatagggccnnnnnnnnnnnnnnnnnnnnnnnnnnnnnnnnnnnnnnnnnnnnnnnnnnnnnnnnnnnnnnnnnnnnnnnnnnnnnnnnnnnnnnnnnnnnnnnnnnnnnnnnnnnnnnnnnnnnnnnnnnnnnnnnnnnnnnnnnnnnnnnnnnnnnnnnnnnnnnnnnnnnnnnnnnnnnnnnnnnnnnnnnnnnnnnnnnnnnnnnnnnnnnnnnnnnnnnnnnnnnnnnnnnnnnnnnnnnnnnnnnnnnnnnnnnnnnnnnnnnnnnnnnnnnnnnnnnnnnnnnnnnnnnnnnnnnnnnnnnnnnnnnnnnnnnnnnnnnnnnnnnnnnnnnnnnnnnnnnnnnnnnnnnnnnnnnnnnnnnnnnnnnnnnnnnnnnnnnnnnnnnnnnnnnnnnnnnnnnnnnnnnnnnnnnnnnnnnnnnnnnnnnnnnnnnnnnnnnnnnnnnnnnnnnnnnnnnnnnnnnnnnnnnnnnnnnnnnnnnnnnnnnnnnnnnnnnnnnnnnnnnnnnnnnnnnnnnnnnnnnnnnnnnnnnnnnnnnnnnnnnnnnnnnnnnnnnnnnnnnnnnnnnnnnnnnnnnnnnnnnnnnnnnnnnnnnnnnnnnnnnnnnnnnnnnnnnnnnnnnnnnnnnnnnnnnnnnnnnnnnnnnnnnnnnnnnnnnnnnnnnnnnnnnnnnnnnnnnnnnnnnnnnnnnnnnnnnnnnnnnnnnnnnnnnnnnnnnnnnnnnnnnnnnnnnnnnnnnnnnnnnnnnnnnnnnnnnnnnnnnnnnnnnnnnnnnnnaaagcagtgttgagacttcattgctgactggcttctccctttcttactctcactgaccattagaattaagaaggagatgtgtaacagactacaatcaagtgtctgctacattttcaagcatgagcagtccctcccagactgttggtgaggactgatttttgaaatgctggtgtgagagaggtggtaattactggaaccagccaagtggctgagagcagatacatgtgctggagaaacctttttccttaacagagggcatcatgggtgctgggtggtctgtgtacttaacctgaaactgtgaagttttccttttttgccagtaaaccaaaaagcagatccttgaaactgtgcccttgaaacacgagacagaaaactgcatcccctgatccccctggggctgatcagattgatcagggtggcccagttggtcccagtcagatatgtcataggatcagtagcttatgagatttgttgaccaaaccctctccctgttggggacccttatattcacacctgaacttccccgtttccctccaccccgccaaagtcatgtctgcttcctctgcctctagctcaccctcttctgaatggttttacttgaaacactatattgtggcatagggcaccctgngatacctggtagaaggtnnnnnnnnnnnnnnnnnnnnnnnnnnnnnnnnnnnnnnnnnnnnnnnnnnnnnnnnnnnnnnnnnnnnnnnnnnnnnnnnnnnnnnnnnnnnnnnnnnnnnnnnnnnnnnnnnnnnnnnnnnnnnnnnnnnnnnnnnnnnnnnnnnnnnnnnnnnnnnnnnnnnnnnnnnnnnnnnnnnnnnnnnnnnnnnnnnnnnnnnnnnnnnnnnnnnnnnnnnnnnnnnnnnnnnnnnnnnnnnnnnnnnnnnnnnnnnnnnnnnnnnnnnnnnnnnnnnnnnnnnnnnnnnnnnnnnnnnnnnnnnnnnnnnnnnnnnnnnnnnnnnnnnnnnnnnnnnnnnnnnnnnntagtatcctggcattccagtgacccactggtgacttactgatgccatagcacctgctgggaagctctgctaaaccttagtatttggtcctgaattttatgactccatggagttcccatcgtccatggctagttaggaagaaaggaggtgggataggggtcaggcccaggtgacctttaagaaccaggagatgggtaaaagnnnnnnnnnnnnnnnnnttttctgatctatgagtacctgtttgtctccaggccaaacctttgggcttaaatatctttttcctagacatgtttttgctagtgttgaattttcttcctcctctggcctcctgtggccctttccccaagccccagactacttccaaagcaaattctagatggacactgtatttgttggtatgggagtgggctctatggagtggtctgcacccatctgggactcttttccctaaatcctgcaccaaatgagtcaggaggcagggtgcacagcattagtttcagtgtggttatgcatcgtaagcttaacatcagaatgaaaatgaaactcgattttgatgtttctttaaaatccttcccctgttcaatccactcgccgcccccaccttgaatagctaaagtctcttacgaaacagagaagagttgttgacgtctaactccttccattaaattaataagtactgacctcctaatatttaagtgtttactatctattgctgtaaagttttgtatattttgtaaacttttttccccaaatagtagatgtctaaaatcattgtacatctgattcttttatattccattgttcagcacaaagtgtggtttttatttagaat

SEQ ID NO: 37333 - DNA, 757 bp, Macaca Mulatta
acagtgttgttttatatactttctgaataaatgtacactattaaaaataatcctctttgccgccaatattttttgattattaattataaacattctttgtttaaatatatttattactcactttggaatgtgggggaaattagcttgtagcattgcaatagaagaaagagaattggaataaaagtgtccagcacatctcccacccgagaaggaaaatgcacactgttcttacgacgtttccaatttccgcccagctgatctcgtccagctggagtcactcatttagctctcgtgagagcttggatggttgacatccaccgcagaaaatggtgtcatgtcctgacacctgtcctgttgtcctgtccatttatccaagacagtgagaggagccaggcaggatctccctgtgttaaagttgtctgacctgtgtaagataggcctgagctcagtgacctcaaaaggaccttttgaaaaccagtttcatcctactgcaatccccaaatctccagagcatgtgactccttcgtggatcacggtaacagtgatgtgtgttgatccagccatcaacatcttcaactgtaacaccaaccaccagccaaaggccaaagcccagactccctgaccacaacaggtgacaggaagcaccactccccatttctactcccagctgccttctgttccagctcctgcgcttgagcctcctggaacccctttctaagcatgattccccatctgtaaccgcatgtccactcctcta

SEQ ID NO: 37334 - DNA, 650 bp, Macaca Mulatta
  misc_feature (1)...(650): n = A,T,C or G
ggaaggtatggcaagccgggaaaacagacagggagaaggagagagaactgctggaagccgacagagggatggagagactcagagattcggagagacagagagaggaaggccagccagagaggtgggagagaggggggcgcaggtggagctgcagggaggggccgggggtgcacacaggtggagggacatgtgctggggagaactgcggacatatcgagggagacagagacagagaagggaaagaattcttggagttgctggccccaaactcatgtctctttccccagccccctaagcccacccatccagggtgagggtaagtctatgtccccaccagtgtcaaggctgcatatctacccacagcccagagtgatttaggattctctttacttctacagagaagcttccagaaccccctgaggtccctgtgtatgtttttagacccccatatattctcggtgctcatgatagggtcctttataccttcatgtgggccccagtatagcccatacatccccactgtagcatgtccacaagcctgtgctctgcctgtgagtgacccacctgcccccattagctntccacataaaccatagatccctctatgtcatgtaaccgaaagtgttagacacctatttaattctcaaatc

SEQ ID NO: 37335 - DNA, 670 bp, Macaca Mulatta
  misc_feature (1)...(670): n = A,T,C or G
ccagggcagctacaccccctcctgccgcaggggcctctgccgagtccccacaggctgtgacacggacatttgtcgaagcctgagtggccaccatcagtacaaaattaggattagctgnnnnnnnnnnnnnnnnnnnnnnnnnnnnnnnnnnncagaccagcccagcctaagaaggccagcctgcccctggtactgagaaacccccagctgcactgtcccaggaggtcctgaggcaccagcacccgctcacagaaccaccaggtccaaacccttcctgcaccaactcacagaggccaagnnnnnnnnnnnnnnnnnnnnnnnnnnnnnnnnnnnnnnnnnnnnnnnnagcatgtcccacaaagagggtgggacctccatcccccaggcctgtggacagggtcgctcagcccccgtggtgctctccacacctgctctggctggtagggggagggcggcactcgctgccaggtaccctgtccgggtcttcctagaagatgtcctcaaggattctttgcttctctgagaactgacacaaaagcagaggacccccaagatccagagttttctcaccaaacaaggtggcagcttccgaggcactcaggctgaactgggactccaagaacttggggctaaacgtggacatgccggtgatgagtgtggcctcagtggc

SEQ ID NO: 37336 - DNA, 220 bp, Macaca Mulatta
ccctggtgggcaggatgcgtgtgttcctgtttgtgacaactcaaccttgtctgtgaccttagtacctccattccaggaatttccccttcgaggcctctaaaagctgaaagattttcaggtaaaggaagtgcgatattgattgaaatctgcatacaccaaaataatttggtctggcttctagaatagtcagtttcctgatacttatcattgcttccatcat

SEQ ID NO: 37337 - DNA, 777 bp, Macaca Mulatta
gggctttctgcccgtggacgccgccgaagaagcatcgttaaagtctctcttctccctgccgtcatgtctaagtcagagtctcctaaagagcccgaacagctgaggaagctcttcattggagggttgagctttgaaacaaccgatgagagcctgaggagccattttgagcaatggggaacgctcacggactgtgtggtaatgagagatccaaacaccaagcgttccaggggctttgggtttgtcacatatgccactgtggaggaggtggatgcagctatgaatgccaggccacacaaagtggacggaaaagttgtggaaccaaagagagctgtctccagagaagattctcaaagaccaggtgcccactttactgtgaaaaagaaatttgttggtggcgtttaagaagacaccgaagaacatcaccctaagagattattttgaacagtatgggaaaaatgaagtgattgaaatcatgactgaacgaggcagtggcaaaaaaaagggcttttgcctttgttacccttgacgaccatgaatccctgggataaaattgtcattccgaaaaaaccatactgtggaatgggccccaactggggaaattatggaaagctctgtctaaaaaagaaaaggggttagtgctttcttcccccccaaaaaaggacgaaactggtttctgggaaaaattttattgggtgggtcacggaagagtggtttttccggtgggaaagaaaaacattcgggcccctgggaggggaaaattcttctgggtcgcgggtg

SEQ ID NO: 37338 - DNA, 634 bp, Macaca Mulatta
ccattggacttacccgatgataaaaaatcattatgatatagtcttaacgtaccttaactaactgcatctgcaaagatcctatttctaggataaggtacatagtgaatttagggatagacatgaatttatggaagcactccactcaacccactacagactgagtggcagagagaggtcaaggatcatgaagtagtgttctcctggtaggggtaattgtagtgggtatagctagtgattgcctctagcttcctcagatgacagaggatgctgggatggaggggctgggctcgccaaagggacctggagcctagggttcccagcaaggactgctgatcccatcacatcatcatcttagaagggcagcaaactctgtgagcagctgaaggtcccaagaacacactttaattttgcaagagcattctactgagagaaacctcacaaggaaaactcaaggtactctcaggtaagggcaaataatggctacctcataaatgatgttcacatataccagtgggctcaagatggaaatactgatagatttgtgtgattacctttactgagcaagggcttactctataattagtatcgtatactatttagaatcggagtaatcatcataataaggtgtgatgct

SEQ ID NO: 37339 - DNA, 790 bp, Macaca Mulatta
ggcattacttttgcatcctgaggacaagcataaattttttttgaagagaactccagggacaaataatataccactgttattctcacctacatgtcaagtttgatacattaccaaacagttctagccttctgcttataagtacatagaacttttatttaccgtatctatgggtcaggatcccagcagaggcagtgatgtatcagaatcaccttcgggattcctctactgcctcctctttctaatccccagattctgatatgcatccttgtcctacagcgaggcagcatggcgtgaggtcggaacaccagttctggagccagagtgtctgggttcatagcccgccatttaccagccatgtgactttggcaaatttcttagtttctcttgcctcactttcctcatatgtaaaatgggaataataataatgcctacctcagaaggttgctgtgaggaatgaaggtattgatatgtgcaaacttacaacagtgtgggtataaaataaacatgatgcaagtgttcaatcactgtttttgggagaattccgtattctttaagccattaaagaagaaaaaatgattaagaataatttcaaagtactgcatgtttcaagggctaatgccaggttgctcccagagtggtctctcccagtgtctagaaattttaacatcttatgaaaatgatgtatatggtcaaaaatgtatttaaccttttccttggctgccttccagggccagaggaagatcttcccaaggaaatggaatactttggaattgttttgtcatgcaacctt

SEQ ID NO: 37340 - DNA, 218 bp, Macaca Mulatta
gcccctactgggagtcatccccacaggaaggcccttgtcctcccttcccagtgtcttttcctggactgagccctgagctagatagggacagagcctgtcctttctgggggttggctcccagtctggggcagctccaggccctgtgcaggtcctcagttctgcctgggttgccttacagtgagacagagctgcctcctgccactgctcgggaggtgaag

SEQ ID NO: 37341 - DNA, 619 bp, Macaca Mulatta
  misc_feature (1)...(619): n = A,T,C or G
agaaccgctctcatacttgctgtatgttgtggatcagcaagtctagtcagccttctacttgagcaaaatattgatgtatcttctcaagatctatctggacagacggccagagagtatgctgtttctaggcatcataatgnnnnnnnnnnnnnnnnnnnnnnnnnnnnnnnnnnnnnnnnnnnnnnnnnnnnnnnnnnnnnnnnnnnnnnnnnnnnnnnnnnnnnnnnnnnnnnnnnnnnnnnnnnnnnnnnnnnnnnnnnnnnnnnnnnnnnnnnnnnnnnnnnnnnnnnnnnnnnnnnnnnnnnnnnnnnnnnnnnnnnnnnnnnnnnnnnnnnnnnnnnnnnnnnnnnnnnnnnnnnnnnnnnnnnnnnnnnnnnnnnnnnnnnnnnnnnnnnnnnnnnnnnnnnnnnnnnnnnnnnnnnnnnnnnnnnnnnnnnnnnnnnnnnnnnnnnnnnnnnnnnnnnnnnnnnnnnnnnnnnnnnnnnnnnnnnagtgatgaacaaaatgatacccagaagcaagttttggaagaacgagatctgctggaatgtcacaagaagagattctgactaataaacgagagcgagatggaagtggctgaaaaggaaatgaattctga

SEQ ID NO: 37342 - DNA, 783 bp, Macaca Mulatta
  misc_feature (1)...(783): n = A,T,C or G
ggcattgtaagtgactagattgtccttgagtgtagaaagactggattcatctttgttttcactgaccagaacaatgcttgtaggtgatcatgcatgttttttccaattgcattgatagttgattgcattacccagagtattagtgactaattagcaagtgtatctttagggttctcaaagcctttgtaggtgatgataggttangtgatctagataacagctcaagaaagtctaaagctgaaaccaaaatataaagttaagttttattacctgggttaaacatttttattcaagtaaaaatggtgaaaaggatggggaagaaaaagaacctacagggtaattttctgggggaaatttactttgatttggaaacctttgggaaaaggtggacctgccccaaaattaatttgattgaaaaattcctttgggcccccattttaaaaaagaaatttttttccctnnnnnnnnnnnnnnnnnnnttttggggggtcctcccaaaaagaccccacaccgggggggtttaaaacccccaaatatcccnnnnnnnnnnnnnnnnnnnnnnnnnnnnnnnnnnnnnnnnnnnnnnnnnnnnggggttccttggcggaaaaaaaacctccccctagggggccaaatannnnnnnnnnnnnnnnnnnnggtggccccctcccacaaaaattttgttccccgcccgccannnnnnnnnnnnnnnnnnnnnnnnnnnnnnnactgggggagccgccggcctcaaaaaaaaaatattggcgcccccctttttttttt

SEQ ID NO: 37343 - DNA, 1874 bp, Macaca Mulatta
  misc_feature (1)...(1874): n = A,T,C or G
aggcggccacagaacagctgaccaggcgcaggtggttcctggtctcgtgcaccaccctctatagaacagacagagacttagaattagagcaggactcagcccactcaccagggcttgcctagctgccattgggtctgcacatggacacaggtgggtcctgggtatttgcatccctcgctgcctctgccctgccagctgtgccctccacgcttgcccgccccactgcaataatgcagatgcacacagctggctgaggctgggagggccccttcagagccgcagtggggagcaccaacaacatgtgtgtggctggggctgggtgacacatgccagctatggtgagtgtggcaccagtcaggctgcagagaggcagaggatagcccacactagggctgtcggtgtggggaactgcccacactctcatttccagagtgaattctcttctgcttctaagtggagnnnnnnnnnnnnnnnnnnnnnnnnnnnnnnnnnnnnnnnnnnnnnnnnnnnnnnnnnnnnnnnnnnnnnnnnnnnnnnnnnnnnnnnnnnnnnnnnnnnnnnnnnnnnnnnnnnnnnnnnnnnnnnnnnnnnnnnnnnnnnnnnnnnnnnnnnnnnnnnnnnnnnnnnnnnnnnnnnnnnnnnnnnnnnnnnnnnnnnnnnnnnnnnnnnnnnnnnnnnnnnnnnnnnnnnnnnnnnnnnnnnnnnnnnnnnnnnnnnnnnnnnnnnnnnnnnnnnnnnnnnnnnnnnnnnnnnnnnnnnnnnnnnnnnnnnnnnnnnnnnnnnnnnnnnnnnnnnnnnnnnnnnnnnnnnnnnnnnnnnnnnnnnnnnnnnnnnnnnnnnnnnnnnnnnnnnnnnnnnnnnnnnnnnnnnnnnnnnnnnnnnnnnnnnnnnnnnnnnnnnnnnnnnnnnnnnnnnnnnnnnnnnnnnnnnnnnnnnnnnnnnnnnnnnnnnnnnnnnnnnnnnnnnnnnnnnnnnnnnnnnnnnnnnnnnnnnnnnnnnnnnnnnnnnnnnnnnnnnnnnnnnnnnnnnnnnnnnnnnnnnnnnnnnnnnnnnnnnnnnnnnnnnnnnnnnnnnnnnnnnnnnnnnnnnnnnnnnnnnnnnnnnnnnnnnnnnnnnnnnnnnnnnnnnnnnnnnnnnnnnnnnnnnnnnnnnnnnnnnnnnnnnnnnnnnnnnnnnnnnnnnnnnnnnnnnnnnnnnnnnnnnnnnnnnnnnnnnnnnnnnnnnnnnnnnnnnnnnnnnnnnnnnnnnnnnnnnnnnnnnnnnnnnnnnnnnnnnnnnnnnnnnnnnnnnnnnnnnnnnnnnnnnnnnnnnnnnnnnnnnnnnnnnnnnnnnnnnncttgccgtgcgtgactagggatgcttgatacttctgcacgcactccttctggaacacctgcaggagccttttggctaaatggctgaaattcatcctagaatgacagggaaccaaggcacagatgagccgccagaaccactgtgcacaagcccaccatccctcagtctctgtcgccaccttgtcataagtgcccaagccctgcgaccacagcagggctatgtctctgggaaaggaggaaggacggtcattcttcttggattgtgaagctgcggtggccagcaaaacccacatcaacagggagacatgggagacacacagcgggtcctcggggaacacacacgtgctcaagcttagtcctcaagaaagggaagggaaagtgaggcagtcgtggaaagaagnnnnnnnnnnnnnnnnnnnnnnnnnnnnnnnngggtctgggtgcttgtagaactgggggagtgagttcccagataaccattaaatcagggagggcctcctggacatgagtgtgtccaggaaacatgggagacagaggagc

SEQ ID NO: 37344 - DNA, 780 bp, Macaca Mulatta
  misc_feature (1)...(780): n = A,T,C or G
ggggtcacccattggacattggtcagggccagttgaagggtcggtggtctcacccagtttgaactggacaagagctgactctaagttcctgaaaaaacaactttgtcacccattaccattgtgacccacacatcagagatgttaactgtaaataaactgaagggtatattgtgatatattgcttagctatgtaacatttagagttagnnnnnnnnnnnnnnnnnnnnnnnnnaaaagcaaacaaagcagattaaagtttgacaagcttagtcaggtttgccctcagcatctctgttatggccattcatgtacaagattttgtgtggacacatgttttcgtatcttttgaatttgtgacctggagtggaattgctgaatcatacggtaacttatgttaaagtttttgataaactgccaaacttttttccaaagtggctgcatcattttatattcccaccaacaatgtattagggccaatttctccacatcctcacttacacttgtttttgtccacttcttaaaaattatagccattctagtgggagtaaagtggtatttcatcacgnnnnnnnnnnnnnnnnnnnnngtagagatggnggtctccctattttgcccaggttnnnnnnnnnnnnnnnnnnnnnnnnnnnnnnnnnnnnnnnnnnnnnnnnnnnnnnnnnnnnnnnnnngtgtaagccactgtgcccagcctcattatggnttttgatttgtacttcccctatgactaatgaatgttgagcatctttttattggctttatttg

SEQ ID NO: 37345 - DNA, 724 bp, Macaca Mulatta
ggggtatctaaaaagatactcattttgactgccaaagccaagcccatttttggctttggctagccttagaaagatattggagaggtcttcctctcccatatccagatggcttagtaactcctaaatgtcttttcagtatttttttgtattcatttgtctgtgtcaccattcctcctgtctggtcatctcttatctggtttccacatgaccaccaaaacattctttctgaaacaccagtagattttctttaccctctgtagttcctcccctgggagccattgcctttagggtaactttgagtttctctctactggtccctcaggtgtgtagtgctattcctctatccacccacatagagttttcttcctctgggcatttgcatgtgtggaacctctgttattcctacttttcttgtaagattcaacttatttagattcaaccgtctgggaaggcttcctgaactcatctcctgtccatttactgggtaacaagagtctctcccctgctgctgggacactaaatctagttgctcagattggacttcaataaaatcaagcaggctatctcaaagccaatgacaaaaagtagccactagagggcactgtgagcatttattttgaagattgtggtcttgaaggtgtttttttggatttccttcgttgctcttcagctcttatggagtaagttgggtacgaaaaggcccattccatttggatgggcagaa

SEQ ID NO: 37346 - DNA, 811 bp, Macaca Mulatta
  misc_feature (1)...(811): n = A,T,C or G
ggatgtttagtgtatgtaaaatgttttgtttgcattgaagagaaaggtccaagttcattatctttcttttttttcattcatttagacgttgagttttctcacaccattggttggcgagtctgaccttttcttcactgtttggtcatagtaacctagtaaaagattatttgataatatttgcacaggcttatttctgggttctttgttctgtcatgnnnnnnnnnnnnnnnnnntgccattaccacattggttttatttttgtagctttggaatctgttttgacatcatgagatgtggtatttctttgttcttttctaaagctgttggctattcatgtacccttgagactacacatgaattttagaattatataaaatatctctgccaaataagtagcattggaattttaataaggatgacattgaatttgtgcaatactcagaagtattgacagcttaacaatattacatctcctgacggagaaacatgcatttgtgtctgtggtgtgtttgtgagtgtgtggattggcatcagagatagtgctgagatgcaagagaaagagttcaaagtgtttccttggcctttctctggtctcctgcacagctcgtatccactggttagcctaccttncactggtttatcttcttagatatatcattgtcaagttggtaggacnaataaaattcctttcacaagtttgagacatttgtctacttttggcccnatctcacaccaaagacccanaaagtggaaagttagggnaagataaattctccntgggtagattttgtaggttaaatttgnttttata

SEQ ID NO: 37347 - DNA, 842 bp, Macaca Mulatta
  misc_feature (1)...(842): n = A,T,C or G
ggatgccccagttagacacatcgacatgattcaccactattatggcgatgctccctacactatatcttattatacagctaaagctactaaacacgaaccactaccaaccacctcttacaaaaaaccccacccttcaattccacaacatccgnnnnnnnnnnnnnnnnnnnnnnnnnnnnnnnnnnnnnnnnnnnnnnnnnnnnntttaaatcaacccgctacaatccccattatcctattccctaccctactaatcttaacccccaagcaccccattaataatcgactagctaccatccaacaggacctaactcgattcaccctaaaacaaataataataactcacaacgcttaaaggaacaaacctgatccttaatactaaccatccctaatcaccttttattgctataacaaacctccctagaacttatgcccttactcgttcagcccaactaacccaactttccataaaccttagctatagccaatccccctctaataagccgcccaccgttaattaatgggggctttcgccnnnnnnnnnnnnnnnnnntcccctaaacccactcctcctggccacaagggccaaacccaaaaccttttcaatttcccagggtaatttaacaaattggaaacctttcgtgccctactttttttcaccccgtatactccttacccctttacaaatttaaacgcaaaaaatatccaagccggggccagttttatcaaattatacccttaattcctgaaaaatcgtgtaatcttgccccatttatcactgttatgatcacgccccccgcaaagattgggccgtagaactctcaaaaatttttatataataa

SEQ ID NO: 37348 - DNA, 626 bp, Macaca Mulatta
aaaggctgttataataatccactaagaaaggatggtatgaagagaggtactaaagagaggcagtaggtgtacaacaagatgaaccagagaagttggttgcattatactacacatatccaaacagaaaaaaatatattacattggaatgtgctttggcaaaagacagagaggtgtcatgagactgccaagaccaaaggaatataaaggaagtgacgtacgttaagtgcctactaacctgtacagacactttgtataccttgtgttctgtataccctgtctacctaaatttgcatcattggtaatgtctccatttgtgaatgttcaacagtgccgatgacaatccttaaaatatatgcattaccaacttcagtgccttctttaagggacgttgtggagtttaatttggcttttactagtgtctcagaatcatcaagatggagagtactttgattattgttaacttgtattgagcactcattagctctgtattagactgtagtgttttctaaaagttcttgtatcagctttatagtctttcctatgcttttagttcctgttgatatctatgtctgcctttagcactcatattcctttaattgtatggacacacagctatgagctaggga

SEQ ID NO: 37349 - DNA, 159 bp, Macaca Mulatta
atacatctctttcatcttaccacattctcaaactcctatttatcttgttttcatttgaagagtatttccagaatttctattctagatctatattatgactatcaggtaagcaagaaacaggggctttatgtgtcttaacttgtagaccaccagtaaaaa

SEQ ID NO: 37350 - DNA, 586 bp, Macaca Mulatta
aacgtcgttattacagcttattcatttgctttaacatagcgagacttcttacctttgcaatcccaaaactaaccacttataattcagagtggtcattttaaacgtacatgtgtgtgtgtatgttttaaccataacatgattgtcacatattctctaggagacattttggaccttttaattgtttaggttattatacttcaaggatttatcaatgtgcaacaattcatagagtggccgaaaaggatatagagagaccacgttgtcgaggacaatagctggagtttagtcttccagaagtatttttcttgccagagctgatcaaaggaagagccaccagcaccggataagagattctagcatttggctgcttctccaagacaagcgaggttagaagggagttgagaagttatgtcatcttccactgcagcagatacccttttaatttttagtacttgaggatcccctgaatcacagaaattctaaatcagtcctggattccacaagtgaagcagcggaggaaccaggaggtcagcggtgcccctcacatccgtggcaatcaacgagggagttctcaaaaggctatcaa

SEQ ID NO: 37351 - DNA, 698 bp, Macaca Mulatta
ggggtagacacagtgcttctgttggacacacatacccagcagtaagtaagctttgtgtctttatataccatggcttgaagtgagacttttcagaaaggagacctaggctagaaagagagccattaggatgatggagttaccaaatacttcatctgccacctggacattagacagtgtagcctattagaacataagtcagtcagttgatcagcatctagccctcaccaaatggcaagagggtcaacttaaggtcaccactatattaagatatttttggttatagaaatgacatgtaaatattagcatgaaccaagtagctctttactgaactattaaatccattgcctactggatatttgaaagtaaattagcatatcctatataggggagttggcttaaagtcagtgtattgagtaagattcacttagccaaaattatgatacactttgctttaaaaagtatcccaccacacttagcacacttagtatagctagcttttcttctagcagtagtcattcacttgttcttcagatgaaacccaagtggagtatttggccttcacgtaggaaacaggctgaaaaaaacaagtattgattgctcccctctcaagctctggtgaaacatggaacagtggtcaattcttgacacagatggctttttcacatttttctccaagacttattgatcattaaagtaga

SEQ ID NO: 37352 - DNA, 765 bp, Macaca Mulatta
gggaaccatctaatgcaggtgccatagggagtaaattagataattatataaagaagtgactatttatgtcagtgtatctgggacagtgactcctgggttagcattgtctcagatttttcattttatgctaaagtattattataaggagactacgtgcagtttctgtttctgcctggtcttctcttgtagtgtgtgagatgcttatatagggatctctgaaagacggccagcaatccctttttctcctaaccctttctgtgcacaccattatgaacacctctgtttcaaggaatgtgtgctctggtgtaagtggctagggaccagtaattcaatttggttattagggttggggaaggataggaaactttaggttacttctcatgaaatgtatctgaaataaaggctgagaagtcctgctgcagagtgtaaagaagcagtctgaatgttcttaatacagtaggttttatggttttatcatttttgaatactgtaaacttacaaatatttgtatcatttgggaaaagtttaaaaatatatatgttgtaagacaccatttttggcagctatgagcttaaaaaataacagaactttgtttactggaaataataccttaattttcctcccctttttttcagggaaatttgacccccaaaccttttactttccataaaaaggtttttttgacgttttaaaaacctacttcctggggaaaattaaatggaaaaccccccaaattttggaaaaaatttcgggggaacccctttt

SEQ ID NO: 37353 - DNA, 309 bp, Macaca Mulatta
gcagccggacgtccggactcggagacacgatccgctgactgcccgcaataaaaaagaaaacccaccccacgctgctgtccacctcaacgaggtccggaatgggaggcggggtgcggttctcgtccaagttctaccccatttgctttgtggctgcatccgaaacggacgtgccccgggaaggcgtctacgctccgaggcaaggttgcctccgtgcagtttctacagcctgagtttaaactagtcctttgcattctacccagccctctgcaatgcggatgtattttaattcttaaaatatttatggaacag

SEQ ID NO: 37354 - DNA, 874 bp, Macaca Mulatta
tttctagttttttttccacctggatatgggggtctttcaacggattttcctgtatcttcccaactattatattataaaattttttcccaattggaaaggttctgtgtttccttggtacagaaaacctgattcttgggtgtctcaggtggtttttaggtatcttattcgtgggtaaaaaagttttggttggaactttttccccaagtcaaaaatttgttgtaaaggtggaaccaaactgaaggatgttctattggtgataggcttgtccatctcctggctgataaatagatgggtttttcttcaaatttatgcccatggaactaatttttttttctcacaaaattgaagttggatgatctgcccactgtggggcttcttcttcaacatttaccttatcctttcttaaaacgagttatccatttgtaaagtgatttctttggagcattgtccccataaatttttcataaagcatcaattagctcaccattcttccacccaagtgtcgacatatatttgatgtttgttcttccttcaattttagcagaattcgtgttgctctgatagagcctcttctcaaactgatgtcttattcttcttagtgcttcaaactagatccttattacataaatcttcaacttcttgatcaaataaatatgacaaatgatgttctctaagaaaaacacccttcaattttattccttcccctgcatattttgagtaattatcttccaagacccatgtatcttttcctgacatctctgagcatgactccttaagaaaatggcaagtgaaggcctgtatctgcaaacaaattttgagtccttaagaaaaggtaaacacctcgatgagacagtcacttcacaccacaaatccc

SEQ ID NO: 37355 - DNA, 769 bp, Macaca Mulatta
  misc_feature (1)...(769): n = A,T,C or G
gggggaagggcgtttcattaatgcaaggcagggaaagcagcaagggttccgggaagaagagcttcaggaagacttagttgacagtgttttgttggacaaattagaggaagaccgaaggtaggaactataataggcctctccaactattctgacaggaggtaatgataacttaggtaggacaagggaaaaagaaaggaatgactcatattaggaagaaatcacagttgaaaaacggacaggaatggcaaacactagcatgggtgagccaatgcagagtcaaaggcaaccacaaaacctgcagcctgggtgccactaaataccacagaaaaatcagtaggcagcatagggttggggtgagaatggatggaagtaagcagatatactgaaatcagggtatgacaagacacccacaaacaatgcattagccaaaggtctaatacggggaaatggaactcagaagggcagacaaaagatatgtgataagagtgggaaatagacaccctgacaganattatgggcactgtcaaaactttgggtaatgtctacttctatagaagtgggcagttgtgcctcctccaacatttgggcaattcctggaagatattttccgattggtacacgtggaggggcaggggggccgctaccaagccatctaatggggtaaaagaccatggaatgtttactaaaacatccctaatagataacgaagggggagcccctcccaagcaacccaaggaaaattggatcccagcttgacagaaagggtccc

SEQ ID NO: 37356 - DNA, 677 bp, Macaca Mulatta
ggagaagagtctgtatatattttgatgcaagtttcatttagttgacctcctagattcctccattggtcctctgttcttttcactataaggttttccttggaaactgtatcaattattgtagttttagccattgattttaggcagatgactaccaaccttgtgtctgaaacactattactttttgctgcctttctattgggtcagtttttgtagattctgttagatgttagatcaaatatgagactaggaaatggcaaacaagtgaattacctcaagtacctttcatcttcttctgaaaagcaactcttcccatcaatatgattttatggatttttttctttattcatctgttcagtacacatttgagagaaggcgtcagaaaggagttgataattgatgatgtcttacaggacaagtcaaatgccacggggttgacaggtagagtttattttagaagagattgcagatgtagaaggacttggtacatccttcagggtgggtttgacatggtaaattacggtgtctctggatagttagaaaggcattatattggacataataataccttaaatgccagtccaaggaatttatatttttcctgtttatagtggggaatcaatatgtttaatgatggttccctagcacacagtaagttgaactaaatagttttcctctga

SEQ ID NO: 37357 - DNA, 954 bp, Macaca Mulatta
  misc_feature (1)...(954): n = A,T,C or G
tcatgctggaatggaagcagcacacttggccagctgcttttgaactttagcatcggatcgtagcttggatngggtgtatgggctgaaacgtggtgcattggttgcaccatgtgtngtacttttcaggtaccgggtctacagtcttctattnaagttaaatgtgcactaggatctcacgtccagctacatattcttatgactnccctagaaatttactacctcagcatctttgnatcatgcactgtcctntgggagctgnatggcattccactcccnccaaacaaacaaaaatcacatgtatacagtttacccgaatgagcggagaggtcagtgaataactctgttaacgcaaaactttggtgagcagatagagcaaaggcattgtgaatttcttctgaaccctgtttgttcctcttttcattgttttcccctgctcccagatcagcggatccgtttgtttctcaaatgctgtttgcttcatggcatgcaggagtctctgctacactttcctggaggcctcattctcattgaaagggagttggcagaactgggctggaagtttctcaatctgatgcatcataatcagcaggtatttggcccatactatgctgagatcctaaaaaacatcatccatccagctcaagcacaagaaacagatgtggagcataactgatagtgctggaccccagccatggcaacagggatccaggagagagaggtcagcatgtttctgggaggacatcacctgtggtcagtcgaacactcagccctcttccttgctacagccaggacacagggatgcaggggtcaagcatgtaaacaccaaatggcccaatccccttcactaataaacttctgagctgcaagaaaatttcagttcctcctgtgttctagctaaagtcaggttctgcaccctcatcccctaactagctgagtgagaatcccagtgggccc

SEQ ID NO: 37358 - DNA, 648 bp, Macaca Mulatta
  misc_feature (1)...(648): n = A,T,C or G
ncagtcatacttgggcgggccaagatgttaaagtttgagcgagcggcgannnnnnnnnnnnnnnnnnnnnnnnnnntatgattttatttatttgtatatctgaaatgatccatgtcatctctagaaattctaaccccaaagatattaagtaatttntgcgttccttgacgatttggtttgccagtgactggcgattatacattgatcctgtttgttaggttctaggtctaaaagtaaaggaaacagaaccttccccaaagtcatgttgagaaaattggagatggctttttacaactttaaaagcagttaaatgcttgctgaatgccagaaagaatgaatagtttgcttttgatctaagagttggggcaacaaaatggtttaggagatagaaagtagtaaggtgcaaattgctgtagtaagctcctcaagtaaaacagagaggccttcaacataaatttacctttttactggccagaactcaatttggccagtagaagaacctgccttctacagtgaagtctttgttttgtgtgtgcatcagaacatcttttaaaaatacggacttttcttataacttcttctcctgtgaatgtgtaggtcaaatttgtgaaccggttaagccgctgacaagagagggaagggcacccc

SEQ ID NO: 37359 - DNA, 1052 bp, Macaca Mulatta
gttctgcgccgccatgtcgcggaggctgctgccccgggcggagaagcggcgtcggcggctggagcagaggcagcagccggacgagcagcggaggcggtcgggagcgatggtgaagatggcggcggcgggcggcggaggcggcggtggccgctactacggcggcggcagtgagggcggccgggcccctaagcggctcaagactgacaacgccggcgaccagcacggaggcggcggcggtggcggtggaggagccggggcggcgggcggcggcggcggcggggagaactacgatgacccgcacaaaacccctgcctccccagttgtccacatcaggggcctgattgacggtgtggtggaagctgaccttgtggaggccttgcaggagtttggacccatcagctatgtggtggtaatgcctaaaaagagacaagcactggtggagtttgaagatgtgttgggggcttgcaacgcagtgaactacgcagccgacaaccaaatatacattgccggtcacccagcttttgtcaactactctaccagccagaagatctcccgccccggggactcggatgactcccggagcgtgaacagtgtgcttctctttaccatcctgaaccccatttattcgatcaccacggatgttctttacactatctgtaatccttgtggccctgtccagagaattgtcattttcaggaagaatggagttcaggcgatggtggaatttgactctgttcaaagtgcccagcgggccaaagcctctctcaatggggctgatatctattctggctgttgcactctgaagatcgaatatgcaaagcctacacgcttgaatgtgttcaagaatgatcaggatacttgggactacacaaaccccaatctcagtggacaaggtgaccctggcagcaaccccaacaaacgccagaggcagccccctctcctgggagatcaccccgcagaatatggagggccccacggtgggtaccacagccattaccatgatgagggctacgggccccccccagctcactacgaagggagaacgatgggtc

SEQ ID NO: 37360 - DNA, 865 bp, Macaca Mulatta
ggtatactttaaatcatctccagtctacttgttacctactgtaatgtaaatgctatgtaaatagttctttaggggataatgacaagaaaaaaagtctgtacatattcagtacacttacaaccactgtaggcctaactatgttttccacgcacggttagttaaatccgtaggtgctgaacctgtggatatggggggccaattgtattttgtatgaactgaaaccaagtttctatgcattgtttcatggaattctgaacattgtcatcataaattatgccattacccagaagcgtatttctaacacagaattttcctgacttatatttcccaatagtagctagatactttcacatggttgtcctcagcaatccaaaatgtttagcttggtatattcagaatgtcccaaaagttgtcatcacagccaccaaaatccagcctccatcaaaatatttacccccactctgtgcagatttaccatcctaagtggcatttttaagtaaaccaggaaatctgagttaaaaaacctggaacaccaaaccctgttattacagcttcgcctccccacaatccttgttgaaaaaccaaaaatccctgcccatagttctaacaatttcaaaatccaatttttgtgcctgcatcggttggtcctacaacatttagagttttatgcccccttattcccttctattaaggagaactttacattttaatagtcccttaaagtaaaacctaatattttcacaatgtgttaaagatttcacatttccaatatttattattctccaaaggtaagggacccaagatcattccttacccgaatataatagaaaatgtcatacatcttgtagatgttccctctaaaacc

SEQ ID NO: 37361 - DNA, 162 bp, Macaca Mulatta
agatgaaaggccagatggagtctcatctgaaggagttagagcgtgtctgcgattccttgatggcagctgaacggaggcttcacgagtgtcaggagagtctgcagtgctgcaaggggaagtgtgcagaccaggaacacaccgttagggagcttcagggccagg

SEQ ID NO: 37362 - DNA, 765 bp, Macaca Mulatta
  misc_feature (1)...(765): n = A,T,C or G
gggataagaagtccattagagctgtatagcagtttggggagaattgacatctttaatatgttgaggtttccagtctatgaacttactatatcttcttacttatttatatcttctttcatcgctctcattttgtaaaatctagcacacctctcatgtacgtttgactttgacttttctccacatacctgcttcttttcctagccttcccaatttcagaaaatgggatcatcctttaactcaagcttgtccaactcacagcccgtgggctgcatgtggcccaggatggttttgaatgagacacaaatttgtaaactttcttaactttcttaaaaccttatgagatttttttgtgacttttcttttttttgttagctcattagctgtcattagtattagcatattttatgtgtggtccaagacaattcttcttccagtgtggcccagggaagccaaaagattggatacccctggtttccttagttgtttaaggtaatccctttctctttttccctcgtagccatgccccagcccgtctatccgcaagtcctttcaacttttaaccctgagacatattctgaatctatgcaccttttagcatctcatctactactacttcccttatccaagttcctctttgttttcactcacctttccttgctttcactcttgccctctacagtgcatttttccacttagtagccaaagtgatctttttaatacaacaatctggttgtgtacttccntctgcccccaacttttcccatg

SEQ ID NO: 37363 - DNA, 834 bp, Macaca Mulatta
  misc_feature (1)...(834): n = A,T,C or G
ggcctgttggtggacttgctttttattgccatcattttgccaatatgaataattctaaaatatatattcaaggtacttatataaatactaaaaattaaatctttcatcttctgattaagtttgcttcctttaaaacactgaaaattgccttgatgagttttgtattacacaaggattaacgtctctccttggccccaaaattctgtgctctgcagagttatcctgcccctttgtgttttgatgacaggttatactctgcttcttttggtaagaagatggacttcctgattgaagtgcaagctgagagggaaccctcacatttggcagacacaggaatgtcttccttcctttgtgacactatcatagatcccaacaagtgcttggggtcagctattctacaatctcattactttgtgggctgctcttgtgtgaaaagtgagcttccctttgtctgccacccttacattcaaagataaaagggcctccagccagtcaaggaacattgttaagccagcccaaactccttcctaaagaaattttcaaaagcccactggaaattattttttggccctaaaaaacacnnnnnnnnnnnnnnnnnnnnnnnctttggggggccaccccgaatttatttaacctccttggccaattaataatcctcgggggaaaagtcgttacaaacagatatattttctttaaacaaacccctgcaaaaaggttggaaaactttgttattgggggccgttactttaatacacaatggttcacagaggaaatggggctcttggtgttttatatctcaatttctgaacactagtgaaaaaaaaacactcggac

SEQ ID NO: 37364 - DNA, 610 bp, Macaca Mulatta
agccaagcacaatgaaaccgtagccagattctgatctggctcctcacacagaggaacttggtggtgatccccacaccggtgacactggaacacattgctgagaacttcaaggtctttgactttgaactgagcaaccaggatatgacctccttactcagctggaacaggaactgaagggtctatgccttggtgagctgagcctcccccaaggatcacccatgccatgaagagtttcgaagctgtggatgtctgctcttcctcaagtaacctacacctggttttcccacctcattgttctcttgctaatgtagtacggcctgtatccctcagcagcggggcagcaatctgcagtgattgctgccagcaagggcttgtcaagcttgatgtcaggtctgaagagcagcatcagtagagtggaattcttttcccactttctttgccatttttgctcagctgaagaaagtacaacctgaatacccttttctgattaagaaggagcaaaatctgcagagtcaaaatagtgcctctaacagttgagtttcggctgcttggaactataatccttacagcaagacttctctttgcctcagataaaaagtgcttttgtgaa

SEQ ID NO: 37365 - DNA, 126 bp, Macaca Mulatta
tatgtcctcgggccaggccctgccctgtgaacctgtgagcacagccttccacacctagcccagccctgaatgatatcccacggcagttgtgacaggccagcaacaaaagcaccagcagcccctagt

SEQ ID NO: 37366 - DNA, 841 bp, Macaca Mulatta
ggggacattcgcaccaggaaaaaaaacaaccccccgctcgtcccgccctgtccctccaggctgcgcaacgctggagggcgatgggagcgccagacagatctcatctccatgtactttacctttccctgcacctctgcttagctgagaggtctcaagatcatcatttgggacctccacttctgctgggtctgtcatcttagatcaccttgatcttcagcatctttgtgaacttgaacaggggaatgacccttattataggcaatgactgagtcccctgttacgcccagcgcccctaatgataactaccatggaacccctgctgaataaaacgctgtggatgaatgaataattcacgaaacctaagctcattaacgtctcacaactccccaagacggacgagtgtacactcatccaaaccttctgggccaccccttaaataaacctccccctgggccgtccactacaaacccctagacgattggcttcgtagggttctatcgcgcagcaaaacatgatcccccccccccctgcatgaaaccatctcccaattttaagatttccttccccggaaccatccaggccgggctgtctcaaatgcttctcaaaggtagtcttccccccaagcaaaaaaaccccttttacgcatatcagttttttccaaccacctgttcctcgataccaaaaaataaaactgaacattgattccctctgatttccaccttgcctggctctcggccatttttaccggcccctcctttttctttccccttggttccctcccgggcaaccgatcctctccgccgacttctatagggtaacgatacacccaaaccctcatttt

SEQ ID NO: 37367 - DNA, 814 bp, Macaca Mulatta
  misc_feature (1)...(814): n = A,T,C or G
nnnnnnnnnnnnnnnnnnnnnnnnnnnnnagcccaccaccangncccnnnnnnnnnnnnnnnnnnnnnnnnnnnnagttttcactgtgtacccaggatgtttgnnnnnnnnnnnnnnnnnnnntgcccacttcggcttccgaaagtannnnnnnnnnnnnnnnnnnnnnncgcgtccagcntcatgccttcaatntcaggcagaccgttcacatctttgcctcagccttcacatcctgcttgctcaaagcctcaaggttagccagaagtaaaacttgggccttctcagatttccagaaatatgttaatcttttttatttcttttctgttagatgagatcttgctatgttgcncaggctgacgtccagtggctatttacaggtgcaatcataacacactacagcctcaaactcctgggcttgagtgatccttnnnnnnnnnnnnnnnnnnnnnnnnnnnnnnnnnnnatgtgccaccaggcagcttatgttaaatctttttaatgccctctccccatggaaatctcattcttcacttttctttttcaagtttttcagtcagcctgttgttagctttaactactgtcactacctgaggctgctgtaatattaaacaattgttactgattgtttttaacaatgccctgtggagagggccacttgcacagggcaagctctgagttatgccaattaaagacaaaccctgggaatgtagcctttccaggaagctgccagacaagtcaaatagtgacaagactctgggcatggggctcttttaggtgctccacatcctttttgcccctccagtggctgccc

SEQ ID NO: 37368 - DNA, 835 bp, Macaca Mulatta
  misc_feature (1)...(835): n = A,T,C or G
ggtgccctgctctcnnnnnnnnnnnnnnnnnnnnnnnnnnnnnnnnnnnnnnnnnnnnnnnnnnnnnnnnnnnnnnnnnnnnnnnnnnnnnnnnnnnnnnnnnnnnnnnnnnnnnnnnnnnnnnnnnnnnnnnnnnnnnnnnnnnnnnnnnnnnnnnnnnnnnnnnnnnnnnnnnnnnnnnnnnnnnnnnnnnnnnnnnnnnnnnnnnnnnnnnnnnnnnnnnnnnnnnnnnnnnnnnnnnnnnnnnnnnnnnnnnnnnnnnnnnnnnnnnnnnnnnnnnnnnnnnnnnnnnnnnnnnnnnnnnnnnnnnnnnnnnnnnnnnnnnnnnnnnnnnnnnnnnnnnnnnnnnnnnnnnnnnnnnnnnnnnnnnnnnnnnnnnnnnnnnnnnnnnnnnnnnnnnnnnnnnnnnnnnnnnnnnnnnnnnnnnnnnnnnnnnnnnnnnnnnnnnnnnnnnnnnnnnnnnnnnnnnnnnnnnnnnnnnnnnnnnnnnnnnnnnnncctcctaccagattgtttgcaaaagctatcccaccaaaaaatctttagaaaataagaacctgttattaatccgggaagacaaagaaggccccactcttttttttttcaccccaaaaatgccttctcccaaacccagaagaaaccgtcaaaaacaattataaatatctctctaaagagaaaagagagacaagaataaatatatcaaccttgtttggggcagacccctggctactatagaaagagttttttagaaggaatctctaaatgggctcccgcggggtccccaaaagaggaaagttgaaaacaatgggcaaaatatataggttgtcacagggag

SEQ ID NO: 37369 - DNA, 277 bp, Macaca Mulatta
  misc_feature (1)...(277): n = A,T,C or G
tgaaaattgttaagaaagctaattattatatctttanatgactctaaatttggtctatttaaaaattcaaaacatagacatttggaaatgactttctcntntcagtactgaagttgagagggagaaggaaaaaaagtgagaaattccagtgcctggatattcccaggctaatttctagacaagtgagttttgataagttcaagtttcagataagaannnnnnnnnnnnnnnnnngttggtttttccaaatcatgagtaaaaatgtctctgaaagagc

SEQ ID NO: 37370 - DNA, 273 bp, Macaca Mulatta
tatgctattcaaatttatactgaaagcagcactttaagaacctactagactagaattatctcagatagaagcagattagagactgataaaaagtgattagctacaccgaactagtttcaaggacacggtagaaccgctatcctgctgtgccgttttctggttgtgattctttataagttgtgctaaccctgcctgtatcaccttctctactccattgacaatgaaacacagtgacttgagaacatgcggaaagctatgggctggatagtaatg

SEQ ID NO: 37371 - DNA, 296 bp, Macaca Mulatta
ggtttacccgtagcgggatccaaggggatggccctcggctggtcaaggtcctgccagaagaggaccttccgggatgtgccattgaggtttggcgacctcgatgcggttgggtctctgagtccgtccagtacagcttcttgcccacccagtcgcaggcaaggccatcgggcgagaccaggccggagatgaccacattctgcacggcggcccccgtctggttcaggtaggtctgcttgatggcctcctcgctcacatctgtccagtacacggctcccttggagaactggaagtccact

SEQ ID NO: 37372 - DNA, 669 bp, Macaca Mulatta
tatgcctatgcctgcttcgctgtatttcacaacatccatgatttcagtttataagtagacatatatctaagggcacatttttggaaagtgaggaatagcagcagtataacttccttctgtcaggcctttgagttttaatattttgtattgctcttcaaatggatccttttaaaaaattgtagataatgagtcataaatagattctgctaactgaggggagaaacacattttaagtaaatatttttcagtgtttggggccttaaaaaataactgtgttcccttaaaattacatgttagagtttttagttttttttggtttaagattggttaaatcagtttaaaagccacttttttgtcaacatttaatagtctccatttctgttaagataatttatactgctgaggaattactattaatagctatcaacatgccaccattaaggtattcactttagattttttattaaagcttttttcttgcacactgatcgttgtgtctctaagctgattttttcagctcatttatacctatggttaaaaagtataaaaacttgatatttagatatatgttttcctattaatttatgttttaaaaagacaaaattgaatatctgtcagtccctgaaggcagtttgtttttatactgtcacatttgtatttgttgtttaa

SEQ ID NO: 37373 - DNA, 749 bp, Macaca Mulatta
  misc_feature (1)...(749): n = A,T,C or G
nnnnnnnnnnnnnnnnnnnnnnnnnnnnnnnnnnnnnnnnnnnnnnntgggcnnnnnnnnnnnnnnnnnnnnnnnnnnnnnncnnnnnnnnnnnnnnnnnnnnnnnnnnnttactacaaaaaaaattagctgggtatggtggtgtgcacctgtaatcccagctgcttggaatgtnnnnnnnnnnnnnnnnnnnnnnnnnnnnnnnnnnnnnnnnnnnnnnnnnnnnnnggcatcactcactccagcatgggtgacagagcaaacannnnnnnnnnnnnnnnnnnnnnnnnnnnnnnnncacaaaccaccatcctgataaaggcaagaacaaaatgctccagatgacatctgataagaaaaaaacagctgtaaccatagcttcaaataatgaaaaaagaaagtatgcagttctcggctgggcactnnnnnnnnnnnnnnnnnnnnnnnnntgcctggctgggaatgagtgttttaaattagtttgactgtttctgaaaaacaatctggcaatagtaacaaagattaaaaacaatttccatcttttgactcaaaacttccacttctaagaaataatccaaaaagaaaaaagggacctggtcagaaatgcttggatgctttttgtattaacaaatattggaaacagctcaaatgttggacccataaggaaaggctgagcatctaagagaataacatctctgtgcaagtattttatttnnnnnnnnnnnnnnnnnnnnnnnnnnnnnnnnnnc

SEQ ID NO: 37374 - DNA, 836 bp, Macaca Mulatta
  misc_feature (1)...(836): n = A,T,C or G
gggaaaatgattagatggcatcatgtcagatagatgggacttttggggtgtgagacagatctttttgggtctttaggcctctgtgttttcactaggagtgaggtgggagctgttggaagcttttgagcagaggactgatgtgatctgaagaaacttccacaagaaccactctggggctgtgcttcccagtacattatgggaagtggcctcctaggaaagagccatcccaaagttcatgccaacagcagtccaaggggttaataactcctggggtctccagcagatgactcaagtttactaacagggtgaatgttgcttggaagtctggacatcctagctgggtgcggtggctcacagnnnnnnnnnnnnnnnnnnnnnntgccaacgcaggtggatcacctgagttctannnnnnnnnnnnnnnnnnnaaaacatagtgaaactnnnnnnnnnnnnnnnnnnagaaaatttgcccgggcataattaatgaggtgccctgtcaatcccaagctaattcctaaggcctgaggtaaccaagaattgcctttgaaacccttgcaagccagtaaggttgcttgttgaacccgaagaatccttgccaaattacaccttccaggccctgggggttggaaagaaaccaaaaaaccttccttccttctaaaaaaacttcattatattgaaactaaaattcacggaaagttctttggaaccaccccctcaaaaaaatataagtttcccattttaaaacatggcgctgtgctggaaaaaaaattacccttagcacctgtaggaactttggggggcaaattttttacccaccacaaaaaatggggata

SEQ ID NO: 37375 - DNA, 801 bp, Macaca Mulatta
  misc_feature (1)...(801): n = A,T,C or G
ggtgcgnnnnnnnnnnnnnnnnnnnnnnnnnnnnnnnnnnnnnnnnntaggtggatcacgaggtcaggagattnnnnnnnnnnnnnnnnnnnnnnnnnnnnannnnnnnnnnnnnnnnnnnnnnnnnnnnnnnnnnctggtggtatcacctgcnnnnnnnnnnnnnnnnnnnnnnnnnnnnannnnnnnnnnnnnnnnnnnnnagtnnnnnnnnnnnnnnnnnnnnnnnacnnnnnnnnnnnnnnnnnnnnnnnnnnnnnnnnnnnnnnnnnnnnnnnnnnnnnnnnnnnnnnnnaattaagattggtaggtgaattaaatgagataatacacataagttccttggcctggcactgcaagtacttaaagtactagcttattagactttcaacatatattttccccttcttaccccaatatgctactggctgagtaaattaacaagtatttctactaatgatcatagatcataatgcaacaaaaattaagattttattaatgtaacaggccaaatactcatatttacttcattatggccaactctcacttataagaaggtagtatagaaatgggaaaaaacccaaaactattgggttatttttctcctacccccccaatctgaagggaaaagtttaaaaaagtagggattttttacctttaatgattcctcaggcctgtttaggtcccattcccaaaaaccttaaaaaaaccaacctccaatcacgttaggccctatttatcaggaatttttcccccgggccttttttaccggggttgaaaatggaaaaagggggttaaggc

SEQ ID NO: 37376 - DNA, 825 bp, Macaca Mulatta
  misc_feature (1)...(825): n = A,T,C or G
nnnnnnnnnnnnnnnnnnnnnnnnnnnnnnnnnnnnnnnnnnnnnnnnnnnnnnnnnnnnnnnnnnnnnnnnnnnnnnnnnnnnnnnnnnnnnnnnnnnnnnnnnnnnnnnnnnnnnnnnnnnnnnnnnnnnnnnnnnnnnnnnnnnnnnnnnnnnnnnnnnnnnnnnnnagtcgacatgtatatcactgatttatattttgctctcatggtaggaaataatagtctttctgaaaagcaggtgctttttctactacaactccatatcctgggcctcatcttcggaaaagtcagacatagagctctccgatgagctgtccccggtgccctcttcctgttctttcagtgcctcctccgtggcatatttctggatgtactctttaattttctgcttgtattcttctggtcggtggaggtacatggctgcagcgtcaccattgagaggatctatggggttaggataggccaacaactggggcaggaaggactcaaatatattggtaagatcatagagagctgtccaagtttgattaattacatctagacacacagttcctgacgcttcatcaatgttgggatggaaaattttattcatgaatcctatagatggagatttgaaagggtatttatcaggtaggtccactctaactttccatactccgccttcatatggtgttccttgtggtccataaaacttcactacaaattcattgagtcctcccaggatcgtaacctcatgtttactctcaatgcttcgcgaatttctctagctggtccttaaataatcagtctggacttcaaccaaaaccactgcctgaagggcccc

SEQ ID NO: 37377 - DNA, 538 bp, Macaca Mulatta
  misc_feature (1)...(538): n = A,T,C or G
ttgtgccagtggaaaattcacccatggtgagttacttcatccttctcggcatgacagataactctcagcttgaagtcctgctatttggagtctttcttattgcttacctcatcactgtattggagaatctaggccttgtggttctgatcatattcagcccccacctccataccccatgtactttttcctctctaatcagtccttccttgatgtctgtttctcttccattacaattccacagaatctagtaaatttgttttctaagctacagtatgtttctttccttttcctgtataactcaaatgagcttgtttataatctttgcctctgatgaatgcaattttttaacgtcatggcctatgaccgctctactgccatctgtcacccactgttctaccacactaccatgtcaagaagccattgtctttttttggtagcangatgctaccttggtgggtgggttaagatggtcactgtgacaacttccatcacacaactatcattctgtcaaccatgtgtcctccctgccttcttctgt

SEQ ID NO: 37378 - DNA, 614 bp, Macaca Mulatta
  misc_feature (1)...(614): n = A,T,C or G
ggggacaagtaattattcagtgagcacattatttgtattgaaaacatttgaaatttgtataaagcaaattataattcaattctcaagttagtttttataccttaatgcttagtgtttacataaaaacatatagtctattttttctacatcagagctatgagaggttgttctatagtagatgaacgtcattaatatcaatttattttcatggaagtttaatggcaaatgtaaaatacatgaagaaaatcttaaagaggctctttgtgtttgaatcataaaacagtaatgtgtgtaagcatatagtacatatttagggcattatattctatactaaagtaaagagggatactctgaattttatttatacatcaattgttccttnaagtagaaaacactggtcagttatttaaaatactggcaaacctttatgtacatgaaagtagtatcttgaatatatttgatgtgttaaaaaaaaacttcttcccgatatcaaggaaatgaaaccctttccgagaatggaaagggcttaatcatttcccaagacataactccaaaaattgaaaaatcccacgtaccatttgaatattccgttttgaacccggggaaaaaaattt

SEQ ID NO: 37379 - DNA, 772 bp, Macaca Mulatta
  misc_feature (1)...(772): n = A,T,C or G
gggttacagatgttcttgtccttctgttaactggaagctggaggtaattaccagcagaagtgcatctctgtgaggcacattaggctggtggacactttccttaaccacaaattgtgcctctaattaggaagttgctgatgcaaggagttcagaatctagtttatgggcttgcttaggccagaagcatcttccagctttaagtggtctaaaatggtgtgggaggaggagggaaagggatcggaatgggaaaaggtagagagggcagattaagtggcagaagagaggagataaggagaaatggaaggaaggaagaaaggagcattctatttttctctatcagacttcattttgataggctggaacatcaattcttggtgtaataactgaaaaactattcaacagtatctagtaaagctaaatccctgtctaatctataacccaggaaatctactccaaggtttatatctaagagaaataaatatatatgcccaccaaagtgtatatacaaaaatagttcatggcagaactattcatactagacccatcctggaaacaaccctaatgttcatcaaccagggaataaagagatccattgtagtgtttcctacgatgacgcaccacacagcagtttttaaaagaaaacagcaaaaccactactgatgatagccgccacaaggtatgttgaggccaaagagacagatacagaaaaggtacatttctgtacaattntctttttttatcagcttcaagaaacaaggaagggatgaatcta

SEQ ID NO: 37380 - DNA, 804 bp, Macaca Mulatta
  misc_feature (1)...(804): n = A,T,C or G
ggtgtagaggtttgggcaatctaatctgatttggaaatcagagaaataagagaagagtgttacaacttgagtggtttccaaaatcaggttatagatggtaatctggattgtgaattaaaatatttgatgctgatagctcttcatattacaaaaaaatttaaccagctcctatcatttgtcacagatttttttaacctctcttcagtaatgcaacaaaatgtctggcattttatgcctcatgtctcttcggcccttgtaaattggaattatattcaacacatttcacttgcagagtttacaatgtaaggtgattttggaatgcttgttagagttccacagtaagacatcattctacattagcccgaggggtttgctcaacacaatattagaaaatacttgagatttgaatgaccctaggtttctatgatcatgtcatttgtgtctaaactggtaaatggaactattgctacctcaaggagtttttgtttatattgaacactaaacgaagtaggctaatgcttggtacttaaataaatgaaatcaaaaactcctccagttattttccaataaccttatgttttaccctgtagacattgtgaaactaatcaattggttcaattcctcctttttatccctgtggtccaccttctttttaccatttttcctcattttttccgttttacaaatttttcccttaattttaaaatggagaaaacgggggggtactctattaatttccacttgggcctaaaaaaatgtggtacaantggggcggaccgctaatatgggggggaaacccccccc

SEQ ID NO: 37381 - DNA, 716 bp, Macaca Mulatta
  misc_feature (1)...(716): n = A,T,C or G
gggggttttgctcaagtgtttgggtgtcttcgcggccgctgaagatgaaccgactcttcgggaaagcgaaacccaaggctccgccgcccagcctgactgactgcattggcacggtggacagcagggcagaatccattgacaagaagatttctcgattggatgctgagctagtgaaagtataggatcagatcaagaagatgagagagggtcttgcaaagaatatgggtcaagcagaaaagcccttgccaagttttttaaagccaaaaagcggaatggtattgaacccagccagccgggggaaaaaattttccgccccccaaaaaaagtttctattttttcaaaacattggggaaaaacaaaaggcccccnnnnnnnnnnnnnnnnnnnnnnnttttcccccacagggnnnnnnnnnnnnnnnnnnnnnnnggggggggacnnnnnnnnnnnnnnnnngnnnnnnnnnnnnnnnnnnnncggnnnnnnnnnnnnnnnnnnnnnnnnnnnnnnnnnnnnnnnnnnnttnnnnnnnnnnnnnnnnnnnnnnnnnnnnnnnnnnnnntttnnnnnnnnnnnnnnnnnnnnnntgttttttttcaaaaacccccaaaggggtnnnnnnnnnnnnnnnnnnnnnnnnnnnnnnnnnntttttttgtgggggagtttnnnnnnnnnnnnnnnnnnnnnnnccctctctttaagggggggaaatt

SEQ ID NO: 37382 - DNA, 408 bp, Macaca Mulatta
caggtcctctacaacagtgagccgacttccctctccaaaatacacggtgtttccagaaatgggtgcctcccgttgtctccaggcacagagacagaagcctgagtcactgaggaggagcttcttagaactcaggatgaaccgcctgtcctggggcctggaggctgagagattctggggcacctcagagctgatctggtcaacaccaatggagtagaagagcagctggaggcccctgcctgcagcctgtcggtaccagtataggttagggtttgatgttccctccacagtgcactccagagaaagcgggctgcccgcaggctgcaccagggtcgctggccattgatgaacagtctgagatctgaccccgaagaaagtgcccaggagaagggcaaggggagagcagagcat

SEQ ID NO: 37383 - DNA, 715 bp, Macaca Mulatta
  misc_feature (1)...(715): n = A,T,C or G
ggatggaaaaccaccaaaccacggaagtaaacaagagggtaagaatcaaacgaaggatcttcaaaatattgagaaaacaaaatagcatgagtaaattattacttatcaatagtaaccatgaatgtaagtggattaaattccccaattaaaaaatacagagcagctagatggattaaaaaaaaagacccaactatatgttgcctacaagagacatacctcatcattaaatataaacatagactgaaagtgaagggatggacaaagataccccatgcaaatacaaaccaaaagtgagcagaagtagccatacttgcactagatacagtagacttgaagtcaaaaactgtgagaagagacaaagtcattatgtaataataaaaggatcaattcgccaagaacaaaactgtaaataaatgagcactgaacaccagaacatccaaatacataaaagaaaatattattagatttaaagggggaaatagactccaatacaacaatattagggacttcagcatccacttttaacaatagacaaatgatttagaaacatgagacttaaactacaccgtggacatttacagaaccttaacagctgcagaatacacatttcttctcaactgtggcatggaaatatttctccangtaaaggatcaatatggttaggagaatgggtatcaaaggtattttttaccgggaaaccacaaacctgatatac

SEQ ID NO: 37384 - DNA, 206 bp, Macaca Mulatta
attagcaactgtaaattctgccacctcatacatggaacagagcttgtgggatgctaatagttaatgaagtatacatgatttaatttcttctaataatctatatgttttctttaaggatggtggtatgttgctctttttcagctttatttttaagagtacagtcaggaaaccaacaaggggcctaagagtggctggccctgcttggg

SEQ ID NO: 37385 - DNA, 630 bp, Macaca Mulatta
  misc_feature (1)...(630): n = A,T,C or G
ggggaggcattttggacttgctaggacagtgataagggtctcgggtacaaaatgctcctgattctggtgtagctccatggcgagtcagaacaccgaacaggaatatgaagacaagctggccccgtctgttggtggagagccaacaagcggggacccatttagttcttcacctgatccaaatccagattccagcaaggttttggacagacacgaggaccacgccgtgagccaagatccaggctcccaagttaactcaccaccagaagaccgaaaccaatgcgtggtcaacacggaagaacaccagaacctttttaagctctccttcccaagaaagctttggatgatcgtggaggaagaaacaattccaatctgtgaactggaaccataatggaaacccctgatcatcaaaaaagatcccttcccaagggaatttcttcacggaaagggccaaaaggatcttcaaaaaaaaactttgaaaatttcttccccactgaacccctgggattcgaaaaaccccccaaacatctnnnnnnnnnnnnnnnnnnnttttccccacccccnnnnnnnnnnnnnnnnnnntccccggaaaatttccaaaaaaaaccctcaaaacggttccaaaaaccttgc

SEQ ID NO: 37386 - DNA, 139 bp, Macaca Mulatta
cactcacatcttggagcctcttactggaaggcttgagggcaaaacttgagtatttacagataatatttttagattaaaacccacaagtatattatgaggcagaatgcacaatgtgcatgaatgttttaaatcccagatg

SEQ ID NO: 37387 - DNA, 90 bp, Macaca Mulatta
gaccgcttgtagttgaaagcgactgacttgaccacatcaccaccgacgcctggcagtgaagcttgaattgtgtagcctccgttgcgcgtt

SEQ ID NO: 37388 - DNA, 755 bp, Macaca Mulatta
ggacagttgatattgacatctctgcaaaagcgagaaggcagcaatgggacaacatctgatgaaccttagaaaaggagaattccagaatagccaacagtatcgactaaaagactatgctggccaattagatagcagtagctcagaggtgttttattctctccattattgattgggtgaaggtctaccataagaaagaccaattaggcaggagtagtttacctcctgtgaacactcaaaactgacttgccaaggtgccattctagaccagacccctaaggaaaagggagtggtataaaatcttacgaaaattttatgctgggagtggaataaaattttatgaaagggacaaaatagagacaagaagagaaggagatagtccatataaaagtgaggcaaagtcatagaatcaagaaatcttagaaaaccacagagcaaacccatgtattttttaacactgcccagaaacagctttgtgaacttatattccctgaacctactcattctaaaagttcaagaaaattaaattcacataaaaatgagttacagaaatgtattgagatcaaatcacaaagttattatacgagaaaaagggacagaatatctctccagacataaaaacttgcagtgaaaacaaatgccccaaaaaatagacccaaaatttataacccacaactggttatcctattttcaccaatgtaggttaaaaagggcatttaaagaaaaatgaacattgaaggacaatggaaaaagaaaca

SEQ ID NO: 37389 - DNA, 1417 bp, Macaca Mulatta
  misc_feature (1)...(1417): n = A,T,C or G
gctgacgagttcactatcgagtccgttaccatgcggaatgtgaggcgggtgaggatcagacacgatggcaaaggctctggcagtggctggtacctggacagagtgctggtgagagaggaagggcagcctgagagcgacaacgtggagttcccctgtctcaggtnnnnnnnnnnnnnnnnnnnnnnnnnnnnnnnnnnnnnnnnnnnnnnnnnnnnnnnnnnnnnnnnnnnnnnnnnnnnnnnnnnnnnnnnnnnnnnnnnnnnnnnnnnnnnnnnnnnnnnnnnnnnnnnnnnnnnnnnnnnnnnnnnnnnnnnnnnnnnnnnnnnnnnnnnnnnnnnnnnnnnnnnnnnnnnnnnnnnnnnnnnnnnnnnnnnnnnnnnnnnnnnnnnnnnnnnnnnnnnnnnnnnnnnnnnnnnnnnnnnnnnnnnnnnnnnnnnnnnnnnnnnnnnnnnnnnnnnnnnnnnnnnnnnnnnnnnnnnnnnnnnnnnnnnnnnnnnnnnnnnnnnnnnnnnnnnnnnnnnnnnnnnnnnnnnnnnnnnnnnnnnnnnnnnnnnnnnnnnnnnnnnnnnnnnnnnnnnnnnnnnnnnnnnnnnnnnnnnnnnnnnnnnnnnnnnnnnnnnnnnnnnnnnnnnnnnnnnnnnnnnnnnnnnnnnnnnnnnnnnnnnnnnnnnnnnnnnnnnnnnnnnnnnnnnnnnnnnnnnnnnnnnnnnnnnnnnnnnnnnnnnnnnnnnnnnnnnnnnnnnnnnnnnnnnnnnnnnnnnnnnnnnnnnnnnnnnnnnnnnnnnnnnnnnnnnnnnnnnnnnnnnnnnnnnnnnnnnnnnnnnnnnnnnnnnnnnnnnnnnnnnnnnnnnnnnnnnnnnnnnnnnnnnnnnnnnnnnnnnnnnnnnnnnnnnnnnnnnnnnnnnnnnnnnnnnnnnnnnnnnnnnnnaggcccggaataagaaggagaaggacaagcttgggcaactgctcaagaagnnnnnnnnnnnnnnnnnnnnnnttgggccggggatgcaggaggtgattgagcagcacaagttcgaagcccaccgctggctggcccggggcaaggaggacaacgaacttgtcgtggagttggtgccagctggcaagccgggtcctgagcgnaacatctatgaggtccaggtgatcaccgggaatgtgcccaaggctggcactgatgccaacgtctacctaactatctacggcgaggagtatggnnnnnnnnnnnnnnnnnnnnnnnnnnnnnnnnnnnnnnnnnnnnnnnnnnnnnnnnnncagacagacaccttcaccatctatgccattgacctgggggccctgaccaagattcggattcgccacgacaacacaggcaacagagcaggctggttcctggacagaatagatattactgacatgaacaacgagatcacgt

SEQ ID NO: 37390 - DNA, 197 bp, Macaca Mulatta
  misc_feature (1)...(197): n = A,T,C or G
ccaagatgaagcagcagggtcatgagacaaccgcttggccggagactgaagagataccgcagggagccagtgcctgctggaaggatgacctccagaaggaactgagtgatatatggtnggtctgctgtgcacatgctgcagaactccatagacggcctcaccatgtgctcgggggcccgtcccaaggcctcaagcct

SEQ ID NO: 37391 - DNA, 887 bp, Macaca Mulatta
  misc_feature (1)...(887): n = A,T,C or G
gggatgtggtggcacacacctaaaatnnnnnnnnnnnnnnnnnnnnnnnnnnnnnnnncccgccaccacacccagctgnnnnnnnnnnnnnnnnnnnnaacgggatttcaccttgttggccaggccgannnnnnnnnnnnnnnnnnnnnnnnnntnnnnnnnnnnnnnnnnnnnnnnnnnnnnnnnnnnnnnnnnnnnnnnngtacctgaccaggaggtaaatttagacgaggtcatgaggatggggccactgtgaggaaattggtgcacttataagaaaagacaccagaaagtttatctctgtctctactcacaaccactgaggaaaggccatgtgaggacacagcgagaaagtggctatctacaatccagaaagagagcctcaagagagcccaacccttttggaccttgatctgggacttccagcctctaagactgtgagaaaaacaaccttccgtgattttaaacacccccatctatgggaaattctagttgtgagcaacccttgagactaaactaagaacaaccccctattttcccttgacggacaaaaaaaaaattgaccctccattgcccaaaaacaggtcctcaagtatattactaacaccgaaaaaaaatttgnaaaaatagaaaacaaatgtcataataatttgtggtgggttgaaacattacatacagtgaccccgtgtcaactcctatactttaaatatcttaacaaaaacgtatataaaaacttaccattatgacatatgttgggacaaaagatatccctctaagatgacatcaatacactataagaagtctcacctatatatacgttgtattctgacttagagggacaacaaaccagatacacattgctatataagacgacaaagaaaaaagaa

SEQ ID NO: 37392 - DNA, 1024 bp, Macaca Mulatta
  misc_feature (1)...(1024): n = A,T,C or G
gggattaagccccatgagggtaaggatatctagctagcatcatgttaatcccagactctatttttgaattaaatgatatgaaaaagtctaaaataagcccaggcactataagtggtttacctcatgtcttattcatgttagcttattaaactctcctgtagatctttgcatatgaggctgggcgcacagtggctcattcctgtaatcccagcattttgggaggtcgnnnnnnnnnnnnnctnnnnnnnnnnnnnnnnnnnnntnnnnnnnnnnnnnnnnnnnnnnnnnnnnnnngctaaaaataacaaaaattacccaggcttggtggcacnnnnnnnnnnnnnnnnnnnnnnnnnnnactgaagccggagaatcacttgaaacttggggagacaaaaggttgctagtggagtcaatgatgggtgccacctggacctcccaggccgtgggccaactagaatggaagactcccccttcccaaaatgataaaacaaaaattaaatcgacggccttttttggccattatttaaaaccttgccactcctaattagaaaacaggtggccttatttgtaaggaaacccccaaaaccatatctcttgttcctatataaacgcacgagggtaaaaatctcccaatatttggtaaaaaacatgccctatactgggggaaaaatcataaagagggacccccaaataattttttatcacatgctgtggggccctctccaaaaaaaattattttataaaaatgccccccttgatgccatccttttattggtgagaaaaaagggggcccggtaaaaaaaaccaaatagtggtggaaggtaacacatcacatttttgtgaagagggcgcccaaacatataatatttttttcgaaaataaacccacacatttcctcgggagggaccaacggaccttttaacaacacagagagaaaccaccccacacaatccatttttattttagatagataataacaatattttttacaaaagaaaatttaatacatattggcgccgcg

SEQ ID NO: 37393 - DNA, 756 bp, Macaca Mulatta
gggcttcaagctggatttcctcccggacatgatggtcgagagccgcctgctcgttcctgacagaattaacggcacagccaacaagatgaacggagctttggatcactcagaccaaccagacccagatgccattaagatgtttgtcggacagatcccccggtcgtggtcggaaaaggagctgaaagaactttttgagccttacggagccgtctaccagatcaacgtcctccgggatcggagtcagaaccctccgcagagtaaaggttgttgtttcgtaacattttatacaagaaaagctgcacttgaggcccagaatgcactgcacaatattaaaactttacctgggatgcatcatcccattcagatgaaacctgcagatagtgaaaagtcaaacgctgtggaagatagaaaattgttcataggaatggtttcgaagaaatgtaatgaaaacgacatcagggtgatgttctctccatttggccagatagaagaatgccggatcctccggggacccgatgggctgagtcgagtggctgcttcaaccccaaactccactgctggtgcagccatgaactccttgacctctcttgggactctgcaaggactggctggagccactgttggactgaataatattaatgcactagcagttgctcaaatgctctcaggtatggcggctctgaatggaggacttggcgccacaggcttgacgaatggcacggctggcaccatggacgccttcaccaggcctactca

SEQ ID NO: 37394 - DNA, 797 bp, Macaca Mulatta
ggtggccatttgttttctagccaagtagataaagtactgtgagctagggctgtgttaaacgtgatgcatgtgctaggccttcataaaggataaaactccctgtgtgttatgctgccgctggattagttaatcagtatatgtgtttgcaggttgttccaagtatgcctcttacaataatatataggttaaaaaaataagcagaaacctttcaaaagacttccaagtgacatggctaattttgccccaatattattttatatttacctgatggcaactctatatttagaattcaagctatcatgtaaatcaaaggatcccaattttaacaatatcacacagaaagggatcctcacttctaccctttcactatcctctgcaggattctttacaacccaaaaaatattgggttttgtgtttgggatgtagctttcaaactatgtaatctgaaatagctgcttaacttttttcctgtgattcttcatgtgtattaaataaaatagttgacttacattattttattgactccttttaaacaaaacatgtatcttgaatacttactatctgaggctacagcgagcccaagattttgccacttaggtgtgaattgcacccaaccctggggtgaaacagttgagacccccgtttaaacactatatatcctattttctacccccatatattattatataatcctggggcctcggtaattaagatcctggtttttttctaccctggctttattaaaaggaaacttaccccttggagaacctggggggccaacttctgtacttaacagg

SEQ ID NO: 37395 - DNA, 672 bp, Macaca Mulatta
  misc_feature (1)...(672): n = A,T,C or G
aacactcacaacaaaactaaccaatactagcatcacagatgcccaagaaatagaaactatctgaactatcttacccgcaattatcttaatcctaattgctctcccatctctacgtatcctatacctaacagatgaagtcaatgacccatccttcaccatcaaatcaatcggacaccagtgatattgaacctacgaatacacggactacgggagcctaattttcaactcctacatactacctccattattcctaaacccaggggacctccgactcctagaagttgacaatcgggtagtccttccaattgaagctcctgtacgtataataattacatctcaagacgtcctacactcatgaactatccccacactaggcctaaaaacagacgccgtacctgggcgtctaaatcaaaccgttttcacggctacacgaccaggcgtctattacggacaatgctcagaaatctgtggcgcaaannnnnnnnnnnnntaggcctaaaaacagatgcagttcctggacgcctgaatcaaaccacattcaccgctatacgaccaggtgtatactacggacaatgctcagaaatctgcagtgctaaccacagcttcatacccattgtcacagaactgatttcactaaaaatttttgagatagggcctgtatttaccctatag

SEQ ID NO: 37396 - DNA, 1518 bp, Macaca Mulatta
  misc_feature (1)...(1518): n = A,T,C or G
gatttggggacattttgggtgccttttggggggtgtgggccaggctgggtctgtgcaagagatcctggctgttggtgccacgaaagctgaaggagactgcctcggggagggaggggaggggagcgagcctcgagttcctggaggggtgcatggagccacttagcaggaagcttcctgaggggccgagcggggacaggggtggggacagagagccacaccttgtgtgctggccaccctggccacccatccctgcaggaaggcagcttgggcggaggaagcatgcaggggcaaccctgggccttgtgctcaccttgggtgcacctgccgttgtggggtgaatggccgggaaccttggaacctcagactgagctggcatgtggggatcacgcccacacccatggggcatgccaggcacgcccagtgggtgagcagagcctggagccctggacaggtagggcccaaggttctggaagaggcggtgtgggtggagagagtggaggcctcgccttaccctgtggggatcacaccccgtggccactcaccatggggcccctggactccacacaatcctggccttatcaggggtggggattgctaactgtggggcgacatgctgaggagacagattgtgaagccagaggggccaaggaggctggaggaccgggtgtggccatgggaggcggggctgcnnnnnnnnnnnnnnnnnnnnnnnnnnnnnnnnnnnnnnnnnnnnnnnnnnnnnnnnnnnnnnnnngctgcatggagtcgaggggaagtgcatttggacccaacacagaaaacttcctagctctcggctttgaccagggccaccctgtgctgcagtgaacacccggtcctggggacagccctgtagatgctggaccaggtcaggtgatgtgtcctgggactccagggtctgcacaggctgcctgggacctggggctgctggaggcagctccggcctgggacgtgtgcaggttgcgggggtgggggctcgccgagccaggtgtgcccaagggcttgggctgtggggccatcctcaggctcagccaggccactctcggaactctctcatggccttcgagggaggaccgtgtgccggcaatgctgccggctgcggcaccccaagctgggatccctcagctctgccctgagcaagcgccatcctggaccatgcctgtgttttgagctgaggctacgctgtgcctggagctggtctccctgttcctccatgcgtggtccagcgtcccgggagcctcctgtcctctccaccgcccgtgtaaaatggctgagagtgccacctggtgggcgtgagggtcgcgctgactgtgcgtccatgcctcggtggaaagggtggttacaagtgaagtggacttnnnnnnnnnnnnnnnnnnnnnnnnnnnnnnnnnnnnnnnnnnnnnnnngggtcctcactgctcagggggactcacaggtgaggggccaatcccaggagggtgggaacaactcaaaaccggcagcctgttgtgggggtgtctc

SEQ ID NO: 37397 - DNA, 649 bp, Macaca Mulatta
  misc_feature (1)...(649): n = A,T,C or G
ctttggnnnnnnnnnnnnnnnnnntggggattccaattttttgggtttggggagacattaggggctcaacaaaaccatgttttttgggtttttctctccgttttttttgggccaccatccagatttttcttatccaaatttgggggttcatttgggccatttttccaaaagttaaaagggaaaatgtttttgggcttggtttatttcacccttcagtggagaaggtcccaaaaaaagcctgcaagaaggagccctcagttaatcttcggatcggtgcgtttcccgtccctagtggctgttcagtgtcttagaaatgagacgttttataagtgactcaccagcttttcctaccatctccttcccctgggggggatcgtcgaggtgaagaagtcatcagtggtctttctcggaatctgtgaccatatttatttgcttatttgctcaggaagagtgcgtgaatgctggccatctgccaggagccatgtagagcacgggggttgaacttagagactgagccccccactgtatgtaagtggcctgccacttaacaactcttagagatgccaagaggaagatgtgcccaggaggcccaagaatgagagagcagcttgctctaagcagtcactatggctgtcatcccagtcttccc

SEQ ID NO: 37398 - DNA, 203 bp, Macaca Mulatta
gatatttccacacaatatacttaggtattcgaagtcgacagagtggggagaatgacagatggaggttttactggaaaatggtatatgagtatgcggatgtgagtatgctgcatttgctagccacctttctggaaagtgctccacagctggtcctgcagctctgcattatcgtacagactcatagcttacaggccctccaaggt

SEQ ID NO: 37399 - DNA, 858 bp, Macaca Mulatta
ggtatgaagttttgtgatgagggaaagtggtgagacatgaagctggagaaggcagacaaaggccaaaaagtgagttcatattaaggaacttgacattatcttgctggctagcaattgtttcccatacttaaaatactatcttcatgatttgccacagtcacataagcaccaaattattagtcacttaatgtttttctttaaaggtaacattacttttctttccaaaggaaactttatctcactattataaatagaaaaccagtattacttgctacaaacagaaggcaacactagtagaggatatgtaaactattaaatttaaaaatattaaaaatgaaatacaagtaagacatttctggaaacagggataataaattaatcagcacacctgtaacttggtcattgtagcagcctcaaaaagaaggcatttcatgtatcctttttttcaaacctcctttatccacgcagtaaaaactgtcttatccaatccattggtaccagtggttggtcatttaatggaaaagaatagttaaagcaagaaataattttaaaacattcatatataccttaaacatttttttcaatttatataaatgtacattcattttgcccatttttacaatggtaggatccaaagcccttttcttttaagttaagggtccttgcttgattgggaattgttcccatttaacctttcctccgaatgaaactatcccctaaaaataatattccggcttatggattttaattttccctggtttccaggttttcccctttaaagatgggagcccaaggaaagtggaaaaagacccttctcattaaattaaatccctaaggaaccgaataaccttttcctcc

SEQ ID NO: 37400 - DNA, 733 bp, Macaca Mulatta
tccttccaggggtgaattcccaccccggcctttgggccctcccccaaaagtggcttggggacttacaaggcaatgaagccacccaccattaggccttttagtgctatacttttatatgatggcagtgcagtaagtttgtttacaccagtatcaccacagacatataattgtgctatgatgtcactaggtaataggccattttccagctccattataatcttacgtgatcactgtcatatctgcagtccatcattgaccaaaatgtccttgtgtggtgcataactgtactcaaaatatgtacaaagagcatttcttctggtacccagcaaatatttcattacttaatatacactatacactaccccctgctcctgagaacctcactgggaaactgtagactattttttaacaaaatagtagtttagtaaggagctagataatggtagtgagtcaacagtgatcaatttagtaatctaggcacaaggtaccaagaatttggaagcagcagtagaaagaaagaaatcaattattaatctatatcaaataaagtcaagttgattgattacagaggataaagaggaatcagtgagcaataattacagggcattcagtgtctactcagcactttgtgatgttttatatcaatcaataacaagatttctggcaggtgtggtggctcatacccgcaatgtcagtgttttgggaagccgaggtgggagaattgttggagtcc

SEQ ID NO: 37401 - DNA, 223 bp, Macaca Mulatta
agggctcttcaaaggactaaaagctaaaggcgacgatagattcattcaacaagtcctaggcgtgcgccctggtgagggccagaccctgctccccgcgaggggccccacgagccacgctcaccaccatccctgccccggtggagcccccgtgcgggacacaggatacgaagatggcagcggaagttccgcagcggccttaaaggcgactgggcagggtgggcac

SEQ ID NO: 37402 - DNA, 676 bp, Macaca Mulatta
  misc_feature (1)...(676): n = A,T,C or G
agctacttgggaggctcaggcagtgaatcgcttgaacccagaggcannnnnnnnnnnnnnnnnnnnnngcgnnnnnnnnnnnnnnnnnnnnnncacgagtgaaactctgtctcaaaaaagaataataatttttatttgtcagctataccttgacaaaaaattaatttaaaaattaaatttaaacattaagattaaatgcaaaaaaatgtattaagacctacttgctatgaaagttgctactaatggtgccaagctattagaagaggggaaaagatcccaacaaaaacttgtgactcttcttggctcagagagacaataaaatggaagtgctttattttaaagaattttattagattaggagccagaattcacaagtattggtgaaaagaataatttaggcaggtttgccatatttcattggcactgggttattgacacctagtgttttttgatgatgcattgttattaaagagcaactgcaaacactaaaactggctcttattccaaccttctagccttcagtgactttttgctagaatgagtgctttggacacaaactgttaattttgtgatggcattagaatctgtcaaattgccaatcttccagatttataaagcctcagaaatcatgtgatttaattaagcattccatgattttgctcttattgctatctcc

SEQ ID NO: 37403 - DNA, 848 bp, Macaca Mulatta
  misc_feature (1)...(848): n = A,T,C or G
ggctagcagacatacaatcaacttcctgttggccatgtgcatctcatctgctttctttatgatccaaataatttttatttcaaattagcttctttctactactcagcataatcctctcactgcctggcccctggtcatccgcctaatgactgcatgctttctggtcacatgtgaaccttgacatgaccaagctgttatatatgtggttgcgcaaaagctttctgtttaatgcgtagtgttattacatcttggttttcagtggcactatgtctagaaggcaaaatcctttacaacagtgctttggctaagatagatacttgtgaatcaaagatggcaaagaaatgaactaagtaaattccatttggaattatattttgatactaagtgaattcttccaaatatttaaaatggtttcacctgtcaaagggccaacagaactcttgggtttactttttgaaattactgtacaaaaaattttcaggagtgtttgaattgccttgtcatcaggtggttttaccttaataaagtagggatatgatcagtttaaaggaaattatacctggaacaaaagttttttgaaaatgcaatttctaggtaaaagagctcattgcttaaaaacggaaacccaaaaaattttaataattttaaacacattccccacatgaaaaccattttgtaccaatgacaaataatgcctccaactttatcttcaatatttcttggccagatacattttccaaaaaatacaattacaaaaaggtgaaggtaaaatttatctttttaaaccgaaatcatggtacacccacgtcatgaaaataatttaaatgatannnnnnnnnnnnnnnnnn

SEQ ID NO: 37404 - DNA, 766 bp, Macaca Mulatta
ttaatgtttaaaaagccataaaatagagtggtaatactaccaaataattacttaaaactgaaagttaagttatcaatagtttatataacagatgttttctgaggagatgtgaatccagtgtgaccaaggtaaaaaaaagtttatataattgttttttttccagtaaatatgaaaaaaaaaaagctgtagcttgtttattacatttccagaatacactggagccttactgtaacacaatgtactgtaatttggaatttgttctgttatgagtctatcttgaattcccatccatgaaactgtagtcaccaaaagcagcaagtattttcacatgatataaaagaccatattgtgctagtatgttaatagaatatccatttagggatggccattgctagaacttgaatcacaaataatagctaataattattcatttttcaaaaaagatcatttggatagcagctatgtataaaatggaaaataaaaaattattctgttttgcatgaatagttcagactttcccataccagagccaagtagtaactaaaattaggatcttaattttcaatgataaaaggtctaaggcttatttaattatgcctcctttaacattgtcctttctagatttttcagccagtattttcaataatttgggaatgtaaacaaattgaaatattttattggaatggttggctagaagtttcatcccttcctgcaaaatatggatttccggagaaatggtgaaaccttgtttttaatgaagaattta

SEQ ID NO: 37405 - DNA, 3631 bp, Macaca Mulatta
  misc_feature (1)...(3631): n = A,T,C or G
gattcctcctgagattggctgtcttgaaaatctgacatctctggatgtcagttacaacttggaactaagatcctttcccaatgaaatggggaaattaagcaaaatatgggatcttcctttggatgaactgcgtcttaactttgattttaaacatataggatgtaaagccaaagacatcataaggttnnnnnnnnnnnnnnnnnnnnnnnnnnnnnnnnnnnnnnnnnnnnnnnnnnnnnnnnnnnnnnnnnnnnnnnnnnnnnnnnnnnnnnnnnnnnnnnnnnnnnnnnnnnnnnnnnnnnnnnnnnnnnnnnnnnnnnnnnnnnnnnnnnnnnnnnnnnnnnnnnnnnnnnnnnnnnnnnnnnnnnnnnnnnnnnnnnnnnnnnnnnnnnnnnnnnnnnnnnnnnnnnnnnnnnnnnnnnnnnnnnnnnnnnnnnnnnnnnnnnnnnnnnnnnnnnnnnnnnnnnnnnnnnnnnnnnnnnnnnnnnnnnnnnnnnnnnnnnnnnnnnnnnnnnnnnnnnnnnnnnnnnnnnnnnnnnnnnnnnnnnnnnnnnnnnnnnnnnnnnnnnnnnnnnnnnnnnnnnnnnnnnnnnnnnnnnnnnnnnnnnnnnnnnnnnnnnnnnnnnnnnnnnnnnnnnnnnnnnnnnnnnnnnnnnnnnnnnnnnnnnnnnnnnnnnnnnnnnnnnnnnnnnnnnnnnnnnnnnnnnnnnnnnnnnnnnnnnnnnnnnnnnnnnnnnnnnnnnnnnnnnntaatttcatagatccgagatcagcctgttgttggacagctgattccagactgctatgtagaacttgagaaaatcattttatcggagcgtaaaaatgtgccaattgaatttcctgtaattgaccagaaacgattattacaactagtgagagaaaatcagttgcagttagatgaaaatgagcttcctcacgcagttcactttctaaatgaatcagnnncaggagtccttcttcattttcaagacccagcactgcagttaagtgacttgtattttgtggaacccaagtggctttgtaaaatcatggcacanncagattttgacagtgaaagtggaaggttgtccaaaacaccctaagggaattatttcacgtagagatgtggaaaaatttctttcgaagaaaaggagatttccaaagaactacatgtcacagtattttaagctcctagaaaaattccagattgctttgccaataggagaagaatatttgctggttccaagcannnnnnnnnnnnnnnnnnnnnnnnnnnnnnnnnnnnnnnnnnnnnnnnnnnnnnnnnnnnnnnnnnnnnnnnnnnnnnnnnnnnnnnnnnnnnnnnnnnnnnnnnnnnnnnnnnnnnnnnnnnnnnnnnnnnnnnnnnnnnnnnnnnnnnnnnnnnnnnnnnnnnnnnnnnnnnnnnnnnnnnnnnnnnnnnnnnnnnnnnnnnnnnnnnnnnnnnnnnnnnnnnnnnnnnnnnnnnnnnnnnnnnnnnnnnnnnnnnnnnnnnnnnnnnnnnnnnnnnnnnnnnnnnnnnnnnnnnnnnnnnnnnnnnnnnnnnnnnnnnnnnnnnnnnnnnnnnnnnnnnnnnnnnnnnnnnnnnnnnnnnnnnnnnnnnnnnnnnnnnnnnnnnnnnnnnnnnnnnnnnnnnnnnnnnnnnnnnnnnnnnnnnnnnnnnnnnnnnnnnnnnnnnnnnnnnnnnnnnnnnnnnnnnnnnnnnnnnnnnnnnnnnnnnnnnggagatctcttagtaaatccagatcaaccaaggctcaccattccaatatctcagattgcccctgacttgattttggctgacctgcctagaaatattatgttgaataatgatgagctggaatttgaacaagctccagagtttctcctaggtnaggtgatggcagttttggatcagtttatcgagcagcctatgaaggagaagaagtggctgtgaagatttttaataaacacacatcacttaggctgttaagacaagnnnnnnnnnnnnnnnnnnnnnnnnnnnnnnnnnnnnnnnnnnnnnnnnnnnnnnnnnnnnnnnnnnnnnnnnnnnnnnnnnnnnnnnnnnnnnnnnnnnnnnnnnnnnnnnnnnnnnnnnnnnnnnnnnnnnnnnnnnnnnnnnnnnnnnnnnnnnnnnnnnnnnnnnnnnnnnnnnnnnnnnnnnnnnnnnnnnnnnnnnnnnnnnnnnnnnnnnnnnnnnnnnnnnnnnnnnnnnnnnnnnnnnnnnnnnnnnnnnnnnnnnnnnnnnnnnnnnnnnnnnnnnnnnnnnnnnnnnnnnnnnnnnnnnnnnnnnnnnnnnnnnnnnnnnnnnnnnnnnnnnnnnnnnnnnnnnnnnnnnnnnnnnnnnnnnnnnnnnnnnnnnnnnnnnnnnnnnnnnnnnnnnnnnnnnnnnnnnnnnnnnnnnnnnnnnnnnnnnnnnnnnnnnnnnnnnnnnnnnnnnnnnnnnnnnnnnnnnnnnnnnnnnnnnnnnnnnnnnnnnnnnnnnnnnnnnnnnnnnnnnnnnnnnnnnnnnnnnnnnnnnnnnnnnnnnnnnnnnnnnnnnnnnnnnnnnnnnnnnnnnnnnnnnnnnnnnnnnnnnnnnnnnnnnnnnnnnnnnnnnnnnnnnnnnnnnnnnnnnnnnnnnnnnnnnnnnnnnnnnnnnnnnnnnnnnnnnnnnnnnnnnnnnnnnnnnnnnnnnnnnnnnnnnnnnnnnnnnnnnnnnnnnnnnnnnnnnnnnnnnnnnnnnnnnnnnnnnnnnnnnnnnnnnnnnnnnnnnnnnnnnnnnnnnnnnnnnnnnnnnnnnnnnnnnnnnnnnnnnnnnnnnnnnnnnnnnnnnnnnnnnnnnnnnnnnnnnnnnnnnnnnnnnnnnnnnnnnnnnnnnnnnnnnnnnnnnnnnnnnnnnnnnnnnnnnnnnnnnnnnnnnnnnnnnnnnnnnnnnnnnnnnnnnnnnnnnnnnnnnnnnnnnnnnnnnnnnnnnnnnnnnnnnnnnnnnnnnnnnnnnnnnnnnnnnnnnnnnnnnnnnnnnnnnnnnnnnnnnnnnnnnnnnnnnnnnnnnnnnnnnnnnnnnnnnnnnnnnnnnnnnnnnnnnnnnnnnnnnnnnnnnnnnnnnnnnnnnnnnnnnnnnnnnnnnnnnnnnnnnnnnnnnnnnnnnnnnnnnnnnnnnnnnnnnnnnnnnnnnnnnnnnnnnnnnnnnnnnnnnnnnnnnnnnnnnnnnnnnnnnnnnnnnnnnnnnnnnnnnnnnnnnnnnnnnnnnnnnnnnnnnnnnnnnnnnnnnnnnnnnnnnnnnnnnnnnnnnnnnnnnnnnnnnnnnnnnnnnnnnnnnnnnnnnnnnnnnnnnnnnnnnnnnnnnnnnnnnnnnnnnnnnnnnnnnnnnnnnnnnnnnnnnnnnnnnnnnnnnnnnnnnnnnnnnnnnnnnnnnnnagggaggtaatggtaaaagtaaacaaggaatcaaaacacaaaatgtcttattctgggagagtgaaagctctctgccttcagaagaacactgctctttggataggaactggaggaggccatattttactcctggatctttcaactcgtcgagttatacgtataatttacaacttttgtgattcggtcagagtcatgatgacagcacagctaggca

SEQ ID NO: 37406 - DNA, 799 bp, Macaca Mulatta
  misc_feature (1)...(799): n = A,T,C or G
agacaatctatacaatgaaaacaaatagtgcaatgtaagaaatattgtgtatcttactgttgatgtgtgagcagggagcagagatacctgcatttgtatttttctgagagtcctaaatttcttcaccaactttttcttcctcatagaagcaacatgacatagttaaaggtgtggactctggaatcctgccgcctggaccccaattccagcatggggcatgctacttaatatctctgtgcctcaattcccttcccataaaagagtagtgatagtgacaacatcttaggattgctttgaggtctaaatgagttgaaattttcaaagcacttagaatagtgtctgagacacaagagctatatgttagaggttatcatcattattatttgtattttgtgaattacgcnnnnnnnnnnnnnnnnnnnggctacccaacattcatcccccaccttcttgctgccagtgccttgatttggttgtttgttgtttgttttcctagaaatgatttaggagcagatcctgactacactaagtcagggtttgacaaatgacggtccatcagacagatctggcccactacccatttttgtatctttgcagctaagaagggttttaaatttctaaatgggttaaaaaaaaaatactgtggacacctgaaaaattatataatatttcaaattttcgtgtccattaaataaagtgttgaaaaccccaattcaacccaaaacctcctgtgtatgttttgaacttgttggctgtccttttcccctaacccaacaggggttgaaataatttttggcaa

SEQ ID NO: 37407 - DNA, 168 bp, Macaca Mulatta
cttttatgttagatgaggaaggggatactcaaacagaggaaattcagccttcagaaaaaaaagaagtggagccagaggcaaccaaggacaaggatctggaagctgatgaagaggacagcaggaaaaaagacgcttctgatgatctagatgacttgaacttctttaatc

SEQ ID NO: 37408 - DNA, 321 bp, Macaca Mulatta
aaatggcacagaaatgttacaagaaaccctgatcacaaagatatgactctcttaagggggtagaccccaggttcctcaggaacatgcactttgccaagaagcacaagaagaagggcctaaagaagatgcaggccaacaatgccaaggccataagtgcacgcgctgaggttatcaagatccttgtaaagcccaaagaggttaagcccaagattccaaaaggtgtcagctgcaagctagatcgacttgcctacattgcccactccaagcttgggaagtgtgctcgtgcccgcattgccaaggggctcaggctgtgccagccaa

SEQ ID NO: 37409 - DNA, 780 bp, Macaca Mulatta
  misc_feature (1)...(780): n = A,T,C or G
ttcttcatatcctgcgatttgttaaactcctgttgggtcttcacaaatgagagcttgctcagaggactgattgaactggtattaatttcccttgaaaatttcccacaccaccaccactgtttttgaattcttggtgttgtgcttcccaccttctgtccttttcgtttgtttagagaagatgaatttttaaaaagcagataaattgctaatgagcaataatgaccttctctttactaaaacactgaaaattaagagagattcaatgttgaagaagcacaatatactgcggtctttttctagaagtgaatggaaatcttgctcagttggcatttcaagcaggaaatgaaatgcttgctttaatggcaaagcagcgttaacatttttcctgttgtgtagcagagagtacaagaatcatttcagcaaagcagtgactcaccatgagacgttatctccatggagctgcgttttgacttttccccactctcttactcatagaaggaggacaaaggaacgaaatgaaatcatgctcacaatgaactgttcattacatcaactgatatctctctctctctccccctctttctcccataccccaagacnnnnnnnnnnnnnnnnnnnnngactttaaaaactatcatttctgtattttaattacatcccttagaaataacattatgtttgcaccatagctttctaagggaaacacacactgtgttttaactgagtcttagttgcttagggctttactgaagtgtgtcattttagactgtcttttaccac

SEQ ID NO: 37410 - DNA, 224 bp, Macaca Mulatta
acctctcagccctggatatcctctccattacagtcactgtccccaagatgctgtccctattcttgcttggggaccacttcctcaacttccctgcctgcttcctgcagatgtacctgttccacaacttctcctgctcagaagccttcatcctggtggtcatggcctatgaccgctatgtgactatctgctgcccactgcactaccctgtcctcatgaccccacag

SEQ ID NO: 37411 - DNA, 450 bp, Macaca Mulatta
ataccccagtgtcaggaagattttgaggttatgtctgatgagctgctttattttccccaaaataataaagtgtaaacacacatagaaacaagaacacatccaccttctgtatcccaccttcactactccaccactcaatggtatgcattcccctcactgatccacttggctggtcattatatggcaaaagcagctactctctcatattttcatatttcaaattatgtcatcaatagtgtctttttcatacaggtcaatagaagttagtgagatcttatattggtcattttctattcctgttcttttaagattttctactttctcaaaacccaccactggctttacctgccttggaaaagttatctgtgaatattacctaactcatcacccaactgcatatttacctctaaactaactaagtcacactgtttaatctttcatgatttataa

SEQ ID NO: 37412 - DNA, 846 bp, Macaca Mulatta
ttagctggtttaacacagcaagcagagatccagctgcccctcttcctcctgttcttgggtatctatttggtcacagtagtgggcaacctgggcatggttctcctgattgccatcagccctctgcttcacacccccatgtactatttcctcagtagcttgtccttcgttgatttctgctattcctctgtcattactcccaaaatgctggttaacttcctaaggaaagaacacaatcctttactctgagtgcatggtccagctctttttctttgtggtctttgtggtggctgagggttacctcctgactgccatggcgtatgatcgctacgttgccatctgtagcccactgctttataacgtgatcatgtcctcatgggtctgctcaccgctagtgctggctgccttcttcctgggctttctctctgccttggctcatacaagtgccatgatgaaactgtccttttgcaaatcccacattatcaaccattacttctgtgatgttcttcccctcctcaatctctcctgctccaacacatacctcaatgagcttctgctttttatcattgcggggtttaacaccttggtgcccaccctagctgttgctatctcctatgccttcatattctacagcatccttcacatccgctcctcagagggccggtccaaagcttttggaacatgcagctctcatctcatggctgtggggatcttctttgggtccattaccttcatgtatttcaagcccccttcaagtaactccctggaccaggagaaggtgtcctctgtattctacaccacagggatccccatgctgaaccctttaatatacagtcttgggaaaaagga

SEQ ID NO: 37413 - DNA, 812 bp, Macaca Mulatta
  misc_feature (1)...(812): n = A,T,C or G
ggagctcaatgtattttagtgtattcacaattgtgcaactgcttcagtgatctaacttgataatatttctctcaccccagaagaaaaacttctacccacaagcaacactcagcacttgcttctgtgcccagtgaccgacaaccactaatctacttaatgtatggaactgccaattctggaccttttatataaatggaattatttaagatgtggtcttttggtctgtcttgtttcacgtagtataagtacattgatctgtagtcttcatttcttttgatgtctttgtctagttttattaaatgagttgaaaaatgcttcttcttcttccagtttttggaagagtttgtaaagaatttgtgttaaatctcctttaaacatttggtagacttttccaatgatgctgcctggggccagggattttctttgcaggaagttgttttggttatgaattcagtatctttactggttacatgtctattctgattctttattttttcttgtttcatgtttgatggattgtatctttcttagaatatgttccgtgaatgaaatatgaccattcagtgaactgaaaaaggcaaacccttttccttcaccattttcccgtgtattttgtggtcgagatcattctttgtagttcccattgtgacngtaccacaaccaaaatgagccttgagaagtacgtaatttctaaaatttaatttatctttatgaatttttcaaccatttggttgaatagagaaagatattttattttgccacagttgaacttcctagttcccggatagcaaaaatgaagagaaagcccgact

SEQ ID NO: 37414 - DNA, 322 bp, Macaca Mulatta
tgtgaagaatggtggcaaagccttttaaccgggtcctcaagacttactcaacataagaaaattcatactggagagaaaccctacaaatgtcaacaatgtgacaaagcttttacccactcctcaaaccttagcagtcataagaaaattcatactggagagaaaccctacaaatgtgaagaatgtggcaaatcttttaatcgatcctcaagacttactcaacataagaaaattcatactagagagaagccttacaaatgtgaagaatgtgccaaagcttttacccggtcttcaagacttacccaacataagaaaattcataggc

SEQ ID NO: 37415 - DNA, 3194 bp, Macaca Mulatta
  misc_feature (1)...(3194): n = A,T,C or G
gaccctcaggactcccaggctcaacaggcnnnnagggccagaaaggcgagaagggcgacggaggcctcaagggtgtgccgggaaagccaggccgggacgtagnnnnnnnnnnnnnnnnnnnnnnnnnnnnnnnnnnnnnnnnnnnnnnnnnnnnnnnnnnnnnnnnnnnnnnnnnnnnnnnnnnnnnnnnnnnnnnnnnnnnnnnnnnnnnnnnnnnnnnnnnnnnnnnnnnnnnnnnnnnnnnnnnnnnnnnnnnnnnnnnnnnnnnnnnnnnnnnnnnnnnnnnnnnnnnnnnnnnnnnnnnnnnnnnnnnnnnnnnnnnnnnnnnnnnnnnnnnnnnnnnnnnnnnnnnnnnnnnnnnnnnnnnnnnnnnnnnnnnnnnnnnnnnnnnnnnnnnnnnnnnnnnnnnnnnnnnnnnnnnnnnnnnnnnnnnnnnnnnnnnnnnnnnnnnnnnnnnnnnnnnnnnnnnnnnnnnnnnnnnnnnnnnnnnnnnnnnnnnnnnnnnnnnnnnnnnnnnnnnnnnnnnnnnnnnnnnnnnnnnnnnnnnnnnnnnnnnnnnnnnnnnnnnnnnnnnnnnnnnnnnnnnnnnnnnnnnnnnnnnnnnnnnnnnnnnnnnnnnnnnnnnnnnnnnnnnnnnnnnnnnnnnnnnnnnnnnnnnnnnnnnnnnnnnnnnnnnnnnnnnnnnnnnnnnnnnnnnnnnnnnnnnnnnnnnnnnnnnnnnnnnnnnnnnnnnnnnnnnnnnnnnnnnnnnnnnnnnnnnnnnnnnnnnnnnnnnnnnnnnnnnnnnnnnnnnnnnnnnnnnnnnnnnnnnnnnnnnnnnnnnnnnnnnnnnnnnnnnnnnnnnnnnnnnnnnnnnnnnnnnnnnnnnnnnnnnnnnnnnnnnnnnnnnnnnnnnnnnnnnnnnnnnnnnnnnnnnnnnnnnnnnnnnnnnnnnnnnnnnnnnnnnnnnnnnnnnnnnnnnnnnnnnnnnnnnnnnnnnnnnnnnnnnnnnnnnnnnnnnnnnnnnnnnnnnnnnnnnnnnnnnnnnnnnnnnnnnnnnnnnnnnnnnnnnnnnnnnnnnnnnnnnnnnnnnnnnnnnnnnnnnnnnnnnnnnnnnnnnnnnnnnnnnnnnnnnnnnnnnnnnnnnnnnnnnnnnnnnnnnnnnnnnnnnnnnnnnnnnnnnnnnnnnnnnnnnnnnnnnnnnnnnnnnagggggagcctggagccccgggtttgcctggcattcaggnnnnnnnnnnnnnnnnnnnnnnnnnnnnnnnnnnnnnnnnnnnnnnnnnnnnnnnnnnnnnnnnnnnnnnnnnnnnnnnnnnnnnnnnnnnnnnnnnnnnnnnnnnnnnnnnnnnnnnnnnnnnnnnnnnnnnnnnnnnnnnnnnnnnnnnnnnnnnnnnnnnnnnnnnnnnnnnnnnnnnnnnnnnnnnnnnnnnnnnnnnnnnnnnnnnnnnnnnnnnnnnnnnnnnnnnnnnnnnnnnnnnnnnnnnnnnnnnnnnnnnnnnnnnnnnnnnnnnnnnnnnnnnnnnnnnnnnnnnnnnnnnnnnncagggtccacccaggtattcctggcccaccaggcccccctggagtgcccgggctgcagnnnnnnnnnnnnnnnnnnnnnnnnnnnnnnnnnnnnnnnnnnnnnnnnnnnnnnnnngttggcccatcctggccttctctgacccagaccccactcctctccccactccctgatcagagtatctgcggggactgtgtccaggggcagagggcccacccagcatacctcgtggagaagggagagaagggagaccagggcatccctggtgtgctaggcctcgacaactgcgcccannnnnnnnnnnnnnnnnnnnnnnnnnnnnnnnnnnnnnnnnnnnnnnnnnnnnnnnnnnnnnnnnnnnnnnnnnnnnnnnnnnnnnnnnnnnnnnnnnnnnnnnnnnnnnnnnnnnnnnnnnnnnnnnnnnnnnnnnnnnnnnnnnnnnnnnnnnnnnnnnnnnnnnnnnnnnnnnnnnnnnnnnnnnnnnnnnnnnnnnnnnnnnnnnnnnnnnnnnnnnnnnnnnnnnnnnnnnnnnnnnnnnnnnnnnnnnnnnnnnnnnnnnnnnnnnnnnnnnnnnnnnnnnnnnnnnnnnnnnnnnnnnnnnnnnnnnnnnnnnnnnnnnnnnnnnnnnnnnnnnnnnnnnnnnnnnnnnnnnnnnnnnnnnnnnnnnnnnnnnnnnnnnnnnnnnnnnnnnnnnnnnnnnnnnnnnnnnnnnnnnnnnnnnnnnnnnnnnnnnnnnnnnnnnnnnnnnnnnnnnnnnnnnnnnnnnnnnnnnnnnnnnnnnnnnnnnnnnnnnnnnnnnnnnnnnnnnnnnnnnnnnnnnnnnnnnnnnnnnnnnnnnnnnnnnnnnnnnnnnnnnnnnnnnnnnnnnnnnnnnnnnnnnnnnnnnnnnnnnnnnnnnnnnnnnnnnnnnnnnnnnnnnnnnnnnnnnnnnnnnnnnnnnnnnnnnnnnnnnnnnnnnnnnnnnnnnnnnnnnnnnnnnnnnnnnnnnnnnnnnnnnnnnnnnnnnnnnnnnnnnnnnnnnnnnnnnnnnnnnnnnnnnnnnnnnnnnnnnnnnnnnnnnnnnnnnnnnnnnnnnnnnnnnnnnnnnnnnnnnnnnnnnnnnnnnnnnnnnnnnggtctaaaaggagaccgaggagccaccggagaaaggggccttgcatgcctcccaggccagcccggcccccctggacaccctggccccccnnnnnnnnnnnnnnnnnnnnnnnnnnnnnnnnnnnnnnnnnnnnnnnnnnnnnnnnnnnnnnnnnnnnnnnnnnnnnnnnnnnnnnnnnnnnnnnnnnnnnnnnnnnnnnnnnnnnnnnnnnnnnnnnnnnnnnnnnnnnnnnnnnnnnnnnnnnnnnnnnnnnnnnnnnnnnnnnnnnnnnnnnnnnnnnnnnnnnnnnnnnnnnnnnnnnnnnnnnnnnnnnnnnnnnnnnnnnnnnnnnnnnnnnnnnnnnnngagagaatggcttactacacctccaggatgcagttccccatggagatggcggcggctccgggacgaccagggcccccagggaaggatggtgctcccggcaggccaggcgctccagggtcacctgggctccctggtcagattggcagagaaggacggcagggcttgccaggnnnnnaggactgcctggtaccaaaggtgaaa

SEQ ID NO: 37416 - DNA, 794 bp, Macaca Mulatta
cccagctcctctgtcccgtcctgtgctcactctgcaccacggacccactgacctttatgtgggggacatggtgcagctcctctgtgaggcccagaggggctcccctccagtcctgtacttgttctatcttgatgagaagattgtggggaaccactcagctccctgtggtggaaacgcctccctcctcttcccagtgaagtcagagcaggatgctgggaactactcctgcgaggctgagaacggtgtctccagagagaggagtgagcccaagaagctctccctgaagggtgcgttttgtcctccaacaaagctttgagccccagcaagctgacgggggtcagatctcaccctctgtgtacctcccaccacgcctggcacagtgctggacccatggcagccactgcatgaccgagcacggaccttaattggtccatctgtccactgagcctggcagagaaatattgaagtccatggagtggggagcattatggggggagcagtcacctggtcactcatggtgtcaccatcatccttgctgccatcccctgagccatccttcatgcccatctacgaggctcccgcaggctagatgcttcctctaataccagtcattctgcctcttccatgccaggctgaaatgcatttctgaattttatcctcagtgctcatggccagcttcttctccccgttcccaggttctcaagtcttgtccactcccaccagcagcaactggctggttccttggctgcctgcgagcctgcttggcatgatggtcattgctgctgcacttctgg

SEQ ID NO: 37417 - DNA, 122 bp, Macaca Mulatta
gttgtctatcatactgtcctaggcaacaccacaaatccttgagctatgcataggcagctcacaaatcacctctgtctggtacatggtatattctaacggcaataaaatggcacaggcagccc

SEQ ID NO: 37418 - DNA, 3600 bp, Macaca Mulatta
  misc_feature (1)...(3600): n = A,T,C or G
ggagctcttggagacaagacacacagcggtgtctggttctgcatagaggaggttttcctaagtgagaggcacagctggatcagcagactcaggtgagtgtgacctgctgtgttccctccctgccgacgtgggacnnnnnnnnnnnnnnnnnnnnnnnnnnnnnnnnnnnnnnnnnnnnnnnnnnnnnnnnnnnnnnnnnnnnnnnnnnnnnnnnnnnnnnnnnnnnnnnnnnnnnnnnnnnnnnnnnnnnnnnnnnnnnnnnnnnnnnnnnnnnnnnnnnnnnnnnnnnnnnnnnnnnnnnnnnnnnnnnnnnnnnnnnnnnnnnnnnnnnnnnnnnnnnnnnnnnnnnnnnnnnnnnnnnnnnnnnnnnnnnnnnnnnnnnnnnnnnnnnnnnnnnnnnnnnnnnnnnnnnnnnnnnnnnnnnnnnnnnnnnnnnnnnnnnnnnnnnnnnnnnnnnnnnnnnnnnnnnnnnnnnnnnnnnnnnnnnnnnnnnnnnnnnnnnnnnnnnnnnnnnnnnnnnnnnnnnnnnnnnnnnnnnnnnnnnnnnnnnnnnnnnnnnnnnnnnnnnnnnnnnnnnnnnnnnnnnnnnnnnnnnnnnnnnnnnnnnnnnnnnnnnnnnnnnnnnnnnnnnnnnnnnnnnnnnnnnnnnnnnggggcctggtcatcgagaacatggtcagtgggggatttggtcgtcatgggtcgggttagtgggggcctggtcagcagagacttggacactggggcttagtgaaagtatgatcagtggggaaatagtcaaggggcctgctcagcagggcctggctagcagaggcctggccagctggccgctggatgacctcagacagagggtttgtccttggagcctctttgcctctattcatagtggggatgagtcatggcatccctgagcactcgccaggtgcaggttctgcactgaccttgtggacggtcttttccttcatcctcacagcaactccgtgggtggatgctgttcccaaatgtagccattccacagatgagatgtctagagtcagagaggtaatgactgacccagagacccagatgtgaccctgggctgtgctctcagccctgccctgtgccatgctggactcaagccctgacctcnnnnnnnnnnnnnnnnnnnnnnnnnnnntttccctggggttctggaccttcatggggtggagggggtgattctcagtctaagtctgtgtccgaagctgagtccccacaggaggaggtctcaccaactcagacttcaggtgcggtcactgatggtccccatgagccccactggacacatggggtccttcatctgggagtgggatggggagccctctgccctcaggcagttgtggaaaatgaaggagctctagagggctgcctggagggtgacgattgtctctcctggtcaaaggggcttggggactggaaccttnnnnnnnnnnnnnnnnnnnnnnnnnnnnnnnnnnnnnnnnnnnnnnnnnnnnnnnnnnnnnnnnnnnnnnnnnnnnnnnnnnnnnnnnnnnnnnnnnnnnnnnnnnnnnnnnnnnnnnnnnnnnnnnnnnnnnnnnnnnnnnnnnnnnnnnnnnnnnnnnnnnnnnnnnnnnnnnnnnnnnnnnnnnnnnnnnnnnnnnnnnnnnnnnnnnnnnnnnnnnnnnnnnnnnnnnnnnnnnnnnnnnnnnnnnnnnnnnnnnnnnnnnnnnnnnnnnnnnnnnnnnnnnnnnnnnnnnnnnnnnnnnnnnnnnnnnnnnnnnnnnnnnnnnnnnnnnnnnnnnnnnnnnnnnnnnnnnnnnnnnnnnnnnnnnnnnnnnnnnnnnnnnnnnnnnnnnnnnnnnnnnnnnnnnnnnnnnnnnnnnnnnnnnnnnnnnnnnnnnnnnnnnnnnnnnnnnnnnnnnnnnnnnnnnnnnnnnnnnnnnnnnnnnnnnnnnnnnnnnnnnnnnnnnnnnnnnnnnnnnnnnnnnnnnnnnnnnnnnnnnnnnnnnnnnnnnnnnnnnnnnnnnnnnnnnnnnnnnnnnnnnnnnnnnnnnnnnnnnnnnnnnnnnnnnnnnnnnnnnnnnnnnnnnnnnnnnnnnnnnnnnnnnnnnnnnnnnnnnnnnnnnnnnnnnnnnnnnnnnnnnnnnnnnnnnnnnnnnnnnnnnnnnnnnnnnnnnnnnnnnnnnnnnnnnnnnnnnnnnnnnnnnnnnnnnnnnnnnnnnnnnnnnnnnnnnnnnnnnnnnnnnnnnnnnnnnnnnnnnnnnnnnnnnnnnnnnnnnnnnnnnnnnnnnnnnnnnnnnnnnnnnnnnnnnnnnnnnnnnnnnnnnnnnnnnnnnnnnnnnnnnnnnnnnnnnnnnnnnnnnnnnnnnnnnnnnnnnnnnnnnnnnnnnnnnnnnnnnnnnnnnnnnnnnnnnnnnnnnnnnnnnnnnnnnnnnnnnnnnnnnnnnnnnnnnnnnnnnnnnnnnnnnnnnnnnnnnnnnnnnnnnnnnnnnnnnnnnnnnnnnnnnnnnnnnnnnnnnnnnnnnnnnnnnnnnnnnnnnnnnnnnnnnnnnnnnnnnnnnnnnnnnnnnnnnnnnnnnnnnnnnnnnnnnnnnnnnnnnnnnnnnnnnnnnnnnnnnnnnnnnnnnnnnnnnnnnnnnnnnnnnnnnnnnnnnnnnnnnnnnnnnnnnnnnnnnnnnnnnnnnnnnnnnnnnnnnnnnnnnnnnnnnnnnnnnnnnnnnnnnnnnnnnnnnnnnnnnnnnnnnnnnnnnnnnnnnnnnnnnnnnnnnnnnnnnnnnnnnnnnnnnnnnnnnnnnnnnnnnnnnnnnnnnnnnnatactgcctggctctggaggctcctatcatgccaggagcaggtgttgcccaagtccttcttttagatcatgagacacctggnnnnnnnnnnnnnnnnnnnnnnnnnnnnnnnnnnnnnnnnnnnnnnnnnnnnnnnnnnnnnnnnnnnnnnnnnnnnnnnnnnnnnnnnnnnnnnnnnnnnnnnnnnnnnnnnnnnnnnnnnnnnnnnnnnnnnnnnnnnnnnnnnnnnnnnnnnnnnnnnnnnnnnnnnnnnnnnnnnnnnnnnnnnnnnnnnnnnnnnnnnnnnnnnnnnnnnnnnnnnnnnnnnnnnnnnnnnnnnnnnnnnnnnnnnnnnnnnnnnnnnnnnnnnnnnnnnnnnnnnnnnnnnnnnnnnnnnnnnnnnnnnnnnnnnnnnnnnnnnnnnnnnnnnnnnnnnnnnnnnnnnnnnnnnnnnnnnnnnnnnnnnnnnnnnnnnnnnnnnnnnnnnnnnnnnnnnnnnnnnnnnnnnnnnnnnnnnnnnnnnnnnnnnnnnnnnnnnnnnnnnnnnnnnnnnnnnnnnnnnnnnnnnnnnnnnnnnnnnnnnnnnnnnnnnnnnnnnnnnnnnnnnnnnnnnnnnnnnnnnnngtcctcgagggtgtcccctggcattgggcccctccatgagggggacagactggccatccccaccccaccagctcagctccaggagctcatgccatcagtccccctgggacaaaagccttgtcctctgccagcctggcctaacggggctgtccccaaggcccaggctgaggtccatcagcacgaaggggcttctcaagaacccag

SEQ ID NO: 37419 - DNA, 943 bp, Macaca Mulatta
  misc_feature (1)...(943): n = A,T,C or G
ggaagaggagagtaatgcaaagggcggcgtatggaagatgaaagtccccaaggacagcacgnnnnnnnnnnnnnnnnnnnnnnnnnnnnnnnnnnnnnnnnnnnnnnnnnnnnnnnnnnnnnnnnnnnnnnnnnnnnnnnnnnnnnnnnnnnnnnnnnnnnnnnnnnnnnnnnnnnnnnnnnnnnnnnnnnnnnnnnnnnnnnnnnnnnnnnnnnnnnnnnnnnnnnnnnnnnnnnnnnnnnnnnnnnnnnnnnnnnnnnnnnnnnnnnnnnnnnnnnnnnnnnnnnnnnnnnnnnnnnnnnnnnnnnnnnnnnnnnnnnnnnnnnnnnnnnnnnnnnnnnnnnnnnnnnnnnnnnnnnnnnnnnnnnnnnnnnnnnnnnnnnnnnnnnnnnnnnnnnnnnnnnnnnnnnnnnnnnnnnnnnnnnnnnnnnnnnnnnnnnnnnnnnnnnnnnnnnnnnnnnnnnnnnnnnnnnnnnnnnnnnnggcaggtgggattgagggagattgtgtgggtttctaccgtcacattacttgcttttnnnnnnnnnnnnnnnnnnnnnnnnnnnnnnntggctttctaaattctctgttcttttcactctgnnnnnnnnnnnnnntgccctttaaaattccttattcagcctaattattgttttctacactcccctttcattgaggcatgagaaatcggtttccctttaagtagttctgctgtacctagttaatgagaatatgcataatcgtgacaataccgcttttgaataccacactgtacaaggaggaatactagcttggagaaacctgtcttctgattatttgttgtgacatattcctatatactgtgagctgggcattgtttttttctgtcccagggaaaagaaaaaccatacttaatctgattttacactgattgcactcaaatctttaattttcctttttaaaa

SEQ ID NO: 37420 - DNA, 1119 bp, Macaca Mulatta
  misc_feature (1)...(1119): n = A,T,C or G
acttaataaacctttcctttttttagctatcagactaaatgttatgtgctacttaatttatgcatctctgagttggtagaatatctaatatgacaaaaccaattcttctgaaagaacacattttatttttaatgtaaatcatgcaaaagttctggaaattctctaaagaattttggaaggttttcttacccacacaagtctgtagtccagagggggtattttctttcttgagaatcttccccagcccgccccccactggagatttactccagagcgtgagtgggcttcttccagcccggggcaggaccctgcagagtcatcagcctaggtcataaatacccttgacacatgtggacattccttcctgcgtttgggaaaaaaccccacagctggaattagccagttgagaaaatctgtgtaaacaggagagccaccataaagagaatttgagcattaatttttgagagaacttataagatagctttactgtgtttgagacttactagttgttacagattgttaatgtcaaatcatttgtatttcaggctttatcgtcttgtttacttttaccaggagatgccactgtcataacttcttcatgggataataatgtgtatgtatctgtgcaccccgctctgtgattccacgtgcagaatagctgcctctgtggacatgaggtgtgaaaagccagaaggtttcctggctggatacagcaccgttttctaaagggaccaatcttccacattagaccgctgggtcgaatgacattgattcgcggattgagtacgctacatcgaggcggtgtctcagtatactcggaggacaaccatgaccactggaattctgaaccacagcgatcagatgtcgaacactggtctcttacatatacaacgtcatgtatcaaccatcatttcttctcctcttctcgtcgctcttcgaaaaacaaatcatattgggtatttcaaaaaaaacaaaagaacacagaaaacaacnnnnnnnnnnnnnnnnnnnaacacagatcacacacacagaacactnnnnnnnnnnnnnnnnnnnaatacagaaaaaccaacaaagcaaaaacaaagaaaaaacaacacaaacagcacgagacaacac

SEQ ID NO: 37421 - DNA, 752 bp, Macaca Mulatta
gcagctgcgattttcgatggccaattgtatgtgagcggtggctgtggtgggactcgtaatacctggcctcattcctgcactatgaccccaaacttgagaagccagggacatttctgagccctatggttttaactcgggctggccatgtcatggctgcattgggtgggcgggtgtatgtggcaggtgggctgggtgagactggggacctgctaagctttgaggcctatgaactaaggactgatagttggactcacctggcacccctaccctccccccatgtgggagctgcaggtgctgtgcttcagggggagctactggtgctggggggctacagtcaccgtacttacgcactctcccaccttatccatgcctactgtcctggcctgggccgatggctttgcctgggaactctgccaaggcctcgggctgagatgcctgcctgcatcctgacactgcccactgtgcagcacatagctgtggttcccaccccacaccaaaccaaacctgctgggtgaagagagagcaacagtgtatggggagaggaaggcataagaaatagcctgagagaaggacagagattgtggggagagaaaagagaaggctttattcttgatagtattttattcttacactgtgcattgtaaactgcttttgtacgtatgatctccattgaggaaatggtggttccagaactcccggggaacacatataggggaaggcgaggcagctgaatagccaggtaaggaaaggag

SEQ ID NO: 37422 - DNA, 799 bp, Macaca Mulatta
  misc_feature (1)...(799): n = A,T,C or G
ttgccaaaaattatttcaacccctgttgggttaggggaaaaggacagccaacaagttcaaaacatacacaggaggttttgggttgaattggggttttcaacactttatttaatggacacgaaaatttgaaatattatataatttttcaggtgtccacagtattttttttttaacccatttagaaatttaaaacccttcttagctgcaaagatacaaaaatgggtagtgggccagatctgtctgatggaccgtcatttgtcaaaccctgacttagtgtagtcaggatctgctcctaaatcatttctaggaaaacaaacaacaaacaaccaaatcaaggcactggcagcaagaaggtgggggatgaatgttgggtagccnnnnnnnnnnnnnnnnnnngcgtaattcacaaaatacaaataataatgatgataacctctaacatatagctcttgtgtctcagacactattctaagtgctttgaaaatttcaactcatttagacctcaaagcaatcctaagatgttgtcactatcactactcttttatgggaagggaattgaggcacagagatattaagtagcatgccccatgctggaattggggtccaggcggcaggattccagagtccacacctttaactatgtcatgttgcttctatgaggaagaaaaagttggtgaagaaatttaggactctcagaaaaatacaaatgcaggtatctctgctccctgctcacacatcaacagtaagatacacaatatttcttacattgcactatttgttttcattgtatagattgtct

SEQ ID NO: 37423 - DNA, 708 bp, Macaca Mulatta
  misc_feature (1)...(708): n = A,T,C or G
ggaggtgggcannnnnnnnnnnnnnnnnnnnnnnnnnnnnnnnnnnnnnnncnnnnnnnnnnnnnnnnnngnnnnnnnnnnnnnnnctagccaggcgtnnnnnnnnnnnnnnnnnnnnntagctgcttgggagannnnnnnnnnnnnnnnnnnnnnnnnnnnnnnnnnnnnnnnnnnnnnntttnnnnnnnnnnnnnnnnnnnnnnnnnnnngagnnnnnnnnnnnnnnnnnnnnnnnnnatttatgactgacttgaaatcctggcagtcagcctgctttagagagcattaaccaaaaatctcttggtccacaccctttctaaatttaggcattcattcagagtctcaaactctaagggccactcaggacacagttgggttgctctttctgggatgggagtacattctggagcagatactttactcctagcttattatttgaccttgagacctgtggttggtgttgtgaagtcgtacatgtactacgagtgactttttttgttatgaaaagtgctcttcttaaagacagtttacnnnnnnnnnnnnnnnnnnnggattgaagttgatttaatggaacaaaaaggggaaagaaannnnnnnnnnnnnnnnnnnnccctatttttaacccaaccctgaaccggggggaaaaaaaattaccccaaatggaaaattaaaggggccaataagcctggaaccttcccgggaaaa

SEQ ID NO: 37424 - DNA, 745 bp, Macaca Mulatta
gggcttttctgtttggatcaaaagacttaccttccttgaaagtttttctttcctagccaaagataaaaccccatagtgaattaaatataattgcttttcatcattaatggcagcccctactaactcttgaattccagcttttcagtgcaaatgcatattgcatcttcattgttgagaagaatccaattccacctttggaaggcacttctttggagataagaagtttcttccataaatcctgctttcgtaaggttgagacccactcaccacattgctggtggaagatggactgggcagattcagagatgtcagtgtactcttctgctctgatcatctgaaaggaatgcctgggtccgaattccctggattagtcctttcaaaacagaaagtaaaaggtactagaaaggcatagtcttttttgctgtaaactccaacttaggaaatataatagttcagattccactacacggactgatctatagagaggtgctatttatagggatgtcagaaaaaatacaggattaattaatattggttgggatatacttatactaaaaaagtattcattgttttcctgaaattcaaatttaactgggcatcctgtattttctatatatttattcattgaatctggcatccctaaccagttattgggtacctactgtgctgtgcagccagtcagagaggtaaggcgctaggaagtttccccgggatggagctaagagcaacgagttctccgatctga

SEQ ID NO: 37425 - DNA, 115 bp, Macaca Mulatta
atatatacatatctagggttagtacttagtttcacgcccgggagctgggagaaaaaacctgtacagttgtccttctcttatttttaataaaatagaaaaatcgcgtacttgcgcg

SEQ ID NO: 37426 - DNA, 877 bp, Macaca Mulatta
gggtgtgctggttatgttaagttattctctcctagctgttttgaaatacacagtagatgacccactgccatccccctgctgatttatcaatagtaggtctcgtgttcccattaggctgtgtgtttgtgcacattaccagcctctgcccatcctgcttatgagtgggctctgctgggccctgttgaccacctacttttggcctccatgagatctgctctcagctcctgcttatgagtgagaacatgcgccgtttccttgcttgactcatttgcttaacgtaatgtcctccaactccatccatgcttgccgcggatgacagggctctccgctgtgtggtggagtattgctcctgtgtgtgttcgggccacgttcccttcatcccctgttgacgggcactaaaggtgattccagacctgagactaacgtgagatggaagcatgacaacagtcactgtcatttatacttctggagcacataaaacaactcttaatgtattaaaaacaatctaatccataaaaaccgtcacaaaaaagggcctgaatatcgaattgagaaacaatggcttccaacaaataacggatgaacaacgccagagaatgggggcctacgagctgaacggcctagacggttcccagcctctcaaaaaaggaaacctaacccttcttctagttcatcagtaatggcgacccaaaaatgagtacattggaaaaattaacatctaaaataaaagcagccaaaatgaatgaagattaaggtataccttcactccacactgttacaaacaacctaatccttctgcaaacaccttgagtagtactactactaccactttgtatcgacgcttacgatattcgtgtacgctattaagccaaagccg

SEQ ID NO: 37427 - DNA, 357 bp, Macaca Mulatta
gtgatttgtatatatggattagattagttttatttaccttttacaataatataggccttttcctatttaggaaaatgagggccataacatcaggtaagtctggtgggaaagttaaacagggaggtcttcagttagagatttaaagttggactataccacttaagtatcaaatatgacctgacgcatctgcagtcatcaaggcagttctggctcattaccatactcgagaactttttgtaggcctggctgggaaatcatttgctcctaagaaagcttgctgttttcctcctccagcctttcttccctgtaccagctcctatgtcccttgcattgcttaagaaaagtctctctctttcc

SEQ ID NO: 37428 - DNA, 349 bp, Macaca Mulatta
ctcagcctcctgagtagctgggactataggtgcgcgccaccatgcccagcttattttttgtattttagtagaaatggggtttcgcctgttagccaggatggtctcgatctcctgaccttgtgatccacccgccttggcctcccaaagtgctggaattacagccataagccactgtgcccagccttattttccccttttaggaaacactgggaactatttttcttctcagagaaaaacaggacttgcacaatagtaacatggaaacttaacagggtcttaacctgtgaagactctaggagcagaacctggagtaaggggaagcaggggccagagtaagggcagcagggcc

SEQ ID NO: 37429 - DNA, 647 bp, Macaca Mulatta
gggggagagtgtcaccacagcttcaggcctggggggttttggccactgagatgaggggctcaggccaggtttcagagtcccaccaggcctccctcttgcaacaggaagaaagtccacactgagggggaccatagcctgctacggctgaagtgcaaggcacatgtcagaagcagaggctccttctgcagcaggactcacctacttactcagagggacatcctccagggacagccacctcctcctctgagcgcacagccatgtcctctgctgtgcactcctcatgcgaatggaccccacctcggaccggaagccaccttgggttggcggatgccctgaagtcgctctggttcaacgtgcatgcactgtttgacttaacctgggatactctgtatgagctgctagttgcacagaaaaggccagcatggacatctgaggacagacagcacaggagtacaggaactaatgcaaattgcatgtgaatgacatctccacacaggccgctactgatcacactcaccctcccgtttcacgtgcctgcttgggcctatccttcctggaggctgctggcacctctggagccactacagcgcttctgatgcatttcctcggtggtgatttcccagcccgacactggtgacagctgtggg

SEQ ID NO: 37430 - DNA, 782 bp, Macaca Mulatta
  misc_feature (1)...(782): n = A,T,C or G
ggttggctggcaaagcagtatcttctcctaatttctactctttcctgtccaagaataagttctatatcagacaccaactttatccaataaaagtgtcctcaaaatgcctggacccattttaaacaaaacgacttttgtagatttctccttgttcagccactggactgtagtacttttccctgctggaattgtatcaaactcaattcagcaggaaggctgttacctgccccagtaatcaaaggacatggtgtgtgatggtgatctgagtaagagctgggatggaggagagaagagctggagctggcagccacagcaaaacttctgtgcacattatgagtctccctgttcttttaattacctattggtgagtctttggctcggcatttttactggcaacaactacttggctattcccccgtcctttccaatcaatggccctggttcccaaatttcagtgaaaaggggcaaacagaccttcctttcatgccacattctcttatgtatttactccttctccttcttgaatacgttatatttgcatttgctccatgaaaatgaagaacattgaaccaagcagtctaaaatcagagaattttaaaatatcttcagctagaattatcataacacttttcaggcaaaaagctttagattaggaaccatttctaaagtaaataaggggcaaacaatttttactttttaaaagattgatttacccctntgaaaaccaggggcagaatttgctctactggtcatgaactgccctcaagtcagactacttgaaa

SEQ ID NO: 37431 - DNA, 70 bp, Macaca Mulatta
cttttgcaagaaagcgtcatccagacaccctagaaaaccaggatttcgtctgttcttataataatgaggt

SEQ ID NO: 37432 - DNA, 708 bp, Macaca Mulatta
gggggggacaataggggcggctgcgccccactcggcagaactccgcccaccaggcgcgatgctggaactacatgtcccatgaggctctgggaggccgcagttttccaccggaaagaggtaagccaagatgggtgcatacaagtacattcaggagctatggagaaagaagcagtctgatgtcatgcgctttcttctgagggtccgctgctggcagtaccgccagctctctgctctccacagggctccccgccccacccggcctgataaagcgcgccgactgggctacaaggccaagcaaggttacgttatatataggattcgtgttcgccgtggtggccgaaaacgcccagttcctaagggtgcaacttatgggaagcctgtccatcatggtgttaaccagctaaagtttgcctcggagccttcattccttttgcagaggagcgagctggaagccactgtggggctctgaaagtcctgaatttctactggggtgggaggaaaattcccatacaaatttttttgaggtatacccccattggtcctttccaaaagcttccaaaaaaatctcgaacaccatgggattcccaaaccttcccaagcccagggaaagcggggcctaaaatttcggggcaaaaaaacggggcctttaaaaggcaatatctccccccttttgggtttcccccgggcctttaaaagcccaactccccc

SEQ ID NO: 37433 - DNA, 757 bp, Macaca Mulatta
ctttgcattctctttgttaaaataagctacaggcccccttcaaactgaaaggaaagtgacttcacaagggcatgaatgtcatcaatgtaatagacaactaaaacattcaggccaatgttcagatgactggaatggatgcaaccacaagaaactataaaatggctaaagcctgaagactgggcaattatagtcagattctattctctgttctttcccacaaaaagagtcaatctaggttcatcgggaatcttaattataagtggaacctgttaatcacttaaaagccgtatgaccttagacaagtcaatgaatctctcttaagcttcagctgctgtattgtaaaacaggaaaaattacacataccctgcctgtcttaagagaaatgctgtagaataaataagacaagagctttgaaaactgtaaactgctatacaaatacaaggaaatattatttacctgacaggatggtaagtataatcaacctagctaggctccatctccctattaataaaattataatcatcatcattaattaccctatatgctaaattactaccattgcaataatatatgtaatagcaagctaaaatcacattatgttttgttactgtgaagagtaataatactaactacaatttattgttgtccaattatatgttaggtgctgttggttactttcagtaatctataattaacccttacaataactcaataaggtaggtattatccctcatttacaaataaagaaactgacact

SEQ ID NO: 37434 - DNA, 653 bp, Macaca Mulatta
  misc_feature (1)...(653): n = A,T,C or G
nnnnnnnnnnnnnnnnnnnttaggggtccttttaatagccctgatttgaggctcaggggaagggtcaacagtccctacctgatttatgaggattttttaaaaacctcgtgtgatgctgttgtacatagttcaaagagcttccttaattcgcttaatttaccttttttttccattttcgcttgagaactagagaagtttgtgttctattggaaccctctgtagaacactttacactcagttctgatggaccttttcaggggcgatttttaaaccactcttgaaagtagtcttaaaatgagagcactttattgatggcttttcaggactgtgttggtatttttcatgcagtgtatttgtcagcttacatttttcagttgagctacccgatgctactgacatgcatgtgattttcctatcttaccaggcaaatactactgttaacgttttaatattaagtctacttatgcacattcattttactttgaaaaaagaactggtttnnnnnnnnnnnnnnnnnnnnnnnctaaaattctttaaaattgtaatggcaatgaagcattttatagtttctcctctctcactggttctgaattttggtgacaggtgtatttcttaatgcagatctgaaaaacagtagctccgtatcgaataca

SEQ ID NO: 37435 - DNA, 617 bp, Macaca Mulatta
cccttacttcaagtctctgttgctattccatctgtttagtggacggttggcggaattagtaggttctaagggttccaggggttcagctgaccaagtagcagagaagtcttttttcccaattgagtgctaatagattaggataaaatactcacaattttagtgtatgcttttaaaaagctccacacaacaaaaattgaaacatacacccacagctcctgtgagggctggagtcttggggttcgggaggagggtagaagttaacaggcatctcttcaggcttgcttgggacttggcacacacaggatgagtgtttttacaagcgccgaattaaatggtgttttaaagagtgggcggcatcccccacacacatacgccatttacatcagcttcatcaacacttttcttcctccctataacttaaccttttttcccttttgtgaagttcagaggctttatgaaataagtttgcattgcacatctgtgcagaaatttttctgactttgaaactatcaggacatcagctgtcaaatacaaaaggtagatatcaggtaagaatctggacttagggaatagtcacaaaactgtcataggttgtactttcatcaacatttgcttct

SEQ ID NO: 37436 - DNA, 830 bp, Macaca Mulatta
  misc_feature (1)...(830): n = A,T,C or G
ggggatctcaacttgtcatgagtttaagcattaaggacattatgcttcttagattctgaagacaggtccctgctcatggatgactctggcttccttaggaaaatatttttcttccaaaatcagtaggaaatctaaacgtatcccttctttgcagatgtctagcagcttcagacatttggttaagaacccatgggaaaaaaaatccttgcttatgtggtttcctttgtaaaccaggattcttatttgtgttgttatcagctctgaatgtgtggtaaagatttttgtgtttgaatacaggagaaaccagtttgctgaaaagttagtcttatctattggccacgatgaaacagatttcaactgataaagagctggagaactccatgtactttggaatctcctccaagatagccagagtttaatacatcttcattctcaacactctccaaagaacttgacctaccttatgggctccatatttttcttcttaaatgtgcatcaatcatgccttgcccctaacctttaaatatattcttagacctggtaattgcactcagacttgcatctttaggaatttttaactttctttcactacatttggcacttaaatttttttctttataaaatgtttttgaaggtcataaaacaaagacccaaaattgattagaccttaataaatttttcttcctggtgtgggtgtgtaacaattctccaaaannnnnnnnnnnnnnnnnnnnnncccacctggttttggttaaggtggccaacaatttttaataatttttaaggggagaccttttttttaagagaagttttccctctaaagaaaccca

SEQ ID NO: 37437 - DNA, 856 bp, Macaca Mulatta
  misc_feature (1)...(856): n = A,T,C or G
ggggttagaatcatctttctaaaataggcgcaataaggccaggcaccnnnnnnnnnnnnnnnnnnnnnnncactttgagaggccgtggagggtgnnnnnnnnnnnnnnnnnnnnnnnnnncagcctgcccaacatggcaaagccccgtctctgctaaagatacaaaaaagaattagtcaggcgtggtggtgcgcgcctgtggtcccgagtggctgggactataggcgtgttccaccaagcctggctaattttcgtatttttattagagacggggctttgccatgttgggnnnnnnnnnnnnnnnnnnnnttntnnnnnnnnnnnnnnnnnnnnnnttctttttttttnctcttcttaccctcctttcctatttccccttcccccctcttctcctctttcttttcctcctccttccccttctntcccttccttcctctcctcctctatttctcaacctccctcttgttgcccgcttcgttctcgcgcgctttttatctctcgtcgctcctatttaccaaacccaccacctatacccccccaatagagcataaatcaatgaacatatcgagatcaattccaataatagtcaagcactacaccgtccctaaatccgcagacaaatacagaatatttctcaatacataaaattaacaaactgctacaacccccaattctgtagaaaataggaaatcgctcacctacttccatcttccttgaataggagcagctgcgaaccactcgatagcgccaatagattaacacacctccttaatacttaaataaatcatactattaacctcatacaatnactacattacgattacccaattagatgattcctcggcgagatacacaa

SEQ ID NO: 37438 - DNA, 821 bp, Macaca Mulatta
  misc_feature (1)...(821): n = A,T,C or G
ggctatatgctgccaacaattactgtaactaaaacatttctgtgacataaccatgctgttcagctattttatagtttccttattagaatgattaaaagatagagagaaacttggaaatactgatgcctgagccccacccccagagattcagattcagttagtctagacttaggagtttcacaaaagagcctggtgtgattctgatgtgtacccagagttgagaactgacttgaaacatgaagagcatggcttatgtgtgagggcaaatactgtttattatttatgcaatgtattgtgctatgggtnnnnnnnnnnnnnnncnnnnnnnnnnnnnagatggtcattaaatcttggttggttgattgatctaaactttaagccaattaaatcagaatctttggagatgggaccctggcattttacggcgtaccagatgattccattatatagccatgattgagatattgctgaactaaactgatttgaactgtaatagtggtgccaaatttaagataccaatgagacagttaaacataagatcagtttgacagcaatgaggatccgttggccctcatgtctgcctgaactgtgttcttgaacctgcatttcttctttttttcctccttctcttccttccttctttgctttctcttttgaaatctggattgattatctgaaattaagtaaccacatactgtgttttaaaatgacctttttgttagccattccacaaatttatacagattttcaaaacatgtttttacatggagtaaatataagttggacccttggaaacaaccacaggggtgtaaaaggccccc

SEQ ID NO: 37439 - DNA, 783 bp, Macaca Mulatta
ggcttgtccaaaatcttaaatgacacatgtaaaacccaacttcatattttccatatttagcattctttccaccccatcttcttactattggctctctgccacttcaccttttccatacctagatttcttcataaggaacattggttaaatgatgcttaaaatgacagtgtggcactccatccacctgtgatccgatgcttcaggatgccacccacccctatacagtttttctaaatttgtaatcttattcttcttaatttcttaataaaattatgattctgttgacttcttaattgatacctctttatggacaattagtacaggtaatcatctgtgaaaaatctgaacatataccgtcattcttactgtatgttgggcagcctgagttggcaactatagcactgctgtctttttctttcattgtcactgctttatgtcttgctttttacacttatgaatatggtatgtttatcatttcatattgccaatttaagatctacctcataattttgagtggctgcagaatactgtgcttaggtgttcaaagtctgggttgcttaagatttttcacaaatacagtcctgccctaaaatatccttttatacctttcagtctcatacttatccgggttattttttttagaagaaaattcctagatatagtaattgcccaggtcccaaagtagttccgggtgggggggaaggtgtggttttaaagtttttcccttggcttgttttcccaattttgtgggggttttccttcaagccctttttaatttttttc

SEQ ID NO: 37440 - DNA, 295 bp, Macaca Mulatta
gggaaccattgagattgtatttgccctgagtattaaagctggcttagcaaaatacttttaaaaacatattggtaaatgatacccataaaactagttatattttattttaaaatgcaaaatacattggtatttattaatcatggatttagggaaagggacagatttttggtgaacctgacttgtggcagatggtaaggaatattataaaacatttggatgagaacaatcagggcgaattacatttttctgttacactggtaatcatttgaaaattgatttacctcagtgtttaaca

SEQ ID NO: 37441 - DNA, 429 bp, Macaca Mulatta
gggtcatggtggtatgaacagtgggtgccaggtgcttcctgcccttcctcttccactggttccagatggcattcctagggcaccaccttcctgaacaactcttggggaggaagagtgtcacatggacacagcacatcccagctcagagtctacagtcacccacagtcttaagcaggtgccagtggtgtccacagtcacccacagtctcaagcaggtgtcagtggtctgagctgagctggagctcaaaaaactttagaattggctccacatttgtgaaagtacctgggtttggttctctgtccactgaggcactgaatgcatgagggcccaaaagtcaacaattgtgggaagagagagtggcatcagggcaaggctctcattacgccaagcaccagggtagctcaggcctgctcatctagtctttggaga

SEQ ID NO: 37442 - DNA, 691 bp, Macaca Mulatta
tacgtttggggtaaatcaacttttcttagtgaattcagtgtgtttgctgcaactgccactcattttgcgtttaaaagaacaaaagaggaatgtattttcaaaggagtgaatgaggttaaaatcaagattttgaatggtataaatatgcaactaattcaattgtaggatattattaaattttgtatctctaaacatctttctttcatacatcgcagtgcttacagttccaatagcttccaagaaaacatttccatgtttgcataatttgtaaagtatatataaataatgtaaaataatttgggattatctcaactttatattgtatgtctgaatttcatcgatgtcatacctggctcagtcaatagtcgtcacaggtattaagccattttggaatttgccacctttttctgtggaacctgttttagtttagtttacagcatttagaaatagaaggtaactttatagaagtaacaccaatatcctagtctgcttgtcccgaatacaattaatagtattaggatgtaagtgatattaagatggtttttattatttttttgtacactgtacttttactttttatttaaactacagctaaaagctgactttttaactaaaattgaatggcatttatcttaatgcccagttattgaccaaatcatactcagaagatgttattatgtcccagtctaag

SEQ ID NO: 37443 - DNA, 554 bp, Macaca Mulatta
tgatgtctttaaagtagttggaaccacttttagaatgttattcttggttgcttttgcctacttctaatggcttaaagccaagaaaaccatagtataaatccttttgtgtacctatgctagtgttaaaatggcagtttgttctgatgaaatatgtcacttcaagttttatgtgagagtttttaattaggttaaaaataattttggcatacctctctactcagtttataaagcaattccacacaatgcaaacaaaactctaacagcaaaggttatcttgacctgatgttacttgaattcgagagaaagtcattacttactactgcactcctgcttttgtgggaaaaacttttttcttccccagaagagttaacagttgagtgtacagctcctgacttacctttaatttagaggcaatattattactgtttaagtgattatttgcttgccacaggttttattttgtcttttttctggtagattacacaatggacaactttagtgatgaggcatgtgaatgatttggtgggagtaggtatatacttagtggaatggta

SEQ ID NO: 37444 - DNA, 771 bp, Macaca Mulatta
  misc_feature (1)...(771): n = A,T,C or G
aattggaaaattcacaaacttgtggaaattaaacaacacactcaaccaatgggtcaaagaagaaatcacaagagaaatttttgagaaaaatgcagcataccaaaatttataggatgcagtgaaagcactgctaaaggggaaatttacagacataaatgcttacattaaaaaacaaaaaacatctcatgtcaacagcctgactttgtaacttaaggaggggggaaagacacactaaatccaaggctagcagatggaaggaaataataaagattagaacagataaattgaataaagattagaaacactagagaaaaatcagtgaaactacaagttctttaaaagaccataaagttgagaagctgctacctagataataaaaaaggaagactcaattgctaaaataaatgaaaatgggacagcactctagatcctagaaaaatgaaaagggttataaaataataccttggacaacttagatgaaatggtcaaaatcctagaaatgcaaaacctaccactgctgaactatgaaaaaaattttaaaatccgaatagaactagaaccagtaaggtgattgaattagtaatcaattctcctggaaaaaaagcgctggaactgatggttctcatttgtgaaatctaccnaataggaagaaataacccccaaccctcttaaactttttccaaaaattgaagaagaaagaagcttcccaaattcattctgatgctggaacccagaccaatattccacaggaaaaagatttccgaccccaat

SEQ ID NO: 37445 - DNA, 501 bp, Macaca Mulatta
  misc_feature (1)...(501): n = A,T,C or G
gggggcactggacctccttctgcgtgccctacagcgccgtccgcaacgaccagttcggcctctctcacttcaactggccggtgcagggcgccaactaccatgtcctgcgcacgggctgcttccccttcatcaagtaccactgctccaaggcgccctggcaggacctggcccggcagaaccgcttcttcacggcgctcaaggtcgtcaacctcggtattccaactttattatatggacttggctcctggttatttgccagagtcacagtgactgtacataccagttatggacccataacagtttattttctcaataaagaagatgaaggtgccatgtattgaaagtgtgcatcgaagaacataaatatcagtggattttctctgtgtatatgtgcagtatttatttttgatcctttaaaataaaacttttgcnnatacnnnnnnnnnnnnnnnnnnnnnnnnnnnnnnnnnnnnnnnnnnnnnnnnnnnnnnnnnnnnnnnn

SEQ ID NO: 37446 - DNA, 530 bp, Macaca Mulatta
  misc_feature (1)...(530): n = A,T,C or G
gccagttactttgtagtttcactcagaaaaacatatggagacatttatacccattgatttgacaactgaaaatcaagagatggacaaggaggaaaccaacacaaaaccaannnnnnnnnnnnnnnnnnnnnnnnnnnnnnnnnnnnnnnnnnnnnnnnnnnnnnnnnnnnnnnnnnnnnnnnnnnnnnnnnnnnnnnnnnnnnnnnnnnnnnnnnnnnnnnnnnnnnnnnnnnnnnnnnnnnnnnnnnnnnnnnnnnnnnnnnnnnnnnnnnnnnnnnnnnnnnnnnnnnnnnnnnnnnnnnnnnnnnnnnnnnnnnnnnnnnnnnnnnnnnnnnnnnnnnnnnnnnnnnnnnnnnnnnnnnnnnnnnnnnnnnnnnnnnnnnnnnnnnnnnnnnnnagaaccaaaagatgatgatgtgataagaaatattattaggctacgagaaaagcttggttggcaaactgtattaccgcagcacagtttgaaatatggaagttccaaaattgcagttcagaagattactttaaag

SEQ ID NO: 37447 - DNA, 459 bp, Macaca Mulatta
gcatttcacccattctcacctgtcaattccagcgttttccccaaggtgtgtgatttcctacaaaaccacatatttctcacaactatgttatattttagcctctacaaaatacccaatcatattctccaaagggtcatctctgtggcgcatcccatgaacatttcctttccttagatgcccccacctggcaactcctggtgtcctggtactggtgttctcccgaggagacagggaacaggactcgtcaggcagaggacagcatcctgcaggaagaacccgggctgctccaggaccccagttggacactgtgcatcctggcacagcaacctcaccatgctcccacctccaatctggccttagggccctccaaccctgaccccaggattctgcccagcactgggaaacagcccccaggtgggtgccccaagcctctgctgctcttcctttcattcttgtgct

SEQ ID NO: 37448 - DNA, 942 bp, Macaca Mulatta
  misc_feature (1)...(942): n = A,T,C or G
gggctctttcccatcttgcaagatggcgggtgaaaaagttgagaagccagatactaaagagaagaaacccgaagccaagaaggctgatgctggtggcaaggtgaaaaagggtaacctcaaggctaagaagcccaagaaggggaagccccattgcagccgcaaccctgtccttgtcagaagaattggcaggtattcccgatcccgcatgtattccaaaaaggcatgtacaagagggaagtactccgccgctaaatccaaggnnnnnnnnnnnnnnnnnnnnnnngttcttgcaactcttaaaaaaaccattttggggtggaaaaaaagggggggacccgggggggtaaaactccccaaaagcccaaaaaattccctccctaaaaaatgtcccccaaaaggtttgggcccccgcaaaaaaaaccttcttctctccccccgtggaaaaaaatggggggggggttttttccccccgggggaattnnnnnnnnnnnnnnnnnnnnnnnnnnnnnnnntagagaaaaaaagaggggtgttttttttttaacaaaccacgccccaaaggcgaggtgtttttattttgtaatgagagaggcgcccgtgcggctccacacaaaaaattctctcctatangaaannaaaanccacaacaaaaatatatatgtttttctctcccctcccctcccccacagaccaggagataggtcagagagggggttatcggactacacacacacataatgaaaagtatcgtcttttnnnnnnnnnnnnnnnnnnnnnnnncggactcaccccgcccccctccgcgggtagaggtgtgattctgcctatcacccaacaacaagaagnagattaanggaaaggaacntattatctattcatcactataaaatgtttgtggnggacgcgggcgtngngtgctcccatggggtgggaccacgaggg

SEQ ID NO: 37449 - DNA, 195 bp, Macaca Mulatta
  misc_feature (1)...(195): n = A,T,C or G
aggcccctgatttctacgtggagatgaagtgggagttcaccagctgggngtgccccttgtgtccaagatgtgcccgagtgatgtgtaccgcgtgtggaagcggggtgaaagcctgcgagtagacaccagcctcctgggcttcgagcacatgacctggcagcgaggccggaggagcttcatcttcaagggccaggg

SEQ ID NO: 37450 - DNA, 1088 bp, Macaca Mulatta
  misc_feature (1)...(1088): n = A,T,C or G
ggctactttggccagcgacctgaggtagctggccaaagtagaggagcccctgggggaagtctagaaagctcctcatcaggagagttaaactggcaggaatgtgctgaaagttggctgaaccaagtacttcagggtggagagggactgaagctgaggaaagcagcagacccagtgataatcttgcacacaggaatataaatgcagtgacgtaaactccaaactctcaggatggcaggcatgnnnnnnnnnnnnnnnnnnnnnnnnnnnnnnnnntgctgaggcagaaggatctcttgagcccaggagattnnnnnnnnnnnnnnnnnnnnnacaagaccttgtctatacgagagagttaaagaatttactcgcgatagtatatatatagtctctggtcttctgctcaaatgggcaggaaacacaggagcgcctctatgccgtggtaaagtccccgggtcgacttttgggagaaggcaccaaagggtaggtgaacaggaactccactcgctgggagatatgcgagaggggggtttccaatagagaatcacaaggggattggtaaacccacgaacgatcggggtctgtggaaaaaagatgccagcgtggattgcttatcttcataattataaaaatataactattataccctcacaatacaaaaactctttatagtggccaggggggagatcctccactttggaggacagangggaatatgatcaataatagtccagccttcgatgtacgatagtctatgccgagagtacctcttaacctacgatatggagggaagaggtgcggcctggagagacgcgcacaaagggggaaataaaatatacactaggtctcaagggaggtgcaatcttgatgatgagatacggtctcaaactaaaaagtatatgtcgaaaagagtgtgaaacgtgtttggcaatggaaactatgacactcaaactaagtcggatgagtcgtcacagatgtccctatctgggagtgcaactactatgtgtaatctccgcagaaaaaggacctccgtgttacccacacagacatgaactaaaaaggaggagtaagcgacacggagaacagcg

SEQ ID NO: 37451 - DNA, 996 bp, Macaca Mulatta
attaccattggaatcaaaaagtgagcatccttactatgggctgaatgtttgtgtcctctaaaattcatatattacactcttaacctgcaacatgatgatattaagaggtgggggatttgggaggtgaccaggtcatgaaggcagagtggttatgaacggggtcagcatccttgtgaaagaggtccacaggagactcctcacccctcccactatgtgagaacatagctggaaggcaccacctaccaatcagaaagggagccctcatcagacaccaagtctgtcagcatcttgatcttgggcttctcagcctccagaaccgtaagaaataaatttatgttttttataaacaacccagtttatggtattttgttatagcagtccaaacagactaaacaattctttatttttcagccattgcattttcagatcaatcgtttctctggtagtccactatcatttactgtgctggctggcaaattgccttccttatgtaacagaaaattgttgaaattcaaaaatctgaatcaatgccttgctctactgagctggataatacattcatgtctgtaatatctctggtttgactttgagggtatgagaaaccctcttccataaaagtgttattccttccacctcagctacagggagcaaaagtttcccattcattatttttcagattgtttctaaagcgtaaacatgtattcttgttgtgcaatagtaaacacatactccagaaataattcactgattaaatcaacgaatataaagtaaaaccctaaatgagataaaaggtaaattaaaatatatacattagagcaactaaagaaactctttagttggaggaggagtaaggaagtgggagatgatgagtaagtctgggaagcaccggatgggcctggtgggagatgggattgcactttggtcagttttatgttaggtgtgcattactcttcaatttattcttgtttcccctcagcatgataaatgcagacttca

SEQ ID NO: 37452 - DNA, 382 bp, Macaca Mulatta
ctcacgcttgtatcttttgaatgcattctgcagccaaagtgaagcggaaacattatccatataaaccagaacaagctgaggttggttcccgcaacctgtcccccaggaaactcctaacacttgtgagtaggtatagcaccagcaaagttcctggtcccagcgagggtgtccttggacttttctgaaggattacagagctgggcttgcctcttgtgtcttctttcctaactcagactcttctttttggccttggatccggccctacccaagttttgactcctcttaggaaagcagaaatcgctccttcatggacaacaccaacttggagaattctctgatggggtgcagtattcatgtgacgattgccagtaatgatagatcc

SEQ ID NO: 37453 - DNA, 262 bp, Macaca Mulatta
tgatctttgccgtgcctccccgaccgtccagcctcgtggccaagcccgtggcctacatgcccgcctccatcgtaacctcacagcagcccgcgggccacgctatccacgttgtgcagcaggcccccaccgtcaccatggtcagggtggtcaccacgtccgccaactcggccaacggatacatcctcaccagccagggctcggcggggggctcccatgatgcggcaggcgcagccgtgctggacctgggcagcgaggccagagg

SEQ ID NO: 37454 - DNA, 793 bp, Macaca Mulatta
  misc_feature (1)...(793): n = A,T,C or G
gggtgatccacccnnnnnnnnnnnnnnnnnnnnnnnnnnnnggattagaggcgtgagccaccgtgcatggccacaggtaatttttaaagggggtgtgtgtgtatttagtttgctttttaaatatacagtgatttggaaaaaccttaatccagcggcatgttactggcagtattttggattagaacatgggctttggagttaaatagacctgtttatgtgcggactccaactctgctacttactagctctgtaatctggggcatgttacttaaaatctctgagcctctacaactgtaaataggaagagtgagcctgcagtgaaggtaaacgtgatgcctaacttcgaagatttcatgtaaatcgcccagtatggtgtttggtgtgtagttggtgctcagtattgctccctctccccctcccgcttttccctcctaaactcaagttagctctctggtaccttattctcacttcatttcccaaggaaacaccactgtaaaacataattataaaattgctatacaaaatagcttccctgggacttggntctgaatgtctttccttttatattgtatccccttttcttttttggaagggccataaagaatgggttgaggcaacccttggtgtcccctgaataaatccaatccgcttaaaaccctaccctgaaaagaaacctaaaaaaaggttccccagttaattccccctctttattgtataaacagggcctggggttcccggggtggccccccanaaacttgggaagttggcccggccttgggggcccaattctccc

SEQ ID NO: 37455 - DNA, 1799 bp, Macaca Mulatta
  misc_feature (1)...(1799): n = A,T,C or G
gattactcacacagtcttgaagatgcaatgtcatctatttaggacagaaacatccaaggccgtgtcagaactcaattacgactacatatgcattaaggcaggaactggcaggcctctgggtacgccaactataggactcgtgcttctcgtacgctgggctataatctatgaaactgagctccagagccagccaatcacttagctcctcataacaagtctaactggctctggaaagctgaaagggctgcactggaacaacacagaagagatattctacacattaatctacttatctggaaatcactttgactctaaaggccagagaaaaatcacagcttccttgttggaggggaaaaggacaggtgatcttggggaaaacgcagctacacctggagcaaggtctcttcccggctttgcaatcccaactgtgcccgcgcttcaggacccgagtcgtcccagaaaccaaagggcaggcacggcagcaaacgcctgagnagtgctgctgcctttggtgactatgtgagaatggaaacttctaaggaagccaggttgttagaattgttaccccctttactcgaagataacatagattatccaggctgagatggaaaacaagccctttattgaattttcaacacagactccctgcttctcatctccttaataaaatttcattaaacccccctagaattccgatgttcaaatctccatttgttgacagacaaggccaagaatactctaaactgaggcatgcaagtcatttcatttgtattcttgtccaaaaatttcccataggaagacttcacctcctacaattctgaagaaaactcttactgtccaagacaatcgccagcaaccatccacagtcatctgagtggaaactttcacagcttttgtacattctctgtgtcaacatacaactgagttacagactgtcccctggctccctgacccttacaaacactaaaagttttgtttgactcaacttcaagctgctcatctgttagtaatgttcactccagaacacattcatgacgagagctttctaaaagaccagcactgccttcccctcctataatcctaataatcatgagaacctgaaacatgttactgggactcgagatttttctggggattgaaaatatttagtccttggagctgtcacatatcaggggcaacctcacactgaaacaaaggaagtgatgtcccattgttatccaccctgagccaccataatatgctgtttacatttattttcttcagcctgtgcaaaacaaagcaatggaagaggaaactaaaaaatatacatactagtaccattatcctcttttgcctaaaattactaatgcaccatgtcagagtctgcttccttcagacatcattctcaattcatcaggaattatagtagcaggttctggctaaagagactatctcctgtcatcacgatcaattaatgttttctggttaattagaaaacatcagccctatctaagaagctcatggtatacaagggtcacccaaatagctaagtgcagtcctggctcataattacttcatctcaaccccgcaaacaagaattaagatgatcccaataaaagaaaaattgctcaggaaagtgaacctttttctgaaccaagcactgtcagcaaatctcaggtatgagagcaactatggttgacggaaaagtgtctcaaaatctgggcctagaatgatttctaggtccataagctaattggtctggccttgccatttacgtaagccaaagaaagtcactcatgagtaaactatagaaaacgttc

SEQ ID NO: 37456 - DNA, 650 bp, Macaca Mulatta
caatgttaaaatggtatttcagatccaaatattctgtttaatcaattctggaacttgctacccaattaccctgcctggcgagacccagcctggagaaggacctaacccagctagaataggcctggcagcagaaagggaggcacggagcacatggccgttttgttcatgcacacctcatttgagacacccactcacatcttctaccaggaaatgctgcagcccaccactgttgggaaactggccacactttccccctcactctgactaatccaagccctatgccaagaccccagagctgtgaggggcccacaacccacttatagatctttcctatactgtactctaggacatcaagtggctgccaagccaaccctgttccgaaaggctcagctaccatcctgtcccaagtaagcacctgttgaggtgggtaaaactgatgatgactgatggtaggggagaggtacaggaagagctaagactggtgaaccttgccggggtgttcagggcaaagagacaagccagtaatcactgactatttcccctgcccttagctgcctggcacatatcctttcacagtaaatagcgattgttatcctagcaacttgacaaactaccaattcccagccatgggctatatctggaacaacttt

SEQ ID NO: 37457 - DNA, 796 bp, Macaca Mulatta
ggggagtggctcgcattcaaaagtcgttggtttctggttcttgaaattggggtgggggtaggggatggctatcatatgttgtttgggggcccccaggacccagcctttccaggcccagcttccgaacctgagtgccaaactgccggctttcccttctaccctctccactcctccagtgtccgagttggagagtgctctgcagatggagccagctgccttccaggctttgtactctgctgagaagccaaagctggaagatgagcatctcgttttcttctgtcagatgggcaagcggggcctccaggccatgcaactggcccggagtcttggatacactgggtacggggaggtatggctgctagctgggaggtgatggggactacctgtcattcctgtccgtctctcacccttctttatctccacagggctcgcaactatgctggggcctatagagaatggttggagaaagagggttaggcaggaggcggcttactgattgccaccccctggccccttaatggccatcttaactaagggtgtgaaggggctgacttggtgagttgggcaactccttatagtgttgtgcacacaaaagcatcaaataaagaacatttaatcaaagtattggaagcacttaatgtgtcagttggactgaaaacagttctaatctttatctagacctcaattcagtcctggatcatcatttctcagcattcatctgcttcccctagcactccccacatgcaaaattctagcagtttcctgagaggctacaatgtacagtacttctagaata

SEQ ID NO: 37458 - DNA, 652 bp, Macaca Mulatta
ggggatggcaacaagcatggaaggaagtttccatgcttcttcgagtttagtacgtagaaagagacctggaaacaaacaacgcataatgatgatgatgctctaggtttctttaatgagatatttggagaattttcagaccaggtttctcagtgcgttggaaggattgagtgtcagagtccttgagccatccaaagattatcttaagagagaaattctcttaaggttgaaatctgagggtttgggggtggattctggcagatcctaaggtttgggacctctggaaagccctgaaatttatgcatttcaccatgatgaagacatctaggcgaagagttgattccagaaggaattgtgaagagccacaacaatgtgccagtgaataatgagtagtacctactgtggcaactcttcagctaagatgagtgtcaacgaagtatcagctttctcattgactctggagcaaaaaactggctttgcttttgttgggattttgagtatcatcttgggacttcttattatcagatgcttcacaatcctgctagacccatatagtagcatgccttcctctacatgggaagatgaaagtcgagagtttgataaaggtacatttgagtatgcgctcgcatgacagtgcgacgattcggattttaag

SEQ ID NO: 37459 - DNA, 297 bp, Macaca Mulatta
gccagttccggccctgaacgcttcagctgtgccacgtgcggccagagtttcaagcacttcctgggcctagtgactcacaagtacgtgcacctggtgcggcggaccctgggctgcggcctctgcggccagagcttcgcgggcgcctacgacttgctcctgcaccgccgcagccatcggcagaagcggggtttccgctgcccggtgtgcgggaagcgcttctgggaggcggccctgctgatgcgccaccagcgctgccacaaggaacagcggccgtaccgatgtggcgtgtgcggccga

SEQ ID NO: 37460 - DNA, 678 bp, Macaca Mulatta
  misc_feature (1)...(678): n = A,T,C or G
ctgtctttacctttgtttggactctgtttgttcccaagacctctggtttggctcctatttggatttctagttgtgtctaagaacctatttggctcaccctgctctgcatctgacagtacaggcacaaggactgtggacaattgctgggcattaatgaagtcaagggagaacagcagggggcaacttggtctgtgtgaattatgggactccattacttttcctgagactctggtcacctattgctgcctgctactggctatgcccaccaccttgggcagctccctgctgagtgaacatatcccagaccattgccagctccactctgtggtttctaatcaacagggatctccacaacactggtggtggacacaggtttcctgtcagcacacaaaagactccttcctcttccaaaagacctctcaattctttgccaccaccaccctcgtcattcagaaaccctactgtcagacaaatggttgaggggacatgtcagaccctatcctcatggcaaggttaatatgttggtgttcttgacaagtaccaagctttctcagccaaaaccagtggattcattgaanatctaggtacttttattttcctcccttcctgaacctaatgaagtgccagagtgagtgtacactttctttttctctcatctctcataaatctcttctgtct

SEQ ID NO: 37461 - DNA, 744 bp, Macaca Mulatta
  misc_feature (1)...(744): n = A,T,C or G
gggtaacattggggtgttttttgggcacctggcagccagccctttcagccgtcagccctctgtaatgactcacagtggcggtgcacaccgtcgaggaagtgggtttccgtgcgtttccttctctggtgtgcttgatcccaggtgctgatagctgctgtgtgggcgccagtagcatcaaggaagagaaggtgaccctttcatgtcctgacagtatggtccagagagcacactgactttttatttttcctcattttttaatttaaatgtttttttttagagacagaaccttgctctgttgccagggactgggatgccattggtaccatcatgactcactgcagcccttgaaccttaccccgggggctcagggcatccttcccaacctcaagccccccccaagaaactggggactaacgggcggagtaccaccccgggcctgggctccattttctttttaacgggttttttggaaaaaaccggggtccctcacgggtggttgcccccaggtttggggtccctgaaaacccccctgggtcnnnnnnnnnnnnnnnnnnnccctcgggggctttccccaaaaatgtgcttggggaaatttccccaaaatgtggaaaccccccccggtgggcccctttgggcccaacccccctgggggaaaaattttgtgaaaaaaacacgggtgcgcccctgggggcccaaannntaaaaaaatacaaagcatataaaaaaaacctttatgagaggggc

SEQ ID NO: 37462 - DNA, 522 bp, Macaca Mulatta
  misc_feature (1)...(522): n = A,T,C or G
aggtgtgtgaatggaggcctcctgagcaactgaaacagcttcttgatttggagatgagagactcaggcgagccaccccatagactattggaactctgtcgggatgtcatacgctacagcgtcaaaactnnnnnnnnnnnnnnnnnnnnnnnnnnnnnnnnnnnnnnnnnnnnnnnnnnnnnnnnnnnnnnnnnnnnnnnnnnnnnnnnnnnnnnnnnnnnnnnnnnnnnnnnnnnnnnnnnnnnnnnnnnnnnnnnnnnnnnnnnnnnnnnnnnnnnnnnnnnnnnnnnnnnnnnnnnnnnnnnnnnnnnnnnnnnnnnnnnnnnnnnnnnnnnnnnnnnnnnnnnnnnnnnnnnnnnnnnnnnnnnnnnnnnnnnnnnnnnnnnnnnnnnnnnnnnnnnnnnnnnnnnnnnnnnnnnnnnnnnnnnnnnnnnnnnnnnnnagtgtcattactccatgaagaaggcagcctcttttcttgggattggcactgagaatgtttgctttgtggaaacagatggaa

SEQ ID NO: 37463 - DNA, 773 bp, Macaca Mulatta
  misc_feature (1)...(773): n = A,T,C or G
ggtatttttcttgggcctgagactttaaaaagtgcagggcagttaaaacgatgagatgtaattctcacctatcaactcagcagaaattaataagattaaaaagatgcataatatattatattgcagagtccatgggggaattgatatacatattcatgaactggcagagacaaaaatgggcacggaaccatttggaaagctattatgtacttttaaaaatttcagtagcacaatttttatatcatgaaatttcacttcagaatgtcagtcctgtagaaatactgacacaagtgcaaaaacagcaaaaaccaacttgtacgttcaaggccagaaagagttatttcaccagataatagaattgaggtacattaactttattagaaataaatctgataatctgctaacattttaaatagttatggtttaacttcagttctcgaagtcacatatatttacaattaggaatgctaacaggctttttgtgcaatacggaaagatgactttaaatgcctactattattttgtgtnnnnnnnnnnnnnnnnnnnnnnnctgacctactacaaagcaccaaatgttttgtgttcttaatctgaagaataatagacattctctataaacagctattgcttattcatgaactttgtacacaagaatcttcataagacaggggctcaattatttttctaaatatatttcctatacaaaataatttcaagatataattgttactttttgtgtctaatactggtatattaaataataaaaatagtaa

SEQ ID NO: 37464 - DNA, 709 bp, Macaca Mulatta
cggcacgaggaattgttgttgactgaatgtaatagacctactgtgatttgtccaatatcactgattagttacatcctttgtgtgggattagctgtaaagtgtactgctcttattcttgttcagaatagtgaattggtagccaaaaatacatgtatcacagatgttaggtcgaatttaaacagcacagtcaagtgctctggaagtttttctgctaaattagtagattaaagaatactataccttagccatgggaagcagcacgttttcctttggtgggtaggatctctatactagtgaacagtgccagtttcacactttggatttagaactgttctctagttattgtaacacagaatactgtcaatccctaatttacttaatgttacttattggaagtggggctgttgaaatacgcacaggagggaaacctactctgtttaggcacagggagccccaatatataaggagatcatattccaaaggttgtcagttgatcagttgattgtttgcaacctggaatgtattttcctttagagaccacgttatccacggtggttaggcccctggagcagctggaaaagatgatcaaacccatagtttagctgaaatcgaataatgtaataggtttgctaaataatctaaccatcaaatataatattgtttccagggagggtgtttgttcagagttgcctgttagtagaatctggac

SEQ ID NO: 37465 - DNA, 841 bp, Macaca Mulatta
  misc_feature (1)...(841): n = A,T,C or G
ggannnnnnnnnnnnnnnnnnnnnnnnnnnnnnnnnnnnnnnnnnnnnnnnnnnnnnnnnnnnnnnnnnnnnnnnnnnnnnnnnnnnnnnnnnnnnnnnnnnnnnnnnnnnnnnnnnnnnnnnnnnnnnnnnnnnnnnnnnnnnnnnnnnnnnnnnnnnnnnnnnnnnnnnnnnnnnnnnnnnnnnnnnnnnnnnnnnnnnnnnnnnnnnnnnnnnnnnnnnnnnnnnnnnnnnnnnnnnnnnnnnnnnnnnnnnnnnnnnnnnnnnnnnnnnnnnnnnnnnnnnnnnnnnnnnnnnnnnnnnnnnnnnnnnnnnnnnnnnnnnnnnnnnnnnnnnnnnnnnnnnnnnnnnnnnnnnnnnnnnnnnnnnnnnnnnnnnnnnnnnnnnnnnnnnnnnnnnnnnnnnnnnnnnnnnnnnnnnnnnnnnnnnnnnnnnnnnnnnnnnnnnnnnnnnnnnnnnnnnnnnnnnnnnnnnnnnnnnnnnnnnnnnnnnnnnnnnnnnnnnnnnnnnnnnnnnnnnnnnnnnnnnnnnnnnnnnnnnnnnnnnnnnnnnnnnnnnnnnnnnnnnnnnnnnnnnnnnnnnnnnnnnnnnnnnnnnnnnnnnnnnnnnnnnnnnnnnnnnnnnnnnnnnnnnnnnnnnnnnaactaaccgggctcttctaccccttactcatcaatactaaagccacaccttaccaacaacaccgggcctccttttaaataatttcctttaacttaaacacctcccgcggaacccagagaacctaaccaaaccccccccgggatcttcccacaacttttttacccttggacctaggccctgggccctaaataaaccccta

SEQ ID NO: 37466 - DNA, 513 bp, Macaca Mulatta
agaattatcactgtccaattggatgagaacaatcgtgtggaaatgaagttgggcccattagtagaaagcaggacgataaatatgtccaatctgtacgtcgggggaattccagagggagaggggacatcgctgctcacaacgagaagatcgttccatggctgtatcaaagacatgatctttaatttggacttttggatttcaacagcgcagttgtccatgagcaagtcgatttggacacctgctggctgtcagaaaggcctaagccggctcccgatgcagaggacagcgagctcttgccagagccccgggcttttccagtaggagcggcttcctttactatcagtcaggtccagtcagcaaaggagggcccaggacagagggagttaaaatggggccttgctgtaaaggtcctgcaagagctggagctggagctggagctgtgctaaaattcagagcagggatagggtgggaaagcgtgccccaagcaactcggatgacacggcccaattcata

SEQ ID NO: 37467 - DNA, 793 bp, Macaca Mulatta
atactataagtacctgcgcgtatgtgtccctttgtaattctttaaccccagaactctattccctccttcaggatgtcatacattatcttttcttctctccatgctgctctgaaatcctgctatagaaaactattaggaaatggctgcagtcctgagctgtgagcggtaaacacagcctttgagagcaggagcacatttccctttcatgacatcaggtacggttgtatgactcccgactagttttagcatctgagtcttaccttcccccccactgtattgaagaatgttggtgatcttctaagaggtactctgtatagtttgtcattcacacctataagaaaacaaactacattttttgttgttgtattgttaccttcagctactctttggttatttcattatctggtttcaaaattcccatgtcctgtgaaaccctgtcaagcaataaataattggtactgttaaatttcataatggaaaaagttggaactcaaagtattaggagtttggcattgattttcaaggacaaagaaagaggctatgaactctcagagatactatacctgtaatgggatggacttcttgctctattgaaaaggtctggtctctggaacatgggcttacaaccagttactcaagtggtttatataccacatgtacttcaatgctcttttctgatttcatgtcccttatcacgattatgatctgggcacctcaggattaagtgatcatggaaaaggaccgaggtattgctgctctaccaggccgttacatactgaagatgtggctactt

SEQ ID NO: 37468 - DNA, 793 bp, Macaca Mulatta
  misc_feature (1)...(793): n = A,T,C or G
ggattctagaggccgaggtgacaggatcatttgaggccaggagttcaagacagcctgccagaccttgttnnnnnnnnnnnnnnnnnnnnnnnnnnngttccgggcctggtggcccatgcctgcagtcccagctagtcaggaggctgaggtgggaggatggcttgggcctaggaggttgaggccacagtgaactgtgattacaccacaggnnnnnnnnnnnnnnnnnnnnnnnnnnncctgtctnnnnnnnnnnnnnnnnnnnnnnnnngttgtacttagtgtactaaaattaaaaattggataacaatagttgaggacagtgtaggcatttaaaagtagaggatttcactttttactcatttttgtcttttatatgcatcagaatgagtgcatattgagtactactttgtaaggtcttaaattaatttgatatctactgagataatccagcatttcatgtgtaaagatacgttagataataatatatcactatcttggaaaacagttcctaaatctgatttattttcaggtttcatngaatcaaatctaacagataagcaacaacgtattggtaggctgtgaaacattgctgcaaatataattaggtaaaacaaagagcaaaatattttgaacannnnnnnnnnnnnnnnnntgtttaaattagttgtactccagcactctgggaagctgaggtgacaggattgttttgaggcccaggagtcaagacccgcttattgttccgaaatagaattgtggaaaattcactatgtgaatattttcctggaaccaaaaa

SEQ ID NO: 37469 - DNA, 651 bp, Macaca Mulatta
  misc_feature (1)...(651): n = A,T,C or G
ggggctcaatgtatggaaatgtttgcacctatgtaaagtctcaagctaattacacattgctacagaacaggagtaagctgaaaactgaatgccatgttttgtttataaggtggggaggggaggggaaataccaaaaagctctgttccaagtttggcatttgacattaatgtgaagcagtgggaccatgctgcctgctaaaactactgtatgaattgtaagtgttctgaagatgagcagctggaggctggaggatggcattccacacagcaaaggagaagcaccaccacttcgtctgggaaaaggaaggaaattgcgggaggcctggatccatcatttgtaaaggggatgtcgcggggtgtgatgctgttgaggagattcaccttcgattgcactgctccacagagccctcatgtaaggccaatcctaatgggctacctcggctttaaaagttcatttcagtaagtcctgtttcaaaagtttgtccttttttgcttctaccttcagtgccactattttccactgcagtgttttgacttcacaaaccgcctcctccagagagaacaatgtattgctgaaaatgggcagtagaagcaaatgctattgttacatttgacctataaagtattcagagtgactgctangtagaaata

SEQ ID NO: 37470 - DNA, 775 bp, Macaca Mulatta
  misc_feature (1)...(775): n = A,T,C or G
ggaatgccccagttagatacatcaacatgattcaccactattatgacgatgcttcccacactatatcttatcatgcagctaaagctactaaacacaaatcaccaccaaccaccccttacaaaaacccccacccttcagtctcacaatgtccgnnnnnnnnnnnnnnnnnnnnnnnnnnnnnnnnnnnnnnnnnnnnnnnnnnnnnnnnnnnnnnnnnnnnnnnnnnnnnnnnnnnnnnnnnnnnnnnnnnnnnnnnnnnnnnnnnnnnnnnnnnnnnnnnnnnnnnnnnnnnnnnnnnnnnnnnnnnnnnnnnnnnnnnnnnnnnnnnnnnnnnnnnnnnnnnnnnnnnnnnnnnnnnnnnnnnnnnnnnnnnnnnnnnnnnnnnnnnnnnnnnnnnnnnnnnnnnnnnnnnnnnnnnnnnnnnnnnnnnnnnnnnnnnnnnnnnnnnnnnnnnnnnnnnnnnnnnnnnnnnnnnnnnnnnnnnnnnnnnnnnnnnnnnnnnnnnnnnnnnnnnnnnnnnnnnnnnnnnnnnnnnnnnnnnnnnnnnnnnnnnnnnnnnnnnnnnnnnnnnnnnnnnnnnnnnnnnnnnnnnnnnnnnnnnnnnnnnnnnnnnnnnnnnnnnnnnnnnnnnnnnnnnnnnnnnattacccgcaaacttcaaagccgggccatctgctaatacacctggaatcggaaaccttgttcctaacaactatcaaccaccaacctttttcattacatctattaagcccccaaccgactggggaataaaaaa

SEQ ID NO: 37471 - DNA, 931 bp, Macaca Mulatta
atcgagaaacagccgactgtaataaaagagaggccaaggcaacaaccttgggtaattagaaaagtcagaaaaacataggaacaaaagcaggtagactagagactatgattgatcttgctacactagactattacattagaggggaacagttcgtgtgaaagtagcagagggttgtgtctagatatttcttaagcaagaagtaggtctccttatggttaaaagtgaaatgaataaggtcaagatagaaaagtttccccctctccctctttctctgctcttcttccttggagatggcagaatccagccccttagggaaatgaatcataagtgaaggagtaaggagttgagggagacagagttagtggaactactgaaacaacctgtccaattaatttggatctccagaataggctctgagaagaagccataactatcttccaactagaccaaatccctgaggtcttgtctcctcctgttatctgttcctgaaggggtttggaaatctccaggatttttcaggtttgtggagaaagactaggacacgcactgaccagcagctgccctggtgcttggtggggctatgatggatttactgaatgttgaagcagaaagtgaaatgcaaaccaattttagtattgcatgccgtatgttaatctctgatcagcactgagtgttcaaagacagtaggatgtcggttgctgacctgcctcttagaagctagtttaactcagcaggtaaggatctaggacttctacattaggtaccactgtaatgataacaataccagaaaagtctctagtttaatatttcccaccttatgcctgtttcttcattcatgcaaagaacataaaaatataatacctaagtctctttgtattacataaagccaaatgcaaagcactgtatcttccaaataatcctcttgatatgg

SEQ ID NO: 37472 - DNA, 985 bp, Macaca Mulatta
attaaacaggttcgaagattgtggaggccaagcaagaaaagtcaacggtggagggttaaaattttttccccaagaggaaaatgggccttaccacccgtgttttaagtcggatcccatgtttcgcctgaaaagaagaaaggatattcatgcatgtacatctgtggcaagaggtttccatcacagtcaaaacttgataggcatgtacttatcaatactggtccagaggcctttttaaatgtgtcttgttgcactaaatcttttcgaccagtcaactcactataaaaaatcccaccaaacctacacattcagaagaaagaccttttcaatgttgtttttgtcaaaaaggatttaagattcaaagcaaacttctgaagcataaacaaatccataccaggaataaggtttttcgggctcttttattaaagaagaggcgtacagaatctcgccccctgcctaataagttaaatgcaaatcagggtggttttgaaaatggtgagattggtgaatctgaggagaataatccacttgatgtccactcaatttatattgtcccttttcaatgtccaaagtgtgaaaagtgttttgaatcagagcagattctcaatgaacacagctgttttcctgctagaggtggcaaaattccaagcaggttcaaaagaagctacaactataaaaccattgttaaaaaaatcttggccaagcttaaacgtgctaggagtaaaaaatttgttaactttcaatctgagaaaaaagtatttaaaaagagtttcttgagaaattgtgatcttatttctggtgagcagagctctgaacaaacccagagaacatttgtgggttctcttggcaaacatggaacatataaaacaattggcaatagaaagaagaaaacattgactttgccgttttcttggcaaagtatgggaaaaaatttgaaaggcatccttaccgcaaaaaacatattaagcattgataattcggagaataa

SEQ ID NO: 37473 - DNA, 702 bp, Macaca Mulatta
ggtcaggaaatgaagtgatttgaaagttttgaataactcaaatgctattgaattacatttaaaatattcctatggtaatttgaaaaatgcttcttaatattttgattgatcatctcatcaagctccagcatgaaaccaagaagacatgtcctgccttagaagtgatacaaaactgacaatgcttctccaggtccctaaagagggagatgggatgttatggggggaatggagaagtctatggattattaaaagatttatatgaaaacccctgagcctaattttctttacatcttacatatgttaacccgaggtagttttatgcatagtcagggccttaagtaccatctggaattgaggattgctagaactttactcaaaacccaaatactcccagggatcatactttatattactgaatggacatttccactttgaaattccgtgggcacttcaaagtcaatcataacctaaactttatcagcttttcattcctccagtcccaggcatggtcttccttctgtattctccctcttagagactgtagtcactacctactgatccaaggcagaatccacagctctcccttccgaggtgcaataatcaccaagttggtttgggggtttaccctattagggtgctcctcaaagtcccttttccccctaacttcctggagtttccagggccttcaatccctccctaagt

SEQ ID NO: 37474 - DNA, 298 bp, Macaca Mulatta
  misc_feature (1)...(298): n = A,T,C or G
ccagactccactctccctgcccgtcacccttgaagagccggcctccatctcctgcaggtccagtnnnnnnnnnnnnnnnnnnnnnnnnnnnnnnnnnnnnnnngtgatggaaaaacctatttgtattggtacctgcagaagccaggccagtctccacagctcctgatgtatttggtttccaaacgggcctctggagtcccagacaagttcagtggcagtgggtcaggcactgatttcacactgaaaatcagcagggtggaggctgaggatgttggggtttattactgcatgcaagctc

SEQ ID NO: 37475 - DNA, 549 bp, Macaca Mulatta
cctttttcttgactgtgactgtgaaggcactagtcttgtcttgcagaagctccctcattctagacttgtttgtttccttgtggtggtgatcatcttcctctatctttatttcttacaagttgacaaacgccccttccccagttatggggatccctatactaccgttccaggaaacacagaaccaggtgcttatacttctttgtttcttcttaggttggcatcaactaccagtcccccacagtggtgcccgggggtgccgtagccaaggtgcagcgggcagtctgcatgctaaacaataccacagccatcaccaaggcctggacccgcctcaacccaaagtttgacctgatgtatgccaagcaggcatttatgcactggtatgtggacgagggcatggaggaaggggagctctctgggccggagaggacctggctgccctggagaaggattatgaagtaggcacagaatctttggacagcgaggatgagcgtgaggagttctaggggtcctggcacgtgtaatacctggtctctcgcaccacagttgtgc

SEQ ID NO: 37476 - DNA, 629 bp, Macaca Mulatta
ggggcttagagctgggggcgcggagagcgaagcaggaaagtaggtggtgtctgtgaacaggcctaggggtttctgacccttctggtttctgtgccatggccacgctgagcgtcaagccaagtcagcgcttccagctgcccgactggcacactaacagctacctgctatccaccaatgcccagctgcagcgagatgcttcccatcagatccgccaggaggcccgggtgctccgcaatgagaccaacaaccagaccatttgggatgaacatgacaacaggactcgactggtggagaggattgatactgtcaaccggtggaaggagatgctggacaagtgtctgacagatttagatgccgagatcgacgccctgacacagatgaaggattcagcagagcaaaacctgcaggccaagaccctacctctggatgtggccattgagtgcctgaccccgcggggaaaccggcgaagacatgatgtggtgaaggaccccgtggaagatgaactgcaaaaaaaggtggaggtcatccaggccaccaaaaaggcttgcaacaaagggtacccggccttgaaccccgtgcccctggaggagctcaaagacttcactccaccttggggaaaatggaacctg

SEQ ID NO: 37477 - DNA, 754 bp, Macaca Mulatta
  misc_feature (1)...(754): n = A,T,C or G
ggtaattggctggcggaaccaaaacacctttgctctttcagaggaatctttatatgagagacagagctcagtgtcctgttgttagagaagcctgttgaaagggaggactctatactgaacaagtgacacggtagtttactctacaatcgtcaggaattatttcaatggatccaagagttcaatgaggaacttatagtttcagttctgacatagaaatagcatggcagtccgaattctgtccttaacacaaaaaagagctggacagatgaaaatgaatatttctcgtatctatcagagaacttaggtctccatgtaaacagctgcaacagaatctggaggcatatccaggcaatcacagctgagatctgcttacccaaaacagaagctgcttgtgtcattaactggaagaaatagttaaatggtaattttaacctaggaatagaggtttagtttgaggctactgtaagagtgagaaacttctggaagccacagctttaagggtgttcccacggttttcgtcagttttagctccagggagtctcaaaggtttttatggtaaagatctgagaaagatgccctcttgaatctggcaganagagaagagtaatcatcgtgaaatatgcccacatttttgtcataagcaatacctgtattccagaagaaaagactttgctggaacattctctcagctagaagaaaaagatttgtagacagttcgtagttaattgccccctaaacctcagttatgctattt

SEQ ID NO: 37478 - DNA, 797 bp, Macaca Mulatta
  misc_feature (1)...(797): n = A,T,C or G
gggagaggaagtgaacagctgttgatttccatctggatatatttaatgtttgcctgcttgtggagcatggtatttaaagggtgtgaatggatgaatgcttttaannnnnnnnnnnnnnnnnnnnnnnnnnnnnnnnnnnnntgatgcacaagctgtatgagagatggctaggtccatctnnnnnnnnnnnnnnnnnnaggaattttaataccttttctttgacagtgaactgtatttagacatatgacctttattgtgaaatgctcataaaatgcaaccaaactgcatgtttggccataggctagaataatatattaagaattaatggaaagtagtagtatctggatttcatgaaactattccagataatattctccagcaaaacttatagtaacctgtattttgtaacgtcaatctgctggaccaatttaatttagaaaataatttttaatcctcagattttcaaaacttggactactgcaagactgatgtgtactctttatgcccaaattttatttttcaaagataggacatcataaggcatcattatttctaatgtatcttttagctagaaagaaaaagctttactgttttaaatagacttctgctcaaaacctaatgggaaagccattttctgggggtaagatttgctacagggcatttcatgttttatagtgaaaaaagatgtttgtacaccttcctcaacctgtttaataaaaaatggttgacttccaatttttttgcaccctcttcccaggaaccttcccaaagttaacctctgttccttgggaaaacca

SEQ ID NO: 37479 - DNA, 163 bp, Macaca Mulatta
catgcactggcagccagggccacacagcggagcaagaagggcagagctgagccaggggtcccagtcgcaccaaagagcatgacaggagaggctagcgctcccagctgtttcagtgctgcttcctatagccctaggacttagagcacactgataataaaaacac

SEQ ID NO: 37480 - DNA, 796 bp, Macaca Mulatta
  misc_feature (1)...(796): n = A,T,C or G
ggnnnnnnnnnnnnnnnnnnnnnnnnnnnnnnnnnnnnnnnnnnnnnnnnnnnnnnnnnnnnnnnnnnnnnnnnnnnnnnnnnnnnnnnnnnnnnnnnnnnnnnnnnnnnnnnnnnnnnnnnnnnnnnnnnnnnnnnnnnnnnnnnnnnnnnnnnnnnnnnnnnnnnnnnnnnnnnnnnnnnnnnnnnnnnnnnnnnnnnnnnnnnnnnnnnnnnnnnnnnnnnnnnnnnnnnnnnnnnnnnnnnnnnnnnnnnnnnnnnnnnnnnnnnnnnnnnnnnnnnnnnnnnnnnnnnnnnnnnnnnnnnnnnnnnnnnnnnnnnnnnnnnnnnnnnnnnnnnnnnnnnnnnnnnnnnnnnnnnnnnnnnnnnnnnnnnnnnnnnnnnnnnnnnnnnnnnnnnnnnnnnnnnnnnnnnnnnnnnnnnnnnnnnnnnnnnnnnnnnnnnnnnnnnnnnnnnnnnnnnnnnnnnnnnnnnnnnnnnnnnnnnnnnnnnnnnnnnnnnnnnnnnnnnnnnnnnnnnnnnnnnnnnnnnnnnnnnnnnnnnnnnnnnnnnnnnnnnnnnnnnnnnnnnnnnnnnnnnnnnnnnnnnnnnnntcctctttggtctgccctcattcggccaacttactaacaccaattttcccaatcgaaaccaattaattttcagcctttcaaaagaccgcccgcctttgaaaattttaaaaccttttccgggggatggttaaatctggaaaaaacctcccccctaaaaattttccgggcccaaattgaaaagaaaagaaatcccttggcacaaaa

SEQ ID NO: 37481 - DNA, 852 bp, Macaca Mulatta
ggatgaaataaatcttagagaccacattaaggaaaagcacaatatgcattttctttgcaccccttgttcctgttctttttgtctgaaaaagacgtggaagaacacaaagccaccgagaagcatcttagttcattggttcaaccaaagactttgcaatcatctaacagtgatttggttttacagactttacctttaagtactttagaatcagaaaactcaaaagagtctatggatgactcaggaaaagcatctcaggaagaacctgtgaagtccagggtaagccatggtaatgaagtgaggcattccagtaagcctcagtttcagtgtaagaagtgtttttataagacaagatcttctactgttctcacgagacatataaagcttcggcatggtcaggactatcattttctttgtaaagcttgtaatctttattcattgagcaaagaaggaatggagaaacacattaaaagaagcaagcatcttgaaaatgctaagaaaaataatattggcttaagctttgaagaatgtattgaaagggtatgtataggtgcaaatgataaaaaagaagagtttaatgtttctggaaatggaaggattgaaggccatgtaggtgtgcaattacaagagcattcttatcttgagaagggcatgctggcgcctaaggagctgtcacagtctggtggtagcaccaaagatgatgaattagcttcgaccactactccaaagagagggagacctaaaggtaacatctcacggacgtgttcacactgtggtcttttggcctctagtattacaaacttgactgttcacattagacgaaaacacagtcaccagtatagttatttatgcaaa

SEQ ID NO: 37482 - DNA, 228 bp, Macaca Mulatta
  misc_feature (1)...(228): n = A,T,C or G
gacgccatctcccaccgagagtcatggccccgttggnnnnnnnnnnnnnnnnnnnnnnnnnnnnnnnnnnnnnnnnnnnnnnnnnnnngactggaaggctgaacgcagccaggaccccttcgagaaatgcatgcaggatcctgactatgagcagctgctcgaggtggtgacctgggggctcaatcggaccctgaagccccagagggtgattgtggtcggcgctggtgt

SEQ ID NO: 37483 - DNA, 898 bp, Macaca Mulatta
cccctccagctccttcagtccaagtccagcatctttcctacaactattctgccttccatttcgtcttcttccttgcctcactctatgtcatggttacccttaccaactggttcaggtaagatggaggtgggccttagatactctcctgaagagctattttacagaaagagcaattcaagggcattacagacacacatgggtccgccataattggtgaggaggtagaacacgtctaaaagctaaggcccttcatactctctaaccagagcctttggttacacagctatgagggagcagaactggaaaagaccttcatcaagggtagctgggccaccttctgggtcaaagttgcctcatgctgggcctgcgtactcctctatctggggctgttactggcaccactctgtcggtcccccacccagaaaccccagccccttctcttgaggcgccgccgccaccaccgcatcatatccccagataacaaatatcctccagtctaagttcttttcacaaactggggttcccctgacattgtactcctagagttggctcaaggggaactgtgcagcccagctcactacctcaaggacacatggggagttatctttgggctgaagtcaatactatgaactcgaagaagtggtcaaatagagtctaatgcgctgggcagtgtctgactcactggacctactgtttctgcatcccacctcaagagcctaacacccaaatcagcagctcaggaaccactgctgatcccagcagacagtgtggcaccagccctttcctggctcttgggctggaagtgggggtggggaaagaccaacagggactgaagactcggcattgcccttggagaaaggaaaaatagcagttcagccctgggcacacggatataaga

SEQ ID NO: 37484 - DNA, 524 bp, Macaca Mulatta
  misc_feature (1)...(524): n = A,T,C or G
ttactgtgttgtnnnnnnnnnnnnnnnnnnnnnngcctcaatcaatcctcccaccttgccctcctgaagcactggaataccaggcatgagccaccacacctagccttatagaactattaactaatatttcctggtctcttaaggaacctttgtagtacattagatatgtgtgctgtgcttggaatttactttggcataaggataagggtttaatttactcttgacataggtaagtaactgtactgacaccatttactgaagtctgtctttcccttactacacatgcaagaacctggctttacataattgaaaagtcaagttgtaatatgggctttcattgtcaaggctctgcatactttgatgtagttctcttggctttaccttcatcttcctgcgtgatactaaaatggctgcaacattcccaagccttgcatcttaatactgtaagcttaacaaagaaaaataatagtctttgtttcctgcagccacatttatttttaacaatactacagttgactctaaat

SEQ ID NO: 37485 - DNA, 361 bp, Macaca Mulatta
attcaattcatttaggaaaagccagttctggccaaagagtttgaatggcagccattgttctttttcattttctccccttgtgctttctctgtttccctggtgtaaagtgtgcgctctaataatttagaagatggcagaagcatttgagagcaggaccttctgagcaggcccaggcttcgagttcagggcagttttcttggcagcatctgcctaggctgagccagaaaacagcagcggggacccctgtgacttgggcagtgtcagggcagcccgcggatggttgcaggggggttcaggggcccttcccacctggctcctcttgtctgcaccttgccctgtcattgtggacctaggttcacag

SEQ ID NO: 37486 - DNA, 1123 bp, Macaca Mulatta
  misc_feature (1)...(1123): n = A,T,C or G
ggaaagtgttcagtcattgttgttgcttattcattggactgtctgggaagagctaaggaggtatgaggccctgaatttatgtggggtaattattacgtggaggattatatagggtagctctgactctgttttcctcagggttcgttcagaggagagaggaatgaagaccagagatgctcacacttttgcaaagaggggattgttctgtctaaataaaaatgttccaagaattagcataaagatcaggcgaatgtcctgtgagtcacctcccaatgtgcataactgaatgtactttttctttccctacaaaaggaacagaaaaaaaccacacttatcacatttatgcagaataaagcccgtttccgctaactctttacacgcaacttctggggaaactatctactctgtccctcgtctgctgcccctctgctatccgtcggaaatgaactgggctcgaaggtactggaccgtgtcaacgcacccatctcttctcaccgcgtcgtcccaccggcgttctgttgccttcctgattaccagagcgctctgcgcgcacggccttctaccgcccgcgtagtagacgcccttacggcaaccagtcgaattcagccgctctatcacccgcgcgtcctcacccgatcacgccgactatcctcacctgtcactgccgtataagcgccgcgttgcgagccgtcacgtgtgcccgttggccctcgggatacctcgatcgctttgccgcagcgcgggccaccccccaccgacgtgcgtgtatctctagcgtgcgccgcccgcttgactgtcgcttgtgcgcggtgcccgagacgtgctcgccgcgcccgttgcgccgtgtgctcctccgcgtgtgcggccgtgcgcggcgcgatggcgcgcttggtcgttgtgtcagctcgcgtgcgctgtgtgtcccgcgccctgtaccgcctcgctacacgacgctcgcgcgacgtccgtgctcaccgcgttntcacgctctctgcacgtagttgtgtgcgctcacactcggctttcgcacgtgtgtgacgcttgcactcctcccctaccacgcgcgactatcacgtcacgtgggtatccacctctcatctgtgcgcgcctcactcccctgtcn

SEQ ID NO: 37487 - DNA, 766 bp, Macaca Mulatta
  misc_feature (1)...(766): n = A,T,C or G
gggatcacattgagtaccatgttccagttagccctgaaattgggttctgccagctcatagagcactgtctacttacaaaatttgggaggatattttcttattcttcagatattcccattatcatacaaatactatgacgttcctcctccttagcaaaaggtaaaattcatgcttactattctctcaagtttatatccattgtaaataatctacctagtaaatatgttacatgtagattagttgatggtttccatactaatttattttctgtttattaaaaaataacaattccttcttaattgtgaataaaaagattaagatagaagcattcattgtctggtggaaaacaggggaagtggagaaggggaagcacatatttcctgaaaccgacctatttgtcaggcttaatgaataatggcatcattgatactgaatcaggactctcaaagctgctctcaaaactggggagtagcagggagagagagagaaagataagtgcatggattgagaaggcaaagagaagcaagggctctaagttttgtgtggtgtgtcaaaatagtaaattctccatcatgtcttgctatttataaagctataggaagagcctccatgctcccactttctgatttagaaacacgtaattctctagtaggtataatggcattgcantgggttggttggagcagttggaagatatgagctctttagtcagacttggttcaaatcctggctgtaacacctttctatttgtgtaaaggcgggtgaa

SEQ ID NO: 37488 - DNA, 841 bp, Macaca Mulatta
  misc_feature (1)...(841): n = A,T,C or G
gggagggacagaatcatctccaagtaatatggatgagagacctgaggcacaacggagcacactacacttttaccagacaattgttccccacaatgtcttgcatttatttatgctaaatcactccaatgtgttttggtttatgaactgatagcctctgtcattttatgtctatatgatttttagagtaaagcacatttcatgcataggaaaattgctagagctagaaaatgtatgcttaggcaaacaaaaacgataacacaaaatgaagagctttcaaatgtgtaattgttgctttgtctccaaagaagcaaaatgtttttaaatatcaggtaagaggaaccaaattatctgtactatagagcacaagctcttcacattttaaccataagtaaaaaagagctaaagtcttatgtttccatagagagtgtcaattagcaaatgaattttaaagcacttaagatataattccaaaaacctatttacaaagcatgtggaagtttttttaaataaagctgaaaggatatttttaaatagtaatctaacctcagaaaactttccctgaccacagtcaaatccagatcatcttagctatctttggagagaggctttttaaaccaccaactcccataatgctgtaaaacaccaagaaacaataaatattataggggtccaaccttgcccctaaaaaagggaagatttctgtccttaccatttttcaaatttcccattttacctcaaatggaaaagggcccctttttaccttggggcctattgggggggaagcaatccccctcagcccttcaattctcttttctttgagcccatcccggcccccctttan

SEQ ID NO: 37489 - DNA, 914 bp, Macaca Mulatta
atcatttctttcagattctgagactccagcaggatgtctaccaacagcagcagtgcaagcagccctgccagccacctcctgtgtgcctcacgccaaagtgcccagagccatgtccacccccgaagtgccctgagccctgcccaccaccaaagtgtccagagccctgcccacctcagcagtgccagcagaaatatcctcctgtgccaccttccccaccctaccagccaaagtgtccacccaagagcaagtaacagcttcaggattcatcaggagcatgaaaggataaggatatttggctcacgtcgttccacagcttcacctgcatcttctcatcaaagccatcaagggatacacaggaaacttctttccccttagcctatgatctgcccatgatgacccttgatagcaaaatgtttcctttctgaggctgccatactgccactgtccaggtggagacttagaaaggaagtcctcagcagtgccggttcccagagctttggaagaaacaccagcagctctctccatgggaaccatcggagaattctgttgatgtttcctgtgtctgtctgtcgcctgggcatgagcttctaccacctgtgcagttgtcactttcctttcactccctgaataaagtatctatgcatatacatttgtgaatggatcttttgtttcttttcaaatctgctttattggcaatattatgtaatcatttgggtttatttccacgtttttttaatccacaggaaggatctcacaatttgggtcataccaacaattatgtctgtattatttaaacccctttcattttcccttaattagtgtttaattgatttgaggaacatattattcaacttctctgaatgtcaatctctttactgtaaagtgagcaatataacttttacctaacaaactag

SEQ ID NO: 37490 - DNA, 863 bp, Macaca Mulatta
  misc_feature (1)...(863): n = A,T,C or G
gggcccttgagacatgtcaggacttggattcgccaatgaaccagaaccaggagtagcccctttgtctctgcagcgagaaagaaaaacacggcccagttcgnnnnnnnnnnnnnnnnnnnnnnnnnnnnnnnnnnnnnnnnnngggcagatcannnnnnnnnnnnnnnnnnnnnnnnnntgccaacatgatgaaaaccctnnnnnnnnnnnnnnnnnnnnnnntgccagatgtcatggtgggcacccgtaatcctnnnnnnnnnnnnnnnnnnnnnnnnnnnnnnnnnnnnnnnnnnnnnnnagannnnnnnnnnnnnnnnnngcnnnnnnnnnnnnnnnnnnnnnnnnagagaaagactccctcnnnnnnnnnnnnnnnnnnnnnnnnnnnnnnnnnnnnnnnnnnnggatgaaaacatttgagtatggatgacaaatgacactagggtggcctggctctggagttggaggctcaactgctccacaggggaactggcctggcccactttgggcttcctgtaacaacctgcccccatcccccaggacttgtggactgggaatggaagtaaaaggtgggggaaacaagactttccctggcttggctccccttccaaaaaagcatggggctttttctgagggaaaaaaggatgggccagggatgggaaggccttcaaatgggggccttgtggggggcttgtaaagggtggtgtggcccagaaaggccctgttaaatccccaaccccattttggtgaagggcctaaagggggggcaggagatcaatttttagaggggttggaggaaatttcataagaacactagggccgcgtgaaactaaaagggnggggtggagaaaactcctgtg

SEQ ID NO: 37491 - DNA, 3388 bp, Macaca Mulatta
  misc_feature (1)...(3388): n = A,T,C or G
ctcacaagcactaaggaaggggaaagtggggaatgtgctgtggctgaatctgaggacagagcagcagacctgctggctgtacatgcagttaaaatcgaagccaatgtaaatagcgttgtgacagaggaaaaggatgatgctgtaaccagtgcaggctctgaagagaaatgtgatggttcttcaagtagagactcagaaacagttgaaggaactatcacttttattagtgaagttnnnnnnnnnnnnnnnnnnnnnnnnnnnnnnnnnnnnnnnnnnnnnnnnnnnnnnnnnnnnnnnnnnnnnnnnnnnnnnnnnnnnnnnnnnnnnnnnnnnnnnnnnnnnnnnnnnnnnnnnnnnnnnnnnnnnnnnnnnnnnnnnnnnnnnnnnnnnnnnnnnnnnnnnnnnnnnnnnnnnnnnnnnnnnnnnnnnnnnnnnnnnnnnnnnnnnnnnnnnnnnnnnnnnnnnnnnnnnnnnnnnnnnnnnnnnnnnnnnnnnnnnnnnnnnnnnnnnnnnnnnnnnnnnnnnnnnnnnnnnnnnnnnnnnnnnnnnnnnnnnnnnnnnnnnnnnnnnnnnnnnnnnnnnnnnnnnnnnnnnnnnnnnnnnnnnnnnnnnnnnnnnnnnnnnnnnnnnnnnnnnnnnnnnnnnnnnnnnnnnnnnnnnnnnnnnnnnnnnnnnnnnnnnnnnnnnnnnnnnnnnnnnnnnnnnnnnnnnnnnnnnnnnnnnnnnnnnnnnnnnnnnnnnnnnnnnnnnnnnnnnnnnnnnnnnnnnnnnnnnnnnnnnnnnnnnnnnnnnnnnnnnnnnnnnnnnnnnnnnnnnnnnnnnnnnnnnnnnnnnnnnnnnnnnnnnnnnnnnnnnnnnnnnnnnnnnnnnnnnnnnnnnnnnnnnnnnnnnnnnnnnnnnnnnnnnnnnnnnnnnnnnnnnnnnnnnnnnnnnnnnnnnnnnnnnnnnnnnnnnnnnnnnnnnnnnnnnnnnnnnnnnnnnnnnnnnnnnnnnnnnnnnnnnnnnnnnnnnnnnnnnnnnnnnnnnnnnnnnnnnnnnnnnnnnnnnnnnnnnnnnnnnnnnnnnnnnnnnnnnnnnnnnnnnnnnnnnnnnnnnnnnnnnnnnnnnnnnnnnnnnnnnnnnnnnnnnnnnnnnnnnnnnnnnnnnnnnnnnnnnnnnnnnnnnnnnnnnnnnnnnnnnnnnnnnnnnnnnnnnnnnnnnnnnnnnnnnnnnnnnnnnnnnnnnnnnnnnnnnnnnnnnnnnnnnnnnnnnnnnnnnnnnnnnnnnnnnnnnnnnnnnnnnnnnnnnnnnnnnnnnnnnnnnnnnnnnnnnnnnnnnnnnnnnnnnnnnnnnnnnnnnnnnnnnnnnnnnnnnnnnnnnnnnnnnnnnnnnnnnnnnnnnnnnnnnnnnnnnnnnnnnnnnnnnnnnnnnnnnnnnnnnnnnnnnnnnnnnnnnnnnnnnnnnnnnnnnnnnnnnnnnnnnnnnnnnnnnnnnnnnnnnnnnnnnnnnnnnnnnnnnnnnnnnnnnnnnnnnnnnnnnnnnnnnnnnnnnnnnnnnnnnnnnnnnnnnnnnnnnnnnnnnnnnnnnnnnnnnnnnnnnnnnnnnnnnnnnnnnnnnnnnnnnnnnnnnnnnnnnnnnnnnnnnnnnnnnnnnnnnnnnnnnnnnnnnnnnnnnnnnnnnnnnnnnnnnnnnnnnnnnnnnnnnnnnnnnnnnnnnnnnnnnnnnnnnnnnnnnnnnnnnnnnnnnnnnnnnnnnnnnnnnnnnnnnnnnnnnnnnnnnnnnnnnnnnnnnnnnnnnnnnnnnnnnnnnnnnnnnnnnnnnnnnnnnnnnnnnnnnnnnnnnnnnnnnnnnnnnnnnnnnnnnnnnnnnnnnnnnnnnnnnnnnnnnnnnnnnnnnnnnnnnnnnnnnnnnnnnnnnnnnnnnnnnnnnnnnnnnnnnnnnnnnnnnnnnnnnnnnnnnnnnnnnnnnnnnnnnnnnnnnnnnnnnnnnnnnnnnnnnnnnnnnnnnnnnnnnnnnnnnnnnnnnnnnnnnnnnnnnnnnnnnnnnnnnnnnnnnnnnnnnnnnnnnnnnnnnnnnnnnnnnnnnnnnnnnnnnnnnnnnnnnnnnnnnnnnnnnnnnnnnnnnnnnnnnnnnnnnnnnnnnnnnnnnnnnnnnnnnnnnnnnnnnnnnnnnnnnnnnnnnnnnnnnnnnnnnnnnnnnnnnnnnnnnnnnnnnnnnnnnnnnnnnnnnnnnnnnnnnnnnnnnnnnnnnnnnnnnnnnnnnnnnnnnnnnnnnnnnnnnnnnnnnnnnnnnnnnnnnnnnnnnnnnnnnnnnnnnnnnnnnnnnnnnnnnnnnntaattgctgagaataactgtaggtgtcctgggccagtcagggaaggcaaagaaccgggtcccgtgttgaccgtgagcactgaggaggggcacaacttgccatcagtccacaaaccctctgcagggcaaggccatccaagtgctgtttgtgcagaaaaggaagagaagtatggcaaggagtgccccgaagtaggaccatttgtaggaagaggagagcaagagagcactttacacctcataaatgcagaagagaagaatgtattgttgaactcccttcagaaagaagataagagcccagagacagggacagcagggggcagtagcacagcaagttattcagcaggaaggggcttagaggggaatgctaactcacctgcccacctgagaggaccagaacagaagtgtgggcagacggttaaggatccctctgtcagtgttcaatagttggcagcagtaaataccgnnnnnnnnnnnnnnnnnnnnnnnnnnnnnnnnnnnnnnnnnnnnnnnnnnnnnnnnnnnnnnnnnnnnnnnnnnnnnnnnnnnnnnnnnnnnnnnnnnnnnnnnnnnnnnnnnnnnnnnnnnnnnnnnnnnnnnnnnnnnnnnnnnnnnnnnnnnnnnnnnnnnnnnnnnnnnnnnnnnnnnnnnnnnnnnnnnnnnnnnnnnnnnnnnnnnnnnnnnnnnnnnnnnnnnnnnnnnnnnnnnnnnnnnnnnnnnnnnnnnnnnnnnnnnnnnnnnnnnnnnnnnnnnnnnnnnnnnnnnnnnnnnnnnnnnnnnnnnnnnnnnnnnnnnnnnnnnnnnnnnnnnnnnnnnnnnnnnnnnnnnnnnnnnnnnnnnnnnnnnnnnnnnnnnnnnnnnnnnnnnnnnnnnnnnnnnnnnnnnnnnnnnnnnnnnnnnnnnnnnnnnnnnnnnnnnnnnnnnnnnnnnnnnnnnnnnnnnnnnnnnnnnnnnnnnnnnnnnnnnnnnnnnnagctgaactccagaaggagcctttgttggtgaatgaatcactaaatgngttgaaaattcagacttcagaacaaatgaagaaattcatagcaaatcttataacaaa

SEQ ID NO: 37492 - DNA, 223 bp, Macaca Mulatta
  misc_feature (1)...(223): n = A,T,C or G
cctggccggctcccatctctcccgttgacatctccggggcggaaagtcgagcgccccactggccttcaaggccgcactgggagccctggtttggnnnnnnnnnnnnnnnnnggagccctggtattccttgaacatgcatacctttcccagcgtgagggacatggaccgtgccgtgcgagggaccccatcttctgcagcaggagggagcagagaagagaacaca

SEQ ID NO: 37493 - DNA, 665 bp, Macaca Mulatta
acttgttaatcattttctaaatatcactcacgtatcagacattctttgcttgccaaggaactgctatagtaggatcccttttcagtgaggccctgcattaaattcagtttcctggttccttaccttcccatttcctgattaacagtttcactttactaagcgatatctttagtcaatttctaataaaactgtgtgtggcagataaaatttatgtcctttcatactcaacagtatttttattctttctatgtgcctgattgtgattttgaaaaagtctacatttatcaataaaaataattttccgttagaacttcaaggcctttctcattatcttaataatagaagcttctgggaatctgatgttctgtctgttgtcagttactttcattgtggtttccctcactggaatattttatgatgtttctttaacccttgaggttctgaaattttgaaaatgatttattttgagatgaatctttattaattttgataaatacctgacgatacctttatatgtaaataactgggtctttaatatttggaaatttttcccttattatttgttttgataattttctcccttcatcttctctgttgtctctctagctctgaacctgaggttgacttccttgtctattcactgttttatcttttctaccatatat

SEQ ID NO: 37494 - DNA, 607 bp, Macaca Mulatta
  misc_feature (1)...(607): n = A,T,C or G
gcctccagcccgtcagaaacccggggtttctatggcaaaggtcntggtgggaatcgcaccacctacggttcctgcttccgcggtggattcgctgcgttaaactgccccccgctcttcatcccccaacccccggcagcctccgaccctccctcccccggcggcgcagcgcagcattttgcaggcgccaagctggaatccgaccgcgcagccttcgcaccggggcgcgcttcaggccccccacgcctctcccaggcttcatcacccagttctctctggcgccggaggaaacccccagctgcttctccactcaccactgaagcgcgtctcggctgcccccagccccgtgccctcctgagaacactgcannnnnnnnnnnnnnnnnnnnnnnnnnnnnnnnnnnnnnnnnnnnnnnnnnnnnncctgtggagcctccaccctttggaggaaggacgtgtcaaagcttggaggtgcgcggcctgtctcacctccgccccaggccgggcatggcgcgccgcagggtctcagctgggatcagcctggccccaaaggatttatcgttgaaagcgctggtcccagaacccaaggggaagacgtgctggttttctga

SEQ ID NO: 37495 - DNA, 343 bp, Macaca Mulatta
  misc_feature (1)...(343): n = A,T,C or G
atgccctttcgagggcgacagctacagaacccaaatggtagccttggatggggccacacctttccagtctcactaccagagattcactgttgccaccttcgccctcctggactcgggctcccagagagccctcagaggacnnnnnnnnnnnnnnnnnnnnnnnnnnnnnnnnnnnnnnnnnnnnnnnnnnnnnnnnnnnnnnnnnnnnnnnnnnnnnnnnnnnngacagcgacgatcctcaggtcacagaaaagacactgccaggccccaggacatcgtgagctctccggggccagtgggctttgaggattcttatgggcaggagcccacacttgggcccaca

SEQ ID NO: 37496 - DNA, 437 bp, Macaca Mulatta
  misc_feature (1)...(437): n = A,T,C or G
acatccagatgacccagtctcctgcctccctgtctgcatctgtaggagacagagtcaccatcacttgccaagccagtcagggtatcagcagctggttagcctggtatcagcagaaaccagggaaagcccctaagctcctgctctataaggcacccggtttgcaaagtggggtcctatcaatgttcagtggcagtggatctgggacagaattcactctcaccatcagcagcctgcagcctgaatattttgcaacttattactgtcaacagtnnnnnnnnnnnnnnnnnnnnnnnnnnnnnnnnnnnnnnnnnnnnnntgtggctgcaccatctgtcttcatcttcccgccatctgaggatcaggtgaaatctggaactgtctctgttgtgtgcctgctgaataacttctatcccagagaggccagcgtaaagtggaag

SEQ ID NO: 37497 - DNA, 999 bp, Macaca Mulatta
  misc_feature (1)...(999): n = A,T,C or G
ggggcacaggcgagtttgagaatcactacttaaaaaacaagcacggtgcatgagagctgtgtcacagagcaaactacagaagcgcagactcgttagtaggcgttggtcggttccaaagattgctcgattcacaatcaatttgagaagatattttgtactcttgggcacagccgacaggtttttggctccactgggttccaagggcccagtgaaggaagcactcgtgccagggactccgtgccggcagtcaagtgtgcaccttaactcctgtgtaccccagtcctactcaagcaagctccaaaaaagaatcaaagtaactgttgacaaattcaaagctcccccggaggtgccgaaagccccaaactgaaaaaagactccacggcaacgaggaagcatgccactctgaaacgaaaaaaaacacacaaagagtgaacccacaaaaagcaaagaaagccaacaggacgaacaatacacccgaacgaacaaagacaaaaagaaaaaggaatacaaacacgaaggacagagaacagaaaaagagggccataaacaacccacagaagaagcccacaacgaancactttgagacgagagcagctacngcgcatagagacgagacatgcaaccnaagaagagagaacacaggcaaacagttagcaaaacaacgaacgccagagaaccagcaaaacagggcgagagaagaacncccatgcgacaacgtgcacaaaanaanaaatcaacaaagaacataggaagacagcagaaaagggacaagacccaagttcacaccatgacacacaagcccgagaaccacgccaaagnagaataggcaaaagaggcgcaaataaaccaagaaccacccagaaanacacgcgtgaaggagcgaagaanacagattgaacaatgcacaagcgcgagaagctatacacacaccggaacgcggcaaaggctcgcacaaccacancatacggccgacgagagacaaaaacctctcgacagaan

SEQ ID NO: 37498 - DNA, 429 bp, Macaca Mulatta
gggtgggaacacttttttcaggtcctctagcacggtgagccttgtgccttgtccaaagaactgctgccgagggctgggcccataacctgtcccattccagacgctgcagaggtatatgctgctgtcttcagggctcgtgttgctcacagtcagagttgagaatgttaggtttgggcgactgatgggaaacttgtcaatgacaaatccactctcatatgtggcctcggagccctgatttgcagttgcaatcagtgtcatgctctgtccaggttgctgacggtaccagaacatcatggtgacttggctatcgacttgacactggatcgtcacggaggttccacgttgacagacatccctgcttggcttttgagagacgacagcactgaacactgagcctcgtcccaggagaaggagcaggagacccagcat

SEQ ID NO: 37499 - DNA, 745 bp, Macaca Mulatta
  misc_feature (1)...(745): n = A,T,C or G
gggttaagcaatgtgaggattattgtggtaagttgtatttagtaatcaatacagtgtgatactagcactaggattgccaaataaatcaatggaatagaagagagagcctgaaaacagatcaacatttatatgatcacttgatttcgacaaaggtggcaaaacaattcaacagagaaggaaagtcttttcaacaaatggagccagaatagcttaatatccatatagaaaaaaatgaacatgaccccctacctcacaaaaatgacttggagatgaatcatagacctaaatgtaatattttaagaatatggagctttttaactgaaaacatggatgattatttttgtgacttgggggttagtcaaaggtttctncaagtacagaaagcagtagccataaaagatccaaaattagagctcatcaaaattgtcactgaagatgttaacaaaagtaatatcaaatgacatttgaaaaatatctttgtaaaacgaccatgttaatagatataaggattttttcatattaatctaacaaaattccctaataggaatttccatagccttaagaatggttttattttaatctgcatctttcttggatgattgcaaaatcccctttgtgaatactttcatggattaccttcctgtcctggtgaaataaaagaaagtatgaacctccgatatacatacccattgtatctgagaagacataacactctccttgtttcgggcccgccccttcgggcccc

SEQ ID NO: 37500 - DNA, 1119 bp, Macaca Mulatta
  misc_feature (1)...(1119): n = A,T,C or G
gagtgccctggagtttatcaggaccaactatttgactgaggagtctggcagtcgggccaaggacagagttcctcagatagttatcctggtgacagatggggagtcaaacgatgaggtacaggaggtggctgaccggttgaaagaagatggagttgttgtgtatgtggtaggggtcaatgtccaggatgtccaagagttgcaaaaaatagccagtgaaccatttgagaagtttctcttcaacactgaaaacttcaatatcctgcaggatttttcaggaagtattcttcagactctgtgctcagcagtggagggtaagataaaaggnnnnnnnnnnnnnnnnnnnnnnnnnnnnnnnnnnnnnnnnnnnnnnnnnnnnnnnnnnnnnnnnnnnnnnnnnnnnnnnnnnnnnnnnnnnnnnnnnnnnnnnnnnnnnnnnnnnnnnnnnnnnnnnnnnnnnnnnnnnnnnnnnnnnnnnnnnnnnnnnnnnnnnnnnnnnnnnnnnnnnnnnnnnnnnnnnnnnnnnnnnnnnnnnnnnnnnnnnnnnnnnnnnnnnnnnnnnnnnnnnnnnnnnnnnnnnnnnnnnnnnnnnnnnnnnnnnnnnnnnnnnnnnnnnnnnnnnnnnnnnnnnnnnnnnnnnnnnnnnnnnnnnnnnnnnnnnnnnnnnnnnnnnnnnnnnnnnnnnnnnnnnnnnnnnnnnnnnnnnnnnnnnnnnnnnnnnnnnnnnnnnnnnnnnnnnnnnnnnnnnnnnnnnnnnnnnnnnnnnnnnnnnnnnnnnnnnnnnnnnnnnnnnnnnnnnnnnnnnnnnnnnnnnnnnnnnnnnnnnnnnnnnnnnnnnnnnnnnnnnnnnnnnnnnnnnnnnnnnnnnnnnnnnnnnnnnnnnnnnnnnnnnnnnnnnncaacgttgctcgatatcttatagtcatcactgatggtaaatcttcagacccggtggctgaggctgcagagggattgagagaaaatggagttataatttatgccattggagtaagagaagctaacattgatgagcttaaggaaatagctaaagacaagatattttttgtgtatgagtttgatttactgaaggacatccaaaaagaagtggtacaggacatctgc

SEQ ID NO: 37501 - DNA, 626 bp, Macaca Mulatta
  misc_feature (1)...(626): n = A,T,C or G
atacaaaaaattagccgggcgcgagttgtgggcnnnnnnnnnnnnnnnnnnnnnnnnnnnnnnnnnnnnnnnnnngcgnnnnnnnnnnnnnngnnnnnnnnnnnnnnnnnnnnnngcnnnnnnnnnnnnnnnnnnnnnnnnnnnnnnnnnnnnnnnnnnnnnnnnnnnnnnnnnnnnnnnntaggtcaggccgaggcannnnnnnnnnnnnnnnnnnnnnnnnnnnnnnnnntctggtnnnnnnnnnnnnnnnnnnnnnnnnnnnnnnnnnnnngaattagccaggcatggtggcannnnnnnnnnnnnnnnnnnnnnnnnnnnnnnnnnnnnnnnnnnntcgcttgaacccgggaggcaaaggttgcagtaagccgagaccaggcttattgccnnnnnnnnnnnnnnnnnnnnnnnnnnnnnnnnnnnnnnnnnnnnnnnnnnnnnnnntaggtcaattcgtaacagtttattttggacacatcctgaagcttttgttttgaattaagaaatagtttcaggaattgacaaaccatttgtcaacctgctgtcctgggctattgaagaagatttcgttttctgtgcatccaattgttgcagtccaggtcctctagtgcaacgccata

SEQ ID NO: 37502 - DNA, 829 bp, Macaca Mulatta
  misc_feature (1)...(829): n = A,T,C or G
gggatgagctctgggcatgcccacgaaggaaagccacgctcccttgagaattcagaggctagggagcaattccagtttcacctaagtctcataatttcagttcccttttaaaaaccctaaaaactacaccaccatggaatgcaaaatattgttatacaacacattgatctgtcaaacttccagaaccatggcagccttcagtgagatttcgatcttggctggtcactccctgactgtagctgtaggtgaatgtgtttttttatgtgcctggttttagtgtcagaagggaaataaaagtgtaaggaggacactttaagccctttgggtggagtttcataatatcccagactattttcaagcaacctggtccacccaggattagtgaccaggttttcaggaaaggatttgcttctctctagaaaatgtctgaaaggattctattttctgatgaaaggctgtatgaaaataccctcctcaaataacttgcttaactacatatagattcaagtgtgtcaatattctattttgtatattaaatgctatataatggggacaaatctatattatactgtgtatggcattattaagaagctttttcattattttttatcacagtaattttaaaatgtgtaaaaattaaaaccagtgactcctgtttaaaaataaaagttgtagtttcttattcatgctggaataataatctgtnnnnnnnnnnnnnnnnnnncctttttcctacacagtgaaatgtcaaactgtaaaacctttgtgtggaaaagttttaacttttattttttccatttaaatttgccggttcgggaatttcccaacc

SEQ ID NO: 37503 - DNA, 361 bp, Macaca Mulatta
gttgattttactctgcagcctgaaagagccaatagtcatatcttcctgtatggagatttgagaagcatgaatgttggatgtgaccctcaagatgatccccatttcactgcaaaatctgaatgtttttttgtatggggtgctcagactttcacatctggcaaatattattgggaggttcatgtgggggactcttggaattgggcttttggtgtctgtaacaattattggaaagagaagagacagaatgataagatagatggaggggagggactctttcttcttggatgtgttaaggaggatgctcactgcagtctctttaccacctctccacttgtggtgcaatatttccaagacctgccag

SEQ ID NO: 37504 - DNA, 1434 bp, Macaca Mulatta
  misc_feature (1)...(1434): n = A,T,C or G
ccaggagcccgagcgagatgatgatggttatgcagcccgagggtctgggggccagggaggggcnnnnnnnnnnnnnnnnnnnnnnnnnnnnnnnnnnnnnnnnnnnnnnnnnnnnnnnnnnnnnnnnnnnnnnnnnnnnnnnnnnnnnnnnnnnnnnnnnnnnnnnnnnnnnnnnnnnnnnnnnnnnnnnnnnnnnnnnnnnnnnnnnnnnnnnnnnnnnnnnnnnnnnnnnnnnnnnnnnnnnnnnnnnnnnnnnnnnnnnnnnnnnnnnnnnnnnnnnnnnnnnnnnnnnnnnnnnnnnnnnnnnnnnnnnnnnnnnnnnnnnnnnnnnnnnnnnnnnnnnnnnnnnnnnnnnnnnnnnnnnnnnnnnnnnnnnnnnnnnnnnnnnnnnnnnnnnnnnnnnnnnnnnnnnnnnnnnnnnnnnnnnnnnnnnnnnnnnnnnnnnnnnnnnnnnnnnnnnnnnnnnnnnnnnnnnnnnnnnnnnnnnnnnnnnnnnnnnnnnnnnnnnnnnnnnnnnnnnnnnnnnnnnnnnnnnnnnnnnnnnnnnnnnnnnnnnnnnnnnnnnnnnnnnnnnnnnnnnnnnnnnnnnnnnnnnnnnnnnnnnnnnnnnnnnnnnnnnnnnnnnnnnnnnnnnnnnnnnnnnnnnnnnnnnnnnnnnnnnnnnnnnnnnnnnnnnnnnnnnnnnnnnnnnnnnnnnnnnnnnnnnnnnnnnnnnnnnnnnnnnnnnnnnnnnnnnnnnnnnnnnnnnnnnnnnnnnnnnnnnnnnnnnnnnnnnnnnnnnnnnnnnnnnnnnnnnnnnnnnnnnnnnnnnnnnnnnnnnnnnnnnnnnnnnnnnnnnnnnnnnnnnnnnnnnnnnnnnnnnnnnnnnnnnnnnnnnnnnnnnnnnnnnnnnnnnnnnnnnnnnnnnnnnnnnnnnnnnnnnnnnnnnnnnnnnnnnnnnnnnnnnnnnnnnnnnnnnnnnnnnnnnnnnnnnnnnnnnnnnnnnnnnnnnnnnnnnnnnnnnnnnnnnnnnnnnnnnnnnnnnnnnnnnnnnnnnnnnnnnnnnnnnnnnnnnnnnnnnnnnnnnnnnnnnnnnnnnnnnnnnnnnnnnnnnnnnnnnnnnnnnnnnnnnnnnnnnnnnnnnnnnnnnnnnnnnnnnnnnnnnnnnnnnnnnnnnnnnnnnnnnnnnnnnnnnnnnnnnnnnnnnnnnnnnnnnnnnnnnnnnnnnnnnnnnnnnnnnnnnnnnnnnnnnnnnnnnnnnnnnnnnnnnnnnnnnnnnnnnnnnnnnnnnnnnnnnnnnnnnnnnnnnnnnnnnnaaggaggagatgctgagccagcgcgactacgattcggcttcgctacaggaggtgcgggcgttgctgcggcgccacgaggcctttgagagcgacctggcggcgcaccaggaccgcgtggagcgcaaagccgcgttggccc

SEQ ID NO: 37505 - DNA, 347 bp, Macaca Mulatta
cccctcaaaagagcaatctccttacgcctgcctggtgagtgctcccaagcacctggctgctagcccagaggaaaatgggtcacttcacgaatcttccatttcataaaaataaccatcagaattctgacataaggcatgctttaagggaatgtatgagttttagcagatatctttcatgtaacattttaaaatattcaattgtaataattcaattcaaaaaaatatttcaggtcaggcaccaaggctcttgcctataatcccagtgctttgggaggcctaggcaggaggatggtttggggccaggagtttgaaatcagcctaagcaacatagcaagaccccatctcca

SEQ ID NO: 37506 - DNA, 269 bp, Macaca Mulatta
  misc_feature (1)...(269): n = A,T,C or G
tctggaagcgtatgatagaggcccggggcgtccagccaacccagcacttggacatcagtgccctagccaaggtctccgatggctacacgccaggtcacattctccaagccatccaatcggtgctgagtgagcggcggttcctgcaactgtccaagcggcccctggtggcctcagagttcctgggacaactggcgaagctggatccagtatacagggaggaggaggagtccctgaagnnggactggtacttcaagaccccactgggcaag

SEQ ID NO: 37507 - DNA, 1268 bp, Macaca Mulatta
  misc_feature (1)...(1268): n = A,T,C or G
atattgagaattatacattagatttatttataattctcttaatttctattaattgaaacattttctattgcttgtattacttgctatatgtaaaaaataattgttggctgggtgtggtannnnnnnnnnnnnnnnnnnnnnnnnnnnaatgtcaaggcgggcagatcagnnnnnnnnnnnnnnnnnnngnnnnnnnnnnnnnnnnntgaaacgctgtctctatnnnnnnnnnnnnnnnnnnnnnnnnatggtggtacatgcctgtaatcctagctatnnnnnnnnnnnnnnnnnnntnnnnnnnnnnnnntgagaggannnnnnnnnnnnnnnnnnnnnctgannnnnnnnnnnnnnntnnnnnnnnnnnnnngaannnnnnnnnnnnnnnnnnnnncggcgaggtttattcagtaggctagattctacactaagttatctttatttgggccatgatttaagctcatctgaaggtatatcacccttttcaggctataattatttgggtaatcttcattctgagataaactttatttagcatttactttgcaacagaacaaccctacagcattttagttcgcagactaagggaactaatacatatataattaaacttgttcatctatcattcatgaaatgtaaaataattatcatttaaactgtttaaaaatgtggtagcataatgtcacattatgctacattcagaaagcaatgtaactgtgaagaccaggtttaaaggtaattcatttacagtttagaactccttagatgtttgatgttgaaaactgctttaacatgaaaattgtcttcctctgctctgtgtaaacaatagcttttaatttaagattgctcactactgtactagactactggtaggtttttttggtttgataaatgtttttttctggcaggttaggggtatgtggggaatgaagcatttacttataggctataatactctgaggccaattttatatccaaagcaatatcattaagtgattcacttcatagaaggctaagttttcctaggacaactagaaaacatgaattctgaaatatatagaacagtagttcacatactatatatttcaaccctgactggtagatgcctatctactatcgacactagaaagagaattttatccaaacgaatattggaatttaatatcttcgaattcggaagcgaatcaacgtacactccggggtatgacgcggtgcagggcatttaaaacccatcttcttcaacccgcatgaaactcgatgcccca

SEQ ID NO: 37508 - DNA, 775 bp, Macaca Mulatta
  misc_feature (1)...(775): n = A,T,C or G
acgaattggtttaggaaaggtttctcgaagggccccaggccggccacatttttnnnnntnnntttnnnnnnntnnnttttgaggcagagtctcgttctgtcacccagggtggagtccagtggcgtcatcttggttcactgcaacctccgcttcccgggtcgcagttcaagcaattctcttgcttcagcctccctnnnnnnnnnnnnnnnnnnnnnncaccaccatgtnnnnnnnnnnnnnnnnnnnnnnnnnnnnnnnnnnnnnnnnnnnnnnnnnnnnnnnnnnnnnnnnnnnnnnnnnnnnnnnnnnnnnnncnnnnnnnnnnnnnnnnnnnnnnnaattacaagcgtgagccaccacacccggccatgttcttttatgtctcaaaacagtttgaattaaataatgaaacttctggaagaactggcccaggccacactgtccagtcctctgtgtttccacgtggttcctcgatgaacttggaacccagtgcagacctcttttttgaggcctctgagctggggatgggacagggtgggagtgggagcctgggttttcagtagcttctctggaaactaagtggaggggagcagagatgtcaagaaagggaatatgtgagatgagtctcactgtcgccctggtgaggaccatgggtgagccatgtgagggctgatcatctgaagagctgccgttttccttctgcccctcctgagcgagacctgaaagctttgaagactaggacacatctatgcggtatagaggtgcatggaagccc

SEQ ID NO: 37509 - DNA, 452 bp, Macaca Mulatta
  misc_feature (1)...(452): n = A,T,C or G
actccagcttgggcannnnnnnnnnnnngnnnnnnnnnnnnnnnnnnnnnnnnnnnctgggcaaaaatttcttataaatccaggattggctgtcagagaactggctaagattcaggaagaaataaaaaattcagactcctacaaggttttgatgacaactagggccgaaatttaaggaggagatgtaggatgcaggagaaactaacaatgttttctttaaatcagaggaggaaatcgtagaggtcagtgaaggtctggggtaggaaaacatacagactgtccattgtatgaatgtggagtgagactgaccttagactgggtcagacttcctgggccataaattgggcatctgtgatgctaagtacctatgggaacaagatgacagctcagagcagccatgggtgatacttggtggtaaaaaacctacaggcgttgggggtcccatgattgtt

SEQ ID NO: 37510 - DNA, 894 bp, Macaca Mulatta
  misc_feature (1)...(894): n = A,T,C or G
ggaaaggcaaatatcatccagcaagcagtctaccccatcctttgcaattgctcttctccacgtcttctctgctacaagtgttttagatgttactaccttattttccccgaattctacttttgtccttgcaaacagaagatactacacctgggcttaaggcctaaggaagccagtcaccttctgggcaagggctcctatctttccttgctatccatggcactaaaccacttctctgctgcctctgcggaagagattcctattactgcagtacttctgtccgccaggggtaacttggccactgtccctgtccttctacagaacctgagggcgaagatggtggctgtgtctctccccggtaatgtcactgtctgtttttattccttccctctaacagctggcctaaccactcgagttcaaggtgtggcgtggagagggggaaggggcatttaatctgtaacccccaaagaggaaaataacttacaaaattcttccagggggtacctggtgggtttgtgcctttttgtaggctggttcccttttgcctttaaacctgaaagaatgtctccctcaagccctgttggggcaacctttccccagaattttccagaaaccttaaagaaaacttgggaaaaagttggtgctcctggtgtgggacacactgtgtgttttacatttggacaaggaatttttatcctctgtagatagagggtgggtattatttggttaacctggtttttaaaagagggggcgcaccaatttggtgtgatcccataaaattgaagagaaccatgggcaaaaataattaaagactttgttaaaaacnnnnnnnnnnnnnnnnnnnnnnnnnnnnnnnnnnnaantcaaaatcaattaatcaagcaatgggcgatccgg

SEQ ID NO: 37511 - DNA, 617 bp, Macaca Mulatta
  misc_feature (1)...(617): n = A,T,C or G
agttttaaaagccgaaagaatattntttgaagataggtgtcatgaagcgatgccaggttaaaaataacgaggtccacacatgcttgtgtctttccacaatgtcaggcttttgttgatgctaattcagtcacaaaagccaggagttacatggaattcccaaggaggcaattctctttagtacctcctgttctcttggtagtcagagccgcaggcacacaggcttgagccactccacaagccagtcaatatggcaaatcacacataatagtatgcttaatcaatatacacgttacagatcaaacattccacaataaacaaagtagcattgaacatcaagaggagaaagagataggagaaagggttaaggaaccagtccagcggaagcaggtcggtcttgcaaggaagagtgtttgaggtggcagaagcagatgctaagttcgtatcgtgagtgactgcaagacagtgtcagttaagacagctgcgttttgagctgctgaaagtctgacattttaaagtcacagagtcctctggtgagaactgatcatggatgagtgtgcttgtttgtgtctttatctgattggatgcagtctttatctttttattaaaacattcttgtt

SEQ ID NO: 37512 - DNA, 415 bp, Macaca Mulatta
  misc_feature (1)...(415): n = A,T,C or G
cgaggcctcactgagtgccgagcaaggaacgatgacggaggtgaaggtgaagacagagctgcccgatgactacatccaggaggtgatctggcagggcgaggccaaggaggagaagaaggcagtcggcaaggatgggaccagcgacgtgcctgccgaaatctgcgtggtgatcggcggcgtccgcaaccagcagacccttgnnnnnnnnnnnnnnnnnnnnnnnnnnnnnnnnnnnnnnnnnnnnnnnnnnnnnnnnnnnnnnnnnnnnnnnnnnnnnnnnnnnnnnnnnnnnnnngggtcttatgaatgtggaatctgtggcaagaagtacaagtattacaactgcttccagacccacgtgcgggcacaccgagnagacactgaagccacctcaggggagggagcctcccaaagc

SEQ ID NO: 37513 - DNA, 2538 bp, Macaca Mulatta
  misc_feature (1)...(2538): n = A,T,C or G
tctcagttgcttataaaaatgttgcatgagcccgtaggtcatcttagatggtcatctcaagtattgatcaaaagacggaagatgctgaggaaaaacagcagatggctcgagaatacagagagaaaattgagatggagctaagagatatctacaatgatgtactgtctcttttggaaaagttcttgatccccagcgcttcacaagcagagagcaaagttttctatttgaaaatgaaaggagattactaccattacttggctgaggttgccactggtgatgacaagaaagggattgtggatcagtcacaacaagcataccaagaagcttttgaaatcagtgaaaaggaaatgcagccgacacatcctatcagactgggtcgggcccttaacttctcttgttctattatgagattctgaactccccagataaagcctgctcccttgcaaagatggcttttgatgaagccattgctgaacctgatacattaagtgaagagtcatacaaagacagcacactaataatgcaattaccgagagatgacttgacattgtggacattggatacctaaggagacaaagctgaagcaggagaaatgggaaaattaaccggcctccaattttagtctgcctcattctaaaatttacacagtagaccacttgtcatccatggtgtcccacaaatagttttttgtttataatttatgacaggtttgtgttacttctatttgaatttctatatttcccatgttgtttttatgtttaatattaggggnnnnnnnnnnnnnnnnnnnnnnnnnnnnnnnnnnnnnnnnnnnnnnnnnnnnnnnnnnnnnnnnnnnnnnnnnnnnnnnnnnnnnnnnnnnnnnnnnnnnnnnnnnnnnnnnnnnnnnnnnnnnnnnnnnnnnnnnnnnnnnnnnnnnnnnnnnnnnnnnnnnnnnnnnnnnnnnnnnnnnnnnnnnnnnnnnnnnnnnnnnnnnnnnnnnnnnnnnnnnnnnnnnnnnnnnnnnnnnnnnnnnnnnnnnnnnnnnnnnnnnnnnnnnnnnnnnnnnnnnnnnnnnnnnnnnnnnnnnnnnnnnnnnnnnnnnnnnnnnnnnnnnnnnnnnnnnnnnnnnnnnnnnnnnnnnnnnnnnnnnnnnnnnnnnnnnnnnnnnnnnnnnnnnnnnnnnnnnnnnnnnnnnnnnnnnnnnnnnnnnnnnnnnnnnnnnnnnnnnnnnnnnnnnnnnnnnnnnnnnnnnnnnnnnnnnnnnnnnnnnnnnnnnnnnnnnnnnnnnnnnnnnnnnnnnnnnnnnnnnnnnnnnnnnnnnnnnnnnnnnnnnnnnnnnnnnnnnnnnnnnnnnnnnnnnnnnnnnnnnnnnnnnnnnnnnnnnnnnnnnnnnnnnnnnnnnnnnnnnnnnnnnnnnnnnnnnnnnnnnnnnnnnnnnnnnnnnnnnnnnnnnnnnnnnnnnnnnnnnnnnnnnnnnnnnnnnnnnnnnnnnnnnnnnnnnnnnnnnnnnnnnnnnnnnnnnnnnnnnnnnnnnnnnnnnnnnnnnnnnnnnnnnnnnnnnnnnnnnnnnnnnnnnnnnnnnnnnnnnnnnnnnnnnnnnnnnnnnnnnnnnnnnnnnnnnnnnnnnnnnnnnnnnnnnnnnnnnnnnnnnnnnnnnnnnnnnnnnnnnnnnnnnnnnnnnnnnnnnnnnnnnnnnnnnnnnnnnnnnnnnnnnnnnnnnnnnnnnnnnnnnnnnnnnnnnnnnnnnnnnnnnnnnnnnnnnnnnnnnnnnnnnnnnnnnnnnnnnnnnnnnnnnnnnnnnnnnnnnnnnnnnnnnnnnnnnnnnnnnnnnnnnnnnnnnnnnnnnnnnnnnnnnnnnnnnnnnnnnnnnnnnnnnnnnnnnnnnnnnnnnnnnnnnnnnnnnnnnnnnnnnnnnnnnnnnnnnnnnnnnnnnnnnnnnnnnnnnnnnnnnnnnnnnnnnnnnnnnnnnnnnnnnnnnnnnnnnnnnnnnnnnnnnnnnnnnnnnnnnnnnnnnnnnnnnnnnnnnnnnnnnnnnnnnnnnnnnnnnnnnnnnnnnnnnnnnnnnnnnnnnnnnnnnnnnnnnnnnnnnnnnnnnnnnnnnnnnnnnnnnnnnnnnnnnnnnnnnnnnnnnnnnnnnnnnnnnnnnnnnnnnnnnnnnnnnnnnnnnnnnnnnnnnnnnnnnnnnnnnnnnnnnnnnnnnnnnnnnnnnnnnnnnnnnnnnnnnnnnnnnnnnnnnnnnnnnnnnnnnnnnnnnnnnnnnnnnnnnnnnnnnnnnnnnnnnnnnnnnnnnnnnnnnnnnnnnnnnnnnnnnnnnnnnnnnnnnnnnnnnnnnnnnnnnnnnnnnnnnnnnnnnnnnnnnnatccatcctctttctcttcctctattctctaaataatgttgagactaagttatacccaaagctcactttacaaaatatttcctcagtactttgcagaaaacatcagacaaaaatgccattttaagagttgtgtttttcttttaggatgtaagctcctcaagagcagggaaaatgttttctgtatgttctattgtgc

SEQ ID NO: 37514 - DNA, 3087 bp, Macaca Mulatta
  misc_feature (1)...(3087): n = A,T,C or G
gctcgctgcgcgccggtcctgggtgccagggttctgcggatcagcctgcctcagcctccggaataactgggactacaggcacgtgccaccacacccagctgatctgcaatgattgcacaaactctcgaagagcatccaaaaaatagtnnnnnnnnnnnnnnnnnnnnnnnnnnncagcgcgcaaagagccagagaaacagagggatttgagattcctcgatcttccagctgtggcagcctggagggagagggaggcgccgcgggtgtgagggccctcctcaccacaggagttgaaaccagcatcttcccttcatctgagtcctgcctccttctgcagaagggagctcaaaagaactttgttgttttgccttttactctggggtgaaagcaacagacgataaggatctcactctgtcgcccaagctggagtgcagtggcttgattacagctcactgtagcctggaccttccaaggctctgggtgatcttcctacctcagcttccccagtagctggactacaggagaaaataatgaatgtcaaaggaaaagtaattctgtcaatgctggttgtctcaactgtgatcattgtgttttgggaatatatcaatagcccagaaggttctttcttggggatgtatcgctcaaaaaacccagaggttgatgacagcagtgctcagaagagctggtggtttccgagctggtttaacaatgggatccacaatcatcaacaagaggaagaagacatagacaaaaaagaggaagagaggagaccaaagaaaggaagatgacacaacagagcttcggctatgggactgatttaatccaaactcccgcctcagccttccaagccgctgggaccacaggcatgcaccaccatnnnnnnnnnnnnnnnnnnnnnnnnnnnnnnnnnnnnnnncttgccatgcnnnnnnnnnnnnnnnnnnnnnnnccctggtctcaagcgattcnnnnnnnnnnnnnnnnnnnnnnnnannnnnnnnnnnnnnnnnntccgctcctggacacaagcagattattgaaagaacgttggtttgaagtggcaccaaatgaaacgcccagaggtggtgagagtgaccagatggaaggcaccggttgtgtggaaaggcacttacaacaaagccatcctaggaaattattatgccaaacagaaaattacggtgggattgaaggcttttgctattggaagtgggtgtcactgatgaaactgtccttgactatttcttgttccactgtcaagacatttttgtggagactcctgaactgatggaggccagccatgattttttgatttattagatagaagaatgttttcatggaactgttttagtctcctttctgctgaggccctaaaatgctgagaacaaaataagagtagatatattgagcattacttggaagagttcataacacctgctaataggtacttcaaggtcggccacaaagtcatattttacattatagtggatgatgtctccaaggtgctgtttatagagctgggtcctctgcattccttaaaagtgtttgaggtcaagccagagaagaggtggcaacacatcagcatgatgcctgtgaagatcatcagggagcacatcttggcccacatccaacacgaggtcgacttcctcttctgcatggatgtagaccaggtcttccaagacaattttggggtgaagaccctaggtcagtcagtggctcagctacagccctggtggtacaaggcagatcctgatgactttacctaggagaggcagaaagagtcagcagcatgcattccatttggccaggaggatttttattaccacacagccatttttggaggaacacccattcaggttctcaacatcccccaggagtgctttaagagaatcctcctggaaaagaaaaatgacatagaagctgagtggcatgatgaaagccacctaaaccagtatttccttctcaacaaaccctctaaaatcttatccctagaatactgctgggattatcatatcagcctgccttcagatattaaaactgtcaagcggtcgtggcagacaaaagagtataatttggttagaaatatcatctgacttcaaattgtgccagtagatttctgaatttgagagaggagtattctggctgcttcctcagaaaagtaacacttaattttaagttaaaaaaaatactaatgaaacaccaacatggcaaacacataccattccttcttgtaacttgaggctttgtaatgtgggagaatgaatctagggtaatcagatgtaaattcccagtgatttcttatctattttgggtttgggggaaatactatcaactgaaccaaaaagaacttgtcataggcaaagataaagccagaaacactctacacatgccacataacatctggagaaaagggtgctaagggaagcgtttggcagcaagatatgattgtaaggggttgtcccttgagttcaatgcctgcctatttccaatggatctaaaacaacgtgaagttactgtgcagcagagctctcagtaaggacaccatttgccttggcaatcctcaaaatgcttcaatagcagattgtttcaggccatctgtagtctgtccttttctcatcaggatgttgtttggcttctgtgcgaaaaattggtggagtgtcctggtagatattgaaactaggcctcatatagaaaaaattaacaccaggtggctctggatagagtcccgccctgcctcgatgaggacccaccctgatagggtcccaccctgccaattccgagaaacaacctcatggggtcccaccctgccaattccgggggtcccaccctgcctcgaagttcccggaatcaacaactccaggaaaaaacctcataaggtcctgctctaaccaattagcataagacgccttgctcaggccatagctagacccaatcattttgcgccttaagctttgtttgaatttcgcgccctaagctgtgtttgaacttgtgtttgcctatataaacagcctgtaacaagcagtcggggtcccagggccaacttagagcttgggaccctagcgcgctagtaataaataactctctgctgcg

SEQ ID NO: 37515 - DNA, 920 bp, Macaca Mulatta
gggctttttcgcaacgggtttgccgccagaacacaggtgtcgtgaaaactacccctaaaagccaaaatgggaaaggaaaagactcatatcaacattgtcgtcattggacacgtagattcgggcaagtccaccactactggccatctgatctacaaatgcggtggcatcgacaaaagaaccattgaaaaatttgagaaggaggctgctgagatgggaaagggctccttcaagtatgcctgggtcttggataaactggaagctgagcgggaacgtggtatcaccattgatatctccttgtggaaacttgagaccagcaagtattatgtgactcgcattgatgccccaggacccagacacttcatcaaaaacattgattcagggggacatctcatcgctgacctgtgcttgtccctgatcgttgcctgctggggttagggtgaattttgaagctgggtatcttccaagaatggggccagacccggagaagcatgcctcttcctgggctttaaacccctgggggttgttcaaaacacacctacatttgcgttcggttgtttccccaaaaaacgggaatttcccgcctggcctgtcacccctgtccgcgccctccccaaatccagtattacgtcccgggacccccttgtttccccgggaacgtttctctgcacctgttccacgttctatcggaaccacttggcggcccaatttgcccctgtggcattaccgccccactgtgattttcgcggggccatgacctcttttggtggtggagccaaactgtcgttatgaacgtacccgtgcctgggggacgccgccacgccgcgactacaacggtgaggcgactaggaccctctcatcgggtgtatcggctacgcgcgtgtctgctcacccattactccgagaccgccgccctacccccc

SEQ ID NO: 37516 - DNA, 359 bp, Macaca Mulatta
  misc_feature (1)...(359): n = A,T,C or G
gaggaggggcaaaaggcaggacttttagaccagcgcccggtcaagcccgggcagctctccctcactctccagcaccgggcaaacgctgcccaatcatgcccgccttaggggctacggcatcactggggtgactgcgagccccggccgtggagccgctgggacccggctnnnnnnnnnnnnnnnnnnnnnnnnnnnnnnnnnnnnnnnntcacgtctctaatgggagcctcagtttcggcgtctgtaaagcgaggaggacgatgcgtcccctccctcgcgggattgaggttaggactaaacgggctccgcagcgcccgccagctcccgggcgctctccccagccgcgcctccctccttcc

SEQ ID NO: 37517 - DNA, 3767 bp, Macaca Mulatta
  misc_feature (1)...(3767): n = A,T,C or G
tgctttcacccctgaccaagctctgnnnnnnnnnnnnnnnnnnnnnnnnnnnnnnnnnnnnnnnnnnnnnnnnnnnnnnnnnnnnnnnnnnnnnnnnnnnnnnnnnnnnnnnnnnnnnnnnnnnnnnnnnnnnnnnnnnnnnnnnnnnnnnnnnnnnnnnnnnnnnnnnnnnnnnnnnnnnnnnnnnnnnnnnnnnnnnnnnnnnnnnnnnnnnnnnnnnnnnnnnnnnnnnnnnnnnnnnnnnnnnnnnnnnnnnnnnnnnnnnnnnnnnnnnnnnnnnnnnnnnnnnnnnnnnnnnnnnnnnnnnnnnnnnnnnnnnnnnnnnnnnnnnnnnnnnnnnnnnnnnnnnnnnnnnnnnnnnnnnnnnnnnnnnnnnnnnnnnnnnnnnnnnnnnnnnnnnnnnnnnnnnnnnnnnnnnnnnnnnnnnnnnnnnnnnnnnnnnnnnnnnnnnnnnnnnnnnnnnnnnnnnnnnnnnnnnnnnnnnnnnnnnnnnnnnnnnnnnnnnnnnnnnnnnnnnnnnnnnnnnnnnnnnnnnnnnnnnnnnnnnnnnnnnnnnnnnnnnnnnnnnnnnnnnnnnnnnnnnnnnnnnnnnnnnnnnnnnnnnnnnnnnnnnnnnnnnnnnnnnnnnnnnnnnnnnnnnnnnnnnnnnnnnnnnnnnnnnnnnnnnnnnnnnnnnnnnnnnnnnnnnnnnnnnnnnnnnnnnnnnnnnnnnnnnnnnnnnnnnnnnnnnnnnnnnnnnnnnnnnnnnnnnnnnnnnnnnnnnnnnnnnnnnnnnnnnnnnnnnnnnnnnnnnnnnnnnnnnnnnnnnnnnnnnnnnnnnnnnnnnnnnnnnnnnnnnnnnnnnnnnnnnnnnnnnnnnnnnnnnnnnnnnnnnnnnnnnnnnnnnnnnnnnnnnnnnnnnnnnnnnnnnnnnnnnnnnnnnnnnnnnnnnnnnnnnnnnnnnnnnnnnnnnnnnnnnnnnnnnnnnnnnnnnnnnnnnnnnnnnnnnnnnnnnnnnnnnnnnnnnnnnnnnnnnnnnnnnnnnnnnnnnnnnnnnnnnnnnnnnnnnnnnnnnnnnnnnnnnnnnnnnnnnnnnnnnnnnnnnnnnnnnnnnnnnnnnnnnnnnnnnnnnnnnnnnnnnnnnnnnnnnnnnnnnnnnnnnnnnnnnnnnnnnnnnnnnnnnnnnnnnnnnnnnnnnnnnnnnnnnnnnnnnnnnnnnnnnnnnnnnnnnnnnnnnnnnnnnnnnnnnnnnnnnnnnnnnnnnnnnnnnnnnnnnnnnnnnnnnnnnnnnnnnnnnnnnnnnnnnnnnnnnnnnnnnnnnnnnnnnnnnnnnnnnnnnnnnnnnnnnnnnnnnnnnnnnnnnnnnnnnnnnnnnnnnnnnnnnnnnnnnnnnnnnnnnnnnnnnnnnnnnnnnnnnnnnnnnnnnnnnnnnnnnnnnnnnnnnnnnnnnnnnnnnnnnnnnnnnnnnnnnnnnnnnnnnnnnnnnnnnnnnnnnnnnnnnnnnnnnnnnnnnnnnnnnnnnnnnnnnnnnnnngttcgatcttaaacaatggttaagcaccactaaacctcctctgtctgatcgtaccaggcttctggagtccattcacttggcacttactgcctggggccttgaaccagatgaggatattttgatgccatttaatcttttctgtaagcactggacttatcttcttctctaccagtttcctgaccagtacagtgacattctcaggctgctgatgcaaagnnnnnnnnnnnnnnnnnnnnnnnnnnnnnnnnnnnnnnnnnnnnnnnnnnnnnnnnnnnnnnnnnnnnnnnnnnnnnnnnnnnnnnnnnnnnnnnnnnnnnnnnnnnnnnnnnnnnnnnnnnnnnnnnnnnnnnnnnnnnnnnnnnnnnnnnnnnnnnnnnnnnnnnnnnnnnnnnnnnnnnnnnnnnnnnnnnnnnnnnnnnnnnnnnnnnnnnnnnnnnnnnnnnnnnnnnnnnnnnnnnnnnnnnnnnnnnnnnnnnnnnnnnnnnnnnnnnnnnnnnnnnnnnnnnnnnnnnnnnnnnnnnnnnnnnnnnnnnnnnnnnnnnnnnnnnnnnnnnnnnnnnnnnnnnnnnnnnnnnnnnnnnnnnnnnnnnnnnnnnnnnnnnnnnnnnnnnnnnnnnnnnnnnnnnnnnnnnnnnnnnnnnnnnnnnnnnnnnnnnnnnnnnnnnnnnnnnnnnnnnnnnnnnnnnnnnnnnnnnnnnnnnnnnnnnnnnnnnnnnnnnnnnnnnnnnnnnnnnnnnnnnnnnnnnnnnnnnnnnnnnnnnnnnnnnnnnnnnnnnnnnnnnnnnnnnnnnnnnnnnnnnnnnnnnnnnnnnnnnnnnnnnnnnnnnnnnnnnnnnnnnnnnnnnnnnnnnnnnnnnnnnnnnnnnnnnnnnnnnnnnnnnnnnnnnnnnnnnnnnnnnnnnnnnnnnnnnnnnnnnnnnnnnnnnnnnnnnnnnnnnnnnnnnnnnnnnnnnnnnnnnnnnnnnnnnnnnnnnnnnnnnnnnnnnnnnnnnnnnnnnnnnnnnnnnnnnnnnnnnnnnnnnnnnnnnnnnnnnnnnnnnnnnnnnnnnnnnnnnnnnnnnnnnnnnnnnnnnnnnnnnnnnnnnnnnnnnnnnnnnnnnnnnnnnnnnnnnnnnnnnnnnnnnnnnnnnnnnnnnnnnnnnnnnnnnnnnnnnnnnnnnnnnnnnnnnnnnnnnnnnnnnnnnnnnnnnnnnnnnnnnnnnnnnnnnnnnnnnnnnnnnnnnnnnnnnnnnnnnnnnnnnnnnnnnnnnnnnnnnnnnnnnnnnnnnnnnnnnnnnnnnnnnnnnnnnnnnnnnnnnnnnnnnnnnnnnnnnnnnnnnnnnnnnnnnnnnnnnnnnnnnnnnnnnnnnnnnnnnnnnnnnnnnnnnnnnnnnnnnnnnnnnnnnnnnnnnnnnnnnnnnnnnnnnnnnnnnnnnnnnnnnnnnnnnnnnnnnnnnnnnnnnnnnnnnnnnnnnnnnnnnnnnnnnnnnnnnnnnnnnnnnnnnnnnnnnnnnnnnnnnnnnnnnnnnnnnnnnnnnnnnnnnnnnnnnnnnnnnnnnnnnnnnnnnnnnnnnnnnnnnnnnnnnnnnnnnnnnnnnnnnnnnnnnnnnnnnnnnnnnnnnnnnnnnnnnnnnnnnnnnnnnnnnnnnnnnnnnnnnnnnnnnnnnnnnnnnnnnnnnnnnnnnnnnnnnnnnnnnnnnnnnnnnnnnnnnnnnnnnnnnnnnnnnnnnnnnnnnnnnnnnnnnnnnnnnnnnnnnnnnnnnnnnnnnnnnnnnnnnnnnnnnnnnnnnnnnnnnnnnnnnnnnnnnnnnnnnnnnnnnnnnnnnnnnnnnnnnnnnnnnnnnnnnnnnnnnnnnnnnnnnnnnnnnnnnnnnnnnnnnnnnnnnnnnnnnnnnnnnnnnnnnnnnnnnnnnnnnnnnnnnnnnnnnnnnnnnnnnnnnnnnnnnnnnnnnnnnnnnnnnnnnnnnnnnnnnnnnnnnnnnnnnnnnnnnnnnnnnnnnnnnnnnnnnnnnnnnnnnnnnnnnnnnnnnnnnnnnnnnnnnnnnnnnnnnnnnnnnnnnnnnnnnnnnnnnnnnnnnnnnnnnnnnnnnnnnnnnnnnnnnnnnnnnnnnnnnnnnnnnnnnnnnnnnnnnnnnnnnnnnnnnnnnnnnnnnnnnnnggttccgagtggttgcccgaagcatggctgccttcctttcagttcaggttcctatggaagatcagatccgtttgaagcctggctctgaattacatctgactcccaaagctcagcagg

SEQ ID NO: 37518 - DNA, 816 bp, Macaca Mulatta
  misc_feature (1)...(816): n = A,T,C or G
ggaatgccccagttagatacatcaacatgattcaccactattatgacgatgcttcccacactatatcttatcatgcagctaaagctactaaacacaaatcaccaccaaccaccccttacaaaaacccctacccttcagtctcacaatgtccgnnnnnnnnnnnnnnnnnnnnnnnnnnnnnnnnnnnnnnnnnnnnnnnnnnnnnnnnnnnnnnnnnnnnnnnnnnnnnnnnnnnnnnnnnnnnnnnnnnnnnnnnnnnnnnnnnnnnnnnnnnnnnnnnnnnnnnnnnnnnnnnnnnnnnnnnnnnnnnnnnnnnnnnnnnnnnnnnnnnnnnnnnnnnnnnnnnnnnnnnnnnnnnnnnnnnnnnnnnnnnnnnnnnnnnnnnnnnnnnnnnnnnnnnnnnnnnnnnnnnnnnnnnnnnnnnnnnnnnnnnnnnnnnnnnnnnnnnnnnnnnnnnnnnnnnnnnnnnnnnnnnnnnnnnnnnnnnnnnnnnnnnnnnnnnnnnnnnnnnnnnnnnnnnnnnnnnnnnnnnnnnnnnnnnnnnnnnnnnnnnnnnnnnnnnnnnnnnnnnnnnnnnnnnnnnnnnnnnnnnnnnnnnnnnnnnnnnnnnnnnnnnnnnnnnnnnnnnnnnnnnnnnnnnnnnnnnnnntaacccgccaaacatcaacagccgggccaatcttgctaatacacccggaatcgggaaaaccctggtactaagcaccttttcaaacccccaaaccttttccctaaggctctaattaacccttttaacacttttggggattacctaacctatttctaaaaaaattgcct

SEQ ID NO: 37519 - DNA, 578 bp, Macaca Mulatta
  misc_feature (1)...(578): n = A,T,C or G
ggaagaacattgtttctcaataataagtgttttgattcctttgagctggaatcagaatttaagttcaggtcttcagactctaaaaatgcaagttcttgccacttgtttccccatacaataagagtgttattatcaagcactaaatagacaacaagaaatggagtgactgtagagaaccaagattggaaagtgggtccaggagaactgtgggccctggaataagagggttcaaacataaattgtctgtgttgcattgatgagctcataatctcatggttctcagtgattacaaatcaactcagcttcgtataaatgactcttccaaaggaaagccggaaaaaggtgagactgaaagtcttcaacagtaaatatttactgaatgcttcctatggggcaggtactacttcaggacctaagagcacaacaaagtagccaacaagtatctgctttatgagcattcatggtttagtgggtgaggccaaaaataaataggttaatcaattaaatatttgcatataatcacagttggtgaagtgttatgaaaannnnnnnnnnnnnnnnnnnnnnnnncatgtcgg

SEQ ID NO: 37520 - DNA, 1008 bp, Macaca Mulatta
  misc_feature (1)...(1008): n = A,T,C or G
acacacgcatatggggcgggttaattcaccgtcatcctgactagtggggcagccacctcttgctgcactgcaaatcaaactggagcatttgacgaagaatacagtgaccggcccacacaaaactaggttcttgacttaacgattatggagcatgcgaccaaacggcattacgaatgccccacagcagcacgcaggggtgtagcaaaatatggaagctcaacagtgtgattgagtggtaacatcaacgtggttgggacaaacagctgtcgncccagcatanagggtggaagcacgacaaactggggctagggcgtttgtacccgccactctccgcgatgggtcactgcgcataatagagcacaggcgccaatcaatgctgtcagaggcggacatggcctgtatcaaatcggaactcgtgcgccgctcaaagagaagaaaaggaaacaaataaaaattcccgaaacgggaaacaagggaggatagcaagcagagcagcggaatagggaaccgcgtaattcagaaaacgagggattcacaacagctgggttgatcaagaaaaggggagtagaggaccgggggccattggcataagggtattgctgacgattgcgctgaaaataagcggccagagctcggattggtgcgcttattcggggtaagggagtcctataagttgtcctcccccatactccccgggtaagtggaccacaagggagctggccaatgcgccaagctaaggtcccgagtatacgagtagagagggggttcaacagtgttagccaggaaggtcttgattttctgacagggtgatccacctgcgtgggcctccccaggtgttagaattacaagaaagagccactgcgcctggcctaattttatgtattttttataaagacatnnnnnnnnnnnnnnnnnnngggcatcggtcaggcacggtatcttnnnnnnnnnnnnnnnnnnnnannnnnnnnnnnnnngggtannnnnnnnnnnnnnnnnnnnnncacc

SEQ ID NO: 37521 - DNA, 790 bp, Macaca Mulatta
  misc_feature (1)...(790): n = A,T,C or G
gggctcacgnnnnnnnnnnnnnngnnnnnnnnnnnnnnnnngggtggatcgnnnnnnnnnnnnnnnnnnnnnnnnntnnnnnnnnnnnnnnnnnnnnnnnnnnnnnnnnnnnnnnnnnnnnnnnnnnnnntgtagtggcatgcannnnnnnnnnnnnnnnnnnnnnnntctgagggaggagaatcgcttgaacccagtaannnnnnnnnnnnnnnnnnnnnnnnnatgccactgtactgtaacctaggtgacagagtannnnnnnnnnnnnnnnnnnnnnnnnnnnnnngaagagttgggctcagtctcagctgtaccattttctaactgatttttacaagaaaaatcagagtaaaaatcagttactctttctagacattaattagcacatttatgttgactgtaagcagtataaaaatgtaaattgctgctaccctactaagttactgtcagtaaatactgtgtccagtagatgttgagtatagattaattgatggaaggatcacccctccaattacttccctttagtcaaggttggtagcctaagaatttgggcttctgaaaaaaaattccttttaaatttttttcctaatggggtttttaagacctctaaacctaattttttcaaacatttttttatccccccgggaaaacctacatttccaaaataataaagggnnnnnnnnnnnnnnnnnnnnnnncttttccttaaaaaaatatttccaagggccccttcccgccgaaagggcaatttttatattggggcccacagggtgtttctttccttcac

SEQ ID NO: 37522 - DNA, 165 bp, Macaca Mulatta
caatggtcacagtcaaaagcattcttggtctgagaggaaatgaacagtgaggcttcagagaaatgagagcatttatactttatgccaattacttgtcatattatagtagaatcagttatcctaactccctgattagttttgagagtgtttttgttaatttttaca

SEQ ID NO: 37523 - DNA, 672 bp, Macaca Mulatta
  misc_feature (1)...(672): n = A,T,C or G
gggtgagaactttggcaagctgattctaacagcgatttggaagtgcaaaaagccaagaattggcaatattcttgaagaacaaggtgggagaacttgctgtaccaaacatcagtacttcttccaaggcagtgatcattagggcaatgtggtattgacacagagagaaacaaataggccaatgggacaggattgagcattgggaaatagcccacacaatatggaagcttgctgtgtatcagaggtggccttcacatcctgggaagaggatggacttttcaatcaaatgttcaggaacagctggatacccacactcggaaaacattaagttggatccttaattacctcacatcatacaccaaaaatccatccttgtcattccagaggattgaagacctaattatggaaagcaaaactataatggtcacatgaccgaatatagaagaatatcttaatgacatcagcattaggatgnnnnnnnnnnnnnnnnnnnngcaataaccataagagagaagactgattaatttgacattagagttaagactcaatcatcaaaatacatcttaaagagtgaaaagacagtgcccacaaaatacaaaggaactcctacaaatcaatagggaaaaaattataaatgactttaataggaaaatgggggcaataagaccaaagttt

SEQ ID NO: 37524 - DNA, 653 bp, Macaca Mulatta
  misc_feature (1)...(653): n = A,T,C or G
cgagatcgcaccattgcactccagtctgggcgacagtgcgaaatcccgtctcaaaaaacaaaaaagaccctggaataaggccagaagcaaaaattaaactcattctcattgccagttccattaatctgtctacaagaccctccaccagacctgaggaattagctggataaaggagaaatgcttatgaaatagcacaggaaattattggttgtaaatgttaacttgtgactctcttcagctagtgcccacagcacaaccaagttgaggttcaaacttcaaactggcttcacctcaacatagagctgatggaaagtaataaatctcaatcagaaccatcctcacaatttcttccataccaaagtatctgaatgactattactaaatatttttgtatcagtcttaaataaaagatataaatcaaacnnnnnnnnnnnnnnnnnnnnnnnnnnnnnnnnnnnnnnnnnnnnnnnnnnnnnnnnnnnnnnnnnnnnnnnnnnnnnnnnnnnnnnnnnnnnnnnnnnnnnnnnnnnnnnnnnnnnnnnnnnnnnnnnnnnnnnnnnnnnnnnnnnnnnnnnnnnnnnnnnnnnnnnnnnnnnnnnnnnnnnnnnnnnnnnnnnnnnnnnnnnnnnnnnnnnnnnnnnnnnnnnnnnnnn

SEQ ID NO: 37525 - DNA, 222 bp, Macaca Mulatta
tggcaggaacaaactcgatttactcgactcaccatgcccaaccccttgtgggaggaagctggtaggcaagcgaatatgggatccagtcagctgcggttgggcaccagcagtagcaaactctgtgtgggccctgtgcagcatctaggtgggggtgcctatgaccccctgaacccccagagggtgtgttgcagtgatctttgagctctgccaatctgtggatgg

SEQ ID NO: 37526 - DNA, 931 bp, Macaca Mulatta
  misc_feature (1)...(931): n = A,T,C or G
gggatgtttatttaattttttacttattactaaattaatgccaggctgtctttttttgaatgtttaaatctcttatgatcaggcacattagttaatctataaatttgttctgtgtgtggggcatgatgatattcctgaaatagtagtccttatccttgggttgggtcccaagggctccacccccgtcatctttcttggtcactcatgttagcgaggcctgtccttcaggcttccagagaagagggtatatgggaggtacatttttgaaactttgtatatcttagaatttctttaatcttctcattttctttaaatttttctatcttttatctcattttctttttgttctcctttattggaagccaccttcaactttttctcccaaaaccaattgccttatccttttagatgtattatttaggttttcctgggaaactctgggttcctcgatcaaaagtccgtttaatttttgggcgaggatggctatttttttcattagactcaaagttttacttaggtgataacttttaaaaaattaagcctaaaaagtaagatatctcctttttttggaaatagctttcactgatcaaacccaaagtgggggttttttttaccacggttccgatttttaagatgtatctaataagtccccatatacgaaattaaatgtttacctattatgctatagagtggggcaaaaagggaggttggctgggtgtggaccgcaaagcgccactgtcttggagaaaacacctggtaataatcttcgtataggttcaagctgttggtcaaacatatctagcttctcgagggaacagtccaggaagaaggggttggagggcnacaaagctcataaaaatggggtgatggaatgtaattttctgaacgggaaatggggaagaaagaatgtagcggtataagggtttataga

SEQ ID NO: 37527 - DNA, 815 bp, Macaca Mulatta
  misc_feature (1)...(815): n = A,T,C or G
gggtagaatttcctgagattgtgaaaaactgatattgaagactcattttgttttttccattcttcaggaccttcttctgcaaggtgagtcaagcctgtctacccacctagatttttttcagaggcctacaaatacaagtatctttcttatatgcacattataataaatgatgaaattcagtccaacatgcttattataaacagcaattcttgctctatcaagattagcttatatgccaaatattaaatatggcttatttcagtaagcataaaaacataggggctatcatttttaaagacttgattttttctgttgtggtaaaaatatataaatacgtatttgctattttaaacatttaccattttacccatttttaagtgtacagttctttcgcattaatgcatccatgaccaacattcacttaagtttttgaaagagggaacagtatatttttttttcctagagccttcagatgagaggaaacagtgtattctgttgcacatctacaattcccaaaagacctcttnnnnnnnnnnnnnnnnnnnnnnnnnnnnnnnnnnnnnnnnnagttgacatcagcctgggcaacatggtgacttcgtctcttgggggggggggggaattagccgggtgaggtggtgtgtacctgtggtcacaggtacttgggaagctgaagtgnnnnnnnnnnnnnnnnnnaagaagtaaaggctggcatgagctgtgattatnnnnnnnnnnnnnnnnnnnnnnngacaaaatgagaccctgtctccaaagaaagcccctcttcttactgaccaaagaacggaaggggt

SEQ ID NO: 37528 - DNA, 1892 bp, Macaca Mulatta
gttgttggtcatcactgtctctattaactttcaacaacttgcatttttaagtcacaaatagtgataccgctgcatttaattttcactaatatgcctcagatttttgtagtgattctacatttgatatgattcacaatgtaaaatgcttctatttattcatttcacttttacccacaggattatttttatttttgtcattttcacacttcaaacataaagacaaaaacatcacaaatatatacaatgttttacatatgtgtatattttcacacatatatgtatgtatgtttatatgtattgaaactacagaagcacttgtcaccagtaagagccctgagacacctttgaccacttaccctcatcagatgagatttgctaaatgagttgtggaaacaagttttttaactgaatttctgagctttgtggatttggaaatgcaaaagaagatttatggacatttacagagatcatgattttattctccttaaaactctttgatactttcccattgtcttcagtataaatccaaaaacctaacgccatccacgagactcttaatacctggcttcttgtgatttctccaagctaatctttcaccctccttcccctcagcctctctgctttagtgaactttgttctagtttcttgaagaagttcatccattcaagcttttgtacatgggatttcctaaacctgaaatgtgtctcctgcgttttggttcccaaaacagacacacagggctctgctctgcccccctggctcacacgtgcttaacctgtcaagtacaatctgaactgtcactcttcagagggtccttctctggtaccctaatgtaattgagatcatcttactattattctctgttctagaactccacacttctgatatttctcattcctgtctaagctcttgtgtgtttggtttttgtctatcgactttcactgctctttattctcccctagcagagtggagagatctgttttcccttgtttggattcctagaggcagcgcgggccaggcacaagttcagcactaaggaagtgttcacaggatgaaggcggtgggtgctgttgaaggaaccggtacagttgtgggaggagggaaggagcagagagtgtctttggggtggaggctcccaggaggaggcggcaggggctgcgttgctgggagaatcctcctccagttcctgcattgagttctccagaacaggctggaggcagggagggggtcccaaaagcccggggatcagaaggggttttcccgctgttccccccaggcccccgttcgcctcaggaagacggagaacgagcccctgggttgctggtggtgggcggtgcgggtggggcgggttaaggttctccgtgcccgcacccgcccgggagccccggattgcggcgttgctgtcagtgtcttctcaggaggccgcccgtgtgaccggatcgttcgtgtccccacagcacgtttcttggagcaggctaagtctgagtgtcatttcttcaacgggacggagcgggtgcggttcctggacagatacttctataaccaggaggagtacgcgcgcttcgacagcgacgtcggggagtaccgggcggtgtcggagctggggcggcgtaacgccgagtactggaacagccagaaggacatcctggagcagaggcgggccgcggtggacacctactgcagacacaactacggggttggtgagagcttcacagtgcagcggcgaggtgagcgcggcgggggcggggcctgggtccctgtgagctgggaatgtgccgtctgtgagcattcagaatcttctctatcctgagcaaggagttctgagggcacaggtgtgtgtagagtgtggatttgtctgtgtggctgttgtgggaggggaggcaggagggggc

SEQ ID NO: 37529 - DNA, 328 bp, Macaca Mulatta
gagaaattctctagagtcctggtggagcagcagcaggaccgagcccggagagagcaagaaaggattcgtctgttttctgctgatccctttgaccttgaagctcaggcaaagatagaagaagatatcaggtaatgaatgatctgttcatctaaagaacaagactcagagactccagatttcccaaactgcagggtatctaacattagttgggcatctgcttggaggcagcttctctgttttgcagttgagatagtaacctcagtcttttagtttagtctctcctctttcattttctacgcatttcgaatcgacatgacaaagatatagg

SEQ ID NO: 37530 - DNA, 394 bp, Macaca Mulatta
cgttaggatgatgacagcattgttagcttcttggtttggggtttagtgctggaatgcttctgagcaacgggtgatgagaggctaagagccgggcactggcagctgtttctgagggtcttttggaggtgtgcggtggtgggagagtggctttgaggaggggatactctcccatctctgcgaaatagccccctccatcccctgggcatcactagatttggctttgaaagagcaatactggtatgaatgttggctccccatgtagctgtacaggtggcagacactggcagggggcctggacctggagaggacactgtgaggtgactagagcttgcagaccagtttcccaggaggaaagcatcctcctgggaactcacggaagcacctggagcaggag

SEQ ID NO: 37531 - DNA, 188 bp, Macaca Mulatta
cgggcggatcatgggacctttattcgttaagacatcaggctccagacatgaactttcagcagaagcgcttgccaggagcaaatggacagaaaagctgggatgaacagcgcccagcaacaatcatgaccgggaaagggtgctcggagcttcgcatcccctggccgggggcagctggaggtgcctcagaa

SEQ ID NO: 37532 - DNA, 1145 bp, Macaca Mulatta
  misc_feature (1)...(1145): n = A,T,C or G
ggggtggcaaatgccacataaatatcttgctttatgtcgagcaactaagcaatacagactagcttagcaaaatgatctgtctgcatgttttcctaaataaaacagcaacctaagacatcttcgattttctgcttaaggcaaaattagaaaattattgcaggccaggcgcggtggctcatgactggaatcccagtactttggaaggccgaagcgggcannnnnnnnnnnnnnnnnnnctcannnnnnnnnnnnnnnnnnnnnnnnnnnnnnnnnnnnnnngaagatacaaaaattaaccaggcgtggtggtgcaaacatataatcataactaattggaagctgaagtatgaaaaaacgaatgaacctgggaggcagaggaagtaagtggagctgaaaataaacatcaatatgggctcccagccttggggccacgacaagtgtagaactttcccaccttgagagatgagaaagaagctattgacgtagaacgagtcgagcaaccggggttacgggaccccggcacactcacaaaccacctaccagagacaaaagcggatctcttgcactcggtaaccacacacgtcacggctctctatgggagatcagctccgacataggagcggacaccctctggagttttaataggcgggcgaaaaaaacagtggtgcggggacgactacgcggcgggcgcggcgacattaagaaaggacatttcgcgttttgtattaccaacaaacgaaccgatataggaaatatacgtcacaggggaccaatcatagagtaaaaaaaatttaaatttgttactaccgtttggagaaaagtctcaagactgcctttacacctgatacttatataacaatgaaagaagaaaaatatccgggagtaagagaaacncgataaaagtacataaatactcgcgtaacatgcngagaacaacgaaaaaatcccgccaattaaaaatagagtaaagaatgtgccataataggaagggagtcactatgagacacaagcgagagaacaaatcaacagcaaaccgaaaagagaacatcacaacaacctatcgcagaggacctattgcatagatacccgaaaagaataactcacgtcactctcttgctctgttagtccgtaggatnatagcgggn

SEQ ID NO: 37533 - DNA, 317 bp, Macaca Mulatta
atgggtgatgttgagaaaggcaagaagatttttgttcagaagtgtgcccagtgtctcaccatggaaaagggaggcaagcacaagactgggcctaatctccatggtctctttgggcagaagacaggtcaggccgttggattctcttacacagatgccaataagaacaaacgcatcacctggggagaggatacactgatggagtatttggagaatcccaagaagtacatccctggaacaaaaatgatctttgccggcattaaaaataaggtagaaaaggccgacttgacagcttatctcaaaaaagctactaatgagta

SEQ ID NO: 37534 - DNA, 764 bp, Macaca Mulatta
  misc_feature (1)...(764): n = A,T,C or G
gggaactctgagaaataaataactattgtttacctgtcactcactttacgatattctgttaagacaatggtaatgcagtttattgcttataaactattaataataatatttataaatcaatgtcagttacagagctagtgcctagaggaattacctataaattaaaataataaaatcaaagcattgtgggaaccactgaaacaaaccagtgtcaaaaggatcttgctattaggttggatactttactaaatgataccaaaataattgaatgaacatttaaatacttcttaccttnnnnnnnnnnnnnnnnnnnnnnnnnagttgcctatatttccaaggttttgcaaaagttttaatctcaaatgcttatttgtcatttatatttggttaccaaattaatctatatactctattaagaagaacatccttatcaaagataaccttcagattcaccttgtctgaatttgttcaaattcccaatttggtgaagcccatatgaataaaagtcttgctgtatttccacttccagaataaattacacagcaatggaaacgcaagttttgggggggggaacttgaaattattcacaaccacaagttatttgaaactaacccgatgtgttaaatttttaaattttacaaattattttctggtgccttaaatccgctttataaaattttttgggggaataattaggaagaaattttatttatatttagaaacttttttaagggaaaaaaaggaaaccaacaactggtgggagg

SEQ ID NO: 37535 - DNA, 3751 bp, Macaca Mulatta
  misc_feature (1)...(3751): n = A,T,C or G
ccagatttggtcatgacagtaatggaagcaatctccattctcttgaatgccaannnnnnnnnnnnnnnnnnnnnnnnnnnnnnnnnnnnnnnnnnnnnnnnnnnnnnnnnnnnnnnnnnnnnnnnnnnnnnnnnnnnnnnnnnnnnnnnnnnnnnnnnnnnnnnnnnnnnnnnnnnnnnnnnnnnnnnnnnnnnnnnnnnnnnnnnnnnnnnnnnnnnnnnnnnnnnnnnnnnnnnnnnnnnnnnnnnnnnnnnnnnnnnnnnnnnnnnnnnnnnnnnnnnnnnnnnnnnnnnnnnnnnnnnnnnnnnnnnnnnnnnnnnnnnnnnnnnnnnnnnnnnnnnnnnnnnnnnnnnnnnnnnnnnnnnnnnnnnnnnnnnnnnnnnnnnnnnnnnnnnnnnnnnnnnnnnnnnnnnnnnnnnnnnnnnnnnnnnnnnnnnnnnnnnnnnnnnnnnnnnnnnnnnnnnnnnnnnnnnnnnnnnnnnnnnnnnnnnnnnnnnnnnnnnnnnnnnnnnnnnnnnnnnnnnnnnnnnnnnnnnnnnnnnnnnnnnnnnnnnnnnnnnnnnnnnnnnnnnnnnnnnnnnnnnnnnnnnnnnnnnnnnnnnnnnnnnnnnnnnnnnnnnnnnnnnnnnnnnnnnnnnnnnnnnnnnnnnnnnnnnnnnnnnnnnnnnnnnnnnnnnnnnnnnnnnnnnnnnnnnnnnnnnnnnnnnnnnnnnnnnnnnnnnnnnnnnnnnnnnnnnnnnnnnnnnnnnnnnnnnnnnnnnnnnnnnnnnnnnnnnnnnnnnnnnnnnnnnnnnnnnnnnnnnnnnnnnnnnnnnnnnnnnnnnnnnnnnnnnnnnnnnnnnnnnnnnnnnnnnnnnnnnnnnnnnnnnnnnnnnnnnnnnnnnnnnnnnnnnnnnnnnnnnnnnnnnnnnnnnnnnnnnnnnnnnnnnnnnnnnnnnnnnnnnnnnnnnnnnnnnnnnnnnnnnnnnnnnnnnnnnnnnnnnnnnnnnnnnnnnnnnnnnnnnnnnnnnnnnnnnnnnnnnnnnnnnnnnnnnnnnnnnnnnnnnnnnnnnnnnnnnnnnnnnnnnnnnnnnnnnnnnnnnnnnnnnnnnnnnnnnnnnnnnnnnnnnnnnnnnnnnnnnnnnnnnnggtatgcattaaagttaccattatcaatttcactgtaacaaaatcaggtctggaggatcagttgttaagnnnnnnnnnnnnnnnnnnnnnnnnnnnnnnnnnnnnnnnnnnnnnnnnnnnnnnnnnnnnnnnnnnnnnnnnnnnnnnnnnnnnnnnnnnnnnnnnnnnnnnnnnnnnnnnnnnnnnnnnnnnnnnnnnnnnnnnnnnnnnnnnnnnnnnnnnnnnnnnnnnnnnnnnnnnnnnnnnnnnnnnnnnnnnnnnnnnnnnnnnnnnnnnnnnnnnnnnnnnnnnnnnnnnnnnnnnnnnnnnnnnnnnnnnnnnnnnnnnnnnnnnnnnnnnnnnnnnnnnnnnnnnnnnnnnnnnnnnnnnnnnnnnnnnnnnnnnnnnnnnnnnnnnnnnnnnnnnnnnnnnnnnnnnnnnnnnnnnnnnnnnnnnnnnnnnnnnnnnnnnnnnnnnnnnnnnnnnnnnnnnnnnnnnnnnnnnnnnnnnnnnnnnnnnnnnnnnnnnnnnnnnnnnnnnnnnnnnnnnnnnnnnnnnnnnnnnnnnnnnnnnnnnnnnnnnnnnnnnnnnnnnnnnnnnnnnnnnnnnnnnnnnnnnnnnnnnnnnnnnnnnnnnnnnnnnnnnnnnnnnnnnnnnnnnnnnnnnnnnnnnnnnnnnnnnnnnnnnnnnnnnnnnnnnnnnnnnnnnnnnnnnnnnnnnnnnnnnnnnnnnnnnnnnnnnnnnnnnnnnnnnnnnnnnnnnnnnnnnnnnnnnnnnnnnnnnnnnnnnnnnnnnnnnnnnnnnnnnnnnnnnnnnnnnnnnnnnnnnnnnnnnnnnggatcttttgagacttatattaacccacaggaatgggaaggctatcctaaaatgaaatacgaagagaaacacatgagacaggaaaaggaggccgcacacgaggatccgtggagtgcaggattgagttctttccataagctaattcttattaaatgttgtaaagaagaaaaggtnnnnnnnnnnnnnnnnnnnnnnnnnnnnnnnnnnnnnnnnnnnnnnnnnnnnnnnnnnnnnnnnnnnnnnnnnnnnnnnnnnnnnnnnnnnnnnnnnnnnnnnnnnnnnnnnnnnnnnnnnnnnnnnnnnnnnnnnnnnnnnnnnnnnnnnnnnnnnnnnnnnnnnnnnnnnnnnnnnnnnnnnnnnnnnnnnnnnnnnnnnnnnnnnnnnnnnnnnnnnnnnnnnnnnnnnnnnnnnnnnnnnnnnnnnnnnnnnnnnnnnnnnnnnnnnnnnnnnnnnnnnnnnnnnnnnnnnnnnnnnnnnnnnnnnnnnnnnnnnnnnnnnnnnnnnnnnnnnnnnnnnnnnnnnnnnnnnnnnnnnnnnnnnnnnnnnnnnnnnnnnnnnnnnnnnnnnnnnnnnnnnnnnnnnnnnnnnnnnnnnnnnnnnnnnnnnnnnnnnnnnnnnnnnnnnnnnnnnnnnnnnnnnnnnnnnnnnnnnnnnnnnnnnnnnnnnnnnnnnnnnnnnnnnnnnnnnnnnnnnnnnnnnnnnnnnnnnnnnnnnnnnnnnnnnnnnnnnnnnnnnnnnnnnnnnnnnnnnnnnnnnnnnnnnnnnnnnnnnnnnnnnnnnnnnnnnnnnnnnnnnnnnnnnnnnnnnnnnnnnnnnnnnnnnnnnnnnnnnnnnnnnnnnnnnnnnnnnnnnnnnnnnnnnnnnnnnnnnnnnnnnnnnnnnnnnnnnnnnnnnnnnnnnnnnnnnnnnnnnnnnnnnnnnnnnnnnnnnnnnnnnnnnnnnnnnnnnnnnnnnnnnnnnnnnnnnnnnnnnnnnnnnnnnnnnnnnnnnnnnnnnnnnnnnnnnnnnnnnnnnnnnnnnnnnnnnnnnnnnnnnnnnnnnnnnnnnnnnnnnnnnnnnnnnnnnnnnnnnnnnnnnnnnnnnnnnnnnnnnnnnnnnnnnnnnnnnnnnnnnnnnnnnnnnnnnnnnnnnnnnnnnnnnnnnnnnnnnnnnnnnnnnnnnnnnnnnnnnnnnnnnnnnnnnnnnnnnnnnnnnnnnnnnnnnnnnnnnnnnnnnnnnnnnnnnnnnnnnnnnnnnnnnnnnnnnnnnnnnnnnnnnnnnnnnnnnnnnnnnnnnnnnnnnnnnnnnnnnnnnnnnnnnnnnnnnnnnnnnnnnnnnnnnnnnnnnnnnnnnnnnnnnnnnnnnnnnnnnnnnnnnnnnnnnnnnnnnnnnnnnnnnnnnnnnnnnnnnnnnntcagacttctctggaaacactcaacaaagccatcgctggattcgtggtgatgtctgaagaaatggaaaaagtgtataacagtttcctcaacaaccaggttcccgctctgtggtccaacacagcctacccatccctgaagccactagggtcgtgggtcaaagaccttatcctgaggacctcatttgtggatnnnnnnnnnnnnnnnnnnnnnnnnnnnnnnnnnnnnnnnnnnnnnnnnnnnnnnnnnnnnnnnnnnnnnacaggaactcttcaaaatcatgctcgaaaatacaatttgcctatagatgagctaagtttcaaatacaacgtaattcccacctatcgggatcaagctgcagtgatagaagctgccaagacagtgcaatttggacaagaactgcccatggacatgga

SEQ ID NO: 37536 - DNA, 656 bp, Macaca Mulatta
gggaagtttaaggaattttagtatgtaatagcaaagtgtttgattaaaagtctaatcctatattgctagtcgaaattagttacattctgatctaggaatgataatagtcattggatattgatatgccgtgctgtcagaaaaccagactaagaaacctttatctgattcccacatgttgcttgttctgatgggatgtatactttacagcagcttattgctgctttgaaaaaaaatgtataaactatacatttggagtgtttgcatataattctttataacctccacttaaagctgtcagacattgctattttatcagtccatactgtttaataaaactaatgttcttaggaatccagcttgtacacactgtttaaaaaccctcagggacagtttacacactcttctcactcaattcaggtactttgatgctattcttaaacctaacagtgacttgtatttttctgttttgcttttatttcaacgtgctggtagcacatctgatgaatgtcaactttaaaaaactcagttcaggtatccaggtataactcagccaaacagattttaaagctgcatataactctccagcacatggtgcctcacactcttatagtggcattctatatattcagttattactactgagcagataatatggg

SEQ ID NO: 37537 - DNA, 130 bp, Macaca Mulatta
gatggactgccatggtggcgtgagcggcaccatttacgagtatggagccctcaccattgatggggaggagtacatccccttcaagcagtacattggcaaatacgtcctctttgtcaacgtggccagctac

SEQ ID NO: 37538 - DNA, 190 bp, Macaca Mulatta
ctcccgaaggagtcctcttatcctgggtcttcggcaccaaatgtcatgcacgtccgtgtgaagagaccaccaaacaggctctgtgtgagcaacacggctgcttatttcaccttcacacctggcccggacctgttcctgaacgccacagttactggaaccccaggatgatgaggagtgaggatgcaaacca

SEQ ID NO: 37539 - DNA, 73 bp, Macaca Mulatta
agttgggagattttgatctattcacctgaccttgaacttcctacccagaccccttctcaagggggatggtgtc

SEQ ID NO: 37540 - DNA, 485 bp, Macaca Mulatta
  misc_feature (1)...(485): n = A,T,C or G
aatgatgaggcttagtggcatgtttgttcctgtttttgtggctgcagctggactgtatgagtagaggagaggatgtggagcagagtcttttcctgagtgtccgagagggagacatctccgttataaactgcacttacacggacagttcctccacctacttatattggtataagcaagaacctggagcaggtctccagttgctgacatatattctttcaaatatggacctgaaacaagaccaaagactcactgttttattgaataagaaggataaacatctgtctctgtgcatcgcagacacccagactgaggactcagctatctacttctgtgcagagaggagcggtagtggaaacaagctcatctttggaactggcactctgcttgctgttcagccannnnnnnnnnnnnnnnnnnnnnnnnnnnnccagctgagaggctctaaatccaatgacacctctgtctgcctatttactgattttgat

SEQ ID NO: 37541 - DNA, 135 bp, Macaca Mulatta
acagaaattgaccctcccagaaaccttcgtccatctgctgtaacgcagtctggtggtgtattgacctggacacccccctctgctcagatccatggctacattctgacctaccagttcccagacggcacagttaag

SEQ ID NO: 37542 - DNA, 592 bp, Macaca Mulatta
  misc_feature (1)...(592): n = A,T,C or G
ggggggcttaaactgcaaaaagaatgaatttggatttaggaagctgttagatcattgagtggcactaagagtgaaatttcactggcagtgaaatttccttgagcctnnnnnnnnnnnnnnnnnnnnnnnnnnnnnnntcagttttttaaattaaaaaaatagaaagctgttaaggctcctaatttgtggggggttttttttgttgannnnnnnnnnnnnnnnnnnnnnnncagttttaaaataatcccgggaagggaatcctttaaccttggggggcctattttccaaaaatgaaaattttttatgggaaaagggataaaaatattttcccccccggggttggttccctaaccccccggtttaaaaaacctgttaaaaaattttaagggaaaattttttagggnnnnnnnnnnnnnnnnnnnntttccgggggggcnnnnnnnnnnnnnnnnnnnnnnnnnnnttattttttaaagggaatttttttcccnnnnnnnnnnnnnnnnnnnnnnnnnnncccnnnnnnnnnnnnnnnnnnnnnnnnnnnnnnnnnnnnnnnnnnnnnnnnnnnnnggccccccgggggtttttt

SEQ ID NO: 37543 - DNA, 1278 bp, Macaca Mulatta
  misc_feature (1)...(1278): n = A,T,C or G
ggattttcttttatacctctatatattgccttgtgatgacattatcttttaaattaaaaagagatttggctagttgtgtgtgtaatgttagtttacagtccgactctcctgatgtacctcttttcatgatctttttctttccttcccaagaaactgaggaatgtttaatatgaaaacacacattggatatgtgaaaagcacaacaaaattcttaatgtacacagtaaaaagtaaatatataaatgtagatggcatttaggaccacagcttgctggatttgtgttagctattggaataacttgattttgtataagctatttagagtgaggctggaggtggcagttttacagaactggagaaccaggccaagtcccctccccaacctaattaggtcattcaggacagctaagtcagtatatttagagcaatactagcatatgtttttcttaattgttatcagcattgaccaagtggtttggaaagaggcatgctttaatatcacaataattttgatttgtaaaccaagaaattaatcctgtgtttatctaacttcataatagcagttattgcccgaagctataatggcatatttacaaaagttcttattactgggtggactgataacatttaaaaaataattgtgtttgaccccaaatgactttatacccaattctacataaaaatatagaaaatctatcttttttgttactttcagatgttcactaactcagtttttaagcagacgttttcagggcattaaatatatgttgtgtatgaaatatctcaaactggaacataaatttagtgatcaaactgccattcataatgtaaggcaacacttaaatttcgaacctaaattttagatggattgtataaaaaatcctaaaagcagtatctgttatttagctgtaaaccaagttggaagcctattcagaataatttcttaaattattgatggaatttttggagtactggtttccttcctttcaaattgaatggtaattttatggaataaaatgcaccttatatgtttaaacaatttttgtatacttttgggatttttggtgcttatatgctaaatcacattcagcatgtgtaattttgacatttaaaatacttctctccattctgtaaatttaaaagaatagttaattttacaggttctaggggattgtgaaataaaatgtcnnnnnnnnnnnnnnnnnnnnnnnnnnnnnnnnnnnnnnnnnnnnnnnnnaannnnnnnnnnnnnnnnnnnnnntaaaaaaacaatcaatg

SEQ ID NO: 37544 - DNA, 917 bp, Macaca Mulatta
  misc_feature (1)...(917): n = A,T,C or G
gggattcctgtaatggctgcttcctggaaggtcgtgtcacgtggaacctcttaatctcagcatccggagctccaggaagggaaaatttcaagtcagatagaattctatatataccatttctttggaaccttcagcctccagattccaacatcatgacctcagtttcaacacagttgtccttagtcctcatgtcactgcttttggtgctgcctgttgtggaagcagtagaagccggtgatgcaatcgcccttttgttaggtgtggttctcagcattacaggcatttgtgcctgcttgggggtatatgcacgaaaaagaaatggacaaatgtgactttgaaaggcctactgagtcaaacctcaccttgaaaacctttgtgctatagaggctaaacctgagctctggtgtgtgaaaggttccaagaatcagtaaataagggagtttcacatttttcattgtttccatgaaatgggaacaaacatacatttatnnnnnnnnnnnnnnnnnnnntttctttccaacaaataatgcacagaaaaatgcagcctataatttgctagttagaaaggaggtcaaagaagtaaaatggctgaaatttacataagtaatatttcataatcttagaattctctcaaagcatgtggaaatagggaagaaggaagttcttgccccagaatcttaggaaaatcgcccactgttttggttataatcactgccctcctggaatcgttgaaggagacttttttcctcccctttttcttataattagaatttgttttttgttgtctcccccaagttaatatttatattttagaatattaaaaaaagtccgcccnnnnnnnnnnnnnnnnnnnnnntcctcnnnnnnnnnnnnnnnnnnnnnnttttagaaaaaagatgtaattttccgatgggtaa

SEQ ID NO: 37545 - DNA, 735 bp, Macaca Mulatta
ggtaaacctccacttttctttcttttgaagcatttacgatcatccacaagcatccagtgtgtataaccgttgtgtggtttattgttaacttcctcattgctggaccaagagctccatgaaatcaggggccttgtctctcttgttctcagtgaaatcatttgccctcaatatgggggttagcacatagtgagtcaatgaatattcaaaatcattcatttaaatattaataaatattgagacacactacaattcatttgacacacagcacatgctacttttaattgtggtggctcaaatagcctatgatacttgagtgaaacctgacttgagtttcaccatcaatactgatctgttgactaatctacccattgtatgtactttgtaatgactgaatcactgacatgcatggcaaagaccatttttatgcccttatagctcatgtagtaccttttgttctctgataggtccctagtacacagtacagtgtttcacacagagtaggcacttaaatgtaccagctagtggacagtgtgatgatgccaggaaatcatatacaagggtagaaaattaacaagtatggagcatctcatatatatactggcatctgccttctcatttagcccccataacaagttttataaaagtagaatagtgaacatccccacacctattaaaggaaaaagcccggaggctcataaattgcaatggaaaaagtgcaataaggggagcccaaac

SEQ ID NO: 37546 - DNA, 811 bp, Macaca Mulatta
  misc_feature (1)...(811): n = A,T,C or G
ggatgatactttgagatgcatgcattaaaagtccaaagagtaccagctgttgagaaagttgctgctttaagttggtatgtatatttttaaatgtggtatttgtaaaaaacatattttttgttccttttaaatgtttttaaatgttttcgagtgtatacctgcatatgtttaagtgatactaattttttaaaatactcacataaagtgaaaatttttgttatgcgatgttcaggctacacgatctaggtttttatttgtattttggatgagatttctgctaggtaatcaagactgtataaaagtcagctgttgtaatctggctagaaatctttattttgctaaagaatagttttgtgattattagacctgttgagatgttcttcattgttcagggccattttagtaacattcttaacagctctttaaacaaataatttgatattctttcgtttccttagataccagcctgccccttttcagaaagcttagggatatctatgtcctcgaagattaaaaaatgtgtctatnnnnnnnnnnnnnnnnnnnnnnnnnnnnnnnnnnnnnnnnnnnnnnnnnnnnnnnnnnnnnnnnnnnnnnnnnnnnnnnnnnnnnnnnnnnnnnnnnnnnnnnnnnnnnnnnnnnnnnnnnnnnnnnnnnnnnnnnnnnnnnnnnnnnnnnnnnnnnnnnnnnnnnnnnnnnnnnnnnnnnnnnnnnnnnnnnnnnnnnnnnnnnnnnnnnnnnnnnnnnnnnnnnnnnnnnnnnnnnnnnnnnnnnnnnnnnnnnnnnnnnnnnnnnnnnnnnnnnnnnnnnn

SEQ ID NO: 37547 - DNA, 766 bp, Macaca Mulatta
  misc_feature (1)...(766): n = A,T,C or G
ggaagaaagaagtcatgtcaaagttagttatggatatagactgaaacaagttatccgtggagacacaaatcccattcagatattctagttttgaagtaattgcaccctactaactttaagaaaatttaggagttattgataacttcatagtttgtacttaagttcatttggctgaatttcataaacttaattgctagtccttaaattaagaggggaaatgcttatttacatgagtgacaaagaagaaaaaagatagtgtttccttaggctgatttaagaataattttaacttaaaatatgactcttacaagtcagataaacaattgtcatgtatttctacattccagtctacactgaatttgtttatatcaatgcaaagtgtgaccaaaggatgcttagccctattctttgaagatgatatagaaacaccatgcttcatcatcagaagacatgtaatcttacaatctatagtcttatacctgaacagaaaatgannnnnnnnnnnnnnnnnnnnnnncctataatgtaacagttaaaatatagtcttaaggatcaagaaagcttataacagtagagatttacttttaatacctgttcttctaanntgcgttctgttatattaagcagtattctgagaatcctaaacctttctagaggacgttaaataactggtgatatatttttttcaacctggggttttattaccggaaatactgaattaatgggctgcaaaaccatccaattaatactgccccaaatataaaac

SEQ ID NO: 37548 - DNA, 761 bp, Macaca Mulatta
gggtggaagaaattattgaaaacttaaagcaagatggttcatcttttgccctagagcaattgaaggtaattaataaaatgtctccaacatctttgaagatcacactaaggcaactcatggaggggtcttcaaagaccttgcaagaagtactaactatgtattatcggctaagtcaagcttgtatgagaggtcatgactttcatgaaggcgttagagctgttttaattgataaagaccagagtccaaaatggaaaccagctgatctaaaagaagttactgatgaagatttgaataatcactttaagtctttgggaagcaatgatttgaaattttgaggtgacaggcttttaaggtatatttcgtagcatgggttggcaatctacagcatgtggcccaaatccagcctgctgcctgtttttatataccctgcaagctaagaatggtttctgcgtttttaaatggttgggaaaagaaatcaaagactcatatttcataacatgaaaagtatatgaaatgtcagagttcacaaataaagctttattggaactagctatactcatctgtttatacattatctgtgactgctttgaaatgagtagttgcaatagagaagggtaagcctacaaagcctaattatttactggtcgggtttttgtcaaaaaaagtttgtcaatccccgtttttaaaagatgaaaaaatggggaaggtcctttgaaaaaattcccttaaagtagtatatcctaatgaaaatggggatcttt

SEQ ID NO: 37549 - DNA, 201 bp, Macaca Mulatta
caggcaccacatgattggagagggagcatctgcaaagatggagccccgcagtgtctgcattagaaaagcattctaaggctgaggcgggcagatcacctgaggtcaggagttcaagaccagcctgaccaacatggcaaaaccccatgtctactaaaaatacaaaaattagctggacatggtggtgggtgcctgtaattccaa

SEQ ID NO: 37550 - DNA, 771 bp, Macaca Mulatta
  misc_feature (1)...(771): n = A,T,C or G
gggacacaggatctttaactttattagcagctactgagctacagaatacaaaccaactgaaaacattaaaggctgcctgaagcaggtatgtacaggtatactacacagaagcaaaagctgtatcatccaatcccaaagccacccctgtggggaaggatgaccttagctatgggccaaaggagtacagaagttacaacatgagagtcccatccatccaggaaagcagtgaacaactacagccgcatgggcaccaaaaatttatctgagattagttttaaaggttccatgaatcaaagttttcaaatgaaaacaggtacccctcttttcctgtagactttccagctcactacccaaaagacttgagtacttctattaaggcagctggaagcccaccctagacttgaatggcaacttgtcctttctctgccagtaatgcaatccaacagaatatgctacggggaaaacaatttccacagtgccgccctctggtacaaggggaacacagcactcaaagcaaaaaggccacagagggctccctgagaatccagtacatctaagcgaggccttcaactgtggagacaaactttgcaactggatcccggtgggatggtgccctgcggcaaggagtagtgtgtatgccagtgagagggcccagcttccaggacagttacnatggcgtcctgagtcactttctctctcccacttgcattcgagagtgagaaaatacacanctgtgggccttgattctcactncacaatcccccctggtaa

SEQ ID NO: 37551 - DNA, 484 bp, Macaca Mulatta
gggaagtgcggctcctttcgcgtcccccaccctctcggctccgcctggcagcagcagctccgacgcccagaggcgtacgagaccctccgactcgtgggtgcgcaaacaggcctcgccagcgagccttgcccaggcaacgagtcgccagcccgcccccttaccgcgggccaggtctcacctcgccaccagtacgtcttggacaggtagtgccaggtctgatgccgggtgtggtgagtgccgccgggacccaggtgcgccgcctcgatgaggtcccggcgtcgctccggctgcagcaccacctccagctccgcgaaggtcttgcggtgtcgctgccgccgctggtaatacagagtcccgccgcgcaccacgtagcaggcggcagcttttcggattttacgcttgacattgccttcggtgcccggcgcgtatggctcgcgctcgttcgtcaggtaacgcaggatggcccggtagctctcctcgcttg

SEQ ID NO: 37552 - DNA, 514 bp, Macaca Mulatta
ccgggagccctgtacaatcagccatggtcaaccccaccgtgttcttcaacatcgccgttgacagtgagctcttgggccgagtctcctttgagctgtttacagacaaagttccaaagacagtagaaaactttcgtgctctgagcactggagagaaaggatttggttataagggctcctgctttcacagaattattccagggtgtatgtgtcagggtggtgacttcacacaccataatggcactggcagcaaatccacctatggggagaaatttgatgataagaatttcatctgaaagcatacaggtcctagcatcttgtccatgacaaatgctggacccaacacaaatggttcccagtttttcatctgcactgccaagactgagtggttggatggcaagcatgtggtctttggcaaggcaaaagaaggcatgaatattgtggaggccatagagccctctgagtccagaagtggcaagaccagaaagaagatcaccactgctgactgtggacaact

SEQ ID NO: 37553 - DNA, 4150 bp, Macaca Mulatta
  misc_feature (1)...(4150): n = A,T,C or G
aaaaggctggggtgtcctgaaccgtgcctgcttccccagccctgccggtttccagaggaggcgcctgagaaggagaaacgaatcgctgctgctcttctaaaagccggttcnnnnnnnnnnnnnnnnnnnnnnnnnnnnnnnnnnnnnnnnnnnnnnnnnnnnnnnnnnnnnnnnnnnnnnnnnnnnnnnnnnnnnnnnnnnnnnnnnnnnnnnnnnnnnnnnnnnnnnnnnnnnnnnnnnnnnnnnnnnnnnnnnnnnnnnnnnnnnnnnnnnnnnnnnnnnnnnnnnnnnnnnnnnnnnnnnnnnnnnnnnnnnnnnnnnnnnnnnnnnnnnnnnnnnnnnnnnnnnnnnnnnnnnnnnnnnnnnnnnnnnnnnnnnnnnnnnnnnnnnnnnnnnnnnnnnnnnnnnnnnnnnnnnnnnnnnnnnnnnnnnnnnnnnnnnnnnnnnnnnnnnnnnnnnnnnnnnnnnnnnnnnnnnnnnnnnnnnnnnnnnnnnnnnnnnnnnnnnnnnnnnnnnnnnnnnnnnnnnnnnnnnnnnnnnnnnnnnnnnnnnnnnnnnnnnnnnnnnnnnnnnnnnnnnnnnnnnnnnnnnnnnnnnnnnnnnnnnnnnnnnnnnnnnnnnnnnnnnnnnnnnnnnnnnnnnnnnnnnnnnnnnnnnnnnnnnnnnnnnnnnnnnnnnnnnnnnnnnnnnnnnnnnnnnnnnnnnnnnnnnnnnnnnnnnnnnnnnnnnnnnnnnnnnnnnnnnnnnnnnnnnnnnnnnnnnnnnnnnnnnnnnnnnnnnnnnnnnnnnnnnnnnnnnnnnnnnnnnnnnnnnnnnnnnnnnnnnnnnnnnnnnnnnnnnnnnnnnnnnnnnnnnnnnnnnnnnnnnnnnnnnnnnnnnnnnnnnnnnnnnnnnnnnnnnnnnnnnnnnnnnnnnnnnnnnnnnnnnnnnnnnnnnnnnnnnnnnnnnnnnnnnnnnnnnnnnnnnnnnnnnnnnnnnnnnnnnnnnnnnnnnnnnnnnnnnnnnnnnnnnnnnnnnnnnnnnnnnnnnnnnnnnnnnnnnnnnnnnnnnnnnnnnnnnnnnnnnnnnnnnnnnnnnnnnnnnnnnnnnnnnnnnnnnnnnnnnnnnnnnnnnnnnnnnnnnnnnnnnnnnnnnnnnnnnnnnnnnnnnnnnnnnnnnnnnnnnnnnnnnnnnnnnnnnnnnnnnnnnnnnnnnnnnnnnnnnnnnnnnnnnnnnnnnnnnnnnnnnnnnnnnnnnnnnnnnnnnnnnnnnnnnnnnnnnnnnnnnnnnnnnnnnnnnnnnnnnnnnnnnnnnnnnnnnnnnnnnnnnnnnnnnnnnnnnnnnnnnnnnnnnnnnnnnnnnnnnnnnnnnnnnnnnnnnnnnnnnnnnnnnnnnnnnnnnnnnnnnnnnnnnnnnnnnnnnnnnnnnnnnnnnnnnnnnnnnnnnnnnnnnnnnnnnnnnnnnnnnnnnnnnnnnnnnnnnnnnnnnnnnnnnnnnnnnnnnnnnnnnnnnnnnnnnnnnnnnnnnnnnnnnnnnnnnnnnnnnnnnnnnnnnnnnnnnnnnnnnnnnnnnnnnnnnnnnnnnnnnnnnnnnnnnnnnnnnnnnnnnnnnnnnnnnnnnnnnnnnnnnnnnnnnnnnnnnnnnnnnnnnnnnnnnnnnnnnnnnnnnnnnnnnnnnnnnnnnnnnnnnnnnnnnnnnnnnnnnnnnnnnnnnnnnnnnnnnnnnnnnnnnnnnnnnnnnnnnnnnnnnnnnnnnnnnnnnnnnnnnnnnnnnnnnnnnnnnnnnnnnnnnnnnnnnnnnnnnnnnnnnnnnnnnnnnnnnnnnnnnnnnnnnnnnnnnnnnnnnnnnnnnnnnnnnnnnnnnnnnnnnnnnnnnnnnnnnnnnnnnnnnnnnnnnnnnnnnnnnnnnnnnnnnnnnnnnnnnnnnnnnnnnnnnnnnnnnnnnnnnnnnnnnnnnnnnnnnnnnnnnnnnnnnnnnnnnnnnnnnnnnnnnnnnnnnnnnnnnnnnnnnnnnnnnnnnnnnnnnnnnnnnnnnnnnnnnnnnnnnnnnnnnnnnnnnnnnnnnnnnnnnnnnnnnnnnnnnnnnnnnnnnnnnnnnnnnnnnnnnnnnnnnnnnnnnnnnnnnnnnnnnnnnnnnnnnnnnnnnnnnnnnnnnnnnnnnnnnnnnnnnnnnnnnnnnnnnnnnnnnnnnnnnnnnnnnnnnnnnnnnnnnnnnnnnnnnnnnnnnnnnnnnnnnnnnnnnnnnnnnnnnnnnnnnnnnnnnnnnnnnnnnnnnnnnnnnnnnnnnnnnnnnnnnnnnnnnnnnnnnnnnnnnnnnnnnnnnnnnnnnnnnnnnnnnnnnnnnnnnnnnnnnnnnnnnnnnnnnnnnnnnnnnnnnnnnnnnnnnnnnnnnnnnnnnnnnnnnnnnnnnnnnnnnnnnnnnnnnnnnnnnnnnnnnnnnnnnnnnnnnnnnnnnnnnnnnnnnnnnnnnnnnnnnnnnnnnnnnnnnnnnnnnnnnnnnnnnnnnnnnnnnnnnnnnnnnnnnnnnnnnnnnnnnnnnnnnnnnnnnnnnnnnnnnnnnnnnnnnnnnnnnnnnnnnnnnnnnnnnnnnnnnnnnnnnnnnnnnnnnnnnnnnnnnnnnnnnnnnnnnnnnnnnnnnnnnnnnnnnnnnnnnnnnnnnnnnnnnnnnnnnnnnnnnnnnnnnnnnnnnnnnnnnnnnnnnnnnnnnnnnnnnnnnnnnnnnnnnnnnnnnnnnnnnnnnnnnnnnnnnnnnnnnnnnnnnnnnnnnnnnnnnnnnnnnnnnnnnnnnnnnnnnnnnnnnnnnnnnnnnnnnnnnnnnnnnnnnnnnnnnnnnnnnnnnnnnnnnnnnnnnnnnnnnnnnnnnnnnnnnnnnnnnnnnnnnnnnnnnnnnnnnnnnnnnnnnnnnnnnnnnnnnnnnnnnnnnnnnnnnnnnnnnnnnnnnnnnnnnnnnnnnnnnnnnnnnnnnnnnnnnnnnnnnnnnnnnnnnnnnnnnnnnnnnnnnnnnnnnnnnnnnnnnnnnnnnnnnnnnnnnnnnnnnnnnnnnnnnnnnnnnnnnnnnnnnnnnnnnnnnnnnnnnnnnnnnnnnnnnnnnnnnnnnnnnnnnnnnnnnnnnnnnnnnnnnnnnnnnnnnnnnnnnnnnnnnnnnnnnnnnnnnnnnnnnnnnnnnnnnnnnnnnnnnnnnnnnnnnnnnnnnnnnnnnnnnnnnnnnnnnnnnnnnnnnnnnnnnnnnnnnnnnnnnnnnnnnnnnnnnnnnnnnnnnnnnnnnnnnnnnnnnnnnnnnnnnnnnnnnnnnnnnnnnnnnnnnnnnnnnnnnnnnnnnnnnnnnnnnnnnnnnnnnnnnnnnnnnnnnnnnnnnnnnnnnnnnnnnnnnnnnnnnnnnnnnnnnnnnnnnnnnnnnnnnnnnnnnnnnnnnnnnnnnnnnnnnnnnnnnnnnnnnnnnnnnnnnnnnnnnnnnnnnnnnnnnnnnnnnnnnnnnnnnnnnnnnnnnnnnnnnnnnnnnnnnnnnnnnnnnnnnnnnnnnnnnnnnnnnnnnnnnnnnnnnnnnnnnnnnnnnnnnnnnnnnnnnnnnnnnnnnnnnnnnnngagacggagtctctctctatcgcccagactggcgtgcagtgctacaatcacaatctcggctcactgcaagctctgtcttccgggttcaagccatctcctcccccagccttccgagtagctgggattacaggcgcctgccaccatgccaggctgatttttgtatttttagtaaacatggggtttcaccatgttggccaggctggtctcaactcgtgacctcaggtgatccacctgcctcagcctcccaaagtgctgtgattacaggcgtgagccacgcgcccggccagtacttcatatgtttaaagaatgagtaaaagaaagcaattactactgctaaatgtgggaaataatagactagacctgtactgtctaatatatggtagtcactagcaacctgttgagcacttgaaattgagttattgagcactgaaatgtggctagtccaaattcaaatggtggtaaatgtgaaacacaagattctaaagacttagttgtttttaaaaagttaagtatctcagtttttcatattgagtacatattgaaataatattttagatatattggttcaaataaaatacattaaaatgaat

SEQ ID NO: 37554 - DNA, 723 bp, Macaca Mulatta
  misc_feature (1)...(723): n = A,T,C or G
ggtggggtgggatgaagagtgagtggggtaaggggttcatttggatggaagggtcataaggacaccagccgtttgaagatctgaggacagcaggtgcagagatcccgaggcaggaaataagtatggtatgtctgaaaaataggagtttgttgggctggagtgcagtgagtgagaagagagttgggtatgtggtcagagaagtgggtctgagctgggtcatgtagggtctcatgtgccaggacaaaatgagcttgtttcttactttaagtgccactggggagtgtatatagtagaaataacgttggttatgtttttaaaggattgttctgctgctgcatagagaggtggtcttgaaggacaagagtggagacaactggatcagctaggaggctctggtggcaatttaaactgcagatgaggtaacttggaccaaagagcagcagtggagtcaaggaaagtgctcagaaatcaagattcaaggcctggtgtggtannnnnnnnnnnnnnnnnnnnnnnnctgggaagccaaggtaggtggatcatctgaggtcagggnnnnnnnnnnnnnnnnnnnnnnncagtgaaaacccatctcttactaaaatgccaaaaattacctgggcatgttggtggatgttctgtaaatccccgcctaccttgggaagggctgaaggcacgaaaaaattgtcttggaactttaataaaggccctaaattttgccat

SEQ ID NO: 37555 - DNA, 602 bp, Macaca Mulatta
  misc_feature (1)...(602): n = A,T,C or G
gggggtactcatgggttagagtcccaagctttgagttttaactgcaaaatccattgtctccccaaatcaaggaagtttttttgttttttgtgttttcccttctggccatttttcttgaagacccttgaatccagctctaaacagacaaggacaggcagaaatttgtgtccaaagagagccaggcacattcattttatcactgtaatatctgcatatgaaataaaaggtcctgggttaaaaataataacagtccaacaaaggtttcatgctgcctagtaagactgcatgatgagcattgtccaggccttggcaaaagcagggccatagaaggaggtttactatggagacaaagagccctccagagacctgggcaggctgagccggcagtgctggtgtcagggggccaagtcctggttggggtctgaattcttgggtgtctggttcttctgacactagttaacccctgtgaccttgggcaatccatctccctgggtttcaagacctttggaaaaagaggtgattcaatcagaatagttttgcccaactcctataatacctgccaactcccnnnnnnnnnnnnnnnnnnnnnnnnnnnnnnnnnn

SEQ ID NO: 37556 - DNA, 486 bp, Macaca Mulatta
  misc_feature (1)...(486): n = A,T,C or G
nnnnnnnnnnnnnnnnnnnnnnnnnnnnnnnnnnnnnnnnnnnnnnnnnnnnnnnnnnctnnnnnnnnnnnnnnnnnnnnncnnnnnnnnnnnnnnnnnnnnnnnnnnnnnnnnnnnnnnnnnnnnnnnnnnnnnnntnnnnnnnnnnnnnnnnnnnnnnnnnnnnggttaactttaaacaaactttagacaaattccatacacacagaaatagaattttgtacatgtgattgcatgggaagggtggcttgctttatggaggagttccctctggtaatcatttagaagtctttctgttctctgcagtgggaaagtataccttaaggttacctagatggcttcaggtcttcaagaaaatagttaaaaagaaagaagactctagcgcatcctagttattatagttattaagaagcttttggctcctgcctctgaattgcacagcagttcttcagtgcagtgtaccatgagcatttatgtcttggggct

SEQ ID NO: 37557 - DNA, 198 bp, Macaca Mulatta
  misc_feature (1)...(198): n = A,T,C or G
tggcgagttgctccttcactcgcgaccaagcgacaagaagactaagaggtnnnnnnnnnnnnnnnnnnnnnnnnnnnnnnnnnnggtgaccaccccgcttctttcctctttaaccccgaccgcactcattgggaccgggtcgtctggtccgggagccatgtggctctccacggccactggctcccgggcagactccga

SEQ ID NO: 37558 - DNA, 684 bp, Macaca Mulatta
gctatactacttgacacgtcaggacttgggatagtaatagtgtctagtattactttaactgaagtgactaaatcagttctttgatatttcttccaaaacttaaactcagcattaaggtcagcatcttccctttactaatgccggttaatcagcagcacaacaacatccagtgttgacactcacagatctgaagcagcagtatccagtagaactttctatggtgatggaattatcttatgtctgcattttctaatgctgtagtcattagccacatgctagcaagtacttgaagtgtagctattatgactgaggaactaagttttaaattttatttaaatagccatgtggtgttaattgtattgggcagatttagagcctcattctctagatgcttctatgcttcttgagctccatttttgaagcttttacaaagatatattacgatgtgtcagagatacctgtcttgcccagggaagagagcactgaaagtgaaactaggtgtctgggagtttaggtcaaggaggatggagtggagacattgaggtttaggaagaagaacacactatgcgtctcctgctcctgatgataataaaatggttaaaacccatctgtcttcaagtcttacttaaaaagtaaaaaattgtttcctatttctaacatatgtccttaatgtcacatttcctt

SEQ ID NO: 37559 - DNA, 569 bp, Macaca Mulatta
aaactgtttttattatcattaaaaattgcatatctgctttgtaattttgttgaacaggatggtctggacaccactgcgagaaggaacttgagtgcgttcccaactcatgtgttcatcaactgtgcatggaaaatgaacctggctcgacatgtttatgcacacctggatttatggtaaagattattggtggttgtggttgtaataattttttattctctttgatatgcagtaaacaatagaaaattacatggtgaaaaataaggttggagtagttaatcttcagtgcatctctccttctctgtctgtacatgctacgcttttctcagcaatcctcgttcccttcttgtccatgcatcacttgcaccctcagtcctttctttcaggagaaaaatattctgataaattgatccacacaaaggtgcaagtgacttaatatattggcctttaatgtcttaatgcatttggaaagaggatgccagtggaggaattacttaatactgtcagggtcttggcagaacttttattttgcccaaggacatagtactacttccagggttgggctcagcata

SEQ ID NO: 37560 - DNA, 665 bp, Macaca Mulatta
  misc_feature (1)...(665): n = A,T,C or G
ggggaaaatgagaatttcagctgaaccaaggctaggtcacttttaacaattcgtgatgacccttttctctgcaacagagaagctcaggagtctggcactagatccagcccaccatttgctagattgggccaaatgtattttggattgtttgagaaaatgtccctaaaatgtgatattatggccatcctacattgaagatgaactaagttttataataaagaaaacaacacgtatataacccaattatctgactgtcctgcataccgcagctccatacagaatttcctatgacttatgcacaaatctcctgcagttctggggtagaatataataaattaatgtccatgtatttagagccaattaaagctggaaaacacggcataacttgggtcaggtttctagcaaggatntctgtctctgncttttatttttatctccttccttctttccttccttcctatttctttctggggcagtattattggctcttgaaagctatggttgaatcttcaagaatacctgggtttaagaagtttccaattaaatacttttggccagccaaaagaccaaaaaacctgggcaatttggccctggaattttaagggccgggggttttttgggaaaaaaggaggaaatttttttatttaaattttaaagcctcttac

SEQ ID NO: 37561 - DNA, 446 bp, Macaca Mulatta
aagtacaaatactgccactggctgggagtttccttgttcattttcctgcacggggcaccttcgatcacacctgttgtctgcatgaatcaggtcttctctatttctcagaggtacgtcatccgttctagagagttctgtctcccatatgaagtgcttcctacagaaagaatgtacagctcttcatgttgccacagcaccaagacacactaaacccacacagcacattccacagggcatttcgagtggctggaggccacggcaccagagcccagggtggcacctgcacactctcatgtgggaagtgggcatgaccagaggcagaggccagacttggcagcacgtgctgaggctgcagagccctgaggaggctgctaggccctgacactgggtggcccagacaatccagcctgacaaggaggtgcattccacccgtgttggagatggat

SEQ ID NO: 37562 - DNA, 693 bp, Macaca Mulatta
  misc_feature (1)...(693): n = A,T,C or G
gccttcctggntgggtaccccagtaggaaatgagtgggtggggtgctagtggctggtggtagggttggggagggggtgcagcaggcagccctggcctgcaatttgaataactaagcacatgaatgacaagtgccttgacctcagacctctccttgaagggttctcctgggggcaggggacagaggtattgttagagaagtcagggaaagtatggcgttatgagagaaaggggaaagagagaaaagaaaccagcatttgcttaaggcttgccatctaacacactacctgtagttgggtgctagaggcttcatgtggattacctcattttaatctttttatttgtgggttaagggttggcatctccggtttctggagacaaggagaaggtaaatagtttgctccatgtcacaccagggtttttctaactccgagtctcttgctatgctacgtgacccacactcccacccgtacctaccctttaaagacatcggggcttctcttctgcattcaggcttcctgacagtagccgtgaaaagaacatctctggatcctgagagcaacgaggccaggccttttatggtaaaagggccaattcagtaaaagtaaacatgtttatgggctgaatcttttttccactgaaagttaaaataactttaccgaggtcctgagggaaagtagatgttcttacaactt

SEQ ID NO: 37563 - DNA, 874 bp, Macaca Mulatta
  misc_feature (1)...(874): n = A,T,C or G
nnnnnnnnnnnnnnnnnnnnnnnnnnnnnnnnnnnnnnnnnnnnnnnnnnnnnnnnnnnnnnnnnnnnnncgatatcgcagttttngagaatccgactgtcagtatatgtagtcgatagtccgtgaacacgtgtagagtcgtatctcgccgatcgtgcgatctgagggggcatcgattgaatgcttgtcgtgtgttttgcagtttggtgggtgataagctctaaaaagagtggtgtactctttctcgtagcaggagaatatttaaggggacaataattatctttctgttctcaaggagttccaagcatttgtctagcttgaagtcatcttgagtccattacctctctgagaggaaatttatttgataactttttcagtttcaaggcaaggtctccnnnnnnnnnnnnnnnnnnnntgagactccnnnnnnnnnnnnnnnnnnnnnnnnnnnctataattttgtttatggaatcttggaaagttttatacatttctttaggttctctaccttttatgttaggtttattcctaactactttatgtatttttggttcctcatatatgggattttataaaattctgtgagtttcagtgaactgttttcaaatgatcattctttgtcttcaaatgatatagtttctttttctgtctttgtaataattttatctcnnnnnnnnnnnnnnnnnnnnnnattcaacgttagtctcatcctggattttaatgggactgccactgttagctcacagttaagttgaaagtttatcattgcctgttaaagtaggtatttgtggtgacattaaacatctagccagcatgaatgttnnnnnnnnnnnnnnnnnnnnnnnnnnnatccaagggtaattacatctctccc

SEQ ID NO: 37564 - DNA, 735 bp, Macaca Mulatta
  misc_feature (1)...(735): n = A,T,C or G
ggggggatattatgcctctaaaattgtggaccttgtgtgactctatcactcagacattagagttacttgagactgattcagagtgtggtaatgtagccacaggaggaaagatatctgaggatttnnnnnnnnnnnnnnnnnnnnnnntctgaaatggagcccatttgtgccaggataacagaggatgggggggtagcaaaagggggagaagagaaaaagccagctcttccttcttctaagggaaattctgacatgcagtgtattatggaaatgcttcaacaaatattacagatatattcttctaattcacctttgcgagctttccctgtttcttttccttctgccctgttaaaagaggattttccagtgcctccaaccccccagcttccttatctttacctttgtttggcgaagttgaagccctgttcacatcagacatacttaaatttatactaaacacctgtttaatatgttaaaaccagtgtatatgtatatcttattgtttgttaaaatattatgagtatttctatagtcaataaataaacacattaatattaactattaatattaatatagtattaataaccccagctaggaaattgttatgttataggggtgcataggttccacccatttacactccaaacaggaagttgaatattcgagctgcttaatacagttaactaccctccttgatatttttcgggggttttttaaaattttaaaccattgggc

SEQ ID NO: 37565 - DNA, 1177 bp, Macaca Mulatta
gggattcaaggatactttttgatttaatggaactggctatttgagaagtgtttgaaacttttgccatggctgcaggacttacattcttttttgggaggacggtggggagacagggagtggtaaagggaaaaggttaaaaatccacctgtggttgtatattcttctattctatcactctgttacctagactgtgagaggcttttgccttcagtcagattaaaaagagcagggcctaacattgagtgatagcacctgctttgataaataggttttctcactcttctttttttccttcttttatccctcactccctcccctaaaccctgcttcagcacaatggactaattctagcattccgatcataaggccctccattttcctaatgtgtttcaaggaatctttttaggaaaaatatccagattatttatccactttttttagtatctactaacaactcctttttttctctagagagttatgaaggaacaggttgtccttgtctggagtcaagctaaacacatgatttgttttatcagcagctggagcagaagttgaaaatgtctttctgtgagacagtaatttgctactgaagctttatagcttgtttgcactgattactccaggatccaaaaacttggtgaaagtcactgaaacgctcaaggcaaattactttacagccctgagtgtcttatcaccatagtttgcatactgaatatgaatccagttggtgtgtgacgtaggaaatcctgtagttgttttcttgaactgaaatatttgactcaaaataattaagactcattgtcatttttcatcttggcattattgtggacaagttgacatattaaatctctttgctttctggtaagcttagcttttaaaatgcattttcccttgtcctgtctttaactagatatgcatgcttatatttatagtgggtttcacagactataaaattgaatgtatgaaatttttatttatatcagtgcttttaataatgaagatatttttggagtaatggtgctgtcttgtagcgagttattaatcatagtaagatttttttctcttcatttgcttttttgtttcatattaacaattttttgtttaacacggacacaactctctgacagtctttccaaatatttaaatcatttgaatatgtatgctgtgatctgaacac

SEQ ID NO: 37566 - DNA, 1430 bp, Macaca Mulatta
  misc_feature (1)...(1430): n = A,T,C or G
aggtagaaggtccaccgtgtaaaaaattgtctctcagcaaattgattgactgtgacagttctgagatctatgctaatcattctagttcctttatagnnnnnnnnnnnnnnnnnnnnnnnnnnnnnnnnnnnnnnnnnnnnnnnnnnnnnnnnnnnnnnnnnnnnnnnnnnnnnnnnnnnnnnnnnnnnnnnnnnnnnnnnnnnnnnnnnnnnnnnnnnnnnnnnnnnnnnnnnnnnnnnnnnnnnnnnnnnnnnnnnnnnnnnnnnnnnnnnnnnnnnnnnnnnnnnnnnnnnnnnnnnnnnnnnnnnnnnnnnnnnnnnnnnnnnnnnnnnnnnnnnnnnnnnnnnnnnnnnnnnnnnnnnnnnnnnnnnnnnnnnnnnnnnnnnnnnnnnnnnnnnnnnnnnnnnnnnnnnnnnnnnnnnnnnnnnnnnnnnnnnnnnnnnnnnnnnnnnnnnnnnnnnnnnnnnnnnnnnnnnnnnnnnnnnnnnnnnnnnnnnnnnnnnnnnnnnnnnnnnnnnnnnnnnnnnnnnnnnnnnnnnnnnnnnnnnnnnnnnnnnnnnnnnnnnnnnnnnnnnnnnnnnnnnnnnnnnnnnnnnnnnnncaggtcgcggttgatgtactgcagagaatgctgatttnttgcacttgacgctttggctgctggagtacaagaggagtcctccactcacaagaccgtgaggtgctgnnnnnnnnnnnnnnnnnnnnnnnnnnnnnnnnnnnnnnnnnnnnnnnnnnnnnnnnnnnnnnnnnnnnnnnnnnnnnnnnnnnnnnnnnnnnnnnnnnnnnnnnnnnnnnnnnnnnnnnnnnnnnnnnnnnnnnnnnnnnnnnnnnnnnnnnnnnnnnnnnnnnnnnnnnnnnnnnnnnnnnnnnnnnnnnnnnnnnnnnnnnnnnnnnnnnnnnnnnnnnnnnnnnnnnnnnnnnnnnnnnnnnnnnnnnnnnnnnnnnnnnnnnnnnnnnnnnnnnnnnnnnnnnnnnnnnnnnnnnnnnnnnnnnnnnnnnnnnnnnnnnnnnnnnnnnnnnnnnnnnnnnnnnnnnnnnnnnnnnnnnnnnnnnnnnnnnnnnnnnnnnnnnnnnnnnnnnnnnnnnnnnnnnnnnnnnnnnnnnnnnnnnnnnnnnnnnnnnnnnnnnnnnnnnnnnnnnnnnnnnnnnnnnnnnnnnnnnnnnnnnnnnnnnnnnnnnnnnnnnnnnnnnnnnnnnnnnnnnnnnnnnnnnnnnnnnnnnnnnnnnnnnnnnnnnnnnnnnnnnnnnnnnnnnnnnnnnnnnnnnnncaggccttgtcaaccttcttattctttaattagtttgctccttattttgcatccctcacaagtaactgtttaactgctcaattaaatgtgttgtaccatttggtacttttagtggaacagtgaataaagcactgtgtgatt

SEQ ID NO: 37567 - DNA, 633 bp, Macaca Mulatta
cactttgataataaatacgaatatgtagacataccaaactgcaaataggattatttttgaaaactatatggtgaaacatgtggtgatatgatagactcttacgatttttctgtttgctgggattgggtctgctttttgtctatgtgtaaggcattttaatgattgtgaatataatagattccttaaaataagaaaattaaaaatcagaaacttcccttggagtagagacatttcagttgcaagtataaagatttttaaatatatagcactaagttatataattcatatgtgtgtggttttgtattaatactcaataaaaacaaatttcattttctaccattattgtatgaatgtaattttattttttaataaccacactcatagatggttttgattgttccagttgagtgattgtgtatgtatgcataggaatgtgttgttcagatgtactttgtatttccaataatcagaaatcttacctttatgtataaaaacccattatgtaatgtaaaatgtataatattgtacataatattcagaatacaattatttgggtaaattaggttgtatttttaatgtcccagttgcagtatttaattatttgaaccatactgaaagttggtagtagtcaat

SEQ ID NO: 37568 - DNA, 573 bp, Macaca Mulatta
cgtgtaggcaccatggctttagaaccataaggaagacatttcccagtacagattctgtctttccacttgtaacagttagtgaggcactgacattgcttttttccaccttaacaagacagtttacattggttaaatagcaaaacacccagagcagttcagcctgaggccatagtgccctgcgacagcactgggccctgcttttctttctgctttgtgctgcgtggctcttcttcacgccagtgttgggtaatgcacagcctgagaggtgtggcctgataaaccctgaaattgaaaaaagtatgcagatttgacccaacactcctggaagtgtctggatacagctcactgagaatgtggaggtgaaagtgcctgcaaaatgttgacagtactctcaatctattgatctcctcagttacatccagaaccttaaagctgcacagttgtcatgctccgcctgcagtctcaggcagggcgcatcaggggctgcactagtagctcccaggaggacttacctgtgggtcaccgtaatagccaggtgtgtccactcagaggggacacgatcctgcagcaatc

SEQ ID NO: 37569 - DNA, 498 bp, Macaca Mulatta
gggtgggaacacttttttcaggtcctctagcaccaggagccgcgtgcctggtccaaagtactgcggttgtacgtactcccccaggtcgtcactgctggcacagaaatacacagatgtttgggagcgggtagctgactccagagtgaggaggaaatcctctgtctttgatctggagacaacatagccatcggggacttctcctttatctgtgataccagcacctgctgagtaatggatcagcctcagcccatgtcccagatcttgtcggtaccagaacatatagctgtggctccaagtctggtgacacgtcaaggtcacctgccttcctgtctctgtgaccttgtatctcgggctctgggtgattccggcatccctgtgtcctgcccacagcagacaaagcgccacatagaagaagagcctggtgcccatttcagctccagggcaggatcttgtgtttggtagccctgctgtgggcaaattgaagttgggctctaagtc

SEQ ID NO: 37570 - DNA, 843 bp, Macaca Mulatta
  misc_feature (1)...(843): n = A,T,C or G
gnnnnnnnnnnnnnnnnnnnnnnnnnnnnnnnnnnnnnnnnnnnnnnnnnnnnnnnnnnnnnnnnnnnnnnnnnnnnnnnnnnnnnnnnnnnnnnnnnnnnnnnnnnnnnnnnnnnnnnnnnnnnnnnnnnnnnnnnnnnnnnnnnnnnnnnnnnnnnnnnnnnnnnnnnnnnnnnnnnnnnnnnnnnnnnnnnnnnnnnnnnnnnnnnnnnnnnnnnnnnnnnnnnnnnnnnnnnnnnnnnnnnnnnnnnnnnnnnnnnnnnnnnnnnnnnnnnnnnnnnnnnnnnnnnnnnnnnnnnnnnnnnnnnnnnnnnnnnnnnnnnnnnnnnnnnnnnnnnnnnnnnnnnnnnnnnnnnnnnnnnnnnnnnnnnnnnnnnnnnnnnnnnnnnnnnnnnnnnnnnnnnnnnnnnnnnnnnnnnnnnnnnnnnnnnnnnnnnnnnnnnnnnnnnnnnnnnnnnnnnnnnnnnnnnnnnnnnnnnnnnnnnnnnnnnnnnnnnnnnnnnnnnnnnnnnnnnnnnnnnnnnnnnnnnnnnnnnnnnnnnnnnnnnnnnnnnnnnnnnnnnnnagcagtaaattttaataaatcttacaggaatctgaaaaaaccctttgcctttcaaaacgtaaaggtacttactaattcgaacaaaccccctacctaaaccctaaagtggacttaaaaggggttccccccccgccctttattaacacaattcgaaagaaaaccaccccaaactaaattttattcgatgtagttattgtcgggtcaattgtttgggccggcccccgggccccttctaaaagaactttttctaagaaaaaatttctttgggggccacagcg

SEQ ID NO: 37571 - DNA, 493 bp, Macaca Mulatta
atggcttttgagaatcatttcaggggaaatggagttatttcttcagcatcaaatatgcatctacattatttatgtttgtgtccaaaattgattcctaaaccttgaattgttaatatctagttaaagtatttagtaaatattctgttgatggtagtgagtaactttaagttctttctttatgctttaagtatgaggtatgaccactttctttaagtggttaaatctggaaaataaaaacctgcccattttgtctttccctttaatataatgcttttaatataaaagtaatttgaacactttatgaaaagtttgttaaatatagaaaagagggaatgttatccaaaaccccgaattgtaacaaaatcactactgccttctcagtgtatatccttctgatcttttttcaaaacgtacaaggtgtgatcttgtgtagtaaaaacctcgctgactttatgcctgaattgcctagaatagtattttacctgacaaggta

SEQ ID NO: 37572 - DNA, 755 bp, Macaca Mulatta
  misc_feature (1)...(755): n = A,T,C or G
ggcaaagggattaatattgatatgaacacgccattctcttgtggacacacctgttaaacactggatgtacccgagtgagaaaacagctttttgaaaaatatgtaaatcagaggtatatttaaagtcatcatttaagaagcttcatttttttatgtatgttttaataattaaaatgcaaatttaaaggtttttgaatatgatggtttttgttgatcttatgacactgggaaacatttagtacactgtattgtctttattgtgagtggacaagaaagaattatatttgagatatagttccataaagatgtaacattgtaccaaataagaagattgtcattggattttatacagaaagtgctaatacaattctagagagagtacggagtttcagccaaaagtttaaaaacaatgtggatgttttaatttggcactaagttatcaaattcaattttggataagtcaataagagaactcatgtttttcttgataaactatatttactaccacacaccaaataaatagcagaaataactaaattaagtaatgcaaattgaaccttgatggacaagcctgcagtgctagatctgcaaaagcaacgtggaagtcagtaagttctgcattcaaacgctccaccccnggagctataccccttggtggtggaagtcagtcagtttctgtatgttcactggtagtggcacacaaatggcgtttggggcccttaatgaaatggatagnttttattgggaggacaatca

SEQ ID NO: 37573 - DNA, 677 bp, Macaca Mulatta
aaagctaaaggtgaggaggtccagccatttgcaggcaaacccacccccattcccttcggcccgggtcaccttctggataagctgcagctctacttgccccacgtggccacagaccgggagcctggcgctcttcagttgtgttcaacaccagccccatgtctacccagccacctaccaccctgaccaatggtggccccttaggaacaagaactacatgacccgcgcttattatgatgccgccaaggtgtactacatcaactagagcgcgccaggtgttgccgggcccagccttcctgggccaggagccggtgcagccagcggcccagagcccagacacaagaggagtgtcatagagtcagactaaagaaattctttcaaagaggggtagccggggcccagttccctctagactccaagtgtccagtgtctcagagggtagatgtgtctaagaaaggacatacagtttttgactatttccctcccctgacctctgccctttctaaataaagcaggttggagtttttctcacgtcacctgtgacccagctaatgtgatttcttgctcaggagctgtggccaagggggaaaacttgagcctgggggaatacaggcatattccctgggctattccagggatgactgcaggccaccttcagcctcttgtcctgggaccccagt

SEQ ID NO: 37574 - DNA, 203 bp, Macaca Mulatta
gctatttacaaatctgaccttgagtggctgagaggaataggatgggttcccattggctctgtagaggtcgagaaggtgaagagagctggagaaatcctgagtgacaggaagtatcgccagcctagagaccagctcaaattcacatgcattacagacactccggaaattgtcctcgcaaagaataatgccctgacaatgagcaa

SEQ ID NO: 37575 - DNA, 694 bp, Macaca Mulatta
  misc_feature (1)...(694): n = A,T,C or G
gggctacanngaatgagactggtctccaaaataatataaaataaataaataggaaaataggaagtaatattaatagcaatatgataatctcagtttgcattatagttttaagaggcccagcatggtggctcatgcctgtagtccctgcacttagggaggtcaaggtgggtggattgcttgcaccnnnnnnnnnnnnnnnnnnnnnnnnnnnttggcaaaacctcatctctacaaaaacaagtacaaaaattctccaggcacagtggcatgagcctatagtcccaggctactgnnnnnnnnnnnnnnnnnngattgcttgagcctcagaagtcnnnnnnnnnnnnnnnnnnngtggcaccactgcatttaagcctgggcaacagagtgagacnnnnnnnnnnnnnnnnnnnnnnnnnnnnnnnnnnnnnnnntaaaaaaattctgagacatgaacctaggcttaaagacaaccaattgaataagtcagatgcccgttgggaattagatgagacctattgtaaccatgaggcctgctttattttttgtatttgggtctcagcttcccagaggaatgtatccaggtacagtatgtagtattagcaatagcaccaacatttgtgaatagataatatagctcagcttttaccatctactatgccataactgggttgagttaaaatagagagtgagcaac

SEQ ID NO: 37576 - DNA, 311 bp, Macaca Mulatta
tcctggatgacgtgtcctcgatatatctgaccttcgggaaggagttcacagaagcggtgcattccaaacaggtggctcagcaggaagtagagagggccagatttccggtggaaaaggctgagcaacagaaaatggtggccatcatctctgctgagggcgactccaaggcagctgagctgattgccaactcactggccatcgcagggaatggtctgatcgagcaggaagctgccgaggacatcgagtaccagctctcacactcttgaaacatcacctatctgccggtggggcagtccgtgctcctccagctg

SEQ ID NO: 37577 - DNA, 822 bp, Macaca Mulatta
  misc_feature (1)...(822): n = A,T,C or G
ggtggtggtatatacagaggcagtgtacttcctgcttaaattttctttaaacctaaaatactaaaaaaataaagacttttaatgaaaaagacttttagcaaaacagaaattcaaggacaccttaagattattatacaagtaatgtaaagatgaaagtacagaagtgctcattgaaatatttagaagacctgttgaaaaactataaaacatcaaagaaaaaattgaagaaataaacaaaaagatatcctagtttgtggattgaagaattaacattgttagaatttccatattacccaaagtgatctacatattcaatgcaattcctacccaaattcgaatgcatttttcataggaataaagtaaacaatagtaagattcatatgggaccaccaaacactccaaatagcaaaagcaatcttgagcagaaagaacaaagctggaggcatcagtctacctgacttcaaaatctactacacgctgtaataatcaaaatagcatgattctggctaaaaactcccactgacaactgaactcaacgcgtctacaaatatannnnnnnnnnnnnnnnnnnnnnnnnnnnnnnnnnnnnnnnnnnnnnnnnnnnnnnnnnnnnnnnnnnnnnnnnnnnnnnnnnnnnnnnnnnnnnnnnnnnnnnnnnnnnnnnnnnnnnnnnnnnnnnnnnnnnnnnnnnnnnnnnnnnnnnnnnnnnnnnnnnnnnnnnnnnnnnnnnnnnnnnnnnnnnnnnnnnnnnnnnnnnnnnnnnnnnnnnnnnnnnnnnnnnnnnnnnnnnnnnnnnnnnnnnnnnnnnnnnnnnnnnnnnnn

SEQ ID NO: 37578 - DNA, 935 bp, Macaca Mulatta
  misc_feature (1)...(935): n = A,T,C or G
ggagaatcggaggacccgtgtaagagtgtttcgacttagcaagtgttgagcaccaggacctgctggcctctgtcctttttaggaagcaggcaaggggattgagatgaatatattggatttcgttttatagtttcctaggttttaacgaatgtatttggtacagaaagccctacttttaaagatatttccaatgtttaatgttttacctctaaatgtctctgaatgtgggttaccatacagtaacctcagaagttctaccagaggtctctggcatggcaggaatagagaaaggaaatcagctcaatactgtgagttaccacctgttactaattgagaatgtaattacgtggctgccttagttttgtgttccttacccaatccactgctcagtgcgaaacatctaagtgtaaaccaatttttttggggggtaaatgttttcttatctttttataattaaagaaacccttaaaaaaattacaagtgattccatcctgggtccagaaaaaaaaaaggttaactttttttgccggggggaaggaaaaaaccatttgaaattcttggtgggggcccnnnnnnnnnnnnnnnnnnnnnncacgggcnnnnnnnnnnnnnnnnnnnnnnaacgtccctttttttggggtggaaacttaacccccttttataaaccatattttctagaaaagaaatgttaagatgtgttctagaattttggggaagcacttagcttttaaagtttaataaaagcaaaaatggtaatagggtttaaaatttcaaaaagaggcccttaatctttgtgggaaaaccccgacaaatacgtttaacatgtttttagataagaagaccctccccgaagacttttagggtttcgccccaacttaattccctcatttggaggaaaatggaaaacttcttggtcccgcttacttagttacagg

SEQ ID NO: 37579 - DNA, 682 bp, Macaca Mulatta
cttggacttctaatctttaccagacgggcacacaaatcaatccatcagctcataaaggtgtgcttttttaacctctaaaacagatgggattggccagaagtgtctggcatgtcaaactgctaatcactgctgccctttgcacaaaataacccacttaagttgaggcatggttgcactgtcaccgacattagtctgtgggaaacccatttaactgtcacacactcctgccactcctgctctcccttaattaagcctaatgccttatgctttgaccttttgttctagcctattaaccctatctagtacaagttcaattatgttaagctaaaaactttgctgtaaaatattaaatgccaagctcaaaaaatcataagggacatcctcccagccctaagttctattcaccctgatactcaatacattcgaaagtaaaacctcactttcaaagtaacactgatactgaagagaggagacgttaaatgactcacccatttcatagcttttccatggcaaagcctcactaaaacctatctaatccctagttccaattctttaatctccatggtgtttctgattaatggttaaaccacccggaagtgtgttaaggacactaacattttcacaacaaattattatccttcaacatcctctagaatatgctatgcaaagaggtctaaaacaa

SEQ ID NO: 37580 - DNA, 496 bp, Macaca Mulatta
tgttgtccaggtttcattgccaagaatgtgttgtcccttataactgtttagttgttaaggatggaacttcaccctttgcttggttttaagtatgaatggaatgttatgattagacatagtagtagcagtggtcagacatggaaatgatggagagacaaaaatatacatgcgaaataaaactctgttttaataaagtagcacagtttctgttgacttaatacagaaaaacaaaggtggtgctgacatcaggtgattttgtaaaatttttaaaatttattttgcatgtcagaaatgcattttaatttttatttgaaaacttaaatttttagacgaatgactttgtgtagaaatttgatctagtttttatgcagaatacaacgatttccctcgttaatctttcatgtgaagggagttacaagcctaaaggaagacactttctgcacagaagtgggtgtcttgcgtgtgcagtgttagaaaccggtggtgtggttgctca

SEQ ID NO: 37581 - DNA, 3170 bp, Macaca Mulatta
  misc_feature (1)...(3170): n = A,T,C or G
cactatgtggcattgtgctttggagaagtgcgtatcagaacggacctacagaaagtttctggtctgtctgccccattctcccagagtgctggggtggatcaaaaggaactgtccttcagcccatccttattgaagatcttctgccaannnnnnnnnnnnnnnnnnnnnnnnnnnnnnnnnnnnnnnnnnnnnnnnnnnnnnnnnnnnnnnnnnnnnnnnnnnnnnnnnnnnnnnnnnnnnnnnnnnnnnnnnnnnnnnnnnnnnnnnnnnnnnnnnnnnnggaggacacctgcctagtggagctctcactggccctggacctgtgtctaaaggtgggcattagcagtcggcatctcacggctatcactgtggatgtgtggacactccatgctgagctgcatgagggcctcttccagagccaattgctgtgccagggcccaagcctagcatctaagcctgttccctgttcagnnnnnnnnnnnnnnnnnnnnnnnnnnnnnnnnnnnnnnnnnnnnnnnnnnnnnnnnnnnnnnnnnnnnnnnnnnnnnnnnnnnnnnnnnnnnnnnnnnnnnnnnnnnnnnnnnnnnnnnnnnnnnnnnnnnnnnnnnnnnnnnnnnnnnnnnnnnnnnnnnnnnnnnnnnnnnnnnnnnnnnnnnnnnnnnnnnnnnnnnnnnnnnnnnnnnnnnnnnnnnnnnnnnnnnnnnnnnnnnnnnnnnnnnnnnnnnnnnnnnnnnnnnnnnnnnnnnnnnnnnnnnnnnnnnnnnnnnnnnnnnnnnnnnnnnnnnnnnnnnnnnnnnnnnnnnnnnnnnnnnnnnnnnnnnnnnnnnnnnnnnnnnnnnnnnnnnnnnnnnnnnnnnnnnnnnnnnnnnnnnnnnnnnnnnnnnnnnnnnnnnnnnnnnnnnnnnnnnnnnnnnnnnnnnnnnnnnnnnnnnnnnnnnnnnnnnnnnnnnnnnnnnnnnnnnnnnnnnnnnnnnnnnnnnnnnnnnnnnnnnnnnnnnnnnnnnnnnnnnnnnnnnnnnnnnnnnnnnnnnnnnnnnnnnnnnnnnnnnnnnnnnnnnnnnnnnnnnnnnnnnnnnnnnnnnnnnnnnnnnnnnnnnnnnnnnnnnnnnnnnnnnnnnnnnnnnnnnnnnnnnnnnnnnnnnnnnnnnnnnnnnnnnnnnnnnnnnnnnnnnnnnnnnnnnnnnnnnnnnnnnnnnnnnnnnnnnnnnnnnnnnnnnnnnnnnnnnnnnnnnnnnnnnnnnnnnnnnnnnnnnnnnnnnnnnnnnnnnnnnnnnnnnnnnnnnnnnnnnnnnnnnnnnnnnnnnnnnnnnnnnnnnnnnnnnnnnnnnnnnnnnnnnnnnnnnnnnnnnnnnnnnnnnnnnnnnnnnnnnnnnnnnnnnnnnnnnnnnnnnnnnnnnnnnnnnnnnnnnnnnnnnnnnnnnnnnnnnnnnnnnnnnnnnnnnnnnnnnnnnnnnnnnnnnnnnnnnnnnnnnnnnnnnnnnnnnnnnnnnnnnnnnnnnnnnnnnnnnnnnnnnnnnnnnnnnnnnnnnnnnnnnnnnnnnnnnnnnnnnnnnnnnnnnnnnnnnnnnnnnnnnnnnnnnnnnnnnnnnnnnnnnnnnnnnnnnnnnnnnnnnnnnnnnnnnnnnnnnnnnnnnnnnnnnnnnnnnnnnnnnnnnnnnnnnnnnnnnnnnnnnnnnnnnnnnnnnnnnnnnnnnnnnnnnnnnnnnnnnnnnnnnnnnnnnnnnnnnnnnnnnnnnnnnnnnnnnnnnnnnnnnnnnnnnnnnnnnnnnnnnnnnnnnnnnnnnnnnnnnnnnnnnnnnnnnnnnnnnnnnnnnnnnnnnnnnnnnnnnnnnnnnnnnnnnnnnnnnnnnnnnnnnnnnnnnnnnnnnnnnnnnnnnnnnnnnnnnnnnnnnnnnnnnnnnnnnnnnnnnnnnnnnnnnnnnnnnnnnnnnnnnnnnnnnnnnnnnnnnnnnnnnnnnnnnnnnnnnnnnnnnnnnnnnnnnnnnnnnnnnnnnnnnnnnnnnnnnnnnnnnnnnnnnnnnnnnnnnnnnnnnnnnnnnnnnnnnnnnnnnnnnnnnnnnnnnnnnnnnnnnnnnnnnnnnnnnnnnnnnnnnnnnnnnnnnnnnnnnnnnnnnnnnnnnnnnnnnnnnnnnnnnnnnnnnnnnnnnnnnnnnnnnnnnnnnnnnnnnnnnnnnnnnnnnnnnnnnnnnnnnnnnnnnnnnnnnnnnnnnnnnnnnnnnnnnnnnnnnnnnnnnnnnnnnnnnnnnnnnnnnnnnnnnnnnnnnnnnnnnnnnnnnnnnnnnnnnnnnnnnnnnnnnnnnnnnnnnnnnnnnnnnnnnnnnnnnnnnnnnnnnnnnnnnnnnnnnnnnnnnnnnnnnnnnnnnnnnnnnnnnnnnnnnnnnnnnnnnnnnnnnnnnnnnnnnnnnnnnnnnnnnnnnnnnnnnnnnnnnnnnnnnnnnnnnnnnnnnnnnnnnnnnnnnnnnnnnnnnnnnnnnnnnnnnnnnnnnnnnnnnnnnnnnnnnnnnnnnnnnnnnnnnnnnnnnnnnnnnnnnnnnnnnnnnnnnnnnnnnnnnnnnnnnnnnnnnnnnnnnnnnnnnnnnnnnnnnnnnnnnnnnnnnnnnnnnnnnnnnnnnnnnnnnnnnnnnnnnnnnnnnnnnnnnnnnnnnnnnnnnnnnnnnnnnnnnnnnnnnnnnnnnnnnnnnnnnnnnnnnnnnnnnnnnnnnnnnnnnnnnnnnnnnnnnnnnnnnnnnnnnnnnnnnnnnnnnnnnnnnnnnnnnnnnnnnnnnnnnnnnnnnnnnnnnnnnnnnnnnnnnnnnnnnnnnnnnnnnnnnnnnnnnnnnnnnnnnnnnnnnnnnnnnnnnnnnnnnnnnnnnnnnnnnnnnnnnnnnnnnnnnnnnnnnnnnnnnnnnnnnnnnnnnnnnnnnnnnnnnnnnnnnnnnnnnnnnnnnnnnnnnnnnnnnnnnnnnnnnnnnnnnnnnnnnnnnnnnncggaaatattccagtacacagtggtatggggcccatgctgggatccagcctggacactgattggtcagtgtgtggacctcttgaccaagccctcagctgaccccagcccacctttgccctggtgggacaagagccgtcttttgttccatggagactggcacatggacattgaacaggcgaacctgcaccagctggccaccgag

SEQ ID NO: 37582 - DNA, 504 bp, Macaca Mulatta
gtttctgatgaagaatgaaaagaagagtagctgaggagctgatattggagcaagccaagaaagaatccgaagatcagaaacggctaaagcaagccaaagagcgggaccgagagagggctgctgccaatgagcagttaaccagagccatcctttgggagaggatatcaagcgaggaggaaggcgctaaggcgaagcacctggctaggcagctggaagagaaagaccgagtactaaagaagcaggatgcattctacaaagaacagctggctagactggaggagaggagctcagagttctacaaagtcaccactgaacaatatcagaaagctgctgaagaggtagaagcaaagttcaagcggtatgagtctcatccagtctgtgctgatctgcaggccgaaattcttcagtggtaccgtgagaacgcccaccagaccctcaaatgctcctctctggccacccagtatatgcactgtgtcaatcatgccaaacagagcatgcttgaga

SEQ ID NO: 37583 - DNA, 171 bp, Macaca Mulatta
ggtagatgatgaggtatgcctagagtagctcggggctccatagtctggccttcagctggtgtcttactcccctttgagacctccagctgcttgtcttccactccctgcatacttcactgatgtcttctcaaactgctggctctaaggggatattccagtgtccctctgaga

SEQ ID NO: 37584 - DNA, 719 bp, Macaca Mulatta
  misc_feature (1)...(719): n = A,T,C or G
tatttgaataatcttaaactttatgacagtgtgaagtagaaactgagtataggagatgcgctcatgaattttattccctggaaaaatgtcataaagtaatttaaagtattcaacgagtatgtgagtattgaatgattttaacaagaactctgagttcccagatacctataaccaaagaacaaattacttggaaataccttctactccagacctttctgtctatccccatatttaaagaaatgtacattgattgtcccttaccccatcaagagagtattctttgccaagataaacactaattagagaagtaattgtgtttatgtgtcagttggccacagtagtttatagatgttacctttccaggtgacatgtttacaatttaatgaagcctctggagatagtatgccttaatctaaaggaatggttctaatgattaaaatttgaggcattacagggaaacagcagtatactattttgtttattttcagcaaatgggcctttctgttcccttaaaatcaaacctcctaactatgggtttgctgacaaagggaaactagtttttaccttcttattatatggagatttaaatctgcagagatgaacataatttgctgtttggccagtgaannnnnnnnnnnnnnnnnnnnnnnnnnnnnnnnnnnnnnnnnnnnnnnnnnnnatgtccggccagaagaggctgattttctaggatcatatgc

SEQ ID NO: 37585 - DNA, 726 bp, Macaca Mulatta
  misc_feature (1)...(726): n = A,T,C or G
ggggggataatacaagtacctgggcatgaatttccattttgattcagatgggactggaaacaaccattcaattttatgaatcttactggacattatggatctactggaattattccagacgttatgccctttggttgtcattaccttgcaaatgtgtaagaggaaaatgtgctaatatggcagtgactgtaaaactggcacatggcatttattaatcctgaagaaaagtatgtgtactatttttcagtataaatataatgaacatgttagaactatttcttgaaaacctttttattacttttgcgtgaatttatttaacaaagatgttttgtcttctgtgtaagggaggttctagaggctagatatttaattgtaaatatgtgaggaaactcaatgcagaattcaggataaaaattttaaaagcacaggtgtttgggaattgaaatgttaagatacccagaacaacattaaatcgatgagtgaacttgtgacagtggtagcatttcaaatttcaaaagacttatccnnnnnnnnnnnnnnnnnnnnnnnnnnnnntattcagcaacaccaagttttataactattgtttgatttattaatactagaatatgtagtctcagccttaattttacatttacattattttgtatttttttattactatttttaaagggatttaagagaacatacattctcacatttaatggtactttctgggtagaaaat

SEQ ID NO: 37586 - DNA, 494 bp, Macaca Mulatta
atagaaaagagaacaatgtgttttattaggtgctcctttgatttattggagccagattagaccagataagaggagcttcaagggcaaatattatagagagagaattggccgtaacatctttatcccttagaagagaagatgaggaaaaagattgagtttaccctttaagcctatttattcccttctctcatactcacaagcattttttatcctctgtgaagaggttaagttacccacccaccaagtctttgctccagcagcttgtagtgacccgctgaaataaaacagaacatgggaggttttaggtgttgcaaaggacataaatacaagggcagtgattagcagccttctgttccgagctaataatgctgactttttcttggataaaatagagtccagggtcccacattagaggaaaagggccctcatttcaagggtggcctggcatgatactgtgttggtcagtcagttcaggaagggagatgggctggata

SEQ ID NO: 37587 - DNA, 415 bp, Macaca Mulatta
gtgcagtccatgaccaagatcagcgaccgctgtgctcccccagaggtctacgggtttgcaatgctagaagagccgaggaacccagacaagcgcaccctcacctgcctgatccagaacttctagcccaaggacatcttggtgcagttgctgcacaacaaggtgcagctcccagacgcctggcacagcatgacgcagccctgcaaaaccaagggctctggcttcttagtcttcagctgcctggaggtgaccagggccgaatgggaacagaaaaatgagttcatctgccctgtggtccatgagatggtgactggctcacagaccgtcaagaagctggtgtctgtaaatcccattaaatgtcctcctgccttcctccccactagggctttgtccagctgtgtggtaggaagagctggcc

SEQ ID NO: 37588 - DNA, 942 bp, Macaca Mulatta
  misc_feature (1)...(942): n = A,T,C or G
ccctcgtggtcccaccccatgggagcacncnacgcccgcgtccnccacaaacattttatagtgatgaatagataatangttcctttccnttaatctncttcttgttgttgggtgataggcagaatcacacctctacccgcggaggggggcggggtgagtccgnnnnnnnnnnnnnnnnnnnnnnnnaaaagacgatacttttcattatgtgtgtgtgtagtccgataaccccctctctgacctatctcctggtctgtgggggaggggaggggagagaaaaacatatatatttttgttgtggnttttnntttcntataggagagaattttttgtgtggagccgcacgggcgcctctctcattacaaaataaaaacacctcgcctttggggcgtggtttgttaaaaaaaaaacacccctctttttttctctannnnnnnnnnnnnnnnnnnnnnnnnnnnnnnnaattcccccggggggaaaaaaccccccccccatttttttccacggggggagagaagaaggttttttttgcgggggcccaaaccttttgggggacattttttagggagggaattttttgggcttttggggagttttacccccccgggtccccccctttttttccaccccaaaatggtttttttaagagttgcaagaacnnnnnnnnnnnnnnnnnnnnnnnccttggatttagcggcggagtacttccctcttgtacatgcctttttggaatacatgcgggatcgggaatacctgccaattcttctgacaaggacagggttgcggctgcaatggggcttccccttcttgggcttcttagccttgaggttaccctttttcaccttgccaccagcatcagccttcttggcttcgggtttcttctctttagtatctggcttctcaactttttcacccgccatcttgcaagatgggaaagagccc

SEQ ID NO: 37589 - DNA, 693 bp, Macaca Mulatta
ttctcacctgcatgttgagtctgtattgctggggcttccaacaaaaaccagagtcactgacagggaacggcagggaccttgttggtatctggctgtgatggataaagagaatcggaggcaccttgttttcacaactaggataaaagtatctgcaaggtcctttccattcctatttggagggagtcctggctccatggccccctccccagtgaactgtccaagcagataggctcacacgagaaacagactgaaagtgggggccatagaagagcggtatggagtccacggagaagatacagtgaatgcttgcatgcattcacacgtgtttgttactgctcttttgaggcggtggtccagctagttcactcctttcaccgggcgcggtcaaggctcccctctctggcagggtgcagcgaacggccagctgggttcttttctgctgggccaaggcgctttgggggtggagggggtggtgctggcgctgcgctgggctgactgcagcgctgacgcggcgtttccccccatccctgttgcctgtgtgtcagtgttgatctgttcctagtataggcaacgtaatgagatactgtgcttcccaactccccttcagttcagagccaaaatgggtctagaatctggcacttatctcaattcctttgattaagtaaattgtactatgcagagctgtcaggaaac

SEQ ID NO: 37590 - DNA, 790 bp, Macaca Mulatta
ggatatattatcttactttgaagaaaatgctgaatagctcttgttagtcaaataaactgataaaaattggtagggcctggctatcagttagccctgggaaatgaatttttagattaaaaaggtttttttgcatcatttggtttgtgcgtttttatatttgtttataaataattgagttgctaattatcttataatcttctccagtcagattttcaacaattttagacatgggacacaagtgtgccaagtctttattttaatgtaataatctcattacccccacccttactcccttaacttccatgtacttagacttcatttgttaaataagccagaggattgtcgtcttcattagaaggacctaggatgataatgtggagactgttggtctgaatctagtgcaactaccacctgccagcttttggggggtatgaaagtatctaaaagttggactgcacgggtcaagtcattatgagacttataaactaaaactttagatacccatttagaaatgtcttggaggcaaaaacaaacctaaagaatgaagactctttcccttctctgaaaaaaaacaaaacactgctcttcacacaaccagaaatcaagaccagagatttgggagcaattgtcctactaatttggcacaaagatcgtttgtttctttagaaaaactggcgtgtggcttttggaataatgaaatctttctcaaaagctggccctaaaaagaacaagaatgggtatatggggatattcggaaaacccttttaataactaaatttaatggccaaaa

SEQ ID NO: 37591 - DNA, 1519 bp, Macaca Mulatta
ggtcacagcaacagcccagcaggcagtgtggcccactctaccacctctgacatcaggcccagtcactcaattctggaaggagttcatggaagagttgcagttggtcaggatgctcggttcccaagtctcacctcgccaggactgagaactccttccagtgagccggacgaacctcaccaggcgcggagtggcccaaaccctcctggcatggagagcatgggaatggtgtacagtgtccccagttcttgcaatggacctacagaatcaaccttctccacttcctggaagggagatgcttttacctacatgactccaagtgccaccagccagagcaatcaagtcaatgaaaatgggaaaaatccttcctgtgggaattcgtgggtctctctagacaaagtcccacctctggttcctaaggaggctgctaccctccttgttgctcgtgataacccagcaggatgcagtgggtcagctggctaccctgagcaccttattcagcgaaggcacatgcccgaaagaccctccaagattggccttctgaccagtgggaccacaaggctggagacaggccccggcggggccagcagattccgggagcggtcactgtctgtgcccacagactcaggcaccacagatgtggactatgatgaggagcagaaggccaatgaggcctgtgccctgccttttgccagtacaagctctgagggcagtaacagtgctgacaacatcgcctcccttagtgcccagcaagaggcccagcacagaaggcagaggtccaagagtatctcacttaggaaggccaaaaagaagccttccccacccacgcgcagtgtctcactggtcaaagatgagccaggcctcttgcctgaaggtgggtcagcactacccaaggaccagaggcccaagagcctttgcctctccttggaacaccaaggacatcactcgtcccacccagatgctcagggtcacccagctgttccaaaccacaaagatccagaaggtacacaattctcccaccactggtatcttactgactggaagtctggtgacacctaccaatccctgtccagctccagcactgccactggcaccacagtcattgagtgcacccaagttcagggcagctcagagtctcttgcctcaccttccacctccagagccactacaccttcccaactctccattgaagtggaggccagggagatatcctccccgggaaggccccctggactgatgtcaccctccagtggctactccagccagtcagaaacaccaacacctactgtttccatgtccctgaccctgggccacttaccccctccaagcagcagtgtccgagtacgtccagtggtacctgagaggaagtcatcactacccccaacgtcaccaatggagaaatttcccaagtcacggctatcatttgacctaccactgacctcttcacccaacctggatctgtctgggatgagtatctccatccgaagcaaaaccaaggtgagtcggcaccactcagagacaa

SEQ ID NO: 37592 - DNA, 730 bp, Macaca Mulatta
  misc_feature (1)...(730): n = A,T,C or G
gggatggaagaataggaggtctcaggcctcattcatccccacacacagaaagtccaactgacaactatccacagacaagaacaccctaaaacttgggaatgtgacggaaacattcatgtggaccacagaactgaataaaccagcaagggataagaacagcctcatgttgactgtatcgtccctctccaccctcaagttggcacagtgacagagaggaggatgtctgggaatcacagtttatacagtgggaaaagaacaagaggcagacatctagcttccctatcattcagagatgcttcccaggaagctcactcctctctctctctatcggaaacatcaggactaataaatagcaaagccagaccacttgcggccagacagaaatagagaaaggaagcagagctcacagcaaccagcatgcagatcttagtggtagtactgtgttccttgtagcagtggcacctgatcatgacgctggccaatagcataccttacccacaaaactgagctggtcactccaagaaacatgataggaagttcaacctggcttgaatccctagacatctagcccacagcccaacctcaaagcccccccccagggaaggggagatttccncacctccnaagcataatcaagtaanaagtggcatggggccgaagaacttgcccccaaancctggaagaagttctaaaaacagtttgggcttcaagaatccaagcccctccaaaa

SEQ ID NO: 37593 - DNA, 792 bp, Macaca Mulatta
gggttttatgaattaaacagggagcggcatgctgaacttgaaactagatttgttcctgcttttttcataatgtgagtagttttgaaaagtcagatctggccatttgtctttcctagaatataataactttgttcattgtttttttgttcatctttcttattcaaaaagactgatgatggtgtctaccatatattcttcaaaacatttgtcacatgctgcactaacctcgtgtatcttttctgtcttggaatttgttcatataaaccctctagcctagactagatcccttaccctctctccagttcctatcattcacccatttcactgtgcaagacacctcactagtcaccagtgatacagaaatgacttaaccagtttttgctcttaagggcttaccgttttgtctataagatacacaactaagtatacatgataattacaaatgaaaatgaatgtttaatgctttatgccctaggtttaagctggttgttggaatgaacaacattttgacccttggaaaagaacaaactaactgtggcattttccagtgggagaacctgacagaagaccaaagaaagttatctaatggtaaaagacctcaggcacctaccttctgcataaaactttttcccgacagagctaaaaggtgcctgtcttcgtaacaccaaattcctaattttttctttaacaaaaaatttttcctacctgggaacacatctgcctttaatttcaaaatggttctaactagttttaaaaaaacttgtctcctttaatgcaattttgttcatccac

SEQ ID NO: 37594 - DNA, 192 bp, Macaca Mulatta
  misc_feature (1)...(192): n = A,T,C or G
gagcggctttatggaccaccgggaggagatggcggacctgagtgagctggtggagaaacccgaacttccattcatcgaatactggggagagagatgccatcannnnnnnnnnnnnnnntaacagaggcagggggcagtgccgaggatgcagcaaagggaggaggacatcatcaggctggtccagcacaggga

SEQ ID NO: 37595 - DNA, 804 bp, Macaca Mulatta
  misc_feature (1)...(804): n = A,T,C or G
gggatgatttccataaaaatatacttcaaagtatttactgtacatagacttaagcgattctatttccagcatcaaactaaacatgtctaaccttttaagtaaatggggaattcagttccatgagaatttttactgacaactaataaacactgtgtgtgtatatacattcatctacactgtggaccggagaaagtcagtacggaaataaatttcactgagatccagaaagtagcaatataggacttctagtggtatgtattagtgtaaataatatatgtgcagcctaggctaaatcgttttaattaaaaacaaacaagcatacttttttgatttaaaaaatatgccctcaaaatggtgggggataaaatgtaagatattctttagctttaattatttttccatcttatgcaagtcagagcacttttttttaaaatagcaatacaacaggcaagagaatactcaaaaatatttaaaattgtatttataccaagagtatgttttaaatattttctaatacttgagcagtttttgtctggcaggcttccaaatttgccaaaagttaagtgttcaatattttcaacacatacgctttttactggtttatactgaactctctgagaattcctaagtgttcccaaagctactgatgtttacaggtcttgtgtttcttctccttctttctaaggatgaaggaatccacagcagactttctctagaaaacactaatgatggacaactttttggtgtcataaatgagttgggctactaccttgnatgtaaaaatttgtaaaggaaatttttccc

SEQ ID NO: 37596 - DNA, 582 bp, Macaca Mulatta
  misc_feature (1)...(582): n = A,T,C or G
agcaaatgtaatcctttcttgatgattgttctttaaacccatggcctacaaggaattctttcagttaaaatttcaaggaatatgagcttacagttaaagcacacaaggaaagaaaccaccatgagcaagagtcattaggaacaaagggcaacaggatcaaactggcaaaaattaaaatgtgagnnnnnnnnnnnnnnnnnngtcatgnnnnnnnnnnnnnnnnnnnnnnnnnnnnnnnnnnnnnnnnnnnnnnnnnnnnnnnnnnnnnnnnnnnnnnnnnnnnnnnnnnnnnnnnnnnnnnnnnnnnnnnnnnnnnnnnnnnnnnnnnnnnnnnnnnnnnnnnnnnnnnnnnnnnnnnnnnnnnnnnnnnnnnnnnnnnnnnnnnnnnnnnnnnnnnnnnnnnnnnnnnnnnnnnnnnnnnnnnnnnnnnnnnnnnnnnnnnnnnnnnnnnnnnnnnnnnnnnnnnnnnnnnnnnnnnnnnnnnnnnnnnnnnnnnnnnnnnnnnnnnnnnnnnnnnnnnnnnnnnnnnnnnnnnnnnnnnnnnnnnnnnnnnnnnnnnnnnnnnnnnnnnnnnnnnnnnnn

SEQ ID NO: 37597 - DNA, 562 bp, Macaca Mulatta
caaggacacctctttgccatggagctgagcagtggtgacgagttttacattgcttgtgacaacatcgggacccctcttgctgtctttagtggaacgggtttgatgatcaagcaaatcctgtacacagcttatggggagatgtacatggataccaaccccaactttcagatcatcataggctaccatggtggcctctatgatccactcaccaagcttgtccacatgggccggcgagattatgatgtgctggccggacgctggactagcccagaccacgagctgtggcagcaccttagtagcagcaacatcatgccttttaatctctatatgttcaaaaacaacaaccccatcagcaactctcaggacatcaagtgcttcatgacaggtaaggaccacggctcactcagggcaggaccccacaaagtgctcttactacctaacaagacttagtcttctttgagaaaggtggtgtaaggtgacaggaaacactgactttctcttagagcagcgttttccgaagtccatttgaagaaatactagttcagaaaatactctggaaaaa

SEQ ID NO: 37598 - DNA, 611 bp, Macaca Mulatta
acgtgatgctagtatatacaaataagtgtattgttttgatttttagaccaccacatggcatgcttgaactatttcttatttcaaatgtctgctaatgcagagtaggctactccatgatagtgttaaaaaacaaaatttgctaacaatgtgatataaagactttaaaagttacacattatgtggagccctacctttacaaaagtttcctactgtaaaatgcttttattttcagttttcatttgatagtactcaaccataattaaacttgcataagataattgctttacatttcacatacctatatttatctgagtgctgtctaaaactgttgtgctagccaaagtaatgctatgaaatcatttgcagaattaacccgtgagttaatgttaaatgcactgttattgccatgtgaagaggcatcgactttgataccaccatcatgttcagaccatgttatacatttcagtggccttttgtttaaggaaaaaaaaagcgcaaaaccaagtacatagtgaagatggctttgatttggacaaatagcttttatattttcattaaaccatgcaaaaaatactacatctttctggcacataactgtctccttaaccact

SEQ ID NO: 37599 - DNA, 655 bp, Macaca Mulatta
  misc_feature (1)...(655): n = A,T,C or G
aataacaataataatatgttcgggggctcaatgaagcacacttcaaaccacatggatttgatcattcagagcaggatgtttcataattcccatttcatttttgttcttcccacacatatctttaaagttagttaagtcctcctagatttcagtagccttgaggcaactatccagtcacctaagctaaactttatttacctcagaataagggtcatagacccaactgagtcaactttctatggattttgattctctgttctggggctatatctgctgtctcaggtaattaagaggtgaataaatgactccagtaaatgggattatttaaagagaagctggttgtccacttatttttagacatataggaatgattttgatcaaatgatggttcaaggacaaatgctgggctcgctatatcaaaaccaaatggagagctttgaaaagatacaaatggcatactgtaccccacgagtactcaatcagaatctctggaggaaacacccagaagcnnnnnnnnnnnnnnnnnnccttccccagatgattcagataatcagtaagattagtaaagcagtaatccaaatcatagtttctcaaatgttaacacgcagaagaatcatctgacttcattgtttgaacacagatcttgaggcatcag

SEQ ID NO: 37600 - DNA, 1174 bp, Macaca Mulatta
  misc_feature (1)...(1174): n = A,T,C or G
gggagtttcactcgttgcccattgtgcaatggcgtnnnnnnnnnnnnnnnnnnnnnnnnnnnnccaggttgaagcggttctcccgtctcagcctttnnnnnnnnnnnnnnnnnnnnnncccgccaccatgcccnnnnnnnnnnnnnnnnnnngnnnnnnnnnnnnnnnnntcatgtcgcaaataactgaaatagtgtggatatatatacgatagggagttaataatcacacttatttcacaatatattaacacccccctgtttggatcaaaaaaatcaattaatagccaggaacaatgataaaggaatggtctacaactcttattattaatcatctttacactaacagtattacaaagtagtctttgacctcgtcgtatatgctctctcgacaagtgagaccacaagtatatagagccatctgatctccaccaatatcatccccctcttttaattttgaaggaggaatatacataaggggacgttataatagtaatgagtgattccacaaatacgtattgcagatgttatgagacggttttatatgttacctcgcattcggtagagcagttagctagtacaattagtagcgtgatgtaaggaagggtactattcattcctagtagaaagcgcttttcaaagatagagagatcgaaggagaacaaccaacgtcccgcagacacactgttatcgttcgtaatagatcacacacagattgtaaataggctagcttatatacacgatactcgccaacgaagctcttacaagtcagagtacacagaagcacatcgtagctcatctagcggatcaactatatcagttggaaatctcttatcgtcgctacatatcacgctgttcctcctgtataacaatactctgtagcacccccctcacaaatattctgcacacaccccgaaggttaactctttgtgtattatgtaaataaattgatacctttgatgatacatgcacttctgatcgcagacacancatcgatagtaaagaatgaagattgtcgactagaaggtaatatatgtagacatcatttatataaaagaatcaaccacttcatttgtatatctgaccgctgctacatgtggtttatttgcacggtgagtctaggttagtctgtgtcaatgttgacatcgttatgagggcgtgtatgtatacactaa

SEQ ID NO: 37601 - DNA, 779 bp, Macaca Mulatta
  misc_feature (1)...(779): n = A,T,C or G
gggggctaaattttaaagtacgccgccggntgttggttaggttcagaaatatacacacacttactctttggccaatttctttcaaggtttactgtcccatcgaatatctagccattttcctttgcaaattacatgcattcttaagagtatatttttaagattattacttatcctttatgatgatttacttttccaaaattacttctagtttcatatgatgttttataattttttctattgttacctgttttaaaaatattttccaaggaagttgattaaaattatatttgtttccttttagaaaacacattgaaatgagtttctcttgctttttcgttttctctctgctttatatgctcttcacagtacatcatgtccaacgggatacctattgtcccatgacacccaaaattgatgacagcaaagggattccaacatatggaaatgttgaaaattattgtaaagtagtattatgaagtagcttttgtgtcattcctggtcgtgacatcaaagtgaagtaaatttattctatttaaattcacgccttaaccaattaaatcctatgagttggaatacacattagaatcacctaagtcttcactatattgagtaacttttaacgttgctagtttttccaatttatggaaaactaaactttttaaacatggtcccatttttggcctcgatcctttttggaaagtattttattcatagtttgcccaatttttaattttttagggggtggaacttttcctccttttctgaaaaggactctcctg

SEQ ID NO: 37602 - DNA, 447 bp, Macaca Mulatta
  misc_feature (1)...(447): n = A,T,C or G
ggcagagcaacatcattttctgtgtgggtccattacgtctgtcactgactttgttggccaaaattgtaacgctttgctcttcattttctttgaccatatccagcccactatgcaccaagttgttcatttctgctcctgcatcctaaaagccctcaaagtcttaccctctgctcttatagccaggagcttaatatttcgaaaaaatgccacatgacctaatacaattttgctgtttcctttattaggtttgataattatcaacttcatacccattaaaatcttattcatattataagaatactgcaaaaaaaatgtactactatcacaagttttctaattttaacccctaggttaaatactttgttctttgtatgattttgttagtagaaaaataaagtccgatgaaatcttaannnnnnnnnnnnnnnnnnnnnnnnnnnnnnnnnn

SEQ ID NO: 37603 - DNA, 633 bp, Macaca Mulatta
ggggtagtgcatggttaattcaagcttctgtacactacagtatattccattttcgttcagtttgtatatttgctgactattacttgatatctctaatctcttttcctaacaaatatagcattgtagcatgccttttaataaatgtcatgacatctgtactctcttaaaatttttctgtgttcttgtctgtactttgggtttccccttgtcttacctgtaattctaatgatgtcctattttcttttcttttccatagccatccatctaaacgtgtcatggttagagaatagcaagcacaaacagtgttcaaaatgggaaaaacacaaaatcttctaactgtctctgtcttcatttaggaataattctcattttgaggagcaaagtgctttcctaatctttttatgagacaccttctctggcaccgccctgtaatgccggagcatgttagcatgctttcttgcttgcacactcactctcctttttctttctctctttttccccatatttgcggtgccaaactacaattggaacactatttccagttttgttcagtagttggcttccctatggcattagtatacatacacttttgagacacaaggtgtgatctcaaccaagtttgtgtccctttaa

SEQ ID NO: 37604 - DNA, 798 bp, Macaca Mulatta
  misc_feature (1)...(798): n = A,T,C or G
agaatcctgcaatgataaggcgaagttgagaggccccttgccctactctggtcaaagcagtgaagtcagcacacccagttctctgtacatggagtatgngaaggtggtcggtacctgtgctcaggggaaggcatgttccgaagaccatcagaaggacagtccctcatcagctacctctctgagcaagacttcggcagctgtgccgacctggaaaaggnnnnnnnnnnnnnnnnnnnnnnnnnnnnnnnnnnnnnnnnnnnnnnnnnnnnnnnnnnnnnnnnnnnnnnnnnnnnnnnnnnnnnnnnnnnnnnnnnnnnnnnnnnnnnnnnnnnnnnnnnnnnnnnnnnnnnnnnnnnnnnnnnnnnnnnnnnnnnnnnnnnnnnnnnnnnnnnnnnnnnnnnnnnnnnnnnnnnnnnnnnnnnnnnnnnnnnnnnnnnnnnnnnnnnnnnnnnnnnnnnnnnnnnnnnnnnnnnnnnnnnnnnnnnnnnnnnnnnnnnnnnnnnnnnnnnnnnnnnnnnnnnnnnnnnnnnnnnnnnnnnnnnnnnnnnnnnnnnnnnnnnnnnnnnnnnnnnnnnnnnnnnnnnnnnnnnnnnnnnnnnnnnnnnnnnnnnnnnnnnnnnnnnnnnnnnnnnnnnnnnnnnnnnnnnnnnnnnnnnnnnnnnnnnctcccacggcttcctgcactccacatctgctgaggcggtggccatggggctcctgaagcagtttgaggggatgcagcttccagctgcctcagagctggagtggctcgtcccggagcacgacgcccctcagaag

SEQ ID NO: 37605 - DNA, 461 bp, Macaca Mulatta
  misc_feature (1)...(461): n = A,T,C or G
gggcagggctggccggcgagctctcgaccgcacagcagataaccaggttttgtaaatccttggctcagaaagttggacaggacaggaactcttttttggaatacaaagccactggtggaaaaatcaaaggactactggaaacaggctggtaacttcagtgaagtggtctaggtgtgacatcacttgatatccatcccccacccaaaaggggaaaaagaagacattgactgtttattcagagtctgaaatgcaacccatcttcacttccaggacccactgatgatctcttctggagttttggcctgaagctaaaactggcagcccctggactaagttcggcatatagactagattcgatatttagccattatgtaccctgcaccatattgatggttacaatgttgaaatatttcgaggggtaatagtatcatggtaattacaataaatgttacanttaatan

SEQ ID NO: 37606 - DNA, 538 bp, Macaca Mulatta
tggttgaggctcagaatttgatttacaggccctgaaaaatgtattctggcaaatgtcaccctgctttgaacggttgatctttatagagagagattctctgcttctgtcagtgacatggcagagacaagctgacaccacttgggaatctaaaccagtgagtcccagagaggctgccttgggagacttggcccatccccaactcaggcccccagcgagggttcgggagggctctgcattgagcatcagcagagtgcaggaggaggagcccctggccttggagacctgaccttcccggcactttgccattgacattggcagaggtggtatcagctaaggaggcggccaccctgggggggcagtatccaggtggcaatttactttcctgacctccacttccacactccttccaaaatatgcactgtgtgctttaattaccttaggggatatgggttcagcagtcagtgtctttggacagatgagataaatgcatgaagatttgcatgcacaggaactggtgtgtgattgtctgcggcagctg

SEQ ID NO: 37607 - DNA, 277 bp, Macaca Mulatta
  misc_feature (1)...(277): n = A,T,C or G
agaggtggaggcttcaaagaaccaagcagaacttgatagaaaggcaatggacgagcttctgagagaaagggacatactaaataannnnnnnnnnnnnnnnnnnnnnnnnnnnnnnnnnnnnnnnnnnnnnnnnnnnnnnnnnnnnnnnnnnnnnnnnnnnnnnnnnnnnnnnnnnnnnnnnnnnnnnnnnnnnnnnnnnnnnnnnnnnnnnnatctttcatctggaaaaggagcgtgaccggtacatcaaccaagccagtgaccttacgcaaaaggn

SEQ ID NO: 37608 - DNA, 1121 bp, Macaca Mulatta
  misc_feature (1)...(1121): n = A,T,C or G
gggcctttccgcgctacctacagaagggtccatacggcgttgttctggattcccgtcgtaacttaaagggaaactttcacaatgtccggagcccttgatgtcctgcaaatgaaggaggaggatgtccttaagttccttgcagcaggaacccacttaggtggcaccaatcttgacttccagatggaacagtacatctataaaaggaaaagtgatggcatctacatcataaatctgaagaggacctgggagaagcttctgctggcggctcgtgccattgttgccattgaaaaccctgctgatgtcagcgttatatcctccaggaaatactggccagagggccgtgctgaagtttgctgctgccaatggagccactccaattgctggcagcttcactcctggaaccttctctaaccagaataagatcagcctatccaagatagccgacggctttctttgatggatacatcgacccccatgggggtgtaaagcgcagatgtccttcttcatatatagggccaatccatttatgagtttaaacccttcttcccatataccccttctggaccttcctcggtgggtaaaaaaacagcaccgataatgtatgccccatcgcaatcacgctgggccgagtcaacgaacattggaatgggatgaataacaaaatattgggtgttccaatatttactcacctctaattcccaacatacttacccatcatccattgtcgggggcaaagagctctctgtctacactttatcacgtagactcgacggtgaataacattaggagaaagcaggacagctcaagaggaaaaaatagcacccttcagggcacatctccgtggtgccgaanaaattcttccctaacacggcggcaccctctacccgnctatgggaatttctatgctgatttttgtttgcttacggacgaaganaaaactaaaaaacctcaataaagaagggcgaacgggatataaatgcataaaacctcaatgcagatactgtatcgctcacagacgtctccctttagccctgctggagagtacttccggcattctctagcaagcattatgcgcgaataggaatacggatgcgataccggcgcactgatatgactacttg

SEQ ID NO: 37609 - DNA, 822 bp, Macaca Mulatta
  misc_feature (1)...(822): n = A,T,C or G
agggaggttgagcctggagagcattggacgatacgatatgtccgatatgaatccgagctaccatgcccgatatcatgagactgatcaccaaagatctgtccgaaccctactccatttatacctatagatattttatccacaactggccacagctgtgcttcttggnnnnnnnnnnnnnnnnnnnnnnnnnnnnnnnnnnnnnnnnnnnnnnnnnnnnnnnnnnnnnnnnnnnnnnnnnnnnnnnnnnnnnnnnnnnnnnnnnnnnnnnnnnnnnnnnnnnnnnnnnnnnnnnnnnnnnnnnnnnnnnnnnnnnnnnnnnnnnnnnnnnnnnnnnnnnnnnnnggttgttttggaaaccgaaataacaaataagtctgctttgaaactttatgaaaatcttggttttgttcgagataagaggctgttcagatactatttaaatggagttgatgcactgcgacttaaactgtggctgcgttgagaaaccgacatcgagaaacaactttcaaccacacagaatcgacctttgcatgcaatgcaatttgtacagaattgctttgcaggtggatttagtaatttccatgcagctcttatctgtcagtgtctcattgagtgtcgcacaatatttgttgcactttggcatggcgcatttgttctgaattaaaagattgttttanacttcaggagttcttttggtaccaacaagatgtgccagttgatagccaagatttatgtgttcatttgcaaagtctgctgacnatgttatttacacagtgatcattttttcacagaaccagtaagtggaacataatttttgttcct

SEQ ID NO: 37610 - DNA, 436 bp, Macaca Mulatta
  misc_feature (1)...(436): n = A,T,C or G
ctggtgatcctgtggcttcagttaagctgggtttggagccaacagaagggggtggagcaggattctggacccttcagtgttccagagggagccactgtcgctttcaactgcacttacagcaacagtgcttcccagtctttcttctggtacagacaggattccaggaaagaacctaagttgctgatgtctgtatactccagtggtaacgaagatggaaggtttacagcacagctcaatagagccagccagtatatttccctgctcatcagagactcccagctcagtgattcagccacctacctctgtgcagtgattcttaatgctggcaacaaccgtaagctgatttggggattgggaacaagcctggcagtaaatccannnnnnnnnnnnnnnnnnnnnnnnnnnnnccagctgagaggctctaaatccaatgaca

SEQ ID NO: 37611 - DNA, 382 bp, Macaca Mulatta
  misc_feature (1)...(382): n = A,T,C or G
gggagatgagaaatccctgttgaatgctgcctggatgttgtcagaaaagctctgaacttgatgtcagaacaccgacaccatgaatatcatgtgtggccttaaccaaggaacagaagccctttagaacttagcttcctcacttgggacctgggactgactgcatttgccctttctataaacccacccacctcatagggttcattgggagcataaagcaagatgtggtgaaagtacttttaatataaattgcaacannnnnnnnnnnnnnnnnnnnnnnnnnnnnnnnnnnnnnnnnnnnnnnnnnnnnnnnnnnnnnnnnnnnnnnnnnnnnnnnnnnnncggccccctcccccctcaaaaatttttcaaaacttttttttgg

SEQ ID NO: 37612 - DNA, 83 bp, Macaca Mulatta
tctactaccgtttgctggttttgtacatggagaaaaggggtgatgaactaagaaacatggatggccttgggaaccaggaaaag

SEQ ID NO: 37613 - DNA, 508 bp, Macaca Mulatta
tcatttattagatcacataatattcattcttcccaatttcagaaaaagtatgttatataaaagtaaaatatttgttttctacagaccatttttttaggcatcttgaatggaaaatttggactatataatttctaaagacatacagtgtttggttttctgtaatagcaatatcataaggtataccagatataacgtaacaaaatatacaacaaatagtgaatattcaatccagtcacttagcaaataaaacagctccagttaaaagaagactgaaggttaaagcacagctgtgttgataataagctcaatctcaatgtactgcctcaacactacgaaaatccacagtttgatacatatatatcttattctgaacattcacatgaaaaagtattgagaactctttctttgagtattttcatgtagtaaagcgtgcttctataaataacaccttacttgggaaactcagacagaatacatctctagctacaacgtaataaccatcactcca

SEQ ID NO: 37614 - DNA, 809 bp, Macaca Mulatta
  misc_feature (1)...(809): n = A,T,C or G
ggnnnnnnnnnnnnnnnnnnnnnnnnnnnnnnnnnnnnnnnnnnnnnnnnnnnnnnnnnnnnnnnnnnnnnnnnnnnnnnnnnnnnnnnnnnnnnnnnnnnnnnnnnnnnnnnnnnnnnnnnnnnnnnnnnnnnnnnnnnnnnnnnnnnnnnnnnnnnnnnnnnnnnnnnnnnnnnnnnnnnnnnnnnnnnnnnnnnnnnnnnnnnnnnnnnnnnnnnnnnnnnnnnnnnnnnnnnnnnnnnnnnnnnnnnnnnnnnnnnnnnnnnnnnnnnnnnnnnnnnnnnnnnnnnnnnnnnnnnnnnnnnnnnnnnnnnnnnnnnnnnnnnnnnnnnnnnnnnnnnnnnnnnnnnnnnnnnnnnnnnnnnnnnnnnnnnnnnnnnnnnnnnnnnnnnnnnnnnnnnnnnnnnnnnnnnnnnnnnnnnnnnnnnnnnnnnnnnnnnnnnnnnnnnnnnnnnnnnnnnnnnnnnnnnnnnnnnnnnnnnnnnnnnnnnnnnnnnnnnnnnnnnnnnnnnnnnnnnnnnnnnnnnnnnnnnnnnnnnnnnnnnnnnnnnnnnnnnnnnnnnnnnnnnnnnnnnnnnnnnnnnnnnnnnnnnnnnnnnnnnnnnnnnnnnnnnnnnnnnnnnnnnnnnttatttattgggatccacatttcctctttgtcnggccctcctccggcaaactactaaccccaacttcacatcgaaccatcccctttcggcttccaaaaccccccgccttgataattgaccccttccgtgggaatgtttatccgggactaccccccccccaaatttccgggccaatttgaa

SEQ ID NO: 37615 - DNA, 284 bp, Macaca Mulatta
  misc_feature (1)...(284): n = A,T,C or G
tggaagatttgacaaacccagaggatatccgaacaagcatgaaatgtgactggcaggtgtcactttatggttatttaagaggagcacacttgaaaagtaaaagccaaattcacatgccaggnccaggggtagaagattttgccatgagtgatgtcagtttcctcccagacccttgtgctcttcctgaacaacaaaagaagcgctgtttaaataagaaggagcagctggtttatgcgcctctttctggagttgggcgtgtgctgtatgacaaagacgctgtctat

SEQ ID NO: 37616 - DNA, 99 bp, Macaca Mulatta
tactgctttacaaaaccagaactgatcttcacattggaacaaggagaagatccatggttattagagaaagagaaaggatttctaagcaggaactcccca

SEQ ID NO: 37617 - DNA, 11286 bp, Macaca Mulatta
  misc_feature (1)...(11286): n = A,T,C or G
ggaagtattgattctttcatgtttgtggctgttccccgtttccagttgttttccatggttattgcttctagtgtgatctatagactcttatatcatcaatatcaggtcatcattgcagttgtcaacttcttcctgttgcattttatgtattaattcaacaagtacatattaggtcccatatgtcatccattaagtttcatatgccatccatttttcttaattctgagaatcttacatgaactagacagacagattcttttgtctaatggtgccctcactatagtgagtagaggagaccagcttacatactgaaataaatgaatgaataagagatttcaggtggtattatatgacttgaagaaactgcatattgtatctacagccatctggtctttgagaaacctgacaaaagcaagcaatggggaaaggattttcaatttaataaatgatggggcagaactagctagccatatgctgaaaaatgaaactggaccccttccttataccttatccaaaaattaaatccgaatggatttgagacttaaatgaaaaaccccaaactctaaaaagcctagaaaaaaatcagggcaatacccttcatgatataggcatgggcaaagatttcatgatgaaaacatgaaaagcaattgcagcaaaaccaaaaattgactaatggaatctaattaaactaaagagctccttcacagaaaaagaaactaccatcagagcgaaagacaatctacagaacatggaaaaatgtttgcaatctattcttctgacaaaggcctaacatccagagtaaataagaaacttaaacaactttacnnnnnnnnnnnnnnnnnnnnntaaaaccatggcacacattacctataaaacaaacctgcatatcctgcacatgtaccctggaatttaaggtaaaattaaattaaatnnnnnnnnnnnnnnnnnnnnnnntgacatggcaatgttaggaagttaccctatatggcctaaaaaaagaaggcataaataatccaaaacttgtttaacatatcatcaagaaataaccataaaaatgaacaactagcagccctcgggggtgctctgcctatacaatagtcattcttttatttctttactctcttaagaaacttgctatgacttaaaaaaaacaagtgcatattgtgaaatggtagtgactgcatttgaagtgggtcctttatgatatgatggagccaggcagagacttttggagaaagaagttcctgaaagaaggaagggcatgtgccaaattctgaggctgaggagaaacnnnnnnnnnnnnnnnnnnnnnnnnnnnaagaacttgacatttcactgtatgtaaagacattgcaaggctagagtagagcatgttgaagtaaaaataagagaaatcaaaattagagagaagggcacaggcttattatttgggtcttacagatgagaatagtagagtaggtattttatactgaaacttaggggaccaggggagatttgtaaacctgagataaacatggtctctagtccactcaaaccctaagcttatttttttctccttcctcatctgccttactcagtgcaaggtgctataacaaaatacaaaataccaaagactggatggcttcaacaacagaattttttctcacgcttctgaaggctgatttgtggtcagggttctcttcctggattgcagatagctgacttctcactgtgtcctcactgggaggaaagacaaatggcttgtctctctgcttctaataaggaaataaattttatgatggggatatgctcttatgagctcatctaaacctagttacttttcaaaagtctcccctacaaataaggtcagttgggagttggggattcagcatgtaaattgtgaggagacaaacattaggtccataacaccatcacattaaactcttacttatacagatgcactaacatccaactatacaaaaattccattgagtaagccttccaattaatcttgtacaaattcttcccactacttttgatctcacagtactggtctcttgctcagacacaacatgctcatgctgacttgtgagcctctgctgattcatttcttacacctaagtcctcacctcccccagaagcttacagtgaggtctcttcctggaaatgctgtgaccaatctgcacacttgaggacatgggattaatcttactttcttaggcatccacaagggctatgaaaagccaggtgccattagaaataatattccccctaacaaaataaatgctacacctgactaaaccttgacctccgaaagcttggaacactttcccttcattaagaaccatccttcctactctgctgcaatccaacacccaggtcttcactgaaacttttcccatctcttccaaaacatgtttctgaggagtctgtcctatagaggtctttcttcttaccagctttctcctgcacaatttacccccaacttgcagaactcccgtatatcagtgtctttactgctttgttcttttatttgctcatcaaaattcacatctcatgtaaaaataaatggggagcatgcgcacaccacaaacacacatagccatacagaaatacacataaacacatccctcaatataaaccctttggggctcatatattttaaaagatgtaaaaaaaagagctgaagaaaatcatgtgtgatctcttagcagaatagatttattatttttattgcttgcagaataaagcctatccttgaaagctctgcattgtgggcagggggnnnnnnnnnnnnnnnnnnnnnnnnnnnnnnnnnnnnnnnnnnnnnnnnnnnnnnnnnnnnnnnnnnnnnnnnnnnnnnnnnnnnnnnnnnnnnnnnnnnnnnnnnnnnnnnnnnnnnnnnnnnnnnnnnnnnnntgagatgaaaggagacaacaaaaatgaacccatagtgagctgagagctccagcctggcctccagaaactacacacccagcttccacccagaatcaagcctatgttaacttccctcaaagcctgagattttgccttccattaaatgcaggtagttgttccccttgcagcattagtcactggccaaaatttaaaacttgctgtcttcttgccaccacaaaccctgtatgttgtaggctgaaaacattaaaagaaacacacgcgtgcgcgcgnnnnnnnnnnnnnnnnnnnnnnnnnnnnnnnntggctttcaaaatctactctagcccaaatgtttcaattgatcctcacccctggacacactttgcccccatctggaattagaggatataagtttgtaatgaagtgatagtggcattttatatgtgtccagctgatataggaatagcctcagactctgtttggtcaccagagttccccactttgactgggccaatatatgccttctgcctgcatctttttaatgaccatacttgtcctgcctccagatagacgttttaaaacaaataacaaaaatgagggaaagttgaaagttctttctaccggaatctaataaagaaaagtcattttcctcatttccacctctcttttgtcaatgtcaaaattgtccgtctagatttttagaggcactccttaggccctaaaacattaccattcggtctcagcccagttagtcctctgcagtttcttcactcccaaccccagtatcttcaaatagctcacacccagcaggtaggttcggctgtcctcagatcaatactcagttgtctaagttgccttgagactgaactctgaaactgctgaaactcctggactcaccctgaagttctcaggatcnnnnnnnnnnnnnnnnnnnnnnnnnnnnnnnnnnnnnnnnnnnnnnnnnnnnnnnnnnnnnnnnnnnnnnnnnnnnnnnnnnnnnnnnnnnnnnnnnnnnnnnnnnnnnnnnnnnnnnnnnnnnnnnnnnnnnnnnnnnnnnnnnnnnnnnnnnnnnnnnnnnnnnnnnnnnnnnnnnnnnnnnnnnnnnnnnnnnnnnnnnnnnnnntgagattgaacaagagcagtttgacagtcagaaagtgccacaaatcctaagaagtggcctggacttttgccaggcacagggtccttccttcccttccttgtcctggtcaccagagcctaccttcccagggtttctcctccagcatcttccacattcaccttgccccacaggcttgtgatagtagccttgtcctcctctgtgaaatgacccatggcgtctggactaggagcttattgataatctcagccgttccagaagcgagtgtgtggaactgctggagggtgcttccttttattcttcatccctagccagccgccggcccctggcctcacctgatactctaagactattggtcaaggttgccttgtcaaggctattggtcaaggcaagactggccaacccatgggtggagtttagccagggaccgtttcagacagatatttgcattgagatagtgtggggaaggggcccccaagaggatactgctgcttaatttttttatagcctttgccttgttccgattcaatcattccaatttttctctaatttattcttccctttagctagtttccttctcccaccatagaagataccaggacttcttttgtcagccttttttttaccttcttgtctctagctccagtgaggcctggagattaaagttaaagcatgtaccaatttttgaaaagttcggggattgtgacacgtgttttaggcataggtccaggattttcgatgggacaagtcttagtctcatttagtaagcattgtgctatacttatctttgaaaatactctctgtggctttttctgttatctcttaagttctcaatagtgcagtgaaaataattcctataagccagtttcagtgcagtgaaagattagtgttatgtaatataagacctaatccttacctcaatatgtacttatctgtacctatttgaaataaatcatgcctgtttcatcttagaaaaaatattggattccatattcaggatgtatatatatatcatatgatgtgtatttatcactgggtaagtgtgtgtgctggctgatgaccagggttttggtgtagcttttttatgctcagtaaagatgatggtggaatgttctttggcaggtactctccattagaattaattatcttgtatagatgctaggttcacttctcagggaatcttattctaagacataagacatgtgtgtgcacggaaaacaactctagagaagcaagggctgtttttattggctaatagtccacacactatgacaactcgaatatcagtgtactttagacagctttatttctaacgcagtgctgtttctgacatattggaccgttaacagggtaagaagtatttctgctggttttttggttctgttttgcttttggttagtttgtttttgtttttctctgcaagtgatccatgatctcaaaccttgctagactatgccagaagatctggaattctggtttattggaggtgagctgtatcttcaattagtttatcccctaagctatcaggttgatttaaattggtgaaatcctttcaggcttcatgatcctgtgtaaagattatacctgttcgttgataaagatggctaaaaggccagaaaggtacacatttgcccatgtaacaagcctgcacatcctgcacatgtaccttggaaattaaaatgaaatgaaataaaattaaaaggaaaaaatgccatggcaacatcaggaagttatcttttatggcctaaaaatgggcggcataaataatctaccccttgtttagcatactattgaaaaataacaacaaaaatcggcaacgagcagcccttgggctactctgcctatgaagtagccgttcatttattcctttactttaattttttataaacttgttttannnnnnnnnnnnnnnnnncaaagaaagaaagtgcgaattgtaaaatggtagtgagtgacagcatttgaagtggatcctttatggtatgatggagccaggcagaagatgtttggagaaagaagttcctgaaaataggaagggcatgtagaaaactgtgaggctgaggagaaaaacgaaagaaagaaatataaagaaagaacttgacatttcactgtatataaacagattacaagcctaaagtacattgaagaaaaaataggagaaatcaaagttagagagaagggctcaggcttacgacttgggagttacagatgagagtagtagagtaggtattttatactgaaacataggagaccaggggagatttgtaaacctgagataaacatggtttctaatccactgaacacccaannnnnnnnnnnnnnnnnncttcatctgccttacttagtgcaaggtgctataacaaaatagcatagaccggatggcttcaacaacagatttttttctcacatttctgctgattcctggtcagggttctcttcctgggttgcagatggctgactcctcactgtgtcctcaccagaaggaagagaaatggctgacctctctgcttctgatgaggaaaataattctctgagagcgatctgctctcatgagctcatctaaacctaattacttttccaaagcctcccagacaaatggggccaactgggagttggggatttagcatgtgaatttcctggagacacaagcgttaggttcataacaccatcacattaaactaaacacttgcttataaacatgcattaactttcaattatataagaattccagagaatctgccttctcaattaatgttatacaaattcttcacattacattttcatctgacagtgctggtctgctgctcaggcatgacactatgatgctgacttgtgagcctctgctggctcatttccttcacctaagtccccacctcccctagaagcttacaatgaggtctcttccttgaaatgctgtgacttaagggcatgggattaatttcgcctctttaggcatgcatcaacacttaaaacgaaaagtttcttagtaaagtaaggatcacttcattgcagttactgtggaaagaaaaatctgtttcctgctctgatctctaacacctcaacctccccatagagcctcacaaggactgagaaaagtcagatgccattagaaatagtattgcccctaataaaatagaatggctatccctgcctaaaccttgacttcctaaatttggaacactttgtcttcgttgagccccttcctcgctgctgtgctgcaatccagcccccaggtcttcactgaaccttcccccatctcttccaaaacatctgtttctgaggagtcctgtcctacagaggtctttcgtcccaccagatttctcctacactttttattctcacttgcataactcccatgtacaagtttctttattgtctagttcttttaattgctcatcaaaacccacatctcatgtaaacaaaaaagtgaggatatgcacatgacactaacacacacagccatgtacaaatacacatacacacatccctcaacataaaaccctttgtggctcatatatttaaagagacataaaaaaagagctgaagacaatcatgtgtgatcgcttagcagaatagatttattatttttattgcttgcagaataaagcctatccttgaaagctctgcatcgtgggcagggggnnnnnnnnnnnnnnnnnnnnnnnnnnnnnnnnnnnnnnnnnnnnnnnnnnnnnnnnnnnnnnnnnnnnnnnnnnnnnnnnnnnnnnnnnnnnnnnnnnnnnnnnnnnnnnnnnnnnnnnnnnnnnnnnnnnnnntgagatgaaaggagacaacaaaaatgaacccatagtgagctgagagctccagcctggcctccagaaactacacacccagcttccacccagaatcaagcctatgttaacttccctcaaagcctgagattttgccttccattaaatgcaggtagttgttccccttgcagcactagtcactggccaaaatttaaaacttgctgtcttcttgccaccacaaaccctgtatgctgtaggctgaaaacgttaaaagaaacacacgcgcnnnnnnnnnnnnnnnnnnnnnnnnnnnnnnnnnnnnnnnnnnntggctttcaaaatctactctagcccaaatgtttcaattgttcctcacccctggacacactttgcccccatctggaattagaggatataagtttgtaatgaagtgatagcggcattttatatgtgtccagctgatataggaatagcctcagactctgtttggtcaccagagttccccactttgactgggccaatatatgccttctgcctgcatctttttaatgaccatacttgtcctgcctccagatagatgttttaaaacaaataacaaaaatgagggaaagatgaaagttctttctaccggaatctaataaagaaaagtcattttcctcatttccacctctcttttgtcaatgtcaaaattgtccgtctagatttttagaggcactccttaggccctaaaacattaccattcggtctcagcccagttagtcctctgcagtttcttcactcccaaccccagtatcttcaaatagctcacacccagcaggtaggttcggctgtcctcagatcaatactcagttgtctaagttgccttgagactgaactctgaaactgctgaaactcctggactcaccctgaagttctcaggatcnnnnnnnnnnnnnnnnnnnnnnnnnnnnnnnnnnnnnnnnnnnnnnnnnnnnnnnnnnnnnnnnnnnnnnnnnnnnnnnnnnnnnnnnnnnnnnnnnnnnnnnnnnnnnnnnnnnnnnnnnnnnnnnnnnnnnnnnnnnnnnnnnnnnnnnnnnnnnnnnnnnnnnnnnnnnnnnnnnnnnnnnnnnnnnnnnnnnnnnnnnnnnnnntgagattgaacaagagcagtttgacagtcagaaagtgccacaaatcctaagaagtggcctggacttttgccaggcacagggtccttccttcccttccttgtcctggtcaccagagcctaccttcccagggtttctcctccagcatcttccacattcaccttgccccacaggcttgtgatagtagccttgtcctcctctgtgaaatgacccatggcgtctggactaggagcttattgataatctcagccgttccagaagcgagtgtgtggaactgctggagggtgcttccttttattcttcatccctagccagccgccggcccctggcctcacctgatactctaagactattggtcaaggttgccttgtcaaggctattggtcaaggcaagactggccaacccatgggtggagtttagccaggaaccgtttcagacagatatttgcattgagatagtgtggggaaggggcccccaagaggatactgctgcttaatttttttatagcctttgccttgttccgattcaatcattccaatttttctctaatttattcttccctttagctagtttccttctcccaccatagaagataccaggacttcttttgtcagccttttttaccttcttgtctctagctccagtgaggcctggagattaaagttaaagcatgtaccaatttttgaaaagttcggggattgtgacacgtgttttaggcataggtccaggatttttgatgggacaagtcttagtctcatttagtaggcattgtgctatacttatctttgaaaatactctctgtggttttaggtcattatctcttaagttctcattagtgtagtgaaaaaaaaatcatataaagcaacggtttcagtgcaggaatagattaatgttatgtaatataatataatacttaatccttacttcagtatctacttctctgtacctatttgaaataaatcatgtgtgtttcatctcagcaaaggtatttttttttcttattcaggtatgtatgtaggcacccgatgatgtgtatttatcactggataagtgtgtgtgctggctgatgacccaggtttttggtgtagctcttctgtgttcagtaaagatgatagtagaatgttctttggcaggtactatggcttagaattaattatcttgtataaatgctaggttcagttctcagggaatcttattctaagacataagacatgtaattgcatggaaaacaactctaaagaggcagggactgctttaattgactaataggccacacactgtgacagttgggatgtcactttagtttagacatctttatctgtaactcagtgctatttctgacatattggccactgaacatggcaggaagtattcatggtnnnnnnnnnnnnnnnnnnnnnnnnnnatttttgtttcttggtgggtttggttttgcttttgttttttctctgaaagtgatccatgaccttggtagattatgatgtcagaaactctggaaatctgttttattggacgggaggtctacttcccctaacctatcagattaatactaattataataatattggtggaatcctttcagccttcataatcttgtgtaaagcttatatctgctcaaagtgtgagacggctaaaagaccagaaagattcatgttgacccatgcagcaaagctgcacatattgcacttgttctttggaagctaaaataaaagttgaataaaaaaggaaagaaaaagatttgtcaacatatcagtatcttccagttattcacataataataagtgacttctctcaatctaagggtgggtgagaaagatttttattggtatgcaggtacagattacagagactgaggtgaatccaaattagggtctctttaagacaggggatctgtgagatgggtagatgggtgtgtatagatctttgaccatatctgggaatctggttgggttccatttgtagagcctgaccttgaagaatgtctcagagactggtgtctaagcccactaaggcttaatcaagtgaatcttttgaatctgnnnnnnnnnnnnnnnnnnnnnnnnnnnnnnnnnnnnnnnnnnnnnnntgttctgtcatnnnnnnnnnnnnnnnnnnnnntnnnnnnnnnnnnnnnnnnntcccgccttccaggttcaagcatnnnnnnnnnnnnnnnnnnnnnnnnnnnnnnnnnnnnnnnnnnttaccatcatgcccggctaannnnnnnnnnnnnnnnnnnnnnnnnnnnnnnnnnnnnnnnnnnntnnnnnnnnnnnnntnnnnnnnnnnnnnnntgcctgtnnnnnnnnnnnnnnnnngnnnnnnnnnnnnnnnnnnnnnnnnntcctagcctctaaacaagtgaatcttaattgctcctcctcagactaaggaatatctaggatcc

SEQ ID NO: 37618 - DNA, 779 bp, Macaca Mulatta
  misc_feature (1)...(779): n = A,T,C or G
ggnnnnnnnnnnnnnnnnnnnnnnnnnnnnnnnnnnnnnnnnnnnnnnnnnnnnnnnnnnnnnnnnnnnnnnnnnnnnnnnnnnnnnnnnnnnnnnnnnnnnnnnnnnnnnnnnnnnnnnnnnnnnnnnnnnnnnnnnnnnnnnnnnnnnnnnnnnnnnnnnnnnnnnnnnnnnnnnnnnnnnnnnnnnnnnnnnnnnnnnnnnnnnnnnnnnnnnnnnnnnnnnnnnnnnnnnnnnnnnnnnnnnnnnnnnnnnnnnnnnnnnnnnnnnnnnnnnnnnnnnnnnnnnnnnnnnnnnnnnnnnnnnnnnnnnnnnnnnnnnnnnnnnnnnnnnnnnnnnnnnnnnnnnnnnnnnnnnnnnnnnnnnnnnnnnnnnnnnnnnnnnnnnnnnnnnnnnnnnnnnnnnnnnnnnnnnnnnnnnnnnnnnnnnnnnnnnnnnnnnnnnnnnnnnnnnnnnnnnnnnnnnnnnnnnnnnnnnnnnnnnnnnnnnnnnnnnnnnnnnnnnnnnnnnnnnnnnnnnnnnnnnnnnnnnnnnnnnnnnnnnnnnnnnnnnnnnnnnnnnnnnnnnnnnnnnnnnnnnnnnnnnnnnnnnnnnnnnnnnnnnnnnnnnnnnnnnnnnnnnnnnnnnnnnnnnnnnnnnnnnnnnnnnnnnnnnnnnnnnnnnnnnnnnnnnnnntctacaccaccttcacattggaaccattcacttcgggcttccaaacccgcccgctttgatattgaaaccttcgggggaaggtttttctgaactaccccctttat

SEQ ID NO: 37619 - DNA, 832 bp, Macaca Mulatta
ccaaaggaggtggctacagagtattctaagacgagcccccaaatttggtttgaccaaagcttccccactcattttgcaatgatggcaagtaattcaatccttctaatcttcattttttctccttgtaatttggacaccatgatatctgactcatacaaatttttgtaatttatgaaaattattgacatggcctttggtgtgaggtaggaactcaaagaatatttctttgttactatttataccagccatctccaccttcaccagaccgataataaaagcatgctgtcttggacatctcctctaaagagaatagctacattaccagtatccattggatttctttctgtggcaggtctctatcaataatatccttcccatttttctgcctcaatgactgcatacaagaaaattatacacttaaacaagaagttcgtgataattcaggaatgaaattcttctgagtatggcagtatgcccgcttctgattaaattcacttttaatagtagctgtgatgatatgttggttggatttaagccatttattttcctcttctgtctacattttttcatcacttcataattttattttaacttcctgcctcattcttacacctttttctctctcacttatacgttgtacttcaaggacatgaacggttacaatacccagtctttgttacctgttgtcttgtctgtggggtcactcattcaattttgttttaaaataattcaataactacttcatgccaggccctgcaccaggatttgtgagagggcgagaaggattattgtctctcataggagaaaacagatgtgcatatcattaattatg

SEQ ID NO: 37620 - DNA, 675 bp, Macaca Mulatta
  misc_feature (1)...(675): n = A,T,C or G
ggnnnnnnnnnnnnnnnnnnnnnnnnnnnnnnnnnnnnnnnnnnnnnnnnnnnnnnnnnnnnnnnnnnnnnnnnnnnnnnnnnnnnnnnnnnnnnnnnnnnnnnnnnnnnnnnnnnnnnnnnnnnnnnnnnnnnnnnnnnnnnnnnnnnnnnnnnnnnnnnnnnnnnnnnnnnnnnnnnnnnnnnnnnnnnnnnnnnnnnnnnnnnnnnnnnnnnnnnnnnnnnnnnnnnnnnnnnnnnnnnnnnnnnnnnnnnnnnnnnnnnnnnnnnnnnnnnnnnnnnnnnnnnnnnnnnnnnnnnnnnnnnnnnnnnnnnnnnnnnnnnnnnnnnnnnnnnnnnnnnnnnnnnnnnnnnnnnnnnnnnnnnnnnnnnnnnnnnnnnnnnnnnnnnnnnnnnnnnnnnnnnnnnnnnnnnnnnnnnnnnnnnnnnnnnnnnnnnnnnnnnnnnnnnnnnnnnnnnnnnnnnnnnnnnnnnnnnnnnnnnnnnnnnnnnnnnnnnnnnnnnnnnnnnnnnnnnnnnnnnnnnnnnnnnnnnnnnnnnnnnnnnnnnnnnnnnnnnnnnnnnnnnnnnnnnnnnnnnnnnnnnnnnnnnnnnnnnncaggtacaatgaccaacctgtgcaaccactctcataatcaggcgtaattactcttcaaaactctgctgcgaacccacn

SEQ ID NO: 37621 - DNA, 647 bp, Macaca Mulatta
tgaatggacagcaggtcaggttgtgtgaaccagaaatgctcacaggcctcactttgccacccaggcactggcccacgctggggtttacataagatgagttagaaaggtgtttctgtagggtcctttttacctctgctcagcggagaatcgattctgtcatgttcctttattcacaatcttaggtctcaaatattctgtcaaaccctaacgaagaagccccatctcaggttggattccctggttctctctaaagagggcctgcccgcgtgccccagagctgctgctgggcacagccgagtgttgggaagggccaccccgcagcgtgcagtcctcaccacccagcccagggtgctcacgctcaccactcctgtggccgaggaaggatagccggctcatccccagaaaacagacccacatctctattcttgccctgaaatacgcccttttcacttgcgtgctcagagctgccatctgaaggtccacacagcattgacaagacacagaaatttgactgttacctgataacactgataagtcagttttcatttttaaaacattgacagttttattactcttgtttctttatactttttaaatggaaagttagtatcatgaggttaatttgcaatcctcttctaattagaaaa

SEQ ID NO: 37622 - DNA, 991 bp, Macaca Mulatta
  misc_feature (1)...(991): n = A,T,C or G
gggctctttcccatcttgcaagatggcgggtgaaaaagttgagaagccagatactaaagagaagaaacccgaagccaagaaggctgatgctggtggcaaggtgaaaaagggtaaccctcaggctaagaagctcaagaaggggaagccccattgcagcccgcaccctgtccttgtcagaagaattggcaggtattnnccgatctgccatgtattccagaaaggccatgtacaagaggaagtactcagccgctaaattcaagggttnnnnnnnnnnnnnnnnnnnnggttcttgccactcttacaaaaccagttggtgggtgaacaaaacggcggtaaccggggtggtttaaccttcccaaaaggcccaagaattatccctacggaaaaatttgccctccaaaagctgtttaagccccgggcaaaaaaaccccctttccctcgcccgcgtgaaaaaaaattggggagcccacctttttcccccccgggacacatttttgtatttttcctccctggagaccccccaggggcgaaagaggggtgggttttctccaaaccccccgggcaagggccttgtttattttggaagggggccccttgggtcccacaagggggttcccctcaaaaaaaacacccccaaaaattttgtttgtgccccccccacaaaaaaataaatatcgcggggggtgaaaaatcccaaaaaattttttctcggggttgnnnnnnnnnnnnnnnnnnnnnnnnnnccggannnnnnnnnnnnnnnnnnnnnnnnnnnnnntatttttcttccccacaaaagaaggaatatcttgttttttgccgcccccccgcaatattattaaaaagggggggcgcccccctttttctcccaaaaaaaagagtggtttctttctcccccggggggtatttattttttttgttctccccacaaagaaaaattccccccccccctgggggttgtgttttttttttccacctcccttttntgggg

SEQ ID NO: 37623 - DNA, 919 bp, Macaca Mulatta
  misc_feature (1)...(919): n = A,T,C or G
gtaatacgactcattataggcgtnnnnnnnnnnnnnnnnnnntcggagttttttttgttttattcttgtttttattttttctgaacttgtgcaaatagctttattaccataagcatatgaatattcatgcataggttcccaattctggggcactcagatagggagcaaaagcaaatgtttcaatttttgtttacaaaagtatactttaccaaattgctgtaaattataaatagcttcaaagagaaatttcataaatctggagaataaaacattcaaagaatcagtacattttcaaataaaaaattatgaaaacattatccttttgatgattcagtccaataaaattgaggtttttttcttctttgtcttgaatttcatgaaggtatcagcctgttcattaaaattttgaaagttctcagagagtccagtggtatgatcttgaagttatcagaaacttgtattcaagagttgtcatcagagtcttttccatatatcttctggaagaaaaaacaattttggactgtagctgattgtaaatacttcaaagaagaatcaaagcagctgtccagtcttcctgaaatacagaaatgacatcatggctgctatatcggattaagcccaggatagatctcctattcccgaagcctcgtgccgaattcggcacgagggaacaatgtcacctgtactcggatctatgaaaaagtagaataaaaattccatcatcactttggacaggaattaactaagagaatgaccaagctcagttcaatgagcaaatctccatannnnnnnnnnnnnnnnnnnnnnnnnnctgtgttcaattatctttatcacaaacattttacgtgtagctgtttcaaagtgtgttggattaattaggatcatcccttggttaataaagaaatgtgtttgtgctaaa

SEQ ID NO: 37624 - DNA, 688 bp, Macaca Mulatta
  misc_feature (1)...(688): n = A,T,C or G
acatttgcgtggaagctcaggatatgtaaaatggtttgggttattcaagttgaagagggaggagtgcttgctttcttttgactactgaaaggacgtgtccagcatttggagtgtactggttttgtaacagtagaagtaggatataaattgctcagctatacttgcaagttggataggcttcccatagtctttttgatgtctaaatgtaactttatatttcattaattttcaagagaaggtctagcccctggggtgggagctatcttcttttcccctggccccaccatcagcactggtcctctgcaaggttttatatttgaaagccctccttggacttggaccttttttccttggacctgggcaaagctaagaggaagaaacagcacaactcagtttgagcttaggagtggttttggcaagactcctgtcctcactccttcctaatcttctcaaaagaggcttcaggtgacttggaaactactggacagattccattctnnnnnnnnnnnnnnnnnnnnnnatatttttcctttctctcctgtcagaacatatgaacattctaacttattttcatgtgtgtacaaaccaactttttagtgtttccactgtgcaaagtcctactgtattttatgatcttgtttaaaagagaagtttatttagcaatacttatcacgacctgaatattctt

SEQ ID NO: 37625 - DNA, 2639 bp, Macaca Mulatta
  misc_feature (1)...(2639): n = A,T,C or G
tccagggagagagcgccccaaccttcccgtggcatggggtgagacccggcgttggataacgcgtggtcgggacgagcaaatgttnnnnnnnnnnnnnnnnnnnnnnnnnctctctcacgtggcactcacgaagctcagaggatatggtggaagtgcaagtgctttgtaaactacagtgcattgtacaaatgagttgtaataaattccttccctcctcctagccgtgaaaggaaacaggggtgcagcttgagtacagtcacaacctgagtctttagtggacaaggagacgaaatgccgggcagaggaaggaacccatcctcgtgcagattgttaggatggcgggaagggaggattggaagggagccatcctctgggagattgttgaaggatttttaactgtcaggggaagaatttaatagtgcctcacttttacgaatggttctttcttatggcttggggctttcgagaacttctgatcttggttcatcagtgtacgttgtcatcaagaaatgttagcctgtgtttcaggtctgactcaaaggttattttctttctaaaataaatgttattactattatgcagcttttcctacagatgttatcctggaaaggaaagtcaagtaaaaactcatgaagtttaaagtgtagttctctaggaaaagaaatttaagataaaaggaccagaatcctcagaaatctgtcttaagtgagtagtatgaggaaaagattaaaacagcagcaatgatgaaagcagattccacaattctgtccgtggaccctagtacactccttgggaagcagtagtaatggactttacaagtctttccacctgnnnnnnnnnnnnnnnnnnnnnnnnnnnnnnnnnnnnnnnnnnnnnnnnnnnnnnnnnnnnnnnnnnnnnnnnnnnnnnnnnnnnnnnnnnnnnnnnnnnnnnnnnnnnnnnnnnnnnnnnnnnnnnnnnnnnnnnnnnnnnnnnnnnnnnnnnnnnnnnnnnnnnnnnnnnnnnnnnnnnnnnnnnnnnnnnnnnnnnnnnnnnnnnnnnnnnnnnnnnnnnnnnnnnnnnnnnnnnnnnnnnnnnnnnnnnnnnnnnnnnnnnnnnnnnnnnnnnnnnnnnnnnnnnnnnnnnnnnnnnnnnnnnnnnnnnnnnnnnnnnnnnnnnnnnnnnnnnnnnnnnnnnnnnnnnnnnnnnnnnnnnnnnnnnnnnnnnnnnnnnnnnnnnnnnnnnnnnnnnnnnnnnnnnnnnnnnnnnnnnnnnnnnnnnnnnnnnnnnnnnnnnnnnnnnnnnnnnnnnnnnnnnnnnnnnnnnnnnnnnnnnnnnnnnnnnnnnnnnnnnnnnnnnnnnnnnnnnnnnnnnnnnnnnnnnnnnnnnnnnnnnnnnnnnnnnnnnnnnnnnnnnnnnnnnnnnnnnnnnnnnnnnnnnnnnnnnnnnnnnnnnnnnnnnnnnnnnnnnnnnnnnnnnnnnnnnnnnnnnnnnnnnnnnnnnnnnnnnnnnnnnnnnnnnnnnnnnnnnnnnnnnnnnnnnnnnnnnnnnnnnnnnnnnnnnnnnnnnnnnnnnnnnnnnnnnnnnnnnnnnnnnnnnnnnnnnnnnnnnnnnnnnnnnnnnnnnnnnnnnnnnnnnnnnnnnnnnnnnnnnnnnnnnnnnnnnnnnnnnnnnnnnnnnnnnnnnnnnnnnnnnnnnnnnnnnnnnnnnnnnnnnnnnnnnnnnnnnnnnnnnnnnnnnnnnnnnnnnnnnnnnnnnnnnnnnnnnnnnnnnnnnnnnnnnnnnnnnnnnnnnnnnnnnnnnnnnnnnnnnnnnnnnnnnnnnnnnnnnnnnnnnnnnnnnnnnnnnnnnnnnnnnnnnnnnnnnnnnnnnnnnnnnnnnnnnnnnnnnnnnnnnnnnnnnnnnnnnnnnnnnnnnnnnnnnnnnnnnnnnnnnnnnnnnnnnnnnnnnnnnnnnnnnnnnnnnnnnnnnnnnnnnnnnnnnnnnnnnnnnnnnnnnnnnnnnnnnnnnnnnnnnnnnnnnnnnnnnnnnnnnnnnnnnnnnnnnnnnnnnnnnnnnnnnnnnnnnnnnnnnnnnnnnnnnnnnnnnnnnnnnnnnnnnnnnnnnnnnnnnnnnnnnnnnnnnnnnnnnnnnnnnnnnnnnnnnnnnnnnnnnnnnnnnnnnnnnnnnnnnnnnnnnnnnnnnnnnnnnnnnnnnnnnnnnnnnnnnnnnnnnnnnnnnnnnnnnnnnnnnnnnnnnnnnnnnnnnnnnnnnnnnnnnnnnnnnnnnnnnnnnnnnnnnnnnnnnnnnnnnnnnnnnnnnnnnnnnnnnnnnnnnnnnnnnnnnnnnnnnnnnnnnnnnnnnnnnnnnnnnnnnnnnnnnnnnnnnnnnnnnnnnnnnnnnnnnnnnnnnnnnnnnnnnnnnnnnnnnnnnnnnnnnnncatattacagtgtcccattgcactattatgtgacaatatgtttagccattctgttgccgatccttatctgggtggtttctagtttaggattgttataaatgctaatgtgaacattcttcatatatgtgttccatcacatctatgtcagtttctgtatagcatatacctgggagtggtaagatgtatcataaacttgaataaataatgccaagttcttttctagagggttacacactcaca

SEQ ID NO: 37626 - DNA, 728 bp, Macaca Mulatta
  misc_feature (1)...(728): n = A,T,C or G
aggctgtgaggaattagctcgcggcattgcaggcgctgagtggaggggacccggttcccgggtgcgtgtcgaggcatgccagcggaacggcccgcgggcagctgcggctcccaggctccagcaatggttgaacagctggacactgccgtgattaccccggccatgctggaagaggaagaacagcttgaagctgctggactagagagagagcggaagatgctggaaaaggctcgcatgtcttgggatagagagtcgacagaaattcggtaccgtagacttcaacatttgcttgaaaaaagcaatatctactccaaatttttgttgacgaaaatggaacagcaacaattagaggaacnnnnnnnnnnnnnnnnntnnnnnnnnnnnnnggagtctttaaaagttaaaaagggtaaaaattcaatcgatgcaagcgaagagaagccagttatgaggaaaaaaagaggaagagaagatgaatcatacaatatttcagaggtcatgtcaaaagaggaaattttgtctgtggctaaaaaaaataaaaaggagaacgaggatgaaaactcctctactaatctctgtgtagaaaatcttcagaaaaataaagattcgaatagtataattaaagatagattgtctcaaacggttaggcagaatactaaattcttttttgacccagtccggaagtgtaatggtcagccagtaccttttcaacaaccaaagcacttcac

SEQ ID NO: 37627 - DNA, 426 bp, Macaca Mulatta
gtgtccctaaattagtcaaccatggctgggagacagagccatgcaatccagtcccagccttctgctcactggcgccgttctcggagaaggagaaaccacgctggagcgggcactcccacgagttgtcggggaacaagaacgcggatcctggcgggagagagcgaacagtgcacccgcgcggcggctgtcacccgctttggaacacgtaagtgcccggccaaccagcatcccagaaacgcctagggagcggggcgcgcggacaaggagagaccgcgctgggagggcacggaagaacgagcgcgctgccgcctccacgctgagctcagcgcgccaggcggccccaaggcagggcgcggggctgagacgaccgagtggtccgtctcgggaggcgcagacgcggttcctcacgagggcactcgtgctgtg

SEQ ID NO: 37628 - DNA, 183 bp, Macaca Mulatta
tgatggtaatcatcagaccctgaattcatttcctgagcttgaaagttctgcagaagtgtttagggccagttgtgtggcagccctcatggaaacaaagagaagtataagggctggtaacctacatcacaaccagcccatcacccaagaacacagccagctccttttgcaacgttgtacctatta

SEQ ID NO: 37629 - DNA, 765 bp, Macaca Mulatta
  misc_feature (1)...(765): n = A,T,C or G
gggaaccactaaaatgaggagtggaaaaaaaatagatgttttgttaatttagagctaatctgagaggataatatatttttattgtcaatgacattaacagatgtgcactgattcttttatacctacaattaatgttcctttttattaaaactcttggttcatgagcaactacagactgactctagattattacctgttgcttttagtattttcgtgatggcttttaaacttatgaaatcatcttaagatcattcatggtcaagccatgaaaactcccatcttcaagcctgacctgctaaagcttttttgccttcctcattgtgattatggtaatattttatctcagacagttgtactttttgataacttagggaaaatagaaattacttgaacaagggattgcctgcctcactgcattgcagagatacagtttttgtaaagaacacaaatagcagttgtgaatattaagatgtgattatctttccctgtccatgtgcttatcaaaagaagatagtgaacaaatgattatattgaggattttttaaatttataagatctaatgtgaaatccacacttggaactttttagatctatctgttgcttgtttaatatatttcttttatgacattacttaaagtttaaaagggttttctatccactgtcaattttgaattggataacatttttgtccnnnnnnnnnnnnnnnnnnnnnngacaattgttatttgaaggcctagctgggaatttcaagaaaaaatggtaaat

SEQ ID NO: 37630 - DNA, 495 bp, Macaca Mulatta
tggatgctgcggtgacagatgattttcaacaaattctgcctattgaacagctgcgctctactcatgctagcaatgactatgtggaacggcctccagccccctgtaaacaggccctctcaagcccttcccttattgtgcaaacccacaagtctgattggtctctggctaccatgcctacttctctcccccgtagtctcagccagtgccatcaactgcagcccttgcctcagcatctgagccaatctagcattgccagctcaatgtctcatagcaccactgcctctgatcaaaggctcttggccagcattacaccctcaccttcaggccaatccatcatccgaacccagcctggagcaggggtccaccccaaggctgatggtgctctgaagggagaagctgagcaatctgcagggcaccctagtgagcacctcttcatctgtgaggagtgtgggcgctgcaagtgtgtcccctgcacagcagctcgccctctcccct

SEQ ID NO: 37631 - DNA, 699 bp, Macaca Mulatta
  misc_feature (1)...(699): n = A,T,C or G
actaaaaatagtcgggcgtggctgtgcacgcctgtaaacctagccacttgggaggttgagagcaggagaatcagttgaaccccagagacgggnnnnnnnnnnnnnnnnnnntnnnnnnnnnnnnnnnnnnnnnnnatacagagctagactctgtctcaaaataaattaaatgaatatgtcgtaaatacttttacaaatacaaataaaatgcaaatacattatgatgtataatgatggactatgatctctaattatagtgatgggctacaggtaaagaaaaaagggaggacaagaagaggtagacaggatagtatgatgaggtcaacaggctggcattttaattgaaataaactggaaagacatggtaagagaacaggatttttaaattagaaacttcctttactggtgatgtcagggttcaaagtatagccttggggtcaataattgaagaaagcagaatcaattttagcttgtctgtcttacaaaaacagcacaaaacataatggccaatgttttaaaacagaagcctcttttggatgttttcaagtaacctactttcatgtttttcaactcggcatttactaaatatctactgtatgcgaaacagatcagcattaagagagtgcagagatgactgccctcatggattttagaatctaatgggagaaaccgtcagcctaatccgagtaattaaataga

SEQ ID NO: 37632 - DNA, 963 bp, Macaca Mulatta
acgaggcagcagctttagtgagaggaacgtggttttctcctctcttccgcatggcgtgtgctcgcccactgatatcggtgtactccgaaaagggggagtcatctggcaaaaatgtcactttgcctgctgtattcaaggctcctattcgaccagatattgtgaactttgttcacaccaacctgcgcaaaaacaacagacagccctacgctgtcagtgaattagcaggtcatcagaccagtgctgagtcttggggtactggcagagctgtggctcgaattcccagagttcgaggtggtgggactcaccgctctggccagggtgcttttggaaacatgtgtcgtggaggccgaatgtttgcaccaaccaaaacctggcgccgttggcatcgtagagtgaacacaacccaaaaacgatatgccatctgttctgccctggctgcctcagccctaccagcactggtcatgtctaaaggtcatcgtattgaggaagttcctgaacttcctttggtagtggaagataaagttgaaggctacaagaagaccaaggaagctgttttgctccttaagaaacttaaagcctggaatgatatcaaaaaggtctatgcctctcagcgaatgagagctggcaaaggcaaaatgagaaaacgtcgccgtatccagcgcaggtggccatgcatcatctataatgaggataatggtatcaatcaaggtcttcagaaaaatcctggaaatactctgtttatggtagaaaactgacatttgaagctggtctggtgggattggagttctgatttgatgaaagtggtcgagtaatgatgttgactgggtaagcgttctaaaagtaaaattcagcaaagtaatacagaaggcaacgaaaggacgacggaagagcgccacaccgagtaggatcggagctagcgtaacctgcttttggttgcttgaccctctctggcgcctctggaga

SEQ ID NO: 37633 - DNA, 786 bp, Macaca Mulatta
  misc_feature (1)...(786): n = A,T,C or G
ggtatttgacagcnnnnnnnnnnnnnnnnnnnnnnnnnnngagatggagtctcgnnnnnnnnnnnnnnnnnnnnnnnnnnnnggctnnnnnnnnnnnnnnnnnnnnncgcctcccaggttcgagcgattctcccgccttnnnnnnnnnnnnnnnnnnnnnngcaggcgctcgccaacacactaggctgatttttgtgttttgtagagacagggtttcgtcatgttggtcagtctggtctcgaactcctttgataggtgttttttatcttaggtgttcagtaaatcatttgagtaattcttagccctcagaacaaagtaatggtattggctttggtctcagcctactattgttcattgatgaagctgttgcaggaagagccccaaggtcccaagcatcacacctagtactgggtgacagttcatcagtcgaacatggcatgacagggaaaaggcctggcaccgagaagcagaatttccaagagtatgagtgaatgaatgatggtggccagtggaaggaaattatgaacatgtgtattccccaagcatgcagaaaaaccattagtttaaaacacgtaagcttaccagaaaacttgcaggaagaaataaaaggatctctatttttaaagtagtaaagggaaatagttgangaaaaatgctgggtttttctctatttagaaagtctgacatacaccatgtgaaattgtaagggatgtggcccctttccaagtagatgatctgggtgtacaaaaactcgnnantacccctcctcctttttgtgttttgcag

SEQ ID NO: 37634 - DNA, 163 bp, Macaca Mulatta
ttcagactttcaagatattccatattctgattggtgtgagcagaccatccataatcccttagaagtggttccctctaagttttcggggatttctggatgcagtgatggggtgtctcaagaaggctcagctagcagcaccaaaagcacggagttgttactaggt

SEQ ID NO: 37635 - DNA, 783 bp, Macaca Mulatta
gggcaataaatttatatactttttgaggggttcttctgggggtgctaatcaggcccctattatgcttagggggagccctggtgctacttgcttgaagttttcagttgtaagtaccctgatgccttttggaccttgggatcagatcaagaatttcggagatcaagtaccaaggaaatagggacagtctagctgcctcaaatgaggggccctttgcatagctctccttccccctcactgaagctgggtagcctcctggggttgagagggaaaatgtgaaatcttggaatttatctcccttagaagagagccagtaacttacgtaaaaggatgaaaggtcacggcagtagctttggggaaagggaggaagatatggcacttctccaaccccggaaaacattgcttttgaaaactgctgataaaatatgagccggttattacttctgtttgggagactgtgctctctgtggtgcctctcttggctctactccatagataccagacctcttctaggaggatgagcagaccagctttgaagttgacctgtttctctttgtctgccttcccaaaacaccagcccccaggaagacattaagcagtcttaagcttaaattcctactccctcttccaaatttggctcacttgccttagatccaaggcaagggaaagaaaagaaaggggatcccctggctttattactccccctaaatcttcactctgacttcccccaaacccagaaaagattttctccccagtgtttcatttgaaaaaaggggagtatttttg

SEQ ID NO: 37636 - DNA, 532 bp, Macaca Mulatta
ccctgtattttggttctgagggatgagtaatgcgtttttaattggttgagtttgtacattcttcaatcccctaaagccttcagctattctctcttatgtggccaacattttaataagtacagtgtttgcttttataagtcggtgttacttggatgtcctataaaatacccaatttttataaagatgatatttataacctaggaactcatgcctgccttggctgcagtccctgtacatctaatatatactgatttgtttgcccccagagaatttttaaagtatctgcctatatcgtgatcttttgaaatggtcaataaatctggtgcattaaaaatcatctgaaaggttccaatgagcattatttgaagtgtgttaaatttttatatttttttaaaagatacctttgtgaatatactaatttaaatgtagttttagttgtcctttgtaaactatcatgttcttttagatttatgtaacagttatcttttaaaataatctaaagattagatagtctagaagttattttaatctt

SEQ ID NO: 37637 - DNA, 782 bp, Macaca Mulatta
gggatacgcattttattctttcttcctatcagattatttgaagtaagaaacctagagaaactggttactatttattaaaatgttttcttatattaaaatattttaatttattttaaatcaaatctatatatttagatacattttacattaaatatacacagccctgttaaaaattaatccacacatttcttttagaaacaaattttcatagatgacttattttcccaactgtaacacacatgattatttgttaaagttggtagaccaggcatggtgcagaaatcagatgtcatttcaatgaactgataccacagaatttgaagtcagtgtcatcgtggccagtgatacattcttaatggcctaatggctgtattactgaacaaataatcagattgtagaacctgaggactgcctgggacttctctttctttggcccctttttctattctggtaagaaataaatccccctttaaaactcattttttagctgattaacagtttcagcccatacctttattccaaaaccagcttacaatagttttgggccccctttaggcccttaaaaagaagggcgtcaccctctaaataagcacggggttttaaaattctccggcgctaattattttatccggggcaccacgttttttcggggagccccaaattctggcccttcccaaggggcccctcacttttgcccccccacagggccgttgtcgcggtgtcgccctcaaaagaccttttccgaaactcggtcttccccgggcccccattttgcgccgccc

SEQ ID NO: 37638 - DNA, 989 bp, Macaca Mulatta
  misc_feature (1)...(989): n = A,T,C or G
ggggtttttatgttactgtgaatgacctcttttaaaaaatatattcccttttatataataggtgttgctcacatttagaacattttcagtgaactcatttagtccgttgtgacaaaatcaattttaatgaaatttgggcatagaactgtagagtgctgatggaacatacaacaagacatttaagggcatttgaccaactgttgatactattttgttttcactattgtgtaccaaaagtcttactttttcaaagtttgaaaatagtaaaatagtggattttcagtgccggagaaagttattatcctattgttatatatacatctaggttttttgttttcccctttcttgcatgatgaattgcctaagcatttgatgagtaaattttataagtcttgtgccagtatacatacaaatttgaggtagatgccgaacgatcccaagccaattggcccttttttaaaatgtgccttaacctcataccttggtttgaaccattaaatggtttctggggtttcctattgataagccccaaattttccaaaagcttttacagagaaattttgggtttaacaaattgtgcttgtttttttaaaaacagaaaattagttttggggttttaggttttgtttttattttacagattctggcagaaaagttctgaataattgtgtcacagacaatgggcagacgcgctctctttcctaagggattttgcgaaccattacctcataatgcttcctcaccagactcgtatcccaagacaaacgacgccttacaaaatcataaaaaccttcatacaaaaaatctcttaagatctgacgatcgtctcctgcggctagtattttttttatctgccgctatctctagcgctattgacaacccgtgtcgataaaagattcatggttatgataagggcctcgcttaggccgcaattgttttttctttgaagaaaggtctataaaatagagcagagccaagttttctntcgg

SEQ ID NO: 37639 - DNA, 819 bp, Macaca Mulatta
agcctctgatgaagcagaagagaaagaagccaagtctgattagtaccatataccatgtcttaccagtggtccatatctcccttcttgcacaatccagaggaatatttttatcaactattttctaaatgcaagttttttagtagctctagaaacatttttaagaaggagggaatccgacctcatcccattttttaagtgtaaatgctttttttttaagaggtgaaatcatttgctggttgtttattttttggtacaaccagaaaatagtgtgggatattgaattatgggaggctttgactgtctcgggtgtcagcttaatattccatacatggggggttagtttttatatcctataatacaaagcatattaaatggcaatatggagtcagtcctgcatttaatgtcttgaacattttaaattacttctagtcccatgttgttttctagtagaattgtttcctaaagaaaaccactgtgatcatggctctccctgtcggaattgtgtgcactctgtaacatctttggttgttagtcctgttttcctgataactttgttactgtgctgtgaaagattacaaatttgaatatgtagtgtacatgctattcagttgtgaactgtgggccgtatgtaacagctgaccaacatgtgaagatactggtacttgatagcctcttaaggaaaatttactttcaaattttaagctggaaagtcactggaataactttaaaaaagaattatgtgactttttagaatttaggtacatatgttaagaattgtgtacaaattgaaatgtctatacggatcctcaaccaataaaa

SEQ ID NO: 37640 - DNA, 750 bp, Macaca Mulatta
agaattttgttacctgggtttatgagtaaaactaatactattgataacttacatttgcaatgtaccaaaagctaaaagttcctttctcataagtttcttggaagggctatgtcagttttcattgcctgtctcctaaaagtgacctactgacaaattgatggagtaaattgattccaagaaagaagaaggtgttcagagactcctctctggatgcaattttaaaatatattggactacaacgaaagacacaacagtcaggttatttaatgcacaacttcaatcccaaatacagaatcaaaagtttttctaaagtaaatgttctgttttcactctacattgtagctctctttggtatcagaaatggtcaagcaggagtactggtttttcccattggaagaaaacgcacttaaacctacttgaagaaaatagagaggtcaagaacccctataagtatagccaatgtttggcaattatatcaacatttacattattaattgaaccaagctcaaggtctttttcattgcttagtatcacatatcagacaagtttttgatagaagattaaagcatattaaaaacactcatagacaacttggaacgttaccattcttaatgctattttatcagtttgtagttgtaaaatcgtttttggtttcattttctggccacataagaataagaaaaccacagtagaagtggctgcctctgtgtggcaggcagagctggggaatactgaaaaaacatttccttg

SEQ ID NO: 37641 - DNA, 1081 bp, Macaca Mulatta
  misc_feature (1)...(1081): n = A,T,C or G
ggctcacaggaaactttgcagtcacaggatgtccaatctttggcagtccaagctcagctccaggacagagctgtccaatagaaatataacgtgagccccatatacaacttcaacatttctagtatattttcaacaagtgaagttaatatgcatccaaagtatttcaacctgtaatcaacataaacttttaatgagatattttatattatgttttggtactgaatcttcagaatccagagtgtattttacatttactggtagcacatctccatttggactagtcacatttttaagtgctcagtggccacatgtggctggtggctactggattagacagcataagtctggaagatggaagctagtgcagaaacctcgtttaaaaaacaaaaaaggcaagatgggcttgagcgattcaagaggcaactaaaaataaaattaggacccagtaccttgtttgacacagtttgaccttcgattttgctctcttatcttccctcttcccttaatatctgtatacaagtgttgcttcaaagtaccaaggtcagaaattaattgagtacgatttactaaagtcatgtggaataaagccactgaaaagaaacggagagcctgtcgggacttccgggctcagaaccagctggcgcacgccctcacttgtcagttggacttctgccttgtgaaatggaagcagcctttgttcctctctggctgagcaagttcctgaggctgggagacactaggaaggcttggtaggaggggaagaaagtcagggaaaggtgtcaaatcagaaacatggaagaagaagggaacagatttgagttggtgggtaaaactctaaaaatctaaatctgattcttatgtaagggttgagcgaattagggagattgctagtggaaattggagggaatttgttttgcatcatttgtctaggatctatgcaaatacagctccactaaaggacccataggcgaagagccagccttgccttttcttacatgattttgtttacaaaattttactgggggacttttaagatctaagctatangagttgggaaaaaatatttccacttagatatttt

SEQ ID NO: 37642 - DNA, 792 bp, Macaca Mulatta
ggcaaagttgatagttgaagaacataagtggatgatggcatttgaggccactggtgaaagtatgttttctctaaaatatttctctaatagtgatataaatggctattttattatgatgtttgtatgtgttttgtatttctctgtaaaccgtgctccagtctttgtttttctgttaccataatgtaagcgaaagtccaggaacagagactacatcccacgaaactgacattgttaaacacactaaaacaaaagtacttacctcttgaagatttaatatataatgcttgacatgatacatgtacatgataaatgaccagatgcttatggtctacattttcctttattctgttagtattaccttccttaatctttgttcattaacacgctaattcctcttcagtgtttactttctagtgacagaatgttaatatttgttacaccctggcagaagggagagaaatgtgtttggggtgggtaactaaatttttgagtgaaatatcctaacaatgaaaatggaagagggagacaccaaaagagttataacaaaaaacaacagttttttttttagcctttgactgggctctttaaatagcctacaagaacattctgttttaacatcactttttagtgaaaaaaaaatgtgcccgaactaccatgtggccttccaaaggggccaaatgggcttttagcggccctaaggcctaaaatttttgggtcattttaacatccagaaaaatgtttaaaagttaatggaaccttaaatatggcgccccctttttcccaaaaaagtgg

SEQ ID NO: 37643 - DNA, 754 bp, Macaca Mulatta
ggtcctcatcctccaccatcttccaggcgacgtctggtcaccctgacctgtctttaacaagaattgccttcctacccctgatgtttcttcttagtaatttttcatgcaccaatccccaccttgttccttggctataaattctcgctttcccatcctgtatttggagttgagctcaatctttccctacctgcaaaatcccgctgcagtggtccctatatgtgttaagatggtcctgaataaagtctgccttactatgcattaaaaagtatcactgagtagttttttcttcttaaaaacattatgtgcttcctgggtctgatgcttgaggacaaacaagatgtcttatacctcatctctataaaatagataatagagataattcagaaactatcgatattcttaagggatctctgttgaaggtaatgccaagtgcagagatttctggacaatttgcctacctatagtctctgcgactgcaaatgaattaatattgcttgggcattaggactggggaacacctgagagacttcagggaagactgcacttcagatataattttattgacaaattcagttgttttagtgggactttaggtaagattgaatggcatggcaaagcctcaagagtgtggctaccccagaaaagtttcatggaagttacaggcatggaggcagaaaaatccctgataaggccgtgtcctccctaatatgggtgtgggacattaagtttttttcccttaaaagaaaaatatcaa

SEQ ID NO: 37644 - DNA, 151 bp, Macaca Mulatta
gatgaagtgcgcacagggacctacaggcagctcttccacccagagcagctgattactgggaaagaagatgcagccaataattacgctagaggccattacaccatcggcaaggagattgttgacctagtcctggaccggatccgcaaactgg

SEQ ID NO: 37645 - DNA, 938 bp, Macaca Mulatta
  misc_feature (1)...(938): n = A,T,C or G
gggaaggaggaagcgggtattcggctggagagtggtcgccgctggaacaccgtgaactaggagtgagtcggagctgccgtgctgcccaggccatggactgtgaggtcagcaatggttccggcctcagggatgagtgcgtcacaaacctgctggntggtttncggggcttccctccaaagctggcnnnnnnnnnnnnnnnnnnnnnnnnnnnnnnnnnnnnnnnnnnnnnnnnnnnnnnnnnnnnnnnnnnnnnnnnnnnnnnnnnnnnnnnnnnnnnnnnnnnnnnnnnnnnnnnnnnnnnnnnnnnnnnnnnnnnnnnnnnnnnnnnnnnnnnnnnnnnnnnnnnnnnnnnnnnnnnnnnnnnnnnnnnnnnnnnnnnnnnnnnnnnnnnnnnnnnnnnnnnnnnnnnnnnnnnnnnnnnnnnnnnnnnnnnnnnnnnnnnnnnnnnnnnnnnccgcccnnncccccccgccccnncccccccnncccccccccccgcccnnnnnnnnnnnnnnnnnnnnncccccccccgtggcccnncnngcnncnggcgcgcccccgccgggggctgcggcccnncccgtaggcccgggcggcggggacgggccgtgccgcctcggtgcgcgttcgcagccgccccggaggcccggccggcactcctgtgcccatttccggggagaggaggcggtccctgaccaggccgcgcgtgcgcgacggactggggggttcgccgtcgtgcgagcgcgtatcctgacgcggccccggcgagtgccgatagacgtctcgcgtcgaagtcccgaagatatcaaatcctgcgcatacgtctccgcgccatctttgtcgggcggcgcgtacacgcgacacgccagcagctgcagcgccccctcactgcggtcgggtgcgccccctcagccggtcgccccgtctcggcgcgccga

SEQ ID NO: 37646 - DNA, 1625 bp, Macaca Mulatta
  misc_feature (1)...(1625): n = A,T,C or G
ccactaccaccctagcccagcctttccactgctccaggaaaagctcttctcctgcccacctctgccctctagcactgcaaacttgcatggctaggccatggcctctgcagccaggaagactgggcaccccccaggcgagagctagtggggtgcagaggcctctctcacgacagacagcccttggggctcgttgcactttaagaaataaggtctgtggtatattccagggnnnnnnnnnnnnnnnnnnnnnnnnnnnnnnnnnnnnnnnnnnnnnnnnnnnnnnnnnnnnnnnnnnnnnnnnnnnnnnnnnnnnnnnnnnnnnnnnnnnnnnnnnnnnnnnntcactgtctccagttcacaatggccaacgaaggtgcttggaaacacnnnnnnnnnnnnnnnnnnnnnnnnnnnnnnnnnnnnnnnnnnnnnnnnaacccagggtccaggcgtgttttctgtgaatgttggatgatgaatttttgtcttttctggcggagctgtgcctggccctgtaggcccagggttgactggaaggtgacatctgtgtttcgttgtagctgaggttggcagataggttcccaaactcccccagtcctgggccccagcagatgaggaaacggccgcattgactcaccccgcccccttttcaaggtcttgctcacctggtcagcacctcacggaattgggagtggagggaaagcatggtggtggcctgggccatccctgtatgaacgcaggcaaaagcagcccagtccccctcactgcttgagctaacactgccacctgttttgtgagcacgaaagccacggcctaagccacctggcccctgattccacagatgtgtgtgcaaccagtgacttccccggagtgtgaagggggcggtgaggaggagcacctgggctttctacccgtcccctcacagaagtacctgaaactaggcctggggcacccccaacgcagcgccctgtcagccaaggtgggcaggcggggactctggcagctcatgtccgaagggagcctccatgcacaggaagccccggggttcctcttgtttcccccactaactcttcagcctctcgtctgctgctttgggctgagggactagaggacatctcagtcgtttgagcggcatggccagtcgtggcaggccaggcttcagcatccggtcagggcagcgtgcagnnnnnnnnnnnnnnnnnnnnnnnnnnnnnnnggagcatccctggggattgttggaaccgtgctgtccccacccctgctttcatcggggctctaagttctggaaggtgcttgcacagagggtgctcatgggacccgcatgcagctctcagcactgggcgggtgggcgttggcttgtccagaatggggacgtggggcagccactgccacccagcgagagtgcagacaccgtgtgagggaacagcagcccttggtgcaaagccagagactgatcctggctctgacggctgaggagggaggacccgaggctgggtggtgtggctcgtgaatccacttagaattcttggcttgtgtcgcacactgggtgtcacggcacacatttactctgcattgtccctgtctttcctgtcgcctagcattggagaggaagagggagagagctt

SEQ ID NO: 37647 - DNA, 716 bp, Macaca Mulatta
ggggcaggggagggagacctcggtgggcagaaaggaaccgggttgtcttgggccgggcagggcgggtaagttgccgtaggggcccggtccgtgagggactgctaaggaagaggctgcatggcgcggtagtcccccgagtggaggtcggcggcccctgggaagccagagagtcggagggagttcatctggagcggccaagtggtgactttcaaaaggaaataggatcatggcagcagatgatgacaatggtgatggaacaagtttatttgatgtcttttccgcttctcctcttaagaacaatgatgaaggctcattggacatatacgctgggttggacagtgctgtttctgacagtgcttccaaatcctgtgtaccatcaagaaattgtttggacttatacgaagagatcctgactgaagaaggaactgcaaaggaggcaacatataatgatttgcaagtagaatatggaaaatgtcaactgcaaatgaaagagctgatgaaaaagtttaaagaaatacagacacagaatttcagcttaataaacgaaaaccagtctcttaagaagaatatttcagcacttatcaaaactgccagggtggaaataaaccgcaaggatgaagaaataagtaatcttcaccaaagattgtctgagtttcccattttcgaaataatcataaaaccgcaaggacatttgatacagtttaaaacaaaagatc

SEQ ID NO: 37648 - DNA, 1022 bp, Macaca Mulatta
cacgaactgcatgtttaaatggaattgttaaacttgatgtttaggagcgaatgcagacttcattggatggttggagtgggggaggggggaaggaggtatgcaggaagaagggttctgtgctcctgagattagttcagatggtctaaccattgttctatatgtgcattttagttaatattgtgtattaaaggataagtcttaatgctcaaagtatattaaaaatagatgtagtaaaccagtccctttgtgaatgtccttttgttatattttaggaaggcctgtgttctgggagtgaccttcatgagttcacctcttggagctagacatcctatacttagtcactgggatggtggaagagggagacgaggaagggtgaagggaagggctctttgctagtatcttcatatctagacgatggttttagatgataaccacaggtctatatgagcatttttagtaaagtgcctgtgttcattgtggacaaagttcgttattttgtaacatctaagctttatgaatggggtgacaacttatgataaaaactagagctagtgaattagccaatttgtaaatacctttgttataattgatagaaaagatgcatcttggacatggaattgttaagccacctctgagcagtgtatgtcaggactgactgttcattgggttggcagcagagaggcagaaggaagtatacgggaagaggtgtttgcagatgtgttcatgtatgtccttatttacattttgatagccattgatgtatgcatctcttttagctgtactatagaaatacattaagtaactcaatgggaatatactttgctaatattttaatggtatagatctgctaatgaattctctttaaaacgttatacttagtatattctgttgctgtgtggttcattttaaattgagcataaaggggaatgcagcattttaaatccggaactctgccaaatgctttttatctaagaggccgtggttgcccattttttggccttcccaaggaaaattttttggcc

SEQ ID NO: 37649 - DNA, 778 bp, Macaca Mulatta
  misc_feature (1)...(778): n = A,T,C or G
gggagcttatatactttgaactttcttgacttggattctaattatgaggaaaaataatctctacaagacatatgaaggaacattatcttctaactcctgtcagttttattaattccaaaggcaaggaataattcactttgaggggggcctttactgttaatctttttgtagaatcgttatcagaaattagctggacgtgnnnnnnnnnnnnncnnnnnnnnnnnnnnnnnnnnnnntaggtgggaagattannnnnnnnnnnnnnnnnnnnnnnnnnnnnnacatggcaagatctcatctctactaaaagtttttttaaagttttttaattagccatgcatggtagtgcacacctgtagtcccaggtgaggcaagaggattgctgtgatctcaccactgcactctcgagcctcagcgacagagtgagaccccgtctcaaaataaaaataaagaaacatgggaactggaaatataatactgtacttgttttggactccatatcccaaagttataaaattttatcaaatacttcctagtctatagtttaagaatctcttggccgggcannnnnnnnnnnnnnnnnnnnnnnnnnnnnnntgggaggcaaagcgggcggatcacaaggtcaggagattgaagaccatcctggctaacacagggaaaaccccgnnnnnnnnnnnnnnnnnnnnngcnnnnnnnnnnnnnncatactggcggggtgctttgtaatccccagctacaccgggaaggcttgaaggtgggaaaaattggcgtggaa

SEQ ID NO: 37650 - DNA, 796 bp, Macaca Mulatta
  misc_feature (1)...(796): n = A,T,C or G
ggggtggccgccatgttctctgtgtgtctttgtcttttgtgtgttctttcattctctaccacccccggcacggaccccaacaagtggcgcagcgagcagggtcagcaccgttctggagaattccaagaccaaggtaccagaagatctggaggtgtctgctaagttttactttcttccctgaaagaatatggaacagctgtatgatctacgcaatagttgatgcaaaactacatcgaatctccatgctatttgccatatctttgtcaactgatatcagtaaaagcgccacgacttggtttctcaaacatacaagtgagatcactctcctcatgggcaaccttcaacatgctggaagaccaagtaagactgcagataaatgcttggtgatttgaaacaaacaaaatatattctaagtattggtgtgttcccttcagtttattgcagagacctcagtgccgcctgtatttttttctagatggagaatgtgtaaaaagctttaaagtacaaagttttacagtgatctccccattattaaacaagatcttactcttctttcaaaagcagtatatagaagtcataagcgtctctatctctaaaattataagtaaacccccttggagaggtttagcatgaataaatggggaggagaaagaaaacagaatnnnnnnnnnnnnnnnnnnnnnnggaagggtggaattgcaagtgggcatttagcatgccttctcccacctaagaaaagacaaaccgtggtgtaaaagaatccccacctgttggaacttccttttccaaaaaattt

SEQ ID NO: 37651 - DNA, 457 bp, Macaca Mulatta
  misc_feature (1)...(457): n = A,T,C or G
ttgctgataacagaaggacgaccatctgaatgttctgtaaaaggtcgaacagaaagctttcatctttctccagcacagtcttgttacccagtaactaccaaacatgaatgtagtgacaagctggcccagnnnnnnnnnnnnnnnnnnnnnnnnnnnnnnnnnnnnnnnnnnnnnnnnnnnnnnnnnnnnnnnnnnnnnnnnnnnnnnnnnnnnnnnnnnnnnnnnnnnnnnnnnnnnnnnnnnnnnnnnnnnnnnnnnnnnnnnnnnnnnnnnnnnnnnnnnnnnnnnnnnnnnnnnnnnnnnnnnnnnnnnnnnnnnnnnnnnnnnnnnnngaatggtgaccgatttattgaagagaagacacttctgttggctgtccgctcatttgtgtttttttctcagttaagtgcgtggctgagtgtttctcatggtgctattccacgaaatattctctaca

SEQ ID NO: 37652 - DNA, 519 bp, Macaca Mulatta
atagagtgccaaggtaacattgcattccttggagggcttcagaaacaagattctcccctgtttgtggagtatagctctcctgaaggtaatcagttgctgtcggaacttcataaatataagcagcaaatatgagatgcaattatgattttcttactatttctgagaaaggcaggtccctaaaacagagcagaatagtcatggactctgagatttgaaggccgagaccagtggagtgaggaaagtactcacatccagccaagctgagtggaagtgtgtggtctagaaggaaagcaccaactgcaattcttaaaaccagattctgaaattaggagggtcaaagacatctacaggctgccagtgctggaggacaagggtttgagagtaaatatcctgtgtttgaaattaggaatagtttaaatcccatgggtttaaatccctgcaagagaacaagaaaagaaaatgtaaaccatgcccactcctcaaaagatcactccgctgggcctagaagcttaggttctt

SEQ ID NO: 37653 - DNA, 1294 bp, Macaca Mulatta
  misc_feature (1)...(1294): n = A,T,C or G
tcccccaggctttgccccttgaccgccacctggcactggctgcctaccagatccattncancntgngacccagctttgctggcccagcagtgctggattgnnnnnnctggtgtccactctgggctgggaactggggccgccgccgggcctatcaggcagcctcttgggcttgggcacagcaggtattacaagacctggaccctcaggagcnnnnnnnnnnnnnnnnnnnnnnnnnnnnnnnnnnnnnnnnncactgatggaggatacgctgcggatgggccaggcactgcggccccatggactctggggcttctatcgctacccagcctgcggcaatggctggcatagtatgnnnnnnnnnnnnnnnnnnnnnnnnnnnnnnnnnnnnnnnnnnnnnnnnnnnnnnnnnnnnnnnnnnnnnnnnnnnnnnnnnnnnnnnnnnnnnnnnnnnnnnncccacccaggctgccgcctgcccaccaccaggcctttgtccgacatcgcctggaggaggccttccgtgtggcccttgttgggcaccgacatcccctgcctgtcctggcctatgtccgcctcacacaccggagatctgggaggttcctgtcccagnnnnnnnnnnnnnnnnnnnnnnnnnnnnnnnnnnnnnnnnnnnnnnnnnnnnnnnnnnnnnnnnnnnnnnnnnnnnnnnnnnnnnnnnnnnnnnnnnnnnnnnnnnnnnnnnnnnncccggcgagatccagaacagatggaagcctttctacacctgtggccagacggcagccttggagattggaagtccttcagctgccactgttactgtggctgggctggccccacctgccaggagcccaggcttgggcctaaagaagcaatataaagccagggcccctgccactgcctcttcttttccctgctgccacttttccagttctgtagctactctgtcccactcttgctctattcaggttacagtcaaccctcccaagcacacaccccgcttcccttggaatccctgaggggtagaaggggccagaaaaaacgcttataaaaccagaggccctctgagatcatgtgactcctccatggcaaggaagcagttccagggagagtcaggttccagctagttagggctgccagcctagggctttgtgcctacacctcactaggcccatggagaggtcacagaagatgggccgtgcacgggcagatgggcccccaaaaatcttggctaaggtcggtaaaagtgttaagctgttgtctgcactgtttcatcataaagtcacttttttccact

SEQ ID NO: 37654 - DNA, 639 bp, Macaca Mulatta
  misc_feature (1)...(639): n = A,T,C or G
ggggttagcagtgtcagtcggggaactagggtaacagggatacacaactgtccgtcagagatgcttttggacagagtttttaacagagtcatattacaccagaagaacacaccagggggagcatatatgggactattagggtatgtagccgattggttgcagaggctgttgctaaatgccgaataacaataggggtatttctcttggtatgggtcacggtacagggctacatcgggtatcgtgactatcgatgagttaaaacctgtatagtttgtgggaggggaggatagaggaacagccgttaatggtggtcttcctagggttgcacacataaagcaagaggacaggtcgcctaaaccagtgaggttggcgaatgctagcccttcccgtaatagagttagccaggagaagggctgcaagtcttgtgataacttggtttcttgcctgtggatttgtgtgtggattaagggttgaatctggactagacttctccacagatataaatggctactgggccaggtactagttgatgagtattatactcccncatgttgtggggttgtccaccgagagtcccatgggtctctaatttatccagtgtaagtgacgggagactcagttttgtaaaataccaccctn

SEQ ID NO: 37655 - DNA, 795 bp, Macaca Mulatta
  misc_feature (1)...(795): n = A,T,C or G
ggagttagccaaggtggaggatgggaaaagaatggaactgtcccagctactcaatgagatcagggcaaactatgaaaagatcctcaccagaaatcagatagagacggtgctctcaacaaggatccagaagaagacataagcaaaaaaatggacaaagatgaagaggctctgaaggcagctcaagcagaactcaaggaggcccgacgccagtggcaccacctgcaagtggaaattgaatctctccatgctgtggaaaggggccttgaaaactctctacatgccagcgagcagcattaccagatgcagctgcaagacctagaggctgtgattgaaggactagaaaaagagctacaggaagtaaggcgcggcatcgaatagcagcttcaagagcatgagatgcttctcaacacgaatatgaggctggaacaagaattagcaacttatcgccgcctcctagaaaaagaagaaatcagatattatggttgtatccaacgtgaaaaaaaagacaaaaagcctaccacaagtaaaattggtttttgtttttccctcccccattttaaaaggaaataccttttaacacaaaaggtcccccaaaagttttgaaaatggaaaaacttaaaaacagggtgcccaaaacaggggtaatctaaaaaggggaaaaattcggttaaaggaaaaaagcccgaaaacctcatggggcaccttttccnnnnnnnnnnnnnnnnnnnnngagaaagtttaataaaacaaaaagggggaaaggggttcctgtccnnnnnnnnnnnnnnnnnncct

SEQ ID NO: 37656 - DNA, 1005 bp, Macaca Mulatta
gcacgagctgaagttgagatacatccttttcctggttcaactctggttttctagaactctgctactacaaggtttttaaaatctcaattaccatacattagtctattctaacaatcttccaatagtgcaaatttttctcaggattttggtagaatatcaggaaaaccatttcctggtataatttttctctgtaatagagaaatcctatatatcatgtaaggtgaagggtagcttttatgtaatagttcactttgaactgtctagcagctgtctagcagctttcacagacacagacaggcagagagaaatacagggcagatatcttaaccattatcctagttctagggttttcagtcaactctgtctcaaagactgcttctagaggccagcaagagaatagacatttgttttctgtcttgtagaacagaaacaggatatgaagtatacttttgccctttaggtggatttttttcttttctaacagtaaaattatggatatgccttgtagttattgtcatgggattgaacagtgacacaccctcaagatgtaaggaatttattcaactgattgtccaaaaggttttcgaaatcttataaactataagtctttgaaccttaaaattaaaataaagcttagagatccatctacatcttcttaactaggaaaaaaaatcgagagcttaggaacatgtgactatgacacacactgatttgtcaaagtgaactagaaattaggcttcctacatctgttcaaggatgtgcccttctccaaactacccaaacagcacggacaattgatcaccactgtggaaagagtcctagaaatatggcgggtttttttaacaacggcagaaataccgggtgtaataaatcataataacaacgcagatctcagcctcctccctcctcttcatcttttctttttttgtctttttctctttatcacacaacgacgaaacagagccggagagtatgagcagacagaaaatgaatagagggggagga

SEQ ID NO: 37657 - DNA, 486 bp, Macaca Mulatta
  misc_feature (1)...(486): n = A,T,C or G
agccccaagacataaatgctcatggtacactgcactgaagaactgctgtgcaattcagaggcaggagccaaaagcttcttaataactataataactaggatgcgctagagtcttctttctttttaactattttcttgaagacctgaagccatctaggtaaccttaaggtatactttcccactgcagagaacagaaagacttctaaatgattaccagagggaactcctccataaagcaagccacccttcccatgcaatcacatgtacaaaattctatttctgtgtgtatggaatttgtctaaagtttgtttaaagttaaccnnnnnnnnnnnnnnnnnnnnnnnnnnnnannnnnnnnnnnnnnnnnnnnnnnnnnnnnnnnnnnnnnnnnnnnnnnnnnnnnnngnnnnnnnnnnnnnnnnnnnnnagnnnnnnnnnnnnnnnnnnnnnnnnnnnnnnnnnnnnnnnnnnnnnnnnnnnnnnnnnn

SEQ ID NO: 37658 - DNA, 725 bp, Macaca Mulatta
  misc_feature (1)...(725): n = A,T,C or G
gattgatgtgccactatacacatgttcacaagaattgacatttgcacaacagactttttaaaaacagtatttattatttcagcatgggaaaataagtttttagaaatgaacttttgggtaagaggaggaatcaattaaaaacattcaaaaaataaacttttagctcnnnnnnnnnnnnnnnnnnnnnnnnnnnnnnnnnnnnnnnnnnnnntnnnnnnnnnnnnnntacccaatttcgcccgtatagatgagatcgtattacagattcactgagccgtgcgtnnnnnnnnnnnnnnnnnnnnnnnnnnnnngtnnnnnnnnnnnnnnnnnnnnnnnnnnnnnnnnnnnnnnnnnnnnnnnnnnnnnnnnnnnnnnnnnnnnnnnnnnnnnnnnnnnnnnnnnnnnnnnnnnnnnnnnnnnnnnnnnnnnnnnnnnnnnnnnnnnnnnnnnnnnnnnnnnnnnnnnnnnnnnnnnnnnnnnnnnnnnnnnnnnnnnnnnnnnnnnnnnnnnnnnnnnnnnnnnnnnnnnnnnnnnnnnnnnnnnnnnnnnnnnnnnnnnnnnnnnnnnnnnnnnnnnnnnnnnnnnnnnnnnnnnnnnnnnnnnnnnnnnnnnnnnnnnnnnnnnnnnnnnnnnnnnnnnnnnnnnnnnnnnnnnnnnnnnnnnnnnnnnnnnnnnnnnnnnnnnnnnnnnnnnnnnnnnnnnnnnnnnnnnnnnnnnnnnnnnnn

SEQ ID NO: 37659 - DNA, 508 bp, Macaca Mulatta
atattgttcgaaaaccttagtaattgttttcttcccaaacctatttcgcccgtgggattttcctctagcaaaccaagtttttcccagtgccgacctcactttccccacttggcaacctgttgcccaggcgtcgaggaaattgattgtctcgttggcccagtgtggtgctgacttggttcctgtcccgcaggcctagaggagaaacccaccattgcgtttgccacaatccccgcggccggtggagtcatccagacagtggccagccagatggcccccggggtccctggacacacagtcactatcctgcagcccgccacacctgtgaccctcgggcagcaccaccttccagtccgggccgtcactcagaatggaaagcatgcggttcccacgaacagtttagctggcagcgcttacggtgaggccctggccctgttctgcatgccacatccgaaggtctgtggctcccagtagtcagtgcagcacgagaatgttctcccagtatcacccg

SEQ ID NO: 37660 - DNA, 812 bp, Macaca Mulatta
gctcagaaactgaaggagtaccttggatttgaatgtcctctgagtcaactctgcccagctgcaaatactctgaatgagatcttcttaatccatttcatcactttctgccaggaaaagggagttgatgagttgctgaccaccaccaagatgaccaagcaccaagccttcctgtttggcgcagactggatttggaccttttggggatccgacaagcaaataaagcttcagctggcagtacagactctgcagatgtcttcacctcctcctatggaatctaaaccttatgacctttccaatccagaaccaagggtagaggagtcttcctggaagaaaagtagatttgataagctggaagaattctgtaacttaataggagaggattgcctgggtctgtttatcatctttggtatgccaggaaagcctaaagacatcaggggagttgtcctggacagtgtcaaaagtcagatggtgaggagccatctgccaggagggaaggctgtggcccagtttgtcctggagactgaagattgtgtcttcatcaaagatctgctcagaaactgtctgagtaagaaagacgggctgagagaggtgggcaaggtttatattggcattctctgatttggatatgtattatgtgactggcctgtaagaggaaaagaaaaaagattctaataagcaagctcatctatttgcatcattccagcatgggatttttttttcatttgttttcccattgatcgaaaatgattactgggatcaaagtatattaatgccacaattacagagggagagagaaagaaagaaaactctgg

SEQ ID NO: 37661 - DNA, 638 bp, Macaca Mulatta
gataactagataaactattttaatagcttacagtatgagcattatggttaaactgaaagggcttaagatcatgttatggtcaaccagtaaaatcacttacatccatgagcaacaaaattgtggcaagcgaattttgagaaatcaattttaatagcattatggggacattactgtagttagaaaggaagtattgggaaaacgaagctgtcaaataatagtgaatatcagatttccaaatttaaattattattgagttaaatattaaacacagaatgtcaattttcaagataagctacattaagagagttctatctactctcacatctacctgcataaagataccataacataaacttccagaaaaacagttcaaacctcatgtaggatttgaagagctgctctgtcagtgagttaggcgcaatgtctccgtgctcctagctgagaggtgaggaaaagcttcaaccatagagacactaccctaggtatattatatatagaaatgtaaaacatagcattgttaaacagtaggtagagcttatctaatttttttttcttttcactattgcaaaacctgaagttgggtttgtgggtagagtaatgactttaatgtaatatcattttaaaaattactttccaat

SEQ ID NO: 37662 - DNA, 462 bp, Macaca Mulatta
cttctcttcgccgcagtcgtaggagtggcttgctttctctatggatatcttaatcaagataactgtacatggaggtaacctctgtttattccttgttgccatgctgaaaagtttgttagacataaaattattttcatgatcttaaactattttggtaagacaagactgactggagaacactcattgcttggatgatatatcccttttgttctgagcataataactaagtgaaatggaaaaatttttttcttagataatccaacccagtttctgacaggaatgttactcctaggaaacactccaatattttaagacaatattttgtttgaaaaaggaaggaggactggaggctggaggattgcccttgaacttttggcccccagaggaatgtacactcagccctgcagatgtgagccaaaagcagctctgatttcttcagggttccactgggaaaattagtgg

SEQ ID NO: 37663 - DNA, 691 bp, Macaca Mulatta
  misc_feature (1)...(691): n = A,T,C or G
gggagaaacctctgtccctagggagagtccattcatatgtgcatatggtctgggatgaaccaggggtctggccccatcgggtcacaggtgatggcaaatagaanagaagcaaatgaagganacagttggataagtangtgacatgaaaggtgggacctggttacctctgtgagtgctatggacagttcccagaaacggtggccccactcacaggtccatggggtccgaacccttggactctggcaaggatcaactgcccctgaatggcccccttttttattccagggggggccctttccttcccccattccccccttgcaaaaggggttgggaatttttggggggattccaaaaccccctttttttggcgaaaggggttnnnnnnnnnnnnnnnnnnnnnnnnngcgggggaaaaattttgggggggggcgcgggggggtnnnnnnnnnnnnnnnnnnnnnnnnnnnnnnnnnnnnnnnnnnnnnnnnnctcnnnnnnnnnnnnnnnnnnnnnnnnnnnnnnnnnnnnnnnnnnnnnnnnnnnnnnnnnnnnnnnnnnnnnnnnncttcaccctccnnnnnnnnnnnnnnnnnnnnnnnnnnnnnnnnnnnnnnnnnnnnngcgggggggcaccctnnnnnnnnnnnnnnnnnnnnnnnnnnnccctcccnnnnnnnnnnnnnnnnnnnnn

SEQ ID NO: 37664 - DNA, 704 bp, Macaca Mulatta
  misc_feature (1)...(704): n = A,T,C or G
ggagggtgtaaggggaccatccacagctgcggctctgccctgggcccatggcgtttattctgatggggtcattaacactgagtcctgctcatgtccattctaagttgtttttctagggaaaaaaatacagggtttctatacagagataaatatttaacatgtaggtatgaattaaataaaaatggctaaaatatgtgataattcaaaattttaattttcatgtttgtataggaagaatagaaaccatgaaagaatatattctcaaaagagttgttttgggcannnnnnnnnnnnnnnnnnnnnnnnnnnnnnnagaggccgaggcgggtggatagcgaggtcaggagatcgagactatcctggctaacactnnnnnnnnnnnnnnnnnnnnnnnnnnnnnnnnnntggccgnnnnnnnnnnnnnnnnnnnnnnnnnnnnnnnnnnnnnnnnnnnnnagacggggcggatcacgnagggtcagggagatcgagaccatcccctgggctgaacacggtgaaaaccccctntctcttacttagaaaacccaaaaaaactaaccccgggcctaaggtgggcggggccgccctgtaagtccccagccttactcggggaagcttgaaggcaaggaaaaatgggccggggaaccctggggaaggcccgaaaaccttggcaattaaagcctggaaaaatccggggccccctg

SEQ ID NO: 37665 - DNA, 867 bp, Macaca Mulatta
  misc_feature (1)...(867): n = A,T,C or G
ggggattgagaacaatattttgggttgaggagagtgatggttgaggccattatttagtgggagcattggcattttgaacactgtaaacataaaagaacacttctgcctgctgtttgtaaaagctctttgggaagatcttttacgaagaccaactttttaaaatgtaaattacctacctaatataagtgtcctaagacatgtatgtaaacttccgaaactgttttgtctgtgtatttagaaaatacacaagagtctttattcaaacctaaaaatataaacttgtgagcactaaactgannnnnnnnnnnnnnnnnnnnnnnnnnnnnnnnnnnnnnnnnnnnnnnnnnnnnnnnnnnnnnnnnnnnnnnnnnnnnnnnnnnnnnnnnnnnnnnnnnntgggccccctcggccctcgaaaaactttttaaaaccatttctttttggcgccccggcgccccctaagggaaagggaaaaatggggcaaaagcctgttttccctaaggaaaatcccggggccagggaaaaaaggggctttgggaatccctccacccaaataaaaacgccggcggacgacgtctacatcaaatggtctgagctatgatctcacgacacagtcatatcccgcgccnnnatgtatcgcagatgcctccnnnnnnnnnnnnnnnnnnnnncnnannnaananannnnnannannnnnnnnnnnnnnnnnnnnnnnnnnnnnnnnnnnganannaanaaaaaacnnnnnnnnnnnnnnnnnnnnnnnnnnnnnnnnnnnnnnnnnnnnnnnnnaaaccccaccccacacaccagacaaaaaccaacaaanacaaanacaacacacacacaanaacaggaaccngaag

SEQ ID NO: 37666 - DNA, 802 bp, Macaca Mulatta
  misc_feature (1)...(802): n = A,T,C or G
gggatatgactgcacactactgcagactttacaaacactctacactgaggctacatgaaatttnnnnnnnnnnnnnnnnnnnnnnntttcttcagtaataagttaactataggttaccacaacttaaaaaaactgaacaaaacaaaaaacagaatctcactgtgtcgcctaggctggagtgtaatggcatgatcaagagttacttaactcactgtaacctcatgaactccttggttcaaggcagcctgctgtctcagcatcctaagtagttaggcctacaagcatgcatcatcacacccaggannnnnnnnnnnnnnnnnnnnntgtagagacaggatttnnntgtttntcnngntggtgtggatgttttggcctcgagtgttttttttgttgttnttttgtggggttttgggtttagtgggggntttttggtggttggggcctttcttcgtgttttgtgcctttgtgaagcttttccttgtggttggctcgtgcccctcccccccggtttttctcgccccgcccggcggggtgtggggagttcgttttccctgtttctcgccccccccgggtgggggcgcgttttgggtgggccttttcgcggcctgaaccacaaggatagaaaaaatacaccaaaaaaaaataacatgacaatcatgacaaccactcgccatatagaaaagagccccacaaaagattaatacaacggacaagaacttcatccaaaatatttgtacagcgaaagattgtaccaatttgataaagacattaatacagagagttaatgaaatacattaataat

SEQ ID NO: 37667 - DNA, 783 bp, Macaca Mulatta
  misc_feature (1)...(783): n = A,T,C or G
ggtctggtttcaatccttctttttatctgaaatactgnaagagccaaactgtattctgtacaggtagtggttacttttctttcgcttaaacttaaaaacacagcctgtttattagcttttgttggcaccaaatagtacttggacactatatatttcacagcagacatattttttctacctaacattaagcagttgcttaatttgaagaactgttctgttgagcctgtctaatacaaaatttcagtgtacacagcacaatctgaattaatagaactcaaacttactaggccatgaaaatggcttaatcaacagtgaaccctttaaagaccttgtcaggtagtgttctaatagtgattttaggaaaaaaaaacaattattagtatttaaagatactttttgtttcagagnnnnnnnnnnnnnnnnnngccctcttgaataacttctggggttgctcccatgttctgtttagaggggaaaaaattggatctctatactctatattgagccacagccatttcagtctagttactaatctcttcttggtaaaagccctttcagactgaattggttaatcctccctatccctaacctgagggaaaattgttgctgagttggtagaatttaatcttctttgttggcatttccggaatttctttttcccaactccgcctcccgtttttggggaaggaatggctaatcctgaatgttgtgaagccattccggaattgaaaacctgnnnnnnnnnnnnnnnnnnnattcctttccgaaacacccttttccttt

SEQ ID NO: 37668 - DNA, 655 bp, Macaca Mulatta
cgcggacgggctcctcactggaacatggcgacttgcgccgaaatcctgcggagcgagttccccgaaattgacggacaagtcttcgactacgtgacgggcgtcttgcacagcggcagcgcggacttcgagtccgtggatgacctggtggaagctgtgggggaactattgcaagaggtgtccggggacagcaaggatgacgcgggcatcagggccgtgtgccagcgcatgtacaacactctgcgcctggctgagccacagagccagggaaatagccaggtgctactggacgctcccatccagttgtcaaagataacagagaactacgactgtggaaccaaacttccaggactgctaaagagggaacagtcctcgacagtgaatgcaaagaagttggagaaggccgaggctcgacttaaggcaaagcaggagaagcgctcagagaaggacacgctcaagaccagcaaccctctagtcttagaagaggcatcagccagccaggcaggcagcagaaaggagagtcggttggaatcatctggcaagaacaaatcctatgatgtgcgaattgagaactttgatgtgtcttttggcgatagagtattgctggctggagcagatgtgaacctggcatggggccgccgttacgggctggtggggc

SEQ ID NO: 37669 - DNA, 247 bp, Macaca Mulatta
gactgccaagatttaccgcaaaaatagatgttcctgtatcaggactttgattttgttaaaatggcactctctccaaagctgtgtccataaagccgtttggagctgacgctgagtcctcatggtgatggattgactcagcctgaggcagcagtgatgtctgcactaggaagaggctggcgggaggcagggcccctcctgtgtcaggcaccgagtggatgggggactgattcagatgttggtgccttcc

SEQ ID NO: 37670 - DNA, 572 bp, Macaca Mulatta
cctttcgctgctgcggctgcagccatgagtatgctcaggcttcagaagaggctcgcctctagtgtcctccgctgtggcaagaagaaggtctggttagaccccaatgagaccaatgaaatcgccaatgccaactcccgtcagcagatccgaaagctgatccaagatgggctgatcatccgcaagcctgtgacagtccattcccgggcgcgatgccggaaaaataccttggcccgccggaagggcaggcacatgggcataggtaagcggaagggtacagccaacgcccgaacgccagagaaggtcacgtggatgaggagaatgaggaatatgcgccggctgcttagaagataccgtgagtctaagaagattgatcgccacatgtatcacagcctgtacctgaaggtgaaggggaatgtgttcaaaaacaagcatattctcatggaacacatccacaagctgaaggcagacaaggcccgcaagaagctcctggctgaccaggctgaggcccgcaggtctaagaccaaggaaacacgcaagcgccgtgaagagcgcctccaggccaagaaggagga

SEQ ID NO: 37671 - DNA, 761 bp, Macaca Mulatta
ggagcaaaaatcaatgaaattgaaaacaggaaatcaatagagtaaattaacaaacccaaaagtaacttttctgaaaagatcaataaaactgataagcctctagccagactcagaaaaaaagacagaagacaaattagtaatatcataaatgaaagagaagatctttactaattgctactaccccaaagccattaaaaagataactagtatcgtaaataaatctatgtccacaaatttgcaaagctaaatgaaatggagcaagtccttaaaaaacataatctgccaaaactcacacaagaagaaaaagacaatcttgaatagacctatatctattaaagaaattgaatcaataactaactttcaaaaacagagggaaccaaatccagatgggttcactggtgagttctaatcaacatataaagaagaaataataccaattctctacaatgtctttcagaaatacagcagttacttcctaagtcattctgtgaggacaatactaacctaatatcaaaaccagacaaagacattacaagaaaagaaaactacagaccaatctcttatgaacagagatggaaacctcctcaacgaaatattagcaaattaaatccaacaatgtacaaaaagaattacatatcatgatccagcagtatttatcaagactgcctccacattttaaaaaaatccatgtaattaatcccctccgactgaaagaaaaaaaatcacatggatcatatttaaaagaaggcaaaaatttccat

SEQ ID NO: 37672 - DNA, 712 bp, Macaca Mulatta
tcaagtcgttttgcgttagttctcatctggagaaagggggtaactttaatacctacctgatgggatactgtgaaaggtaattcagctaatatatagaaagggtatatagaacagcagatgcccaggctggagcacgcttggtgcattttaaacacagcagagcagtcttggtgagactggtgagagatggcatttggaggtggcccaggacatcctcacataaaacttgtaggctacactcagtacttggcttttattctgagtgaaatgcaaagctctgagaattttgtgtgttgatgtgatacagggtgatttctgtttcaaagtctggtttctgtgtggagaagagaaggtaagaaaggtgaagaaaggtaagggaagaaacaggaatacaatataagaggctattaaaatagtccagggatatttcacggaacagtagcttgaagaagtcagattctcctgcaaataacaatgaggaaaactggccagattattaaaaacaactgtaagattctgggaaatgaccaaaggcagaaatataagaagagattactattgaaagactgttactgattgggtaggaagtcagagtttatggctttctcgctagggatgctcctagcccctgtagatctaacagtggaataccacatccttaccaggtcaaagtggtgatgccaaaattcggaaatcagagcaggtgcggatt

SEQ ID NO: 37673 - DNA, 750 bp, Macaca Mulatta
ggagaacagtcatctaaaaacgtaaggttttggaaaagagatgctttttcaatccttaccattaggtggaatgttttatagaattttggtgttaaaaaaaatttagtaacaatgcattttgcttggaatactccccaatccagaaaagttggtgacttctctccactgtatatatgtacatagttttcattattagattgtaagctcctcaagggcaggaattgttttatctttgttgttcctgcagcacctaatgtaaagtgccttgcacagggtaggtgctcatgacgtgtagaatgagtgagtcacttcctgcctcataaatgtggttcacttcccctgtgttcaacactacaaagctactcatgccagaagagggcagagttctttcttgggtttgaactggcttttttgggttgaatcagaccattccacatccttagcactacttaacctccttttcctgaagactacatatcagtgtcctgcgtttttaatctaatattacagctgaggtttctaggaaaattttgaagtggagaagattatggagaaaatgcaatggagatttggagagggtggtttgtcagtatattgccctgtggggtaatcgtattttagttattacttgttaaaagggtaacagaacctctgtttcttttaccaagtcgctgggttggcccattttctcccaattaaccaaaacttaaccattggttttttagcctccttttctcaattttggaaatc

SEQ ID NO: 37674 - DNA, 690 bp, Macaca Mulatta
  misc_feature (1)...(690): n = A,T,C or G
aggaatgcatcaactgcgtctctccccctccccagctgtaatagtacttccttcatggcttctgaaatgccctgagtaaagtagaaaagcgacctttgtatggatgtggggatatttaatatatgtaaaannttttccccnntttaatggtttcagttttatctatttataccttaagggggnntgggtaaatctnacantcactcttcatcttttctcccaacgcctgctccattttcttaaaatattttccagttaatagttagttgctttatttcctagctgaagtgagaaaaccaagagaaaacaacacagatttgggcagaggagatacagttagatccttaaaggagtcagccacccacccagaaggagaatcacatgtgtaactgatgtaggggtttaagccttcttttactttcgctaaaatcagtctactaactcttccaccaacctttgcatcaaacacttaggtagctgcctgattagggggccccttgnnnnnnnnnnnnnnnnnnnnnnnnnnnnnnnnngccttggttttatcttctgggaaagaacacttttacttaattagcaagatgattacattatataacttgcccttaaaaacactccaaaatactgactcctttgctccaattacaagtgagagagtgaagaaattctgttgtatgatttgaacactat

SEQ ID NO: 37675 - DNA, 715 bp, Macaca Mulatta
  misc_feature (1)...(715): n = A,T,C or G
ggctttannnnnnnnnnnnnnnnnnnnnnnnnnnnntatgtannnnnnnnnnnnnnnnnnnnnnnnnnnnnncatatgtatatattatgtacacacacacacacaaacacactcacgttagagatgaggtctcactatgttgcccaagttggtctcaaagtcttagactcaagtggtaatccggtctcagcttcctaaagttnnnnnnnnnnnnnnnnnnnnnnntgtacacagcccaggtgactttgaatataggcaaaacttggagtagtaatcaaagatagttgataattccaggaatacaaatttcatattaaagtcatgaaaggggaaaaaaataaggagagaacacacaaacacaaaacttctatccctagaaagatagaagttttctgaattaatttgtaaaatttttaatccntgtttcaaaatttataactatgaatgtggactttaacccaactaacctgaaaactcccccacccccaaaaattggaatttttannnnnnnnnnnnnnnnnnnnnnnnnnnnnnnnnnnnnnnnnnnnnnnnnngnnnnnnnnnnnnnnnnnnnnnnnnnnnnnnnnnnnnnnnnnnnnnnnnnaaaaaannnnnnnnnnnnnnnnnngggtggtcnnnnnnnnnnnnnnnnnnnnnnnnnnnnnnnnnnnnnnnnnnnngccccccagatattttttttcttcccacacagggg

SEQ ID NO: 37676 - DNA, 198 bp, Macaca Mulatta
tcagccctagggtggagagccaccaggagggatgcctgtgggtgccaggaccagtcaacctgggcaaagcctagtgaaggcttctctctgggatgggatggtggagggccacacgggaggctcacccacttctccatccacatgggagccaagtctgcctcttctgggagggcagcagggataccctgagctgaggca

SEQ ID NO: 37677 - DNA, 332 bp, Macaca Mulatta
tgcagggtgggctctaccgaggttttcttctggctctaaccccctgacctccacctctgatttttttaactacagtttgtagtctctctccctgagagtctacaaactgtagtcctagtgacagtaagtgatcaccctctctgcctaaaccccctttgcggccatatttatcttctgcttccctttgtgacctgttgctgtcacatagccctttgttgtcatcccccaggccagggccatgatcccctcactaatactcctttgcccccatagaggacagccccaccctaccaggtactcaagtgggtgccaaaataaaattttttcaaatg

SEQ ID NO: 37678 - DNA, 4133 bp, Macaca Mulatta
  misc_feature (1)...(4133): n = A,T,C or G
ctggaaatgttcaccaggcctttacagcaagtgttttgggtatgacaagtattacagccaaaggagatgtttatgccaagactctgcctcccagaaacctttttcagtcctcaaggaagcctgatgctgaagaagtctcctcagattcagagaatattcttgaggagggggatggttctgaagaactggctcatggtcactcttcccagtccttggggaagtttgaagatgaacaagaagtcttctcagaatcaaaaagttttgttgaggacttgagcagctctgaggaggagctggaccccagatgcccctcccaggctttagaagagcctgaagatgaagaagtcttcacagaatcaagcagttatgttgaaaagtacaacagttctgaggattgcagcagctcagaggaagacctgcctctcagacaccctgctcaggccttgnnnnnnnnnnnnnnnnnnnnnnnnnnnnnnnnnnnnnnnnnnnnnnnnnnnnnnnnnnnnnnnnnnnnnnnnnnnnnnnnnnnnnnnnnnnnnnnnnnnnnnnnnnnnnnnnnnnnnnnnnnnnnnnnnnnnnnnnnnnnnnnnnnnnnnnnnnnnnnnnnnnnnnnnnnnnnnnnnnnnnnnnnnnnnnnnnnnnnnnnnnnnnnnnnnnnnnnnnnnnnnnnnnnnnnnnnnnnnnnnnnnnnnnnnnnnnnnnnnnnnnnnnnnnnnnnnnnnnnnnnnnnnnnnnnnnnnnnnnnnnnnnnnnnnnnnnnnnnnnnnnnnnnnnnnnnnnnnnnnnnnnnnnnnnnnnnnnnnnnnnnnnnnnnnnnnnnnnnnnnnnnnnnnnnnnnnnnnnnnnnnnnnnnnnnnnnnnnnnnnnnnnnnnnnnnnnnnnnnnnnnnnnnnnnnnnnnnnnnnnnnnnnnnnnnnnnnnnnnnnnnnnnnnnnnnnnnnnnnnnnnnnnnnnnnnnnnnnnnnnnnnnnnnnnnnnnnnnnnnnnnnnnnnnnnnnnnnnnnnnnnnnnnnnnnnnnnnnnnnnnnnnnnnnnnnnnnnnnnnnnnnnnnnnnnnnnnnnnnnnnnnnnnnnnnnnnnnnnnnnnnnnnnnnnnnnnnnnnnnnnnnnnnnnnnnnnnnnnnnnnnnnnnnnnnnnnnnnnnnnnnnnnnnnnnnnnnnnnnnnnnnnnnnnnnnnnnnnnnnnnnnnnnnnnnnnnnnnnnnnnnnnnnnnnnnnnnnnnnnnnnnnnnnnnnnnnnnnnnnnnnnnnnnnnnnnnnnnnnnnnnnnnnnnnnnnnnnnnnnnnnnnnnnnnnnnnnnnnnnnnnnnnnnnnnnnnnnnnnnnnnnnnnnnnnnnnnnnnnnnnnnnnnnnnnnnnnnnnnnnnnnnnnnnnnnnnnnnnnnnnnnnnnnnnnnnnnnnnnnnnnnnnnnnnnnnnnnnnnnnnnnnnnnnnnnnnnnnnnnnnnnnnnnnnnnnnnnnnnnnnnnnnnnnnnnnnnnnnnnnnnnnnnnnnnnnnnnnnnnnnnnnnnnnnnnnnnnnnnnnnnnnnnnnnnnnnnnnnnnnnnnnnnnnnnnnnnnnnnnnnnnnnnnnnnnnnnnnnnnnnnnnnnnnnnnnnnnnnnnnnnnnnnnnnnnnnnnnnnnnnnnnnnnnnnnnnnnnnnnnnnnnnnnnnnnnnnnnnnnnnnnnnnnnnnnnnnnnnnnnnnnnnnnnnnnnnnnnnnnnnnnnnnnnnnnnnnnnnnnnnnnnnnnnnnnnnnnnnnnnnnnnnnnnnnnnnnnnnnnnnnnnnnnnnnnnnnnnnnnnnnnnnnnnnnnnnnnnnnnnnnnnnnnnnnnnnnnnnnnnnnnnnnnnnnnnnnnnnnnnnnnnnnnnnnnnnnnnnnnnnnnnnnnnnnnnnnnnnnnnnnnnnnnnnnnnnnnnnnnnnnnnnnnnnnnnnnnnnnnnnnnnnnnnnnnnnnnnnnnnnnnnnnnnnnnnnnnnnnnnnnnnnnnnnnnnnnnnnnnnnnnnnnnnnnnnnnnnnnnnnnnnnnnnnnnnnnnnnnnnnnnnnnnnnnnnnnnnnnnnnnnnnnnnnnnnnnnnnnnnnnnnnnnnnnnnnnnnnnnnnnnnnnnnnnnnnnnnnnnnnnnnnnnnnnnnnnnnnnnnnnnnnnnnnnnnnnnnnnnnnnnnnnnnnnnnnnnnnnnnnnnnnnnnnnnnnnnnnnnnnnnnnnnnnnnnnnnnnnnnnnnnnnnnnnnnnnnnnnnnnnnnnnnnnnnnnnnnnnnnnnnnnnnnnnnnnnnnnnnnnnnnnnnnnnnnnnnnnnnnnnnnnnnnnnnnnnnnnnnnnnnnnnnnnnnnnnnnnnnnnnnnnnnnnnnnnnnnnnnnnnnnnnnnnnnnnnnnnnnnnnnnnnnnnnnnnnnnnnnnnnnnnnnnnnnnnnnnnnnnnnnnnnnnnnnnnnnnnnnnnnnnnnnnnnnnnnnnnnnnnnnnnnnnnnnnnnnnnnnnnnnnnnnnnnnnnnnnnnnnnnnnnnnnnnnnnnnnnnnnnnnnnnnnnnnnnnnnnnnnnnnnnnnnnnnnnnnnnnnnnnnnnnnnnnnnnnnnnnnnnnnnnnnnnnnnnnnnnnnnnnnnnnnnnnnnnnnnnnnnnnnnnnnnnnnnnnnnnnnnnnnnnnnnnnnnnnnnnnnngggagctggccctgaaaatgaaaaccaacctaaaaagattttcacttccagtgtccataaacaggagaagagagcacagatgaagccacctaagcctacaaaatcagnnnnnnnnnnnnnnnnnnnnnnnnnnnnnnnnnnnnnnnnnnnnnnnnnnnnnnnnnnnnnnnnnnnnnnnnnnnnnnnnnnnnnnnnnnnnnnnnnnnnnnnnnnnnctgtctggttctcctgggccaggaagaaagccaaagcatggagccacatggcagagatgatgcaataaagagcccttgtgtggagcatcagcnnnnnnnnnnnnnnnnnnnnnnnnnnnnnnnnnnnnnnnnnnnnagtctcgctgtgttacccagactggaatgcagtggcgcgatctccgctcactgcaagctccgcctcctgggttcacgccattctcccgcctcagcctccccagtagctgggactataggcagccgccatcatgcccggctaattttgttttcgtatttttagtagagacggggtttcaccatgttggccaggatggtctcgataacctgaccttgtaatccgcccacctcagcctcccaannnnnnnnnnnnnnnnnnnnnnnnnnnnnnnnnnnnnagcatcagcattttaaatgataattgctaatagctgtattaattctatgtagtgatctttntactgtgaccagttttattaagcaaaataagtattaagcaaaataagaatgtattaagcaaaataagaatttattaagcaaaatagccttagaaatgtgaattaaaacataattatttgaatgaaataaatgccatgaatgcttaaccttccatataaccactgccagcacccagaaacccagcatttcctctattaaaactatggaaaacatttgcactgctgtagaattgcaaaatctttaactttggnnnnnnnnnnnnnnnnnnnnnnnnnnnnnnnnnnnnnnnnnnnnnnnnnnnnnnnnnnnnnnnnnnnnnnnnnnnnnnnnnnnnnnnaatggaaacattcagatgatttgacccaaagattggcctttaggttttatgagcctagatagatgctgcaattatttggttgttgctccaaactttgcaaagactcctaaaagagatggtggaagtgaaaattctgggtctccaagaaaatttctgcacagcnnnnnnnnnnncagcctatcaccccttgacacatcttctctgtgtccctgggggcccctgatgctttctccttgggtgatagtaacacgcagagcacttacacaaaactccctctttggacatgcctcacatcaacctgtcacaggcctggctgcagcgagcacctccctatgacgcagaatgcttcttgggaattatcttactcctctggatagtgactccatcagtgttttgcttcttgtcccaatactaccgtgaccctctctgatcgcacagagatacactgtctatcacatata

SEQ ID NO: 37679 - DNA, 626 bp, Macaca Mulatta
  misc_feature (1)...(626): n = A,T,C or G
acagtgcatgaccncggagcacagaaacctagttcatgagcatttccanagtaaattggccttgaaaatatagatttgactcagctgatctcattgacactgatgatcaggccacaatagttggctcgttcacatcgcacgacacatttggcaagtgatctagatgttcaagtcctctggtcaatgtgttttttcctaaattcaagctatatgggtactcaagtaataattagaaggtttctttcttaacacagaatcagaacaagaggagcttatttgtaaacttaatcaacccaagagagctcttatgtgttcagctccacagtagcaggcatgaaaagggactctgcttctggtttttctccagccttatggcaaaagatagaccaaaagaaacaatataggttcatatacacttgtattatttgcaatgctcatagctagatcagtgagaaaatcagcaagcaaacatagtgcccacatgtgctactcctgtacagaggcttggtaaattccatttatataccacccacattctttggctatatgatctcctactctttaaaaaaaactctattcaaaatccagctaaactctatcctgatcccttctactggatagaggta

SEQ ID NO: 37680 - DNA, 857 bp, Macaca Mulatta
cgcgcgcacggagcgattggtgctgacgtcgacggcggtgaccttaatttcggtgtcgccaaactgcatggcggcgcggatctcgcggcggccgggaggagcgccggcagcgtcctggccgcagtcggcgggctcaagctcgagactgagcgcgccgcatttgcgcacgccggggtcggtgatgaagcgcgcatcctcggtcgcgcagcagtacaggttgatgagcacgcgccgctggcccggacgcgccgggcagtagctgcgccgcacctcctcgcccagggccaccgactgctcggcggccacgaagcgctcgaagacgtcggtgcaccagcggcggccgtcgcgaaccagcagcttctcgggcgggtggcgcccaggcacaaagcggttgagcacgcccacgccataggtgagcggcgagcggcggacccgcaccacgcccggcgcctggccaaacagcaccgcgcctttgaggatggtgaggcccacgtcgtgcgggaccacgacacgcagaccgcgggcgcccagcgctgcctgcaccgcgtgctgcagcaccgctgactcggcgaagccgcccaccaggaacagcagcttcacaccctgcacctccggccgcgccagcagcgtctctgtggtacaggacgggggacgcgggtgaagagggcggagaaggcggggaaagagagagagccactgaggccaccactaggcggccaccggcgcctcccctccctagctcgtatccgcctagcaactagagagtagccatttgagcactttctttgagagctcccgcgagtcctcgagggctttgcctcccccaacactcacgctccccacttctctcccaccac

SEQ ID NO: 37681 - DNA, 654 bp, Macaca Mulatta
  misc_feature (1)...(654): n = A,T,C or G
cacaggcgcccgccacttcgcccggctaagnnnnnnnnnnnnnnnnnnnnnnnnnnnnnnnnnnngtgttannnnnnnnnnnnntnnnnnnnnnnnnncatgatccgcccgtnnnnnnnnnnnnnnnnnnnnnnnnnnnnnnnnnnnnnnnnnnnnnncggccgtctgtccgtttcttattttacacacatgaatttaacaaacaggtacagctgccccttccatactgccccaggatcccttctcagtgggaggacagcgcacaggccttccgccccaatcccgtcctcagcacctgaggctgtgactctcagaccatttgccgaaacacatctgcaagcgctcagccgctgcccccagcctcatcctcaggttgctcctgatacctcggccacacttgtgtggggtctgaaacccagggagcacttgtgttcagggcagggtggtgtgcagcccccagcccatccttctaactcccaagtgagcatcagtcagccttgcttggatgacagatactcagagttgagagtggagacttgcccagagcccagcgcttgcgggctgtacccagccctgccaggcccagaaagaggcccagctgtaggcaatcagggaagcccagggctgggtggtctcagcccagagcccaaccac

SEQ ID NO: 37682 - DNA, 1778 bp, Macaca Mulatta
atgcgggtcatggcgccccgaaccttcctcctgctgctctcgggggccctggccctgaccgagacctgggccggctcgcactccttggggtatttctgcgccgccgtgtcccggcccggccgcggggagcccctgtatcatcgaagtgggctacgtggacgacacgcagttcgtgcggtttgacagcgacgccgagagtccgaggatggaggcgcgggcgccgtgggtggagcaggaggggccggagtattgggaagaggagacacggagagtcaagggcaacgcacagactttccgggtgggcctggggaacctgcgcggctactacaaccagagcgaggcggggtctcacaccttccagtggatgtatggctgctacgtgggacccgacgggcgcctcctccgcgggtatgaccagttcgcctacgacggcagggattacatcgccctgaacgaggacctgcgctcctggaccgccgcggatttggcggctcagaacacccagcggaagtgggaggcggccggtgtggcggagcagctgagagcctatctggagggcgacgtgcgtggagtggctccgcagatacatggagaacgggaaggagacgctgcatcgcgcggacacgcccaaagacagacgtgacccaccaccctgtctctgaccatgaggccaccctgaggtgctgggccctgggcttctaccctgcggagatcacactgacctggcagcgggatggggaggagcaaactcaggacaccgagcttgtggagaccaggccaggaggagatggaaccttccagaagtggggagctgtggtggtgccttctggagaagagcagagatacacgtgccatgtgcagcacaaggggttgacggagcccctcaccctgagatgggagccatcttcccagtccaccatccccatcgtgggcattgttgctggcctggctgtcctagcagttgtggtcaccggagctgtggtcgctgctgtgatgtggaggaggaagagctcaggtggaaaaggagggagctactctcaggctgcgtccagcgacagtgcccagggctctgatgtgtctctcacggcttgaaaagcctgagacaactgtgttgtgtgggactgagatgcaggatttcttcacgcctctcctttttgtgacttcaagagactctggcatctctttctgcaaaggcatctgaatgtgtctgtgtccctgttagcataatgtgaggaggtggagggacagcccacccccgtgtccaccgtgacccctgttcccatgctgaccagtgtttcctccccagtcatctttcctgttccagagaggtggggctggatgtctccatctcagtctcaactttatgtgcactgagctgcaacttcttacttccctgctgaaaataagaatctgaatataaatttgttttctctaatatttgctatgagaggttgatggattaatgaaataagttatcctactagaacttgaagcaccactcaaaatatgtggtgacatccatgggcaatactatgattcgctgcgactttttgagtacggtggtttcccgccagaaagcaactacctgtttcttggggactatgtggacaggggaaagcagtcattggagacgatctgcctcttactggcctacaaaatcaaatatcctgagaatttttttcttctcagagggaaccatgaatgtgccagcatcaacagaatttatggatttcatgatgactgtccaagaagatacaacatttaactatgggaaactt

SEQ ID NO: 37683 - DNA, 336 bp, Macaca Mulatta
  misc_feature (1)...(336): n = A,T,C or G
tgatnnnnnnnnnnnnnnnnnnnnnactcaggtgatctgcccgtctcggcctcccgaagtgctannnnnnnnnnnnnnnnnnnnnacgctcagccaatattttttctttttagaaacataatgctgaggtactccccactaaataattttttaaatgccggttatgttaaccatttttagtatattgtgtaagtataatgtagttactctatggaaatcaagccttactctcttaatcagtactgcttttcagcaatattgaatactgatattttgggactgttattaagccagctttcttttaaatgtaattaggtatcttaacatccagcttga

SEQ ID NO: 37684 - DNA, 708 bp, Macaca Mulatta
  misc_feature (1)...(708): n = A,T,C or G
ccagtgtacccaggtcaagttttgaagaatcagcacatctcatgcaaccagtccacaccatgaataagcctgttaaacgaggacctaggtataatctacatcagatccagggtcactcaactcgacatttccacacccagacccaaaatttgcaacaatcagtcaggccgatggagccattgaatgatggaccagccaactcacaaagcaactgaataaaggacatcaggacagcctgctattggggtgacacctcgatttgactagggcagcatggacactaagcactgtactccaatacaagggaaacacagcactgcacacatcttgagaaacactgagcttggtgtggatagaggtggaccaggtgactgcctgatgaggctgcacctgtgaaattccaatctcagtgttcccaaccattcttttttctttctccatttagagtgcacatcctgtaggtggtcggtggttcaagctgccagagcacctcagacagggccccctgactctaatctagaggtgatacttcccccaggtgcctctcttctatgaaatccacagggatacaggacaggaccaaggagtaccagagtgctagggttaatggcaccaggaacacctgatccttccatannnnnnnnnnnnnnnnnnnncaatcttggctcacagaaacctctatctcaaaggttcaggcgattctccctg

SEQ ID NO: 37685 - DNA, 1215 bp, Macaca Mulatta
  misc_feature (1)...(1215): n = A,T,C or G
cagtgagaagtgccgtgctcccgcctggtgtgaccggatcctctggaaagggaagaacatcactcagctgagttaccagagccacatggccctgaagaccagtgaccacaagcctgtcagctcagtgtttaacatcggggtnnnnnnnnnnnnnnnnnnnnnnnnnnnnnnnnnnnnnnnnnnnnnnnnnnnnnnnnnnnnnnnnnnnnnnnnnnnnnnnnnnnnnnnnnnnnnnnnnnnnnnnnnnnnnnnnnnnnnnnnnnnnnnnnnnnnnnnnnnnnnnnnnnnnnnnnnnnnnnnnnnnnnnnnnnnnnnnnnnnnnnnnnnnnnnnnnnnnnnnnnnnnnnnnnnnnnnnnnnnnnnnnnnnnnnnnnnnnnnnnnnnnnnnnnnnnnnnnnnnnnnnnnnnnncagattctgacattgagattgaactggagctcttcgtaaataagacgacagctacaaagctcaactcgggtgaagacaaaattgaggacattctggttttgcacttggacaggggaaaggattactttttatctgtgtctgggaattacctgcccagctgtttcgggtctcccattcatacactgtgttacatgagagagccaatcttggacctaccacttgaaactattagtgagctgngactctgatgccaatacggactggagatgatggcagccagttggagagccccatggaaatccccaaagagctctggatgatggttgattacctgtaccgaaatgctatccaccaggngcaggaagatctgtttcagcaaccaggcctgaggtcagaatttgaacatgtcagggactgcttggatactggaatgattgataacctctnnnnnnnnnnnnnnnnnnnnnnnnnnnnnnnnnnnnnnnnnnnnnnnnnnnnnnnnnnnnnnnnnnnnnnnnnnnnnnnnnnnnnnnnnnnnnnnnnnnnnnnnnnnnnnnnnnnnnnnnnnnnncaggtcatttctactctccccacattctacagaaatgtcttccactacttgatggcgtttttacaagaactgctgaaaaattcagcaaaaaatcatttggatgagaatattctagnagctagcatatttggcagcttattgcttcgaaacccagctggtcaccaaaagcttgatatgacagagaagaaaaaggctcaagaatttattcaccagttcctctgcaacccactctga

SEQ ID NO: 37686 - DNA, 615 bp, Macaca Mulatta
agccctgtgagctgtgatggggacggacccgggacagtactgcagcatcctggcggggcgtccagtagaatgccttccaaggctatcccggccacgcggtcagcccgagcaggccggggtggcagtgtgagagcttcacctgctggctggaggcggaggctcctgggggattgggcaggcacacggcaccaaggggaggacgggctggagcagctggaggggcaggtgcgtctggagcagctggagcgaagatggccgaagccccctgctcccctagtggccagcaggtgagtgtcccaggttaacgggcgcaccccatggcgggtggagggcagagcaggtggctgctgtgcacagggcccctcttcagggatggggtcaggggctggcgtggggtgccattgactctggtcttccctctgctaccatggggcctcctgtgtgaggacagccagggacactttcctggccagagcttttttagacaaaaccaggggtgatccagccattggctcaggcgtggccaaagggctccccagccctcaggggcagaggttgtccccactccgtgagtgctctgtcccatgggtgggggtggcagagcctccttcccta

SEQ ID NO: 37687 - DNA, 629 bp, Macaca Mulatta
  misc_feature (1)...(629): n = A,T,C or G
gggnnnnnnnnnnnnnnnnnnnnnnnnnnnnnnnnnnnnnnnnnnnnnnnnnnnnnnnnnnnnnnnnnnnnnnnnnnnnnnnnnnnnnnnnnnnnnnnnnnnnnnnnnnnnnnnnnnnnnnnnnnnnnnnnnnnnnnnnnnnnnnnnnnnnnnnnnnnnnnnnnnnnnnnnnnnnnnnnnnnnnnnnnnnnnnnnnnnnnnnnnnnnnnnnnnnnnnnnnnnnnnnnnnnnnnnnnnnnnnnnnnnnnnnnnnnnnnnnnnnnnnnnnnnnnnnnnnnnnnnnnnnnnnnnnnnnnnnnnnnnnnnnnnnnnnnnnnnnnnnnnnnnnnnnnnnnnnnnnnnnnnnnnnnnnnnnnnnnnnnnnnnnnnnnnnnnnnnnnnnnnnncatctataattcaccatctacttcttcccttctcctgcttactaatctttattcatctattcctattccttttccctaaatctttctctctgtccccttttctttatcatttccctcattattttattacaatctcatctatcctttcattctattcatctccaacccttcttctactgctctccaactctcactctttttccttttatctccttcctacttccatttattcttactttttcn

SEQ ID NO: 37688 - DNA, 751 bp, Macaca Mulatta
ggcactgaaaacatggaatcagctgtcttcctgttaaactgacccatctctcactgtatgttcctctttatctcttaatattatatcttaccttaaattctgcttttttgaaaagctttctttgattatctttgtataatatatattttccgttattttcaatttatttgtgtttttttaataaacaacatatttaggtcaacttttttctgaacatttttttaattacagtgttttagtccattttcattttacttaattactaattaattaattaaatgtaccgcaaataacattgtcatatgcagcttaaaatatataaagagctaaggcatatgaaaacaatagcacaaagatatgggaaagtattaaatggagttcaagagttttaatatctctgcattgtccatgctgtggacaaaatatatattcaacttgatgaatcaagagtgcatatgtctattttaaaaagtttaaaaagagaaggaaaatcatacataaatgacaaaggaagaacagatggggaaatcaaaaaatagttttctatttttcttttgatttttaatatagaaaagttaaacatatactttatagaagtaacagaatagtgtgaagagccctacccccagtattcatttttttcagttaaaattcccacccctaatcccccaactccccattattattttaagaagaaaaatccctaaaaccatcctcaatttttaatcttaccaaaaggttcctccaattg

SEQ ID NO: 37689 - DNA, 144 bp, Macaca Mulatta
ccaagtattcaaggcataaagtctgttgtaagccaaaaaaaagtcttttcatcgctatagaagcttaaggagtacatcagtggtaaatacgatctttattctcttctgtggttttctcagttgagatatttttaaaagagagta

SEQ ID NO: 37690 - DNA, 638 bp, Macaca Mulatta
  misc_feature (1)...(638): n = A,T,C or G
nnnnnnnnnnnnnnnnnnnaacttggtagtctgaggtggaagaatgtcttgagcccaagagttgaagactagcctgggcaacattgcaagacgtcatctccactaaaagtcaaataaattagtcaagtgtgatcgcgcacacctgtgatcccagctactagggagcctgaggtgggaggattccttgaatccttctttgctgagaaggcccgtttttctgctcatcctggatcttgggggcttcagatatgtctaagagcagaaaagcttttcccattgccactgggtcaccaaatagctgaaaagtatacaaaaaatagagtcagaactgccttgaagagatggaagtgcactactctagttagagagccagctttgttctggcaagagcacagaacacagaagaggagtgtattgggcagaatgttcttttttctgcttccagtaagtgtcataacactgtgcttgcttggagaatcccgaaaccctgcaggaaaatactgttgcctgctgctatttcattatgcactcagtgcacaaacatgtgcatactgactgacttcagcacatgaaaggggccttggtggtcatgtcaaatgttatctttctttggtgcagacctgttgaccaggctctgt

SEQ ID NO: 37691 - DNA, 791 bp, Macaca Mulatta
ggataatatttattcctgttctctagaaataaggaagagcagaaagtgtgaaatcagttttcaactaaaccctacttaggcccttttcttcaattatgcagtacttattactaaacgattgtgcattatagtgatttaatattaggtatttaatgcaatgaaaaaatgttctaacatgctttaatgccctgtggatattgtaattagaattttgattaatgacttaagtaaattttttccaaattataattaaatgtttcctactttgttgttttaaaagatagttgggtaggtatccccttcattccaccaaaatgtctctagtattaataattatgtaaatcttcaggttcattacaaggaatttagataaagacattattttttaaaggccttggaagtattacagcatgtgtttctaattatctcaaacctttgatttactgcactgctttttaatacttacctattcctttagtgtctgacttagagtgcagttgtgaaaagaaccttaaacttttaaattttcactcccagcccattggatttttgtttttaacctaaataaaactgtataaagccgttgcccttgaagtgaattcacagccaggaaaaccatttcctagaaaaagtccattggtggcttaaggattggaaatccattgccaataagtaattggaggaccccctggggccctccttctagttcccaaattgaagaaagcccaaaaacccctggcagtaggagcaagtattgaagagggcccctcccctgttttaaaattcagcgc

SEQ ID NO: 37692 - DNA, 843 bp, Macaca Mulatta
gtaagttggaagccagtgccgccctgaaccaggccctggagatgaagcgccagggcaagcgggaaaaagcccaaaagctcttcatgcatgccctcaagatggatccggacttcgtggacgcactcaccgagtttggcatcttctcagaagaagacaaggacatcatccaggcggactatttgtacaccagagcattgaccatctcgccctaccatgagaaagcgctggtcagccgtgatcggacgctcccactcgtggaggagatcgatcagaggtatttcagcatcatcgacagcaaagtgaagaagatcatgtccatccccaaggggaactcggctctgcgcagggtcatggaggagacctactaccatcacatctaccacacagtggccatcgagggcaacaccctcaccctctcagaaatcaggcacatcctggagacccgctacgccgtgcccgggaagagcctggaggagcagaacgaggtcatcggcatgcacgcggccatgaagtacatcaacacaaccctggtttcgcgcatcggctccgtcaccatcagcgacgtgctggagatccacaggcgggtgctgggctacgtggaccccgtggaagcgggtaggtttcggacgacacaggtcctggtcggacaccacatccctccccatccgcaggatgtggaaaagcagatgcaggagtttgtacagtggctcaactctgaggatgccatgaacctgcacccggtggagtttgcagccttagcccattataaactcgtttacatccaccctttcattgacggcaacgggaggacctcccgcctgctcatgaacctcatcctcatgc

SEQ ID NO: 37693 - DNA, 810 bp, Macaca Mulatta
  misc_feature (1)...(810): n = A,T,C or G
ggcatgaggtattacacacttaaatatacataatatacataatatttttgtccaaaaataatgaattattcttacaagtaataacatgggtgactatcacaggtgtaacattgaccaaaagaacccagatatatggtataatcctannnnnnnnnnnnnnnnnnnnnngttttttggagtacatagtaggtatatatttttattaggcacattagatattttgatataggtatactatgcataataatcacattagggtgaatggggtatccatcacctccagcatttatcctttatttttgttacaaacaactcaattataaattatattattttaatatgtacactaaattatcgtggactgtagtcaccctgttatgctattgaatactagatcttattcattctatctaactatacttttgtacccattagccataccccttctttcccaataattatattcttataaataaataggcaaaacttaaaagaaaaaaaattggagaaaatcttctttatattggtcttcacaaggatttcatctatacanacatcaaatcagagaaaacaaaagcaaaaaatagaccagtgggactatattaaactacaaaacttctgcacagcaaaagaaacatgaaccaaaataaaaagacaatataccgaattaggagaaaatattttcaaaccaatatagctgataaattagttaacattctaaagggacataaaagaacctaaccaattcaatttgcaaaaccccccccaaatattccaaatttaaattaattggtccaaccgggaaatctt

SEQ ID NO: 37694 - DNA, 444 bp, Macaca Mulatta
ccagtggcctagatcataatgtgaagatctggacacccacagctaaagctgccactgagcttactggattaaagaaggtgattaagaagaacaagtgggaacgagatgaagatagcttgcaccatgccagcctgtttgaccagtacatgctttggttcctcatgcgtcacctgacacagagaggtcatcaccggggctggagaagtggtgaagccgaatttccagatgaagaatcggatgagtcttccagcacctcagagacatccgaggaggagggccaagaccgagtgcagtgcatgccatcctgaaggcctcataccccagtccagctagatgccacctaagtacactggactttaaaattcagtttgactaatttagaattgtcaatagattaatagatttgctttttgtcttctaatttccacaatatatgctgaaaac

SEQ ID NO: 37695 - DNA, 286 bp, Macaca Mulatta
atataaaactactatccaagagtttggaatttttatgagcaaagttttgttgctcccactgggtgacagatgaagagagtgagaaaccaaaggtccaaggggaatcttggatcaatacccgctttgcagtcagctcttactgatcctgtggtctccagatgagctgaaaggcattgatgctgctcaccctcaaagcagacatccagaagactttgctaggcaggggtgggtgcatctgctgccatcccaggccacatgcccatacagtcttcctgttttcagttgt

SEQ ID NO: 37696 - DNA, 1878 bp, Macaca Mulatta
  misc_feature (1)...(1878): n = A,T,C or G
gagggcccctccaagccatccctggcctccccctacctgcctgaggggacctccaaaccactctccgacaggcccaccaaagcaccagtgtacatgccacaccccgagaccccctcaaagccatctccctgtctggtgggggaggcatcgaaactgccagccccatccgaggggtccccgaaggcggtggcttcgtccccagcagccaccaactccgaggtgaaaatgaccagctttgccgaacgcaagaaacagctggtgaaggcagagactgaggctggagcggggtcccccacgtccactccggccccgccggaggccctgagctcggagatgagtgagctcggcgcccggctggaggagaaacgcagagccattgaggctcagaagcgacggattgaggccatctttgccaaacaccgtcagcggctgggcaaaagcgccttcttacaggtgcagccgcgggaggcatccggggaggnnnnnnnnnnnnnnnnnnnnnnnnnnnnnnnnnnnnnnnnnnnnnnnnnnnnnnnnnnnnnnnnnnnnnnnnnnnnnnnnnnnnnnnnnnnnnnnnnnnnnnnnnnnnnnnnnnnnnnnnnnnnnnnnnnnnnnnnnnnnnnnnnnnnnnnnnnnnnnnnnnnnnnnnnnnnnnnnnnnnnnnnnnnnnnnnnnnnnnnnnnnnnnnnnnnnnnnnnnnnnnnnnnnnnnnnnnnnnnnnnnnnnnnnnnnnnnnnnnnnnnnnnnnnnnnnnnnnnnnnnnnnnnnnnnnnnnnnnnnnnnnnnnnnnnnnnnnnnnnnnnnnnnnnnnnnnnnnnnnnnnnnnnnnnnnnnnnnngcagccctgggcccgggcccagccagtcaccccgcagcccgaaacacacgcggccggcggagctgcggctggcacccttgaccagggtgctcacgccaccccacgacgtagacagcctcccccacctgcgcaagttctcgccgagccaggtgcccgtacagacgcgctcttccatcctcctggcagaggagacgccccccgaggagccgactgcccggccaggcctcatcgagatccctttgggcagcctggcagatcccgctgccgaggatgagggagacgggagccctgctggtgctgaggattccttggaggaggaggcgtcttcagagggggagccccgggtggggctggggttcttctacaagnnggatgaagacaagcctgaggatgagatggcccaaaagcgggccagcctgctggagcggcagcagcggcgagtggaggaggcgcggcggcgcaagcagtggcaggaggcggagaaggaacagcggagggaggaggccgcgaggnaggctggcccaagaggaggcccctggcccagccccgcctgtgtccgcagtccccgtagccccgatggcgaccccagcccctgctgcccgggctccagccgaggaggaggtgggtccccggaagggggacttcacacggcaggagtacgagcgccgggcccagctgaagctcatggacgacctcgataaggtgctgcggccccgggctgcggggtccgggggcccaggtcggggcgggcggagggccccccggcctcgctctggctgctgtgacgactcggccttggcacgaagcccagcccgcggcctgctgggnnnnnnnnnnnnnnnnnnnnnnnnnnnnnnnnnnnnnnnnnnnnnnnnnnnnnnnnnnnnnnnnnnnnnnnnnnnnnnnnnnnnnnnnnnnnnnnnnngggctccctccccgtcaggtctcatgtccccaagccgcctgcctggaagccgcgagcggaaatgggaaaatggcagcaatgcctcctccccagcatcggtgcccgagtacacagg

SEQ ID NO: 37697 - DNA, 780 bp, Macaca Mulatta
tggtctgagcagctatgctgaaggactcctaggcgtggagcagagcgacaaaacagaccagtttctagtgacagacagcggcaggacagtcatcctctataaggtttctgatcagaaacccttggggagctggtcagtgaaacaaggtcaaattataacatgtccagctgtgtgcaactttcaaactagagagtatattgtcgtacacgataatcaggttttaagaatatggaataatgaagatgtaaacctggataaagtgtttaaagctacattgtcagctgaagtatataggatactttcagtgcaagggacagaacccttggtgctcttcaaggagggtgctgttcgtggtttagaggccttgcttgcagacccccagcagaaaattgacactgttatctctgatgaagacgtgattaaatggacaaaatttttcatagtattcaggcatcctgttttaattattattactgcaaaacatggaaattacttagcttacgtgcaaatgtttaactcacgtatcttacccaaatatacactcttacttggacaagatgaaaactctgtcatagagagttttactgcatctgtagatcggacaatcactcttcgatgtcattacgctctgatggttgcatctctgaaaccttgatacaattagtccacttgacccgtaaaaaatcagacctaatacaataccggcgcatcaaggcgtggatttgataatcgacggagtagatcagccggatagaccattcgtcacaacaaaggcttaag

SEQ ID NO: 37698 - DNA, 769 bp, Macaca Mulatta
tccacaaagaaaaaactccaaagattcttaaagtagctgaattcttcaactactcaaaaagcaggattgtgattttaccttgtaaatttttgccttcatatagaataattctattagagttggagtactagcaattgcagcattaatataatccaaagccagagaatactgtccaagtttatcaaagtgctgtgccaggaaatactgaacccaaagtagtgttgtcgggggttccttctccccatcctctgcaatcaaacaaatattaaattattataggaagaatgtaaagcaaattgcatactttctctctcctaactcataatgaaattaatgactattgcaataataacaagcaggaaaaactcagcaaaaactaatttcaaaataaagaggtatgacttcataaaattcaaaaagtggtagccacgtagagaaacaagattgtactttgacaggcttctaaccccaatctcactccaaagaaacaatgctggggaaaagacatacatcaatctaattctgtgaactctcagcctgaaagcaaaagggcagcaagaccaggaaaaagtcaaggaaaataacttggcaaagagatttcctaactaccactgcaagatttcggcagaggcaagaactgccaaactgccatggcttaccattttccaggcttcaatactaaatcagggatacccaaagttgaagattatgacctataggaaaaagacacacctgacaaagtagcaacaaccctgccatctgacaaaaa

SEQ ID NO: 37699 - DNA, 789 bp, Macaca Mulatta
  misc_feature (1)...(789): n = A,T,C or G
ggatattgtttccagtttggtttttaattgaaaataaggtgagaaaataaaacttgagcaggaaaatgggaaagtggcaagtttttcattgggcttgaatctgaaaattagtgagagaacttgacagaaggaaaaatgtgaggttgagaaatgtgtgctttattaaatttagactatgtcctcaaatagccctttactgttgtgatattgatatatgtgtctttggcaattaggtggtttgagtctaccaaagaaataatttaagcattttaatagagataaatggtaccacaggttctcagtcagtctactctttcagttgttgaaatggatgacttgctgaatgttttttcctttaaatgcctttgaagttgagggaaatttagactagtttctggtagtattgttacatatatcccacttgtccaaaataatgtaaacaaatagctaagtagcttttttatgttacaggatgaatctggctatagatggacaagagatgatcattctgcaagcaggcaacctgaatacaggtaaaaggataaaaataatagcataggtactttgatacttgactcatcgagatgtctgctttttgaatatagagtccagcacatagatgaaatattttactggggattttaaagttttgaagccacaagcattatattcctttaagtgactatggaagttatataagcactgaataactagtgtttccacatcctcttggcatttttgtaaatcatnnnnnnnnnnnnnnnnnnnnnnnnnnnggcctgggggtgg

SEQ ID NO: 37700 - DNA, 211 bp, Macaca Mulatta
  misc_feature (1)...(211): n = A,T,C or G
ggctacttaggacggaagctcagttggtgtttctgccgaagtttcccccttgggcggtggcggagtttctgagcgcggtagtagcagctccggcggcagcaacagtgactacgagggatggcggcggttgcagcaggacctgcagcatcccagaggnnntccagagcttctcagatgctctaatcgaccgggacccccaggcggcgttaga

SEQ ID NO: 37701 - DNA, 247 bp, Macaca Mulatta
ttcttaagctaaggtctcaaaaggtggtcattggagaacaagcaaactttgttcagttccttaaatggcggaatacaaacatactcaccagcagcaataccaagtttcttgccttttgcctgaaattatgtcaactcgaactatctctgctggtcaccagctctgcgctgagcggttgtgtgttatgtatctgtgtgtaatttaaatgtagaaacttaaaataactgctacttaaaaagtagagttt

SEQ ID NO: 37702 - DNA, 798 bp, Macaca Mulatta
gggaggtcttcaaagcagaaggtcgcgcttggaggaagtggcggctttgagtcccgtggcccaagcgccgttactacttctctgaacctcctgtcggctgcttgccgagacaccctgccgccaagatgcctcgaattatgatcaaggggggcgtgtggaggaacaccgaggatgaaattctgaaagcagcggtaatgaaatatgggaaaaaccagtggtctaggattgcctcattgctgcatagaaaatcagcaaagcagtgcaaagccagatggtatgaatggctggatccaagcattaagaagacagaatggtccagagaagaagaggaaaaactcttgcacttggccaagttgatgccaactcagtggaggaccattgctccaatcattggaagaacagcggcccagtgcttagaacactatgaatttcttctggataaagctgcccaaagagacaatgaagaggaaacaacagatgatccacgaaaacttaaacctggagaaatagatccaaatccagaaacaaaaccagcgcggcctgatccaattgatatggatgaggatgaacttgagatgctttctgaagccagagcccgcttggctaatactcagggaagaaaggccaagaggaaagcaagagaaaagcaattggaaagaagcaagacgtcttgctgccctcccaaaaagaaagaaaacttcgagcaagctgggcataaaaaattccaaagaaaaggaaaagggaagagaggaagttgattataaatgctgaaaatcccattttgaaaaaagcctgccc

SEQ ID NO: 37703 - DNA, 616 bp, Macaca Mulatta
gagcccgaaggtggcgtcgctgttggggagccaccgtgtgcaccgaccgccctccctgggccgcatcgcggtggtggtggaccagggctcgggtttcaccaaggcgggcttcgccggcgagaaccagccgcgaatagtgctgaagagctccagcctggtgcccagctgggaccggccggtgctgcccggcgcgctgggctgtgagctggcaggcggcgtggcgcgggcgcaccccatcaagcacggcgtggtggcggactgggaggcgctggaagggctctgggagcgcctgctggtgggcggcctgcgggtgtgcccagagcagtggcctgtgctggtgagcgactccccgtcggcgccacccgcaggccgcgagagggtggcggagctgctgttcgagaccctggcagtgcccgcgtgccacatggctagcaccgcgttgttggcgctctgctccactggcgcgttcagcgggctggccgtagaggcgggcgcgggcgtgtgccacgccacgcccatctacgcgggtcactcgtggcaccaggccaccttccggctgaacgtggcaggcagcaccctgtcgcgctacctgcgggatctgctggtggcggcgaac

SEQ ID NO: 37704 - DNA, 255 bp, Macaca Mulatta
gccggaccaccagccagcaccaagggaacacgaaagacgaagtcctcctctcagccaaggcccagaagccctaagaagtgtcccaaaatagcgaagaaaggaaaagcaactcgtcgagggagagccaggaagaaaagtgctccaaaaaagacctcgactgtaagaacacctgaggaagggagcgggccagcgccatcaggccccattggcccgctgaaccagaaggttcctcagcatgaactgcggcgggagcca

SEQ ID NO: 37705 - DNA, 791 bp, Macaca Mulatta
gggagtcttgaagctggagatgtaatgatttttcacttttctatttcaaagttgatgaaactgggacgtgcctcaagttaagtattgagtagcaaagctagtacctcggttcttgaaagctctaattctgtggccatttccttgtatcatagagcttctggaatccaaaggaaatacatgcattttggtagtggttttatcatagatgcagtttgatctgggtagagggtattgagtgggggagtaacattctctgtttctaattagaactagtaaaccgattttgcaggttgtggaaggtgtatgggaaagattcatttagccacaaatgtctactatgcctaacctttatgctatgcactgggatgtcattgtcaccaattatctgttttgagtttctgtttaccacacatggcttctagctcttccaaattttcccagagtcatactgctttacagccttcctccttcttgagtcaataagaagttagataatgcccctacttttcccagtgtggacacagaactggactctgtatatgtgtgagtggatgtaaatccagatttaagtcagtcactgatcatgaagaatccttggggttaaggctttctagctgaaatcctgactcagtgaatttaagaaagcatttgcgaaattaaatgtaacaggttatgggcatggtagatgcatcctaaacctgttttcattccttaaagcatggttttttatttgtggcccctttttcctaaaaggggttttataaccttatgaaccttttttggtttttccc

SEQ ID NO: 37706 - DNA, 544 bp, Macaca Mulatta
  misc_feature (1)...(544): n = A,T,C or G
ggcagaaaacttcatcttcttctgcatggtcctagtgctatttaccttccagaagcgtgttttcagccccattttcatcattggaggtttcgttgccgttttcctgggcagagctgcccatatcgacctgctctccctcttcctcaacttgggcagaaggcataagattggctggaatttccaacacatgatgatgttttcaggcctcaggagcaatggcgtttgcgttggccatccgtgacacggcatcctatgctcgccacatgatgttcaccaccatgcctttcatcgtgttcttcaccatctggatcattggaggaggcacgacacccatgttgtcatggcttaatatcagagttggcctcgaggagccctccaaagaggaccacaatgaacaccacnnnnncccagattctgccagaggaaaccggacaaaacaggagagtacgtggatattcaggctgcggtacagctttgatcgtaattacctgaagcccatcctcacacacagcggctccctgctaaccgccactctcccgcctgg

SEQ ID NO: 37707 - DNA, 656 bp, Macaca Mulatta
  misc_feature (1)...(656): n = A,T,C or G
gggnnnnnnnnnnnnnnnnnnnnnnnnnnaaaccactgcacgcagcctaccctctgcctttttaagatgacgtatttatttaatttttgccatcattggtgcttcaccttcctgcgaaggaaattccagagcctgtatttaagctgcctaagcttttaccctccctttattgcctttctaaatagtatctcatttggtgtactctactatcctatacctcttggaagtgaacaggacccaacctacaactaataagggacaaaccttgaacttactaagaccttacacacccagaaagaacatgggccctccttcttcagggacaatgcaggagccacttggcctgcggaattttctgaaggctattttctgtaacttgctagttaacttagttttgcatttcacacaaaggtgtgctctgtaatgttgggcctttgacttcacacgactggagagctgtccacacagatgtatagacnnnnnnnnnnnnnnnnnnnnnnnnnnnnnnnnnntcaacaaatctttcacagaggcagtcattttgaaaggttgacatatttggcctttaccaaagagcttgtctttttccttaagctaaatcctatcggatagatcaaatggggaatggcagatgatgatgcatggtcctaaccacc

SEQ ID NO: 37708 - DNA, 368 bp, Macaca Mulatta
caagtagatatctgggagattctttgaagaagtccaatacttaatgtgaagttttccacaaggataaaaatgaaagcatccatccccctggtgggaggccacaggccacaggtagcttgtggcccctcttaggcacttctcctatcaccctctgctccttctgcagcggctgacagaacagagtaaaccccaacctagggcgagactcccagctttgccacgccaagccgggccccaggggagtcagtgcgaaccctagtctccctgggatgagaagacctcagcactaaccaggtttgcgggtggctgtggggttagggtgggtcagctatgtgatccaatcaacctatgttcgaatttgactgcac

SEQ ID NO: 37709 - DNA, 774 bp, Macaca Mulatta
ggattctaaagtaagaataatttagaaagtagtagatcttagttctttattacctagttaattttaaaagaaagcatttatagttacgaataaaatttctaaaccctttccttgtattgcgttgtgtgtgtgtgtttagtttatgagatttttgagtttattgtactaagtcggcttcattgtttgacagatctaaaaaaacagagttctgcctggctaatactgcaaaaccgtagtaaagttaggaaattgggctaatgtttaattaagtcaattactggcctcacttttgtgcttcatttgctcatttaaacttatggtaaatttctttctcaaactaatggcagaaaagactttgtggtctcatgctgttaaagtgcatatcacttacaatactacagtatgaagagatgcttttccttttatttataattctcccacattaatgtcatgtctgtctgttccaatttagtgcttcgtatttttcgttttaaatgtacctggtctgctcctatgaacatttaggtagatacctcagtttgaggtcctgtgaatcggtgattctgttatttgtaaacatgtatggaaatgggaaagaagttgggcatggtggcctcgcgccctataatcctagcactttggggaggcagggagattgccttaaagctgaaagtttggagggggcgcccggggccaacaaagaaaggaccccggtctccttcccaaaaccaaacctaacccacccaaaaaaaacttagccggggagtggggggg

SEQ ID NO: 37710 - DNA, 728 bp, Macaca Mulatta
gagagtgactaccactgtggggcagaccacggcactgggagcagcttcgtgtaacccacagtgacacaggcagagtggaagtgagacaaaaacctcccagctgatctgctctgtccacacttccttcccgctggcctgactcacagttcagagggcggtctcctaactctgtatttagttttcaccttcctagacattttggagttctaattcacagcatatgattcctgtgtgtaaatagtttctacagaacttttgaaacatttaagtttgcacatgaacatttggggttttttgccactcacctgtcctcgatgggatttaaatttccaggttgtagagctcctcacaggtgcatttacagggaaatcactgtgaccagctcccactacctttgtccatattccacatttgtgagctgcctatacaatgatgggaactgacaatttccctggagacacaaggccttcaccctgactcacagggtcacgtaatcaacatggactacagccgtctccaatcacctccatgtgcacagagttctcatggtgcatgtgcttggctctcctagaagagagaattgacacacactgaagataggagaatgtgagcctgctctgtatctgagattctgggagagccccccattgcctttacagaatgaatcccttcacatgcagggagagagctctggtggaatcactctgcagtgcttcctgatgacaaac

SEQ ID NO: 37711 - DNA, 779 bp, Macaca Mulatta
  misc_feature (1)...(779): n = A,T,C or G
ggggaagtttctcctttgctcttctctttcctgctaccatgtgaaggtccttgcttccccttcgccttctgtcatgattgtaagtttcctgaggcctccccagccaggcagaactgtatttacattacagtcagctggaatttatttagttgtctgtcttctctgaaggactgtgacctttggaagatggagaccatgtcttggtcatcttttttcagcttctgagttcctctatttggtttctggaaaccctttgcagcaatccacaaggacttccctgcttaatgaccaggttttcatctgaccttcctagatggctccatccataacttctgagaacatgtccttcctggattctttcagagaggagcccttactcacagatgcaggtctgtgctgaacgtcagccttaactacctgccctcagaactgcctcttccctgagaagaggaaccacctctcttgccccatatgttctatactccatattattgatttatctcagattagtgctcatggagcatgctgggtagctggggacacggtacatggcatttgatctctatcttctttgaaacatatcanaacattaacatcagcctgcctcttacataaagccatactgtaaacatgtctttgcttatattctatttttgctttgtgatgtagggnaggaaaaaagaagaaaaagttattcctctcccttatgtataacccctatttatttttgccaagtaagattaagcttttgggaggaaaataaaactaaaaatggtggg

SEQ ID NO: 37712 - DNA, 787 bp, Macaca Mulatta
  misc_feature (1)...(787): n = A,T,C or G
gggtctcgnnnnnnnnnnnnnnnnnnnnctctgtggcacagtctcggctcgctgcaagctccgcctcccgggttcacgccnnnnnnnnnnnnnnnnnnnnnnnnnggctgggactgcaggcgcccgccaccacactgggctaatttttttgtactttttcttttttggcagagatgaggtttcaccgtgttggctaggatgannnnnnnnnnnnnnnnnnnnnnnnngcctgcctcggcctcccaaaatgctgagattacacgtgtgagctaccgcgccaggccaaaaatgatgatgatttttaaaaaaactaggccaggtgcggtgcctgacacctataatcccaannnnnnnnnnnnnnnnnnnnnnnnnnnnnnnnnnnaccagtgttaccggaaaggagtcccaacccagaccccaagacagggttcttggatcttgtgcaagaaagaattcagggcaagtccatagagtgaagtgaaagcaactttattaagaaaataaaagaataaaagaatggctaccccataggcagagcaggggtatgtgctgcgcaactgagtgtacttatagttatttcttgaccatatgctaaacaaggggtgggattattcatgaattttctgggaaaaagatggggatttccaggaattgagcatttctttccctttttagaccataaagggaaaacttcgaaaaattgcccagggcattttgtaaactggcatgggaactggtggggaatgttctttaagcaaaaccaatgccattaataatagcccaattt

SEQ ID NO: 37713 - DNA, 768 bp, Macaca Mulatta
gggagagaaggagaagcgctttcttgcgtcctagtcccagtacagcgtggagagcttaggtaacgtgttctgattctctgcgggacggctagcacgtttgtgctttgcccgccgcggcttaggggactttttggggccgcgtagtcggtgtttttgaactgagtccacagctcgtggtgggccgcgcggcgccctgacccggcctcaccatgttggtgctgtttgaaacgtctgtgggctacgccatctttaaggttctaaatgagaagaaacttcaagaggttgatagtttatggaaagaatttgaaactccagagaaagcaaacaaaatagtaaagctaaaacattttgagaaatttcaggatacagcagaagcattagcagcattcacagctctgatggagggcaaaatcaataagcagctgaagaaagttctgaagaaaatagtaaaagaagcccatgaaccgctggcagtagctgatgctaaactaggaggggtcataaaggaaaagctgaatctcagttgtatccatagtcctgttgttaatgaacttatgagaggaattcgttcacaaatggatggattaatccctggggtagaaccacgtgaaatggcagctatgtgtcttggattggctcacagcctgtctcgatatagattgaaatttagcgctgataaagtagacacaatgattgttcaggcaatttctttgttagatgacttggataaagaactaaacaactacctttattgcgatggtagaagaa

SEQ ID NO: 37714 - DNA, 844 bp, Macaca Mulatta
  misc_feature (1)...(844): n = A,T,C or G
gggtagtcatgttaactgtcattatcatttgagaacagacctttttctaacttaggggaacatatttcaaatatttttgttacagaatgctaatccttcaagaattctgtcgattttcccctggtaatgtattatgaatatgttcattttgctgttacttcagcattagctgtatgttaaaaattttaaataaacttgtgtttactttctggtcnnnnnnnnnnnnnnnnnnnnnnnnnnnnnnnnnnnnnnnnnnnnnnnnnnnnnnnnnnnnnnnnnnnnnnnnnnnnnnnnnnnnnnnnnnnnnnaacaagaattagtaatatagttttaaaaagtataaaaaatcgcttaaataattttttgtgggccccccctccccccccaaaaaaacttctaaaaaattttttttgtgggcgccgggccccccttatgtaaaaaaaaagtggtaacaatggtttttcctaaaagaaccctggggcaaaaaaagagggggttaggaaccctccccacaaacaaaaaccccggggggagatnnnnnnnnnnnnnnnnnnnnnnttctaacgggagacctgcagagggcccctttggggtgtctatctgtcagggtggggctccatcgggcagcctaaattaaaaataaccccccccccctattgtcatatatataaataaaaaaagtggaggataatattaactaacaacttttgttcctcccaatttctagacccctctccaaaaggggggagttaatattaaattctataaaattatttcacggaatctattatacaaatcttctttgtccgcagttactacatagatagaaactgctccgctcccg

SEQ ID NO: 37715 - DNA, 13726 bp, Macaca Mulatta
  misc_feature (1)...(13726): n = A,T,C or G
atgcaccaggcagaccagaggtgacagatgtcacaagatcaacagtatcactgatttggtctgccccagtgtatgatggaggcagcaaggttgtgggctacatcatagagcgtaagccagtcagtgaggtaggagacggtcgctggctgaagtgcaactataccattgtatctgacaatttcttcaccgtgactgctctcagtgaaggagacacttatgagttccgtgtgttagccaagaatgcagcaggcgtaattagcaaagggtctgaatctacaggccctgtcacttgccgagatgaatacgnnnnnnnnnnnnnnnnnnnnnnnnnnnnnnnnnnnnnnnnnnnnnnnnnnnnnnnnnnnnnnnnnnnnnnnnnnnnnnnnnnnnnnnnnnnnnnnnnnnnnnnnnnnnnnnnnnnnnnnnnnnnnnnnnnnnnnnnnnnnnnnnnnnnnnnnnnnnnnnnnnnnnnnnnnnnnnnnnnnnnnnnnnnnnnnnnnnnnnnnnnnnnnnnnnnnnnnnnnnnnnnnnnnnnnnnnnnnnnnnnnnnnnnnnnnnnnnnnnnnnnnnnnnnnnnnnnnnnnnnnnnnnnnnnnnnnnnnnnnnnnnnnnnnnnnnnnnnnnnnnnnnnnnnnnnnnnnnnnnnnnnnnnnnnnnnnnnnnnnnnnnnnnnnnnnnnnnnnnnnnnnnnnnnnnnnnnnnnnnnnnnnnnnnnnnnnnnnnnnnnnnnnnnnnnnnnnnnnnnnnnnnnnnnnnnnnnnnnnnnnnnnnnnnnnnnnnnnnnnnnnnnnnnnnnnnnnnnnnnnnnnnnnnnnnnnnnnnnnnnnnnnnnnnnnnnnnnnnnnnnnnnnnnnnnnnnnnnnnnnnnnnnnnnnnnnnnnnnnnnnnnnnnnnnnnnnnnnnnnnnnnnnnnnnnnnnnnnnnnnnnnnnnnnnnnnnnnnnnnnnnnnnnnnnnnnnnnnnnnnnnnnnnnnnnnnnnnnnnnnnnnnnnnnnnnnnnnnnnnnnnnnnnnnnnnnnnnnnnnnnnnnnnnnnnnnnnnnnnnnnnnnnnnnnnnnnnnnnnnnnnnnnnnnnnnnnnnnnnnnnnnnnnnnnnnnnnnnnnnnnnnnnnnnnnnnnnnnnnnnnnnnnnnnnnnnnnnnnnnnnnnnnnnnnnnnnnnnnnnnnnnnnnnnnnnnnnnnnnnnnnnnnnnnnnnnnnnnnnnnnnnnnnnnnnnnnnnnnnnnnnnnnnnnnnnnnnnnnnnnnnnnnnnnnnnnnnnnnnnnnnnnnnnnnnnnnnnnnnnnnnnnnnnnnnnnnnnnnnnnnnnnnnnnnnnnnnnnnnnnnnnnnnnnnnnnnnnnnnnnnnnnnnnnnnnnnnnnnnnnnnnnnnnnnnnnnnnnnnnnnnnnnnnnnnnnnnnnnnnnnnnnnnnnnnnnnnnnnnnnnnnnnnnnnnnnnnnnnnnnnnnnnnnnnnnnnnnnnnnnnnnnnnnnnnnnnnnnnnnnnnnnnnnnnnnnnnnnnnnnnnnnnnnnnnnnnnnnnnnnnnnnnnnnnnnnnnnnnnnnnnnnnnnnnnnnnnnnnnnnnnnnnnnnnnnnnnnnnnnnnnnnnnnnnnnnnnnnnnnnnnnnnnnnnnnnnnnnnnnnnnnnnnnnnnnnnnnnnnnnnnnnnnnnnnnnnnnnnnnnnnnnnnnnnnnnnnnnnnnnnnnnnnnnnnnnnnnnnnnnnnnnnnnnnnnnnnnnnnnnnnnnnnnnnnnnnnnnnnnnnnnnnnnnnnnnnnnnnnnnnnnnnnnnnnnnnnnnnnnnnatactcctggtccctgtccttcagtgaaagttaaggaagtatcaagagattctgtgactataacttgggaaattcccacgattgatggtggagctccagtcaacaattacattgttgagaagcgtgaagctgccatgagagcattcaaaacagtaactaccaaatgcagcaagacactttacagaatttctggacttgtagaaggaaccatgtactacttcagagtgctgccagaaaatatttatggcattggagaaccctgtgaaacatctgatgcagtactggtctcagaagtgcctttggtgcctacaaagctagaagtggtcgatgtcaccaaatccactgttacccttgcctgggaaaaaccactctatgatggcggtagccgactcactggatatgttctcgaggcctgcaaagctggcacagagagatggatgaaggttgtcaccttaaaacccacagtcctagagcacannnnnnnnnnnnnnnnnnnnnnnnnnnnnnnnnnnnnnnnnnnnnnnnnnnnnnnnnnnnnnnnnnnnnnnnnnnnnnnnnnnnnnnnnnnnnnnnnnnnnnnnnnnnnnnnnnnagtgttgccaacaatcgatctttctacgatgcctcagaagaccatccatgtcccagctggcagaccagtagagctggtgatacctattgctggccgtccacctcctgctgcttcctggttctttgctggttctaaactgagagaatcagagcgtgtcacagttgaaactcacactaaagtagctaaattaaccatccgtgaaaccactatcagagatactggagaatacacacttgaactgaagaatgttactggaactacttcagaaaccattaaagttatcattcttnnnnnnnnnnnnnnnnnnnnnnnnnnnnnnnnnnnnnnnnnnnnnnnnnnnnnnnnnnnnnnnnnnnnnnnnnnnnnnnnnnnnnnnnnnnnnnnnnnnnnnnnnnnnnnnnnnnnnnnnnnnnnnnnnnnnnnnnnnnnnnnnnnnnnnnnnnnnnnnnnnnnnnnnnnnnnnnnnnnnnnnnnnnnnnnnnnnnnnnnnnnnnnnnnnnnnnnnnnnnnnnnnnnnnnnnnnnnnnnnnnnnnnnnnnnnnnnnnnnnnnnnnnnnnnnnnnnnnnnnnnnnnnnnnnnnnnnnnnnnnnnnnnnnnnnnnnnnnnnnnnnnnnnnnnnnnnnnnnnnnnnnnnnnnnnnnnnnnnnnnnnnnnnnnnnnnnnnnnnnnnnnnnnnnnnnnnnnnnnnnnnnnnnnnnnnnnnnnnnnnnnnnnnnnnnnnnnnnnnnnnnnnnnnnnnnnnnnnnnnnnnnnnnnnnnnnnnnnnnnnnnnnnnnnnnnnnnnnnnnnnnnnnnnnnnnnnnnnnnnnnnnnnnnnnnnnnnnnnnnnnnnnnnnnnnnnnnnnnnnnnnnnnnnnnnnnnnnnnnnnnnnnnnnnnnnnnnnnnnnnnctcctccaggaaagccacaaaacccaagagttactgatacaacaaggacatcagtttccctggcctggagcgttccagaagatgaaggaggatctaaagtcacaggctacttgattgaaatgcaaaaagtagatcaacatgaatggaccaagtgtaacaccactccaaccaagattcgagagtatactctaacacacctacctcagggtgcggaatacaggttccgcatcctagcttgtaatgctggtggacctggcgagcctgctgaggtaccaggaacagtcaaagtcnnnnnnnnnnnnnnnnnnnnnnnnnnnnnnnnnnnnnnnnnnnnnnnnnnnnnnnnnnnnnnnnnnnnnnnnnnnnnnnnnnnnnnnnnnnnnnnnnnnnnnnnnnnnnnnnnnnnnnnnnnnnnnnnnnnnnnnnnnnnnnnnnnnnnnnnnnnnnnnnnnnnnnnnnnnnnnnnnnnnnnnnnnnnnnnnnnnnnnnnnnnnnnnnnnnnnnnnnnnnnnnnnnnnnnnnnnnnnnnnnnnnnnnnnnnnnnnnnnnnnnnnnnnnnnnnnnnnnnnnnnnnnnnnnnnnnnnnnnnnnnnnnnnnnnnnnnnnnnnnnnnnnnnnnnnnnnnnnnnnnnnnnnnnnnnnnnnnnnnnnnnnnnnnnnnnnnnnnnnnnnnnnnnnnnnnnnnnnnnnnnnnnnnnnnnnnnnnnnnnnnnnnnnnnnnnnnnnnnnnnnnnnnnnnnnnnnnnnnnnnnnnnnnnnnnnnnnnnnnnnnnnnnnnnnnnnnnnnnnnnnnnnnnnnnnnnnnnnnnnnnnnnnnnnnnnnnnnnnnnnnnnnnnnnnnnnnnnnnnnnnnnnnnnnnnnnnnnnnnnnnnnnnnnnnnnnnnnnnatcctccagaacctccaagcaatcctccggaagtactcgatgtaaccaagagttctgttagcttgtcctggtcccggcccaaagatgatggtggttctcgagtcacaggctactacattgaacgcaaagagacatccactgacaagtgggtcagacacaacaagactcagatcactaccacaatgtacactgtcacggggcttgttcccgatgctgagtatcagttccgaatcattgcacagaatgatgttggcctaagtgagaccagccctgcttctgaaccagttgtttgcaaagatccatttnnnnnnnnnnnnnnnnnnnnnnnnnnnnnnnnnnnnnnnnnnnnnnnnnnnnnnnnnnnnnnnnnnnnnnnnnnnnnnnnnnnnnnnnnnnnnnnnnnnnnnnnnnnnnnnnnnnnnnnnnnnnnnnnnnnnnnnnnnnnnnnnnnnnnnnnnnnnnnnnnnnnnnnnnnnnnnnnnnnnnnnnnnnnnnnnnnnnnnnnnnnnnnnnnnnnnnnnnnnnnnnnnnnnnnnnnnnnnnnnnnnnnnnnnnnnnnnnnnnnnnnnnnnnnnnnnnnnnnnnnnnnnnnnnnnnnnnnnnnnnnnnnnnnnnnnnnnnnnnnnnnnnnnnnnnnnnnnnnnnnnnnnnnnnnnnnnnnnnnnnnnnnnnnnnnnnnnnnnnnnnnnnnnnnnnnnnnnnnnnnnnnnnnnnnnnnnnnnnnnnnnnnnnnnnnnnnnnnnnnnnnnnnnnnnnnnnnnnnnnnnnnnnnnnnnnnnnnnnnnnnnnnnnnnnnnnnnnnnnnnnnnnnnnnnnnnnnnnnnnnnnnnnnnnnnnnnnnnnnnnnnnnnnnnnnnnnnnnnnnnnnnnnnnnnnnnnnnnnnnnnnnnnnnnnnnnnnnnnnnnnnnnnnnnnnnnnnnnnnnnnnnnnnnnnnnnnnnnnnnnnnnnnnnnnnnnnnnnnnnnnnnnnnnnnnnnnnnnnnnnnnnnnnnnnnnnnnnnnnnnnnnnnnnnnnnnnnnnnnnnnnnnnnnnnnnnnnnnnnnnnnnnnnnnnnnnnnnnnnnnnnnnnnnnnnnnnnnnnnnnnnnnnnnnnnnnnnnnnnnnnnnnnnnnnnnnnnnnnnnnnnnnnnnnnnnnnnnnnnnnnnnnnnnnnnnnnnnnnnnnnnnnnnnnnnnnnnnnnnnnnnnnnnnnnnnnnnnnnnnnnnnnnnnnnnnnnnnnnnnnnnnnnnnnnnnnnnnnnnnnnnnnnnnnnnnnnnnnnnnnnnnnnnnnnnnnnnnnnnnnnnnnnnnnnnnnnnnnnnnnnnnnnnnnnnnnnnnnnnnnnnnnnnnnnnnnnnnnnnnnnnnnnnnnnnnnnnnnnnnnnnnnnnnnnnnnnnnnnnnnnnnnnnnnnnnnnnnnnnnnnnnnnnnnnnnnnnnnnnnnnnnnnnnnnnnnnnnnnnnnnnnnnnnnnnnnnnnnnnnnnnnnnnnnnnnnnnnnnnnnnnnnnnnnnnnnnnnnnnnnnnnnnnnnnnnnnnnnnnnnnnnnnnnnnnnnnnnnnnnnnnnnnnnnnnnnnnnnnnnnnnnnnnnnnnnnnnnnnnnnnnnnnnnnnnnnnnnnnnnnnnnnnnnnnnnnnnnnnnnnnnnnnnnnnnnnnnnnnnnnnnnnnnnnnnnnnnnnnnnnnnnnnnnnnnnnnnnnnnnnnnnnnnnnnnnnnnnnnnnnnnnnnnnnnnnnnnnnnnnnnnnnnnnnnnnnnnnnnnnnnnnnnnnnnnnnnnnnnnnnnnnnnnnnnnnnnnnnnnnnnnnnnnnnnnnnnnnnnnnnnnnnnnnnnnnnnnnnnnnnnnnnnnnnnnnnnnnnnnnnnnnnnnnnnnnnnnnnnnnnnnnnnnnnnnnnnnnnnnnnnnnnnnnnnnnnnnnnnnnnnnnnnnnnnnnnnnnnnnnnnnnnnnnnnnnnnnnnnnnnnnnnnnnnnnnnnnnnnnnnnnnnnnnnnnnnnnnnnnnnnnnnnnnnnnnnnnnnnnnnnnnnnnnnnnnnnnnnnnnnnnnnnnnnnnnnnnnnnnnnnnnnnnnnnnnnnnnnnnnnnnnnnnnnnnnnnnnnnnnnnnnnnnnnnnnnnnnnnnnnnnnnnnnnnnnnnnnnnnnnnnnnnnnnnnnnnnnnnnnnnnnnnnnnnnnnnnnnnnnnnnnnnnnnnnnnnnnnnnnnnnnnnnnnnnnnnnnnnnnnnnnnnnnnnnnnnnnnnnnnnnnnnnnnnnnnnnnnnnnnnnnnnnnnnnnnnnnnnnnnnnnnnnnnnnnnnnnnnnnnnnnnnnnnnnnnnnnnnnnnnnnnnnnnnnnnnnnnnnnnnnnnnnnnnnnnnnnnnnnnnnnnnnnnnnnnnnnnnnnnnnnnnnnnnnnnnnnnnnnnnnnnnnnnnnnnnnnnnnnnnnnnnnnnnnnnnnnnnnnnnnnnnnnnnnnnnnnnnnnnnnnnnnnnnnnnnnnnnnnnnnnnnnnnnnnnnnnnnnnnnnnnnnnnnnnnnnnnnnnnnnnnnnnnnnnnnnnnnnnnnnnnnnnnnnnnnnnnnnnnnnnnnnnnnnnnnnnnnnnnnnnnnnnnnnnnnnnnnnnnnnnnnnnnnnnnnnnnnnnnnnnnnnnnnnnnnnnnnnnnnnnnnnnnnnnnnnnnnnnnnnnnnnnnnnnnnnnnnnnnnnnnnnnnnnnnnnnnnnnnnnnnnnnnnnnnnnnnnnnnnnnnnnnnnnnnnnnnnnnnnnnnnnnnnnnnnnnnnnnnnnnnnnnnnnnnnnnnnnnnnnnnnnnnnnnnnnnnnnnnnnnnnnnnnnnnnnnnnnnnnnnnnnnnnnnnnnnnnnnnnnnnnnnnnnnnnnnnnnnnnnnnnnnnnnnnnnnnnnnnnnnnnnnnnnnnnnnnnnnnnnnnnnnnnnnnnnnnnnnnnnnnnnnnnnnnnnnnnnnnnnnnnnnnnnnnnnnnnnnnnnnnnnnnnnnnnnnnnnnnnnnnnnnnnnnnnnnnnnnnnnnnnnnnnnnnnnnnnnnnnnnnnnnnnnnnnnnnnnnnnnnnnnnnnnnnnnnnnnnnnnnnnnnnnnnnnnnnnnnnnnnnnnnnnnnnnnnnnnnnnnnnnnnnnnnnnnnnnnnnnnnnnnnnnnnnnnnnnnnnnnnnnnnnnnnnnnnnnnnnnnnnnnnnnnnnnnnnnnnnnnnnnnnnnnnnnnnnnnnnnnnnnnnnnnnnnnnnnnnnnnnnnnnnnnnnnnnnnnnnnnnnnnnnnnnnnnnnnnnnnnnnnnnnnnnnnnnnnnnnnnnnnnnnnnnnnnnnnnnnnnnnnnnnnnnnnnnnnnnnnnnnnnnnnnnnnnnnnnnnnnnnnnnnnnnnnnnnnnnnnnnnnnnnnnnnnnnnnnnnnnnnnnnnnnnnnnnnnnnnnnnnnnnnnnnnnnnnnnnnnnnnnnnnnnnnnnnnnnnnnnnnnnnnnnnnnnnnnnnnnnnnnnnnnnnnnnnnnnnnnnnnnnnnnnnnnnnnnnnnnnnnnnnnnnnnnnnnnnnnnnnnnnnnnnnnnnnnnnnnnnnnnnnnnnnnnnnnnnnnnnnnnnnnnnnnnnnnnnnnnnnnnnnnnnnnnnnnnnnnnnnnnnnnnnnnnnnnnnnnnnnnnnnnnnnnnnnnnnnnnnnnnnnnnnnnnnnnnnnnnnnnnnnnnnnnnnnnnnnnnnnnnnnnnnnnnnnnnnnnnnnnnnnnnnnnnnnnnnnnnnnnnnnnnnnnnnnnnnnnnnnnnnnnnnnnnnnnnnnnnnnnnnnnnnnnnnnnnnnnnnnnnnnnnnnnnnnnnnnnnnnnnnnnnnnnnnnnnnnnnnnnnnnnnnnnnnnnnnnnnnnnnnnnnnnnnnnnnnnnnnnnnnnnnnnnnnnnnnnnnnnnnnnnnnnnnnnnnnnnnnnnnnnnnnnnnnnnnnnnnnnnnnnnnnnnnnnnnnnnnnnnnnnnnnnnnnnnnnnnnnnnnnnnnnnnnnnnnnnnnnnnnnnnnnnnnnnnnnnnnnnnnnnnnnnnnnnnnnnnnnnnnnnnnnnnnnnnnnnnnnnnnnnnnnnnnnnnnnnnnnnnnnnnnnnnnnnnnnnnnnnnnnnnnnnnnnnnnnnnnnnnnnnnnnnnnnnnnnnnnnnnnnnnnnnnnnnnnnnnnnnnnnnnnnnnnnnnnnnnnnnnnnnnnnnnnnnnnnnnnnnnnnnnnnnnnnnnnnnnnnnnnnnnnnnnnnnnnnnnnnnnnnnnnnnnnnnnnnnnnnnnnnnnnnnnnnnnnnnnnnnnnnnnnnnnnnnnnnnnnnnnnnnnnnnnnnnnnnnnnnnnnnnnnnnnnnnnnnnnnnnnnnnnnnnnnnnnnnnnnnnnnnnnnnnnnnnnnnnnnnnnnnnnnnnnnnnnnnnnnnnnnnnnnnnnnnnnnnnnnnnnnnnnnnnnnnnnnnnnnnnnnnnnnnnnnnnnnnnnnnnnnnnnnnnnnnnnnnnnnnnnnnnnnnnnnnnnnnnnnnnnnnnnnnnnnnnnnnnnnnnnnnnnnnnnnnnnnnnnnnnnnnnnnnnnnnnnnnnnnnnnnnnnnnnnnnnnnnnnnnnnnnnnnnnnnnnnnnnnnnnnnnnnnnnnnnnnnnnnnnnnnnnnnnnnnnnnnnnnnnnnnnnnnnnnnnnnnnnnnnnnnnnnnnnnnnnnnnnnnnnnnnnnnnnnnnnnnnnnnnnnnnnnnnnnnnnnnnnnnnnnnnnnnnnnnnnnnnnnnnnnnnnnnnnnnnnnnnnnnnnnnnnnnnnnnnnnnnnnnnnnnnnnnnnnnnnnnnnnnnnnnnnnnnnnnnnnnnnnnnnnnnnnnnnnnnnnnnnnnnnnnnnnnnnnnnnnnnnnnnnnnnnnnnnnnnnnnnnnnnnnnnnnnnnnnnnnnnnnnnnnnnnnnnnnnnnnnnnnnnnnnnnnnnnnnnnnnnnnnnnnnnnnnnnnnnnnnnnnnnnnnnnnnnnnnnnnnnnnnnnnnnnnnnnnnnnnnnnnnnnnnnnnnnnnnnnnnnnnnnnnnnnnnnnnnnnnnnnnnnnnnnnnnnnnnnnnnnnnnnnnnnnnnnnnnnnnnnnnnnnnnnnnnnnnnnnnnnnnnnnnnnnnnnnnnnnnnnnnnnnnnnnnnnnnnnnnnnnnnnnnnnnnnnnnnnnnnnnnnnnnnnnnnnnnnnnnnnnnnnnnnnnnnnnnnnnnnnnnnnnnnnnnnnnnnnnnnnnnnnnnnnnnnnnnnnnnnnnnnnnnnnnnnnnnnnnnnnnnnnnnnnnnnnnnnnnnnnnnnnnnnnnnnnnnnnnnnnnnnnnnnnnnnnnnnnnnnnnnnnnnnnnnnnnnnnnnnnnnnnnnnnnnnnnnnnnnnnnnnnnnnnnnnnnnnnnnnnnnnnnnnnnnnnnnnnnnnnnnnnnnnnnnnnnnnnnnnnnnnnnnnnnnnnnnnnnnnnnnnnnnnnnnnnnnnnnnnnnnnnnnnnnnnnnnnnnnnnnnnnnnnnnnnnnnnnnnnnnnnnnnnnnnnnnnnnnnnnnnnnnnnnnnnnnnnnnnnnnnnnnnnnnnnnnnnnnnnnnnnnnnnnnnnnnnnnnnnnnnnnnnnnnnnnnnnnnnnnnnnnnnnnnnnnnnnnnnnnnnnnnnnnnnnnnnnnnnnnnnnnnnnnnnnnnnnnnnnnnnnnnnnnnnnnnnnnnnnnnnnnnnnnnnnnnnnnnnnnnnnnnnnnnnnnnnnnnnnnnnnnnnnnnnnnnnnnnnnnnnnnnnnnnnnnnnnnnnnnnnnnnnnnnnnnnnnnnnnnnnnnnnnnnnnnnnnnnnnnnnnnnnnnnnnnnnnnnnnnnnnnnnnnnnnnnnnnnnnnnnnnnnnnnnnnnnnnnnnnnnnnnnnnnnnnnnnnnnnnnnnnnnnnnnnnnnnnnnnnnnnnnnnnnnnnnnnnnnnnnnnnnnnnnnnnnnnnnnnnnnnnnnnnnnnnnnnnnnnnnnnnnnnnnnnnnnnnnnnnnnnnnnnnnnnnnnnnnnnnnnnnnnnnnnnnnnnnnnnnnnnnnnnnnnnnnnnnnnnnnnnnnnnnnnnnnnnnnnnnnnnnnnnnnnnnnnnnnnnnnnnnnnnnnnnnnnnnnnnnnnnnnnnnnnnnnnnnnnnnnnnnnnnnnnnnnnnnnnnnnnnnnnnnnnnnnnnnnnnnnnnnnnnnnnnnnnnnnnnnnnnnnnnnnnnnnnnnnnnnnnnnnnnnnnnnnnnnnnnnnnnnnnnnnnnnnnnnnnnnnnnnnnnnnnnnnnnnnnnnnnnnnnnnnnnnnnnnnnnnnnnnnnnnnnnnnnnnnnnnnnnnnnnnnnnnnnnnnnnnnnnnnnnnnnnnnnnnnnnnnnnnnnnnnnnnnnnnnnnnnnnnnnnnnnnnnnnnnnnnnnnnnnnnnnnnnnnnnnnnnnnnnnnnnnnnnnnnnnnnnnnnnnnnnnnnnnnnnnnnnnnnnnnnnnnnnnnnnnnnnnnnnnnnnnnnnnnnnnnnnnnnnnnnnnnnnnnnnnnnnnnnnnnnnnnnnnnnnnnnnnnnnnnnnnnnnnnnnnnnnnnnnnnnnnnnnnnnnnnnnnnnnnnnnnnnnnnnnnnnnnnnnnnnnnnnnnnnnnnnnnnnnnnnnnnnnnnnnnnnnnnnnnnnnnnnnnnnnnnnnnnnnnnnnnnnnnnnnnnnnnnnnnnnnnnnnnnnnnnnnnnnnnnnnnnnnnnnnnnnnnnnnnnnnnnnnnnnnnnnnnnnnnnnnnnnnnnnnnnnnnnnnnnnnnnnnnnnnnnnnnnnnnnnnnnnnnnnnnnnnnnnnnnnnnnnnnnnnnnnnnnnnnnnnnnnnnnnnnnnnnnnnnnnnnnnnnnnnnnnnnnnnnnnnnnnnnnnnnnnnnnnnnnnnnnnnnnnnnnnnnnnnnnnnnnnnnnnnnnnnnnnnnnnnnnnnnnnnnnnnnnnnnnnnnnnnnnnnnnnnnnnnnnnnnnnnnnnnnnnnnnnnnnnnnnnnnnnnnnnnnnnnnnnnnnnnnnnnnnnnnnnnnnnnnnnnnnnnnnnnnnnnnnnnnnnnnnnnnnnnnnnnnnnnnnnnnnnnnnnnnnnnnnnnnnnnnnnnnnnnnnnnnnnnnnnnnnnnnnnnnnnnnnnnnnnnnnnnnnnnnnnnnnnnnnnnnnnnnnnnnnnnnnnnnnnnnnnnnnnnnnnnnnnnnnnnnnnnnnnnnnnnnnnnnnnnnnnnnnnnnnnnnnnnnnnnnnnnnnnnnnnnnnnnnnnnnnnnnnnnnnnnnnnnnnnnnnnnnnnnnnnnnnnnnnnnnnnnnnnnnnnnnnnnnnnnnnnnnnnnnnnnnnnnnnnnnnnnnnnnnnnnnnnnnnnnnnnnnnnnnnnnnnnnnnnnnnnnnnnnnnnnnnnnnnnnnnnnnnnnnnnnnnnnnnnnnnnnnnnnnnnnnnnnnnnnnnnnnnnnnnnnnnnnnnnnnnnnnnnnnnnnnnnnnnnnnnnnnnnnnnnnnnnnnnnnnnnnnnnnnnnnnnnnnnnnnnnnnnnnnnnnnnnnnnnnnnnnnnnnnnnnnnnnnnnnnnnnnnnnnnnnnnnnnnnnnnnnnnnnnnnnnnnnnnnnnnnnnnnnnnnnnnnnnnnnnnnnnnnnnnnnnnnnnnnnnnnnnnnnnnnnnnnnnnnnnnnnnnnnnnnnnnnnnnnnnnnnnnnnnnnnnnnnnnnnnnnnnnnnnnnnnnnnnnnnnnnnnnnnnnnnnnnnnnnnnnnnnnnnnnnnnnnnnnnnnnnnnnnnnnnnnnnnnnnnnnnnnnnnnnnnnnnnnnnnnnnnnnnnnnnnnnnnnnnnnnnnnnnnnnnnnnnnnnnnnnnnnnnnnnnnnnnnnnnnnnnnnnnnnnnnnnnnnnnnnnnnnnnnnnnnnnnnnnnnnnnnnnnnnnnnnnnnnnnnnnnnnnnnnnnnnnnnnnnnnnnnnnnnnnnnnnnnnnnnnnnnnnnnnnnnnnnnnnnnnnnnnnnnnnnnnnnnnnnnnnnnnnnnnnnnnnnnnnnnnnnnnnnnnnnnnnnnnnnnnnnnnnaatctcaagaaaagttagccctcaaagaggaagcttcaaaggttttgatttccgaagaagtcaagaaatcagcagcaacctccctggaaaaatccattgtccatgaggaaatcactaaaacatcacaggcatcagaagaaatcagaactcatgctgagattaaagcattttctactcagatgagcataaatgaaggtcaaagagtggttttaaaagccaacattgctggtgccactgatgtgaaatgggtactgaatggcatagagcttaccaactctgaggagtaccgatatggtgtctcaggcagcgatcagaccctcaccatcaagcaagctagtcacagagatgaaggaatcctcacctgcataggcaaaaccaaggaaggaatcgtcaagtgtcaatatgatttgatgctgagcaaagaactctcagatgctccagccttcatctcccagcctagatctcaaaatattaatgaaggacaaaatgttctctttacttgtgaaatcagtggcgagccatcccctgaaatcgaatggtttaaaaacaacctgccnnnnnnnnnnnnnnnnnnnnnnnnnnnnnnnnnnnnnnnnnnnnnnnnnnnnnnnnnnnnnnnnnnnnnnnnnnnnnnnnnnnnnnnnnnnnnnnnnnnnnnnnnnnnnnnnnnnnnnnnnnnnnnnnnnnnnnnnnnnnnnnnnnnnnnnnnnnnnnnnnnnnnnnnnnnnnnnnnnnnnnnnnnnnnnnnnnnnnnnnnnnnnnnnnnnnnnnnnnnnnnnnnnnnnnnnnnnnnnnnnnnnnnnnnnnnnnnnnnnnnnnnnnnnnnnnnnnnnnnnnnnnnnnnnnnnnnnnnnnnnnnnnnnnnnnnnnnnnnnnnnnnnnnnnnnnnnnnnnnnnnnnnnnnnnnnnnnnnnnnnnnnnnnnnnnnnnnnnnnnnnnnnnnnnnnnnnnnnnnnnnnnnnnnnnnnnnnnnnnnnnnnnnnnnnnnnnnnnnnnnnnnnnnnnnnnnnnaggaattccgcctaaaattgaagctctgccatctgatatcagcattgatgaaggcaaagttctaacagtagcctgtgctttcacgggtgagcctaccccagaagtaacatggtcctgtggtggaagaaaaattcacaatcaagaacaacaggggaggttccacattgaaaacacagatgacctgacaacgctgatcatcatggacgtacagaaacaagatggtggactttataccctgagtttagggaatgaatttggatctgactctgccactgtgaatatacatattcgatccatttaagagggcctgtgcccttatactctacactcattcttaactttctgcaaacgtttcacatggactaatctttctgatctgtaaatatttaaagaaaaaaaaagtagttttgtatcaacctaaatgagtcaaagttcaaaaatattcatttcaatcttttcataattgttgacctaagaatattatacatttgctagtgacatgtacatactgtatatagccggattaacggttataaagttttgtaccatttattttatgacattttacaatgta

SEQ ID NO: 37716 - DNA, 1971 bp, Macaca Mulatta
  misc_feature (1)...(1971): n = A,T,C or G
agtttatcgtgggtcagggacgtcagatcgcttgccttcgtttgctgtggtcatgagcgagcgtatgaggacggccattattgttgggggcaaatggaaatgctctaggcgnnnnnnnnnnnnnnnngggcacgctgccgtcgccattgcccactggttcggatgaagtccctgtggccgccatcttgatctcgggcggccccgataagggaggcggagtgtacagagaggaggcggggcaactacgcggacgtgacgcaaggcgccgccatgtcttttgagggcggcgacggcgccgggccggccatgctggctacgggcacgnnnnnnnnnnnnnnnnnnnncccgaggagctgtgggaggccgtggcggtggccgctgagcgcttccgggcccggactggcacggagctggtgctgctgaccgcagccccgccgccaccaccccgcccgggcccctgtgcctacgctgcccatggccgaggagccctggcggaggcagcgcgccgctgcctccacgacatcgcgctggcccacagggctgccgctgctgctcggcctcctgcgcnnnnnnnnnnnnnnnnnnnnnnnnnnnnnnnnnnnnnnnnnnnnnnnnnnnnnnnnnnnnnnnnnnnnnnnnnnnnnnnnnnnnnnnnnnnnnnnnnnnnnnnnnnnnnnnnnnnnnnnnnnnnnnnnnnnnnnnnnnnnnnnnnnnnnnnnnnnnnnnnnnnnnnnnnnnnnnnnnnnnnnnnnnnnnnnnnnnnnnnnnnnnnnnnnnnnnnnnnngatggcagcctgagcgaggagacccccgctggccccccaacctgctcagtgcccccggcctcagccctacccacacagcagtacgccaagtccctgcctgtgtctgtgcccgtctggggcttcaaggagaagaggacagaggcgcggtcatcagatgaggagaatgggccnnnnnnnnnnnnnnnnnnnnnnnnnnnnnnnnnnnnnnnnnnnnnnnnnnnnnnnnnnnnnnnnnnnnnnnnnnnnnnnnnnnnnnnnnnnnnnnnnnnnnnnnnnnnnnnnnnnnnnnnnnnnnnnnnnnnnnnnnnnnnnnnnnnnnnnnnnnnnnnnnnnnnnnnnnnnnnnnnnnnnnnnnnnnnnnnnnnnnnnnnnnnnnnnnnnnnnnnnnnnnnnnnnnnnnnnnnnnnnnnnnnnnnnnnnnnnnnnnnnnnnnnnnnnnnnnnnnnnnnnnnnnnnnnnnnnnnnnnnnnnnnnnnnnnnnnnnnnnnnnnnnnnnnnnnnnnnnnnnnnnnnnnnnnnnnnnnnnnnnnnnnnnnnnnnnnnnnnnnnnnnnnnnnnnnnnnnnnnnnnnnnnnnnnnnnnnnnnnnnnnnnnnnnnnnnnnnnnnnnnnnnnnnnnnnnnnnnnnnnnnnnnnnnnnnnnnnnnnnnnnnnnnnnnnnnnnnnnnnnnnnnnnnnnnnnnnnnnnnnnnnnnnnnnnnnnnnnnnnnnnnnnnnnnnnnnnnnnnnnnnnnnnnnnnnnnnnnnnnnnnnnnnnnnnnnnnnnnnnnnngctccagcttcctgtgggggcgtggccaagccctcctgttcccagaattggcctggggccttcaatttacattctttacactacgggggctggggtcgtnnnnnnnnnnnnnnnnnnnnnnnnnnnnnnnnnnnnnnnnnnnnnnnnnnnnnnnnnnnnngcctctggcaccccctttcattggttccatccatccccacaacagcctgccaatcgaagcccgtccctgcatccaggatggtaccagctcccgtccctcgccccccacctccacaggtgccttaaagggccctcgtccacccaaggtggggggcaggggccctcactctccggccctggtgtaggggagagagtgaggggttgggggattggcagttgggaagggcgctctgagattaaagagttttacctctga

SEQ ID NO: 37717 - DNA, 710 bp, Macaca Mulatta
tttccttcaactatttcctgaactatgggcagaagggcagggtgttgtgttactttttaatgacactgtcgtatcaaactaccccattgttacaacaatccctgtgtgacaaatcaccccgaaactcagtggcaaaagatcagtaaccactcatttgttatcatgagcttccaggtcagctgagcagttcttctgatcttggttgggcctggctggatagttctggtctcaggtgagctcacttcacatacccggcagttggctgtcagctgaagcaactggggtcactgggccacatgtttctcactattcaaaagtctagtccatgcatgttcttatggtgaaggcagaggagcaagggggaaagtagacaggtgcaagtaagcaagtgcttttccaggcctctgccggcatcaagttttctgttgtctctggccaaaacaagtcacaagggcaagccagagtctatactatataacctagatgttggttgtctccaggtgtgacttctgtttattttgccccacgccaaccttgaagtaacaatcagcacttcgctgcatctaaatagcaaatcctcttcacaaagcacaggtaagcaaggcagatttggctggcaattctgaacgaagtcgcgggcaagcacggtgtgggccgtattgacatcgtggagaaccgcttcattggaatgaagtcccgaggtatctccc

SEQ ID NO: 37718 - DNA, 218 bp, Macaca Mulatta
tatgataatttgtaatctagctttgctgcatgtaacatgtatacttggtcttgaattcattgtactgatattaaacatgcatgctggatgttttcaagttgtgttttagaaaactttaataataattaatgagtaaatacagttaccatacttttcaattgaaatgaaggtttttcatcagccttaaaagtgtaagaaaaataaagttgtcattcatt

SEQ ID NO: 37719 - DNA, 473 bp, Macaca Mulatta
ttggttcttcccagataatgctgcctcagtatatagatggagccaagtacacttccctctgtgttagggacagatgggtagaaactccaccaccaccatgtcagaaccaggcttcctggcactggatggcatgtggctagttttgcagggctctccttagaatggggctagggtgtctttgtgtgagagggagagtatcttatccaccaagaaagctgaacctcccttttttctggagcactgtagaaggtgtatacaaacacaaatttttgttattgcagactattgttattattgccaaaacagtaaactctttctccaaggctttggctcccctggactctccacagatgctgccctaggccctgttcccccagtacctccactcttacagcttcagcacacagtgaggacggccctgtcatggacctttggggctggattccacttggctggtcagctcttgacagaag

SEQ ID NO: 37720 - DNA, 4581 bp, Macaca Mulatta
  misc_feature (1)...(4581): n = A,T,C or G
ggtccaccctgagaatgaagactggacttgcttcgagcagtcggcctcactggacatccggtccttctttggctttgaaaatgccttggagaagatcgccatgaagcagtacaccgccaacgtcaagagggnnnnnnnnnnnnnnnnnnnnnnnnnnnnnnnnnnnnnnnnnnnnnnnnnnnnnnnnnnnnnnnnnnnnnnnnnnnnnnnnnnnnnnnnnnnnnnnnnnnnnnnnnnnnnnnnnnnnnnnnnnnnnnnnnnnnnnnnnnnnnnnnnnnnnnnnnnnnnnnnnnnnnnnnnnnnnnnnnnnnnnnnnnnnnnnnnnnnnnnnnnnnnnnnnnnnnnnnnnnnnnnnnnnnnnnnnnnnnnnnnnnnnnnnnnnnnnnnnnnnnnnnnnnnnnnnnnnnnnnnnnnnnnnnnnnnnnnnnnnnnnnnnnnnnnnnnnnnnnnnnnnnnnnnnnnnnnnnnnnnnnnnnnnnnnnnnnnnnnnnnnnnnnnnnnnnnnnnnnnnnnnnnnnnnnnnnnnnnnnnnnnnnnnnnnnnnnnnnnnnnnnnnnnnnnnnnnnnnnnnnnnnnnnnnnnnnnnnnnnnnnnnnnnnnnnnnnnnnnnnnnnnnnnnnnnnnnnnnnnnnnnnnnnnnnnnnnnnnnnnnnnnnnnnnnnnnnnnnnnnnnnnnnnnnnnnnnnnnnnnnnnnnnnnnnnnnnnnnnnnnnnnnnnnnnnnnnnnnnnnnnnnnnnnnnnnnnnnnnnnnnnnnnnnnnnnnnnnnnnnnnnnnnnnnnnnnnnnnnnnnnnnnnnnnnnnnnnnnnnnnnnnnnnnnnnnnnnnnnnnnnnnnnnnnnnnnnnnnnnnnnnnnnnnnnnnnnnnnnnnnnnnnnnnnnnnnnnnnnnnnnnnnnnnnnnnnnnnnnnnnnnnnnnnnnnnnnnnnnnnnnnnnnnnnnnnnnnnnnnnnnnnnnnnnnnnnnnnnnnnnnnnnnnnnnnnnnnnnnnnnnnnnnnnnnnnnnnnnnnnnnnnnnnnnnnnnnnnnnnnnnnnnnnnnnnnnnnnnnnnnnnnnnnnnnnnnnnnnnnnnnnnnnnnnnnnnnnnnnnnnnnnnnnnnnnnnnnnnnnnnnnnnnnnnnnnnnnnnnnnnnnnnnnnnnnnnnnnnnnnnnnnnnnnnnnnnnnnnnnnnnnnnnnnnnnnnnnnnnnnnnnnnnnnnnnnnnnnnnnnnnnnnnnnnnnnnnnnnnnnnnnnnnnnnnnnnnnnnnnnnnnnnnnnnnnnnnnnnnnnnnnnnnnnnnnnnnnnnnnnnnnnnnnnnnnnnnnnnnnnnnnnnnnnnnnnnnnnnnnnnnnnnnnnnnnnnnnnnnnnnnnnnnnnnnnnnnnnnnnnnnnnnnnnnnnnnnnnnnnnnnnnnnnnnnnnnnnnnnnnnnnnnnnnnnnnnnnnnnnnnnnnnnnnnnnnnnnnnnnnnnnnnnnnnnnnnnnnnnnnnnnnnnnnnnnnnnnnnnnnnnnnnnnnnnnnnnnnnnnnnnnnnnnnnnnnnnnnnnnnnnnnnnnnnnnnnnnnnnnnnnnnnnnnnnnnnnnnnnnnnnnnnnnnnnnnnnnnnnnnnnnnnnnnnnnnnnnnnnnnnnnnnnnnnnnnnnnnnnnnnnnnnnnnnnnnnnnnnnnnnnnnnnnnnnnnnnnnnnnnnnnnnnnnnnnnnnnnnnnnnnnnnnnnnnnnnnnnnnnnnnnnnnnnnnnnnnnnnnnnnnnnnnnnnnnnnnnnnnnnnnnnnnnnnnnnnnnnnnnnnnnnnnnnnnnnnnnnnnnnnnnnnnnnnnnnnnnnnnnnnnnnnnnnnnnnnnnnnnnnnnnnnnnnnnnnnnnnnnnnnnnnnnnnnnnnnnnnnnnnnnnnnnnnnnnnnnnnnnnnnnnnnnnnnnnnnnnnnnnnnnnnnnnnnnnnnnnnnnnnnnnnnnnnnnnnnnnnnnnnnnnnnnnnnnnnnnnnnnnnnnnnnnnnnnnnnnnnnnnnnnnnnnnnnnnnnnnnnnnnnnnnnnnnnnnnnnnnnnnnnnnnnnnnnnnnnnnnnnnnnnnnnnnnnnnnnnnnnnnnnnnnnnnnnnnnnnnnnnnnnnnnnnnnnnnnnnnnnnnnnnnnnnnnnnnnnnnnnnnnnnnnnnnnnnnnnnnnnnnnnnnnnnnnnnnnnnnnnnnnnnnnnnnnnnnnnnnnnnnnnnnnnnnnnnnnnnnnnnnnnnnnnnnnnnnnnnnnnnnnnnnnnnnnnnnnnnnnnnnnnnnnnnnnnnnnnnnnnnnnnnnnnnnnnnnnnnnnnnnnnnnnnnnnnnnnnnnnnnnnnnnnnnnnnnnnnnnnnnnnnnnnnnnnnnnnnnnnnnnnnnnnnnnnnnnnnnnnnnnnnnnnnnnnnnnnnnnnnnnnnnnnnnnnnnnnnnnnnnnnnnnnnnnnnnnnnnnnnnnnnnnnnnnnnnnnnnnnnnnnnnnnnnnnnnnnnnnnnnnnnnnnnnnnnnnnnnnnnnnnnnnnnnnnnnnnnnnnnnnnnnnnnnnnnnnnnnnnnnnnnnnnnnnnnnnnnnnnnnnnnnnnnnnnnnnnnnnnnnnnnnnnnnnnnnnnnnnnnnnnnnnnnnnnnnnnnnnnnnnnnnnnnnnnnnnnnnnnnnnnnnnnnnnnnnnnnnnnnnnnnnnnnnnnnnnnnnnnnnnnnnnnnnnnnnnnnnnnnnnnnnnnnnnnnnnnnnnnnnnnnnnnnnnnnnnnnnnnnnnnnnnnnnnnnnnnnnnnnnnnnnnnnnnnnnnnnnnnnnnnnnnnnnnnnntgtaagccacagagagccatgcgcaggtgctaaacacaaaagggtgaccattcatgggtgcatagaactggccagtctaggagggcttgcttcaggtaaggctagatccagggtctcaacacagagtcctgactctccctgggagtggaggctgttgcatctgctctggggcagatgtgactctggaactaggttcaatattgacatgactttccctagttttactacacagagcatcttgggtctccttggggcctgaggacatttctcctttcctttcctgggctccccaaaaggcagccagtcaggggtcaccaacttgaagcctgatctggcctgcttttagtgttcttttttgcctttagaatggtttaaaaattggggcatttcacatcaaaatcaggatttctggcttcccttaggcatttgggagcaccggcagaatagggtcactattgttggatgaaggcaacacctctgcgcccctggagcgggccactctagtccctaccccattaacttgcacccagcgcacattacacaccctcatgacctgcgtgacaggagcctcactgacatggctctgtcagcagtggctggtacccttgtctcctggccttgcttagagttggggctcatctgtgacggagtaactgagccaaggggtggttttgtggccacaggaatcatctttatgcaggctcagcatgcagggccaggagacttatctccatgccagcctcaaccccaaacccagggcagagagaaacggtcatcttttcagacacatccttcttcctgctgggagacagcctcgcccaccttcctgttggctctctgtctgcttctcaggtatctgaacaaaatagattgctttgcaccctgcgtcaaggtgtgtgtgcacatgtgtgcataagagacagactgattggaaggagacgttctcaaaactaatggctcccatgtcactgggcatttattgctgagagcaacttgcaatattttcaactgtctttaagtgaatttccagcttttctcttaaaaactagatgttatcctacaagtatgctgggataagctgccctggcagtcttcatacatttattgtgtagccccagagaaggacgcagaagacttttactggaggaagctggagctgcctgttccagaggcagggggtgtgtgccatcagctgtccacccttaacagtgggggtgaggaacctcaggccctttcagttctgccttgagagagctctctccctagggaaaaaccagcccaaactggcttaagcaacaaagcaaattccctgggtcctgtattggggatggctgaaggtggctgctgcttcaggtatggctggatccaggagcttaatgtcttcaggcctctcaactgcacccaggcctcttgactctgcatctctttgcatgctgacctcattctttcttccatctggcgggaaagatggctgccagcagcccggagcctataacttcaggattcacactctctaagggatgcttttccatctcaaatctcatggaaggctctgattggcccagcttgagtcacatgctcattcctgtgggccacactggcgaggaactagggtcctgtgattgacattccctccagaagcagcagcaggattgcggagggtcagtctcctaatggacaagagaagctggactacagaaccagcaggtatctatggtggcatctgctacggcccgcgctcctcccatgtggaggtctcggggacccaccttcaagcatcatcaaggtcattcttcttgc

SEQ ID NO: 37721 - DNA, 693 bp, Macaca Mulatta
  misc_feature (1)...(693): n = A,T,C or G
atatatttatacaatatacttttttatcaannnnnnnnnnnnnnnnnnnnaaatcccaacatagttggtattagtcttcccagtttggtgtataaatagagcaaggttgagaaaaatctgtgttcttgctttatgatgtccttttatactgagatgagggacagaggaccatgccacatgtaaaactttatctcattactcagcattgtatcttttacatagtgttctccaagtgctttattgtttttcgtgtattaacagatctaattggtcagattaattaacagatgaagcaagtaatgccactgttgcccttgctttgtttttcttagtgtttggaaacatctgagcctctttggttgctggggaaggccaggtaaagaactaaagggacaatattacagatttgccagccagtagtcctgtgtaataaccaattgtagtcctgcatttttaatgccaagataaatattatatgttcactttaggataatttccagcagtgttataagcgaggagggacatctggtggtccacgagcaaattcgagaggtaagagtaattagctgaatagttttttttacccaaaacatgtctctagttctttctgcatcctctaccaagttcttcccaaagcgcattgctttttagcatttgtcttgttgaggttttccattgcttgaatgtagtact

SEQ ID NO: 37722 - DNA, 732 bp, Macaca Mulatta
  misc_feature (1)...(732): n = A,T,C or G
ggatgtctggcggagttgtctcgtttttacaggtagagttgtctgaatacacagcaggggagtcgagaattcggaggagtcgggtgggattggaatcgacaggaacaacctgatggtacctccccacattcccttcttatttggaaagaagtgcagttcattgtagctttaccctctgtctttgcatctttgatttctccagctgggagcatccccagacaagatggcctcatccctggtagaaaattccctagctgagagctcaatgtgaatttcccgtcctggcttccaggtgtctctgcttggcatctcactttctagaaaaagagtacccaagctacttcccagacctgtcataactttgtcccattttgatactttttaaaaataaccccaaacacgtgtactctttctattggttgtttgtctaanactttgtgttctccagaagtaaatgccccttgtcatacccaataggctctttgaatttgcatcccccatacctaagttttgggacgcctcccaatgctcacccctcccaatgctcacccctctgtattagatacagtcatgcagtcatgggcnnnnnnttntnnnnnnnntttttnttttccccaaagtggcgacagtccatcctaagttttatttgaactaaggaaagggaaagaaattttccaaaagggggccctgggtcctcatgtgggtttgggaaagccccaataaaaaaccata

SEQ ID NO: 37723 - DNA, 451 bp, Macaca Mulatta
  misc_feature (1)...(451): n = A,T,C or G
taaaaaaaaaaacttagccgtatgtggtggtgggcccctgnnnnnnnnnnnnnnnnnnnnnnnnnnnnacaggagaatggcgtgaacggaggtggagcttgcagtagccgagatcacgccatnnnnnnnnnnnnnnnnnnnnnnnnnnnnnnnnnnnnnnnnnnnnnnnnnnnnnnnnnntacatttaaaatgcataggcattatatggaaacaaaatattgcctttgtgccattactgattaaagctctcgtgactttaaagggaaaacgataatgtaaatatatgacaatattactaatctcttaagctggatttgtataaaggataatgtatctatcctatttgaatattaatctaacatggtaatttatatgcttgaacactaaatttttntctcctcctaagaagncnncctatttgcagttatcatgctaagacaacattgtcca

SEQ ID NO: 37724 - DNA, 4225 bp, Macaca Mulatta
  misc_feature (1)...(4225): n = A,T,C or G
agcctgagaacctgctggtgtgggatggtgccgagggtgaagagcaggtgcggatctgtgactttgggaatgcccaggagctgactccaggagagccccagtactgccagtatggcacacctgagtttgtagcacccgagattgtcaatcagagccccgtgtctggagtcactgacatctggnnnnnnnnnnnnnnnnnnnnnnnnnnnnnnnnnnnnnnnnnnnnnnnnnnnnnnnnnnnnnnnnnnnnnnnnnnnnnnnnnnnnnnnnnnnnnnnnnnnnnnnnnnnnnnnnnnnnnnnnnnnnnnnnnnnnnnnnnnnnnnnnnnnnnnnnnnnnnnnnnnnnnnnnnnnnnnnnnnnnnnnnnnnnnnnnnnnnnnnnnnnnnnnnnnnnnnnnnnnnnnnnnnnnnnnnnnnnnnnnnnnnnnnnnnnnnnnnnnnnnnnnnnnnnnnnnnnnnnnnnnnnnnnnnnnnnnnnnnnnnnnnnnnnnnnnnnnnnnnnnnnnnnnnnnnnnnnnnnnnnnnnnnnnnnnnnnnnnnnnnnnnnnnnnnnnnnnnnnnnnnnnnnnnnnnnnnnnnnnnnnnnnnnnnnnnnnnnnnnnnnnnnnnnnnnnnnnnnnnnnnnnnnnnnnnnnnnnnnnnnnnnnnnnnnnnnnnnnnnnnnnnnnnnnnnnnnnnnnnnnnnnnnnnnnnnnnnnnnnnnnnnnnnnnnnnnnnnnnnnnnnnnnnnnnnnnnnnnnnnnnnnnnnnnnnnnnnnnnnnnnnnnnnnnnnnnnnnnnnnnnnnnnnnnnnnnnnnnnnnnnnnnnnnnnnnnnnnnnnnnnnnnnnnnnnnnnnnnnnnnnnnnnnnnnnnnnnnnnnnnnnnnnnnnnnnnnnnnnnnnnnnnnnnnnnnnnnnnnnnnnnnnnnnnnnnnnnnnnnnnnnnnnnnnnnnnnnnnnnnnnnnnnnnnnnnnnnnnnnnnnnnnnnnnnnnnnnnnnnnnnnnnnnnnnnnnnnnnnnnnnnnnnnnnnnnnnnnnnnnnnnnnnnnnnnnnnnnnnnnnnnnnnnnnnnnnnnnnnnnnnnnnnnnnnnnnnnnnnnnnnnnnnnnnnnnnnnnnnnnnnnnnnnnnnnnnnnnnnnnnnnnnnnnnnnnnnnnnnnnnnnnnnnnnnnnnnnnnnnnnnnnnnnnnnnnnnnnnnnnnnnnnnnnnnnnnnnnnnnnnnnnnnnnnnnnnnnnnnnnnnnnnnnnnnnnnnnnnnnnnnnnnnnnnnnnnnnnnnnnnnnnnnnnnnnnnnnnnnnnnnnnnnnnnnnnnnnnnnnnnnnnnnnnnnnnnnnnnnnnnnnnnnnnnnnnnnnnnnnnnnnnnnnnnnnnnnnnnnnnnnnnnnnnnnnnnnnnnnnnnnnnnnnnnnnnnnnnnnnnnnnnnnnnnnnnnnnnnnnnnnnnnnnnnnnnnnnnnnnnnnnnnnnnnnnnnnnnnnnnnnnnnnnnnnnnnnnnnnnnnnnnnnnnnnnnnnnnnnnnnnnnnnnnnnnnnnnnnnnnnnnnnnnnnnnnnnnnnnnnnnnnnnnnnnnnnnnnnnnnnnnnnnnnnnnnnnnnnnnnnnnnnnnnnnnnnnnnnnnnnnnnnnnnnnnnnnnnnnnnnnnnnnnnnnnnnnnnnnnnnnnnnnnnnnnnnnnnnnnnnnnnnnnnnnnnnnnnnnnnnnnnnnnnnnnnnnnnnnnnnnnnnnnnnnnnnnnnnnnnnnnnnnnnnnnnnnnnnnnnnnnnnnnnnnnnnnnnnnnnnnnnnnnnnnnnnnnnnnnnnnnnnnnnnnnnnnnnnnnnnnnnnnnnnnnnnnnnnnnnnnnnnnnnnnnnnnnnnnnnnnnnnnnnnnnnnnnnnnnnnnnnnnnnnnnnnnnnnnnnnnnnnnnnnnnnnnnnnnnnnnnnnnnnnnnnnnnnnnnnnnnnnnnnnnnnnnnnnnnnnnnnnnnnnnnnnnnnnnnnnnnnnnnnnnnnnnnnnnnnnnnnnnnnnnnnnnnnnnnnnnnnnnnnnnnnnnnnnnnnnnnnnnnnnnnnnnnnnnnnnnnnnnnnnnnnnnnnnnnnnnnnnnnnnnnnnnnnnnnnnnnnnnnnnnnnnnnnnnnnnnnnnnnnnnnnnnnnnnnnnnnnnnnnnnnnnnnnnnnnnnnnnnnnnnnnnnnnnnnnnnnnnnnnnnnnnnnnnnnnnnnnnnnnnnnnnnnnnnnnnnnnnnnnnnnnnnnnnnnnnnnnnnnnnnnnnnnnnnnnnnnnnnnnnnnnnnnnnnnnnnnnnnnnnnnnnnnnnnnnnnnnnnnnnnnnnnnnnnnnnnnnnnnnnnnnnnnnnnnnnnnnnnnnnnnnnnnnnnnnnnnnnnnnnnnnnnnnnnnnnnnnnnnnnnnnnnnnnnnnnnnnnnnnnnnnnnnnnnnnnnnnnnnnnnnnnnnnnnnnnnnnnnnnnnnnnnnnnnnnnnnnnnnnnnnnnnnnnnnnnnnnnnnnnnnnnnnnnnnnnnnnnnnnnnnnnnnnnnnnnnnnnnnnnnnnnnnnnnnnnnnnnnnnnnnnnnnnnnnnnnnnnnnnnnnnnnnnnnnnnnnnnnnnnnnnnnnnnnnnnnnnnnnnnnnnnnnnnnnnnnnnnnnnnnnnnnnnnnnnnnnnnnnnnnnnnnnnnnnnnnnnnnnnnnnnnnnnnnnnnnnnnnnnnnnnnnnnnnnnnnnnnnnnnnnnnnnnnnnnnnnnnnnnnnnnnnnnnnnnnnnnnnnnnnnnnnnnnnnnnnnnnnnnnnnnnnnnnnnnnnnnnnnnnnnnnnnnnnnnnnnnnnnnnnnnnnnnnnnnnnnnnnnnnnnnnnnnnnnnnnnnnnnnnnnnnnnnnnnnnnnnnnnnnnnnnnnnnnnnnnnnnnnnnnnnnnnnnnnnnnnnnnnnnnnnnnnnnnnnnnnnnnnnnnnnnnnnnnnnnnnnnnnnnnnnnnnnnnnnnnnnnnnnnnnnnnnnnnnnnnnnnnnnnnnnnnnnnnnnnnnnnnnnnnnnnnnnnnnnnnnnnnnnnnnnnnnnnnnnnnnnnnnnnnnnnnnnnnnnnnnnnnnnnnnnnnnnnnnnnnnnnnnnnnnnnnnnnnnnnnnnnnnnnnnnnnnnnnnnnnnnnnnnnnnnnnnnnnnnnnnnnnnnnnnnnnnnnnnnnnnnnnnnnnnnnnnnnnnnnnnnnnnnnnnnnnnnnnnnnnnnnnnnnnnnnnnnnnnnnnnnnnnnnnnnnnnnnnnnnnnnnnnnnnnnnnnnnnnnnnnnnnnnnnnnnnnnnnnnnnnnnnnnnnnnnnnnnnnnnnnnnnnnnnnnnnnnnnnnnnnnnnnnnnnnnnnnnnnnnnnnnnnnnnnnnnnnnnnnnnnnnnnnnnnnnnnnnnnnnnnnnnnnnnnnnnnnnnnnnnnnnnnnnnnnnnnnnnnnnnnnnnnnnnnnnnnnnnnnnnnnnnnnnnnnnnnnnnnnnnnnnnnnnnnnnnnnnnnnnnnnnnnnnnnnnnnnnnnnnnnnnnnnnnnnnnnnnnnnnnnnnnnnnnnnnnnnnnnnnnnnnnnnnnnnnnnnnnnnnnnnnnnnnnnnnnnnnnnnnnnnnnnnnnnnnnnnnnnnnnnnnnnnnnnnnnnnnnnnnnnnnnnnnnccaaggtgactgtgcggagtctcagcccggccaaggaggtggtcagctcccctgggagcagtccccgaagctctcccaggcctgagggtaccactcttcgacagggcccccctcagaaaccctacactttcctggaggagaaagccaggnnnnnnnnnnnnnnnnnnnnnnnnnnnnnnnnnnnnnnnnnnnnnnnnnnnnnnnnnnnnnnnnnnnnnnnnnnnnnnnnnnnnnnnnnnnnnnnnnnnnnnnnnnnnnnnnnnnnnnnnnnnnnnnnnnnnnnnnnnnnnnnnnnnnnnnnnnnnnnnnnnnnnnnnnnnnnnnnnnnnnnnnnnnnnnnnnnnnnnnnnnnnnnnnnnnnnnnnnnnnnnnnnnnnnnnnnnnnnncaggttccggtattctgaggatgacgaggccacttacgtggcgcagctgctacaaggcctggactacctccacggccgccatgtgctccacctagacatcaagccagacaacctgctgttggcccctgacaacgccctcaagatcgtggacttcggcagtgcccagccctacaacccccaggcccttcggccccttggccaccgcacgggcacgctggagttcatg

SEQ ID NO: 37725 - DNA, 562 bp, Macaca Mulatta
ctccacgctcctgctgtgaccgtcccttcatgggtcttctcccaggtcaccttgaaggagtctgatcctgcgctagtgaaacccacacagaccctcacgctgacctgcaccttctctgggttctcactcagcacttctggaatgggtgtggacgggatccgtcagcccccagggaaggccctggagtggcttgcacgcattgattgggatgatgataaatactacagcccatcgctgaagagcaggctcaccatctccaaggacacctccaagaaccaggttgtccttacaatgaccaacatggaccctgtggacacagccacatattactgtgcacggagaccacagagacacagctcagggcgcctcctgtacaagaacccaggctgctgcttattggtgctccctccccaccaatgcagaacaggaaagtgcggctgagatgccatttcctgctagggcctgggtttcccatcaccactagacccagagccctgtcttcctccttcttctttactaataactggcatgtcttctgttaatggttcatgcaagcagcagc

SEQ ID NO: 37726 - DNA, 1669 bp, Macaca Mulatta
  misc_feature (1)...(1669): n = A,T,C or G
aaaatatgaacagtcacagcttcatgctttcaggaaaccaccttcttttccatcatctcctttggcctgctcagccagccagaaatgttaaaaatatttttcccacaggctcatgcaaattaaaggatgtggctgagcatctgcttcagnnnnnnnnnnnnnnnnnnnnnnnnnnnnnnnnnnnnnnnnnnnnnnnnnnnnnnnnnnnnnnnnnnnnnnnnnnnnnnnnnnnnnnnnnnnnnnnnnnnnnnnnnnnnnnnnnnnnnnnnnnnnnnnnnnnnnnnnnnnnnnnnnnnnnnnnnnnnnnnnnnnnnnnnnnnnnnnnnnnnnnnnnnnnnnnnnnnnnnnnnnnnnnnnnnnnnnnnnnnnnnnnnnnnnnnnnnnnnnnnnnnnnnnnnnnnnnnnnnnnnnnnnnnnnnnnnnnnnnnnnnnnnnnnnnnnnnnnnnnnnnnnnnnnnnnnnnnnnnnnnnnnnnnnnnnnnnnnnnnnnnnnnnnnnnnnnnnnnnnnnnnnnnnnnnnnnnnnnnnnnnnnnnnnnnnnnnnnnnnnnnnnnnnnnnnnnnnnnnnnnnnnnnnnnnnnnnnnnnnnnnnnnnnnnnnnnnnnnnnnnnnnnnnnnnnnnnnnnnnnnnnnnnnnnnnnnnnnnnnnnnnnnnnnnnnnnnnnnnnnnnnnnnnnnnnnnnnnnnnnnnnnnnnnnnnnnnnnnnnnnnnnnnnnnnnnnnnnnnnnnnnnnnnnnnnnnnnnnnnnnnnnnnnnnnnnnnnnnnnnnnnnnnnnnnnnnnnnnnnnnnnnnnnnnnnnnnnnnnnnnnnnnnnnnnnnnnnnnnnnnnnnnnnnnnnnnnnnnnnnnnnnnnnnnnnnnnnnnnnnnnnnnnnnnnnnnnnnnnnnnnnnnnnnnnnnnnnnnnnnnnnnnnnnnnnnnnnnnnnnnnnnnnnnnnnnnnnnnnnnnnnnnnnnnnnnnnnnnnnnnnnnnnnnnnnnnnnnnnnnnnnnnnnnnnnnnnnnnnnnnnnnnnnnnnnnnnnnnnnnnnnnnnnnnnnnnnnnnnnnnnnnnnnnnnnnnnnnnnnnnnnnnnnnnnnnnnnnnnnnnnnnnnnnnnnnnnnnnnnnnnnnnnnnnnnnnnnnnnnnnnnnnnnnnnnnnnnnnnnnnnnnnnnnnnnnnnnnnnnaatacacagaacttttaacagcttagatcgaaggaagctgaccagcctgcaaaaagggacagcttccctagggaagtgacttcggagctgtgatgatgaatggctaagagttaaccaaggaatgggaggagggaggaggagacagggaaggctttccaggcagaagccagagcatgtgcaaagatcctgtggcaagaaggagcctggtgcaggggaggaatggagagacatgcaagctggctggagtgcagagagggagatgggcaggcaggcggttggattgggggaggcaaggatcagatcatgagtcccttggagaagcgggaaggcatcacgatgactaatgtcagaggcaggggaggacaggtagggatagacatggaagcagtgctgggaagatgctaaaatgctgcagtttgtgcttggaaagatcatgaaatggttcttccattgtcatgactggttgttctctttcaaatggttcttctaatttgtcttgac

SEQ ID NO: 37727 - DNA, 781 bp, Macaca Mulatta
  misc_feature (1)...(781): n = A,T,C or G
ggatgctaacttgggggtggtaaccaaccagttttatctcatttaagcattacattttgaagactgtgaatatactttacagcagatcaaacacatttatggcatgcattgacctcttcttggagcccagaattttatagagttgcctaccggggttactgtaatggaatttatgatcttaagaaattactagttatattatttatcctatgattcattcattcaataagattttattgcataaactttgcatccagcactgtagtaagtacccaaaattgaatagaaataatggcttttgaaaattgcgcaaagcaggccaggcannnnnnnnnnnnnnnnnnnnnnnnnnnctttgggaggctaaagcgggcggatcatgaggtcagannnnnnnnnnnnnnnnnannnnnnnnnnnnnnnnnnnnnnnnnnnnnntnnnnnnnnnnnnnncggacgttgtggcgnnnnnnnnnnnnnnnnnnnnnnnnnnnnnnnnnnnnnnnnnnntaactnnnnnnnnnnnnnnnnnnnnnnnnnnnnnatgagatcgcnnnnnnnnnnnnnnnnnnnncannnnnnnnnnnnnnnnnnnnnnnnnnnnnnnnnnnnnnnnnntgtgcaaagcatagataaaatttttttctttattaaagcttctcactgaataagccttcttttcttnctgggtaaatgtcaactctgtttagggagatagtctgcctttttcccgtgaaaatagaaatagttgggcttaaaagcccctggaaaagaaaggtat

SEQ ID NO: 37728 - DNA, 824 bp, Macaca Mulatta
  misc_feature (1)...(824): n = A,T,C or G
gggtttagaatattgttcattgccaggtaggcagtaatatttatgacaaaaacagaagaatttcttcaaataattaattggacccaattggccctgctgctggtccatgatgctatatttattttcccaaactgcacacatctaattttgtcattttattgcttagcaaataaaataaaatacaaactcccaggcctaacattccaggcctctcatgatctggggtttgctgatttttccatctagactccttagcattccccacatatagtcaatcctttaccacctctatgtctttgctttttccatcttagaaggtctcaaaataaaccctggccccaaatgcctgatgtttctcaaatgccacctttttaaaatgaaattttccctgattagcttagcaaaagtgatctcttcctcaacttgaatagctttttgttaaaccatgtctttgaagctcaccacatcactcctttacagcataaatatttataaacatgtaatttttttcttctaaattgcaaaatctctgagggtaggaaataatttgcttctttgataaaacccctattgtagaaaactaaaagttactaaagttctttaaaagccattttagtgatggnctgaccttaaagcaaatggataataggtagataaataaattgagtatttcactgntgtggctggggcactcgntgctttagagggtatagtgttgcgcttttaacacccccttgttttgggtagggaaccttccatgtttttagaatggtgggaaaacttaaaaatttaaaagggctccttgttgccctttggctccaggg

SEQ ID NO: 37729 - DNA, 757 bp, Macaca Mulatta
  misc_feature (1)...(757): n = A,T,C or G
ggtgcggtggctcacatnnnnnnnnnnnnnnnnnnnnnnnnnnagggcgggcannnnnnnnnnnnnnnnnnnnnnnnnnnnnnnnnnnnnnnnnnnnnnnnnnnnnnnnnnnnnnnnnnnnnnnnnnntaactgggcgtggtggcacatgtnnnnnnnnnnnnnnnnnnnnnnnnnnnnnacaggacaattttnnnnnnnnnnnnnnnnnnnnnnnnnnnnnnnnnnnnnnatgccattgcactccactctgggcaacaagagcgaannnnnnnnnnnnnnnnnnnnnnnnnnnnnnnnnccaccaccgaaaacaaacaaaacccccccacaaataatcctggtgattctgcccaacttaaggttcctattaactctagactgtctttaaaatagagtctaaaggcatgacatatacctccctttcctacctggtcccaacctgctcctcaaatctcaactctgcccaccatttccacctctgatttctaagctccaagaacaaaatgtttcgtatttccctgaatgcttttatgactgggcctttgcatttgccaatcctctgtccgaaatgcttcttgcctgtaaagtaaaccatactgttttcttcctctgcccttcatggtgcctctcctacatcttttaggaaatttatcagataatacaagaacacgtttaatatacctgcctaaaccttcccacctcacaacagactgtcttgctccaacctttgctcagnttcaatttcctcaagccca

SEQ ID NO: 37730 - DNA, 192 bp, Macaca Mulatta
gatgggatgagaaatgaaagtagagattcagagatatcaaagaggaaaactgcagagcaacacagctttggaatctgtaaggaaaagagagctaggatagaagatgatcagtcaacccgggaacatatcatctagcagcccacctgagaaagaacagcctccaagagaggaaccaagggttccccctctcaa

SEQ ID NO: 37731 - DNA, 774 bp, Macaca Mulatta
  misc_feature (1)...(774): n = A,T,C or G
ggacagtgtgaagcctcctcaggaggctaaggtgnnnnnnnnnnnnnnnnnnnnnnnnnnnnngctagcctgggcaatatagccagaccccaatttttaaaaaagttgtgttgtaacattagatatcacccttgctgccaacactccctaccttttctggtttcaccacttcccctgcccctgttttgccctttccaagtgattctgaattaattttctagggatgttagagcagattggtggtgaaaacggtttgggctcatggagtgggaaggaaaaaaatatgtgatgacagatatatggcagagaatcagaaaacaaggttatatttaagaatctgaaatgttgcagacataaggacctacaatggttgaggtttaaaggcagagattttttgaattanaacgtgaatggcttcttcagagctgttatttttggatgaaaagtaagaaggtgaggaatggggagaggaattctgcccttatttaccttggcggcgaattcgcgcctcatctgggcagggcttgttggccgaaggacgaaagacagggctgcgntgggtgggaagtccacgtggattgggtgggggtggaaacccacgtgggggcggggcttggagagaagcgcaaggttgcttgggggcttgccggttgagagggttcctaatgccgaaaggagcgtcagggggggggggccgcaagcgcaatcggcgggctggccgccgcgcgccgctagcgcggtataagagaagggcgcgacgagggacggagagaa

SEQ ID NO: 37732 - DNA, 552 bp, Macaca Mulatta
ctagctctgggctttttggtcctgctgcagagcaataacctcctcttctgccaccttggggattcagagagagcaaatgcggccagcattatcttcatgggtttgtttttctcgtttgaatatgaaaattcccctaacagcttctatgttctcctttagaatacttaccaaaagaagcccggcaaaaacagacattcatcacgtggactcaaaaaaacaaactagtgcaagcctttgagaggaacccattccctgatattgctaccaggaaaaaactgactgaacaaacaggcctgcaggaatcaagaattcaagtaagttccatgtctgtgaccccgactatatcctgcctgtgatactgccccctgaaggtgttactgaaaaacttcgagctgtcttgggttatcaaagtcatcaagggcaatgacaggggatggtaaatgtctggcattgcaagtcccatttttgtcaaggaagaattttcaaatcaaattgctatgcacggatttggaatcactagcagaaactacccattttgagaacattgttaga

SEQ ID NO: 37733 - DNA, 1270 bp, Macaca Mulatta
  misc_feature (1)...(1270): n = A,T,C or G
acgaaatggttctaagaaaagctttcttggagggccgagggccggcccgaacaagnnnnnnnttnnnnnnnnnnnnnnnnnnnnnnnacacagaaacaagaaattttattatctccaaatgctggtgcataacaaataacaagcttaattagaggaggagacagagggaaacttcagataccaaggtaatttctgggtaggtttaaaacctttaaaagttgatagaataactgttcataaagtctttttagatatagggctttttacttgacaactttttattaacagttcttacaatatgaagttcaactaaagtatttcaccttgcaagttaaaacagcaagcaaaacaaaatttctctagtatataacagcgtgagcaatggtttctttgtacattcacacacatttagtgtctagatttgaaagtttttaattaaagatgtcttaatttttgacttttaaaaatggttatgacaatgaattttcttgatttatatatcacagtggctttataaatgatcaagatacatgtacaaacaaaatttcagacgctcttggaaacacatcttaagatacagagcacatgtgatacatctttgagtttactcatccttttggaataatgaagaatacttcatttgtcttacactgaaaatttagcctttgataactacggcttgactagatcacaaaatagaatttcccaagttttcttaaactttcagtccaaataactcaaaagatatgtgtcctagttggatacattttttctcattatataattaatatcagtgggctcttgtattggcagtttgtcttggtcatgacttattcttgcaaaaccatctttacagcaaacaaatatgaaagatattttccccaatgcaaggaaaataatctggatcaataacaaagtcaaagccataggtgttttagcacattcttgataacagatttcaacggtcttaaaatcttttttcctttttctttaatgattctcctttttcacaactgtgcagtcactgtcctattgtcttctattctgaaaaacaaatttttttgaaggtcaagtttttcaatggcacaaaactatttggaatgaacccaaaagatagcggaaagttgggtccctcctcaagtagtttcctcctcttttaacagcatgtaactactctctatcaataatctcatcacagccgagttcttcggtcagacgattgacaaccatcagtgaaaaaagctcttcgataaaagctaactgatcaacc

SEQ ID NO: 37734 - DNA, 107 bp, Macaca Mulatta
atggcagcgctgcgctacgcgggcctggacgacacggacagtgaggacgagctgcccccgggctgggaggagagaaccaccaaggacggctgggtttactacgccaa

SEQ ID NO: 37735 - DNA, 402 bp, Macaca Mulatta
atgaggcaagtggcaagagtgatcgtgttcctgaccctgagtactttgagccttgctaagaccacccagcccatctccatggactcatatgaaggacaagaagtgaacataacctgtaaccacaacgacattgctacaagtgattatatcatgtggtaccaacagtttcccaaccaaggaccacgatttattattcaaggatacaaggcaaacattgcaaatgaggtggcctccttgtttatccccaccgacagaaagtccagcactctgagcctgccccgggttgccctgagtgacactgctgtgtactactgcctcgtgggcgaccggtattcaggaggaagtgctaacagactcacctttggcaaagggactcatctaatcgtccagccctatatccag

SEQ ID NO: 37736 - DNA, 751 bp, Macaca Mulatta
agttgggctttacacaatccaaattctccagctcattcctttttttgataataaaaatgagctatctaaaagagatatggtcaattttgtatcaggaagtggtgatattccaggggatcaaaatgatgaatatcaattagccctcaaaaactatattccttatttaactaaattgaaattttctttgaaaaagtcctttgatttttttgatgaatactttgtcctgctaaaacccaggaacaacattaagcaaaatgaagaggccaaaactcggagaaaggtggccgtatattttaagaaatatacagatatattttgtctcttaggagaatcacaagacataggtcttggatcaaagttcagtgagccacttcaaatagagagatgccgcaaaagcctagtagctttaaaagcagacaagttttctgggctcttggaatatcttatcaaaagtcaagaggatgctataagcactatggaagacatagtgaacaaatatgcttttctcttagaacaatgcactgtcaaaatcgagtcaaaagaaaagttaaatttcatcttggccaacattattctctcctgtatcaaacctacctcgacattagtaaagccagttgaaaaactaaaagatcagcttcgagaagtcttgcaaccaataggactgactcatcggttttcagaaccttattttctagcttccctcttattctggccagaaaatcaacaactagatcaacattctcaacaaatg

SEQ ID NO: 37737 - DNA, 1262 bp, Macaca Mulatta
  misc_feature (1)...(1262): n = A,T,C or G
gcgccggggggtggggggctgcgcgggactcttttctttcagactgaccgcggggcagctgcggagcatgtcgaccccggcccgaaggaggcttatgcgggatttcaagcggttacaagaggacccacctgtgggtgtcagtggcgcaccatctgaaaacaacatcatgcagtggaatgcagttatatttggaccagaagggacaccttttgaagatggtacttttaaactagtaatagaattttctgaagaatatccaaataaaccaccaactgttaggtttttatccaaaatgtttcatccaaatgtgtatgctgatggtagcatatgtttagatatccttcagaatcgatggagtccaacatacgatgtatcttctatcttaacatcaattcagtctctgctggatgaaccgaatcctaacagtccagccaatagccaggcagcacagctttatcaggaaaacaaacgagaatatgagaaaagagtttcggccattgttgaacaaagctggaatgattcataatagacaactggtctgttaatctttttcatcattgttgtgtataatttacctctcagtagaaaggctaacaaattttaagtgccacaggttttaaggattctgcnnnnnnnnnnnnnnnnnnnccttcagtttagaacctacaaaagcttgtgtatcttgattaatgtactttttattgcatggtgtgaactaagttattgctgcataaatttgtaatatatcctgtttgtattttttttccaagtgtataatgttggtgtggagttttcatgacagaatatacacattttgtaaatctgtacttttttcaaatattgaatgccttatttctgaattctttagatttttaaattggagaaaagcacttaaagttttttatatatgaatattacatgtaaagctgttaaaatacataacttcagtgcaagagactttgtcacttatttccttatgtgtgtaggaggggttaataagtctctagctctccatctattgatagtttcatttacaatttcaaaagaacattcttacattttatcaaggaagtcttcaaatttgattctaaatagcaattataatctccaactttattttgtatgtacctatattagtttcaattgagtaattctagacataactggtttggttctgtccaactctgtatttaggccatttgttacagtttcttcatgcattacttactgttaaaactgtacttttggggccaggcgcggtg

SEQ ID NO: 37738 - DNA, 735 bp, Macaca Mulatta
gggataaaacaaggtatgcactgatctattgttctaaaattggaaagagtctgaattccaaacacactcggacccttgcatttcagaaagaaagtgaccatgcacccacaacaatagctagtcttcatggcacacactcatgttttaggccatttaatccgcacatagccctatgggaaggttcctttagcttttccatttgacagtgggtggcacacagaaagataaagaaaccaagccaggctgcacatttaacaagcacagagtcaggaccggaccaggcagcctggcatcagaaactttttcttaagactcctttgtactgcctgttttctgtttcactcctactgaaatattaatcacctactgaaactcaaaataccacgagaaacacacattctgtggtggttaagaatatgcactatggatacagaatgcctgagtttacctctcagctccatcacttagcagctgtgtaacttggggcacgttacttaacttctcagtgcttcatctgtaacataaggataacaagaatatttcttagggttgcttgaggatgagttaatatatgtgaagtaccccgcacatgtccgtggtaaactataatattatttcatctcaactatctgcagctgaactagcactcatgaatctcattatatttaaactgaatttagttaaatttccagggccaaaacctgaattcctttaactaagggggcttgaaagtga

SEQ ID NO: 37739 - DNA, 762 bp, Macaca Mulatta
  misc_feature (1)...(762): n = A,T,C or G
ggggcacaatgttcccactatgcagagctccagggtctttgcaatgaaatgagaaccattccccaggcccatttattttattttgtattctgggactgacttgtaaccatacagagacctttagagaagataaattatcaaggttttttggttgtttttatttgttttgttttgtttctcacggcttttttgctttcaccccagccctaagagcttggcagagaatgagtggactggaccaggggcaaatctttgtgacagactatggcctctgctagtggttgaattgggccaggcttgaatgtctgatgcccccttctcttagggtgggttcatacaatgagactacacatctcgctggctgtctaaataatattttctccccatattcattttaaattattggagccttaattgcgctacagacatgctaaattttgtaatagcttaagatgtattaagacattaagattcctggtgtggccgnnnnnnnnnnnnnnnnnnnnnnnnnnnnnnnnnnnnnnnnnnnnnnacgggtgnnnnnnnnnnnnnnnnnnnnannnnnnnnnnnnntaacacgggngaaacnnnnnnnnnnnnngnnnnnnnnnnnnnnctagccggggggaagtggtggggcacnctgtagtcccangctactcanggaggctgaangcanngagaatgatgttgaacccccggaagcggaagctttgcantggagctgaagatccggnnaccactgcannctccagccctggg

SEQ ID NO: 37740 - DNA, 652 bp, Macaca Mulatta
aacagaagcctcccagtcctcttcagcatttaattccaggctcaaactcggacagtgaacccagaattcaaacagatacactaaagcgagctagcaaggatagagtcagtgatttccataaattgaagcaaagccgattctttgatgagaatgaatcccctgttgatctgcagcatggccctaaactggcggattatgatggggatgatggtaacgtaggtgagtatgaggcagacgagcaggctgagctggcttacaatgaggaagaagatggtgatggtggatcggaagacatccaagatgatgaagaacgagagcttcaaatagatcctgcagactatggaaagcaacatttcaatgatgtcctttaagtcctaaaggaacatttcagaaaacctaaagtgctgtaaaatgaactcattctgctttgtcctttctgacttttgttgtaaagatgagttgtatccgttgtaaagacacattgagatagaattaaggaaaaactttaatgaaggaatgtacccatgtacatatgtgaactttttcatattgtattatcaaggcatagacttttttggttatgatacagttaagcaaaaaacagctaatctttgcatctaaagcaaactaacgtatatttcacattttattg

SEQ ID NO: 37741 - DNA, 2021 bp, Macaca Mulatta
  misc_feature (1)...(2021): n = A,T,C or G
agcttctccttgttctatgtgtgaatagctagtctgtatcttcacctatgtatatttaaaaatcaatcttaagaaggcccttggccaccataatccttccacaccatagcaagagcccagcctctgagactgtgcttccttcgcgcctcccactggaatgccttccccctaatctccaaggtatcaaactggtcaggggcagctgagacagccctacttctgggagtcctccccaaccccttgaagtcacaggcatctctgatgtccctgcccttcatccacatcactgaacaattaagcacacacatctctgtacttttatttaaaccattccatatgtgtttacaattaacgacttcatgactgcagtatggatggagcagaaaggaatgctgagggaggactccagttagaatgagctgctcttccaggactaggaatgaactttccccagtaccaaccaggcagcctccagggcaagaaaaggtaaggggatccatcctcttgacagccaagatggaattacaggtaatctcacctcttttttgactctcaggtggaaaaccccttcagtggaggtgaagcacagtccactccagagccccacagttgggctcagggatgtcacagaaatcaccagggcagcaaattcccatccagaggggccccaggctgaccaagcaccctcaagcttagctccaaactcaggtcagggagtgaagcccttgtccccaagccccagagtgagggtttgtctctaaccctgtgggctccagtgaaaggaaaatggcctgcaggtgcccacaggagagcacctgagttctgagacagctctacggctcccagccttcatccccgtgagaaacacagggacacacagaggggcatgctgactgcctatagggcacccatggaacacggatgctccctgcagatcctgaagccggtcagataacaaggtgcaaaggtgtgggggagacctggagggaggccttactgggtgccaaccagcctaaccagccggggccacagaccagaagtgcttctgatgttaacgtgacacggaaggtgtgtatgatgggtagtagaagtgaccacagaggcctctggggattgtagttttggagctagagaggcgggaaagcagttggttttgcccacacagggtgcctctgacatctgcacagcacatacagccaagtttaggagcccactgttaagatgcccaggtgacattgacaagtttctcctctgcaagccaatgagatctggtgactgtcagagcatcgcaggaccgccgaaggattctggaaaatgcagtcccgggtggccactgtgtgctgaccttcacctgcaggtgagctgagctcaccacgcaagtctccaccctggtgtgcccttctccgagcagatgccaggttgggacagaagcagctcagggagaggtgatgctttgccgggactcctggtttgtaggtaacactggccctgtgtcccctacagtaggagggtgtaccaggacaaggaaccccaaggctgttttcagagagagcaagattggcttgcggcaaactcctggaatggagatggggagagtcttgtcacatttccccgggattttaggggatggaggctggacctgggtgaacagcaaaagaccgcctggtggtcgtggtggtgaggatgggagacttgagccagaaattccnnnnnnnnnnnnnnnnnnnnnnnnnnnngagacagagtctccctctgtctcccaggctgcagtgcaatggcgcgatcttggctcaccgcaacctccacctcctgggttcaaatgattctcctgcctcagcctcccaagtggctgggattacaggtgcctgccaccatgcccagctaannnnnnnnnnnnnnnnngtatttttagtagagatggtgttttgccacattgcccagcctgttctcaaattcctgacctcaagtgatccacctgccttggcctcccaaagtgctgggattacaggcatgagccccca

SEQ ID NO: 37742 - DNA, 609 bp, Macaca Mulatta
gcagcaaaggcaattctgttattctcaagtccatagatgcccagtgtgacactgtgaactggagaaaaaggagcacttcctgttcaggaaatcttgtaaaatcataaatgttgggactcagtcaacaataccccaaaatgaaggcctcacgagcatcttcagaagaaaaatttatttctctgatcttctcttgccttcctgtctcttagtgccattctcccctgaggctagacacagacactagaatccctctgccccaaggcagggcatggaagtcagaagcctttttccccaaagccagccataaaacttaaagatatcactctaactttccctctgcctttctgtgtaaaaactggccataaagaaactatctgccctaccttgtttgactgcaggtcataagacccccattccagagagggtcctgcctcatcctcagaaggaaggaatgcacgtttagcaaggccaagaagaatctaaacagataggccttgctgggtttccccactcagcctattggcattggatcatgccctttttgtccagtcctatgtctacctggctgtccatactttgttgaacctaagcataaaaatgggcagtttc

SEQ ID NO: 37743 - DNA, 670 bp, Macaca Mulatta
  misc_feature (1)...(670): n = A,T,C or G
gggggttccagaagaagaagacagcgatggcggcagagccttcgaagactgggccttcccggtctgcctaccagcggatggggaggaagagtcagcactggggtgccgctgacatccagtgcaccaggtgtggaaggagggtatccagagcatccggtcaccactgtgaacttcaatgtggacatgctttttgtgaactatgcttgttaatgactgaagaatgcaccacaattgtatgccctgattgtgaggttgctacagctgtaaatactagacaaggctgctatgcaatggctggatatgttaaagaagactccgtaatggaaaaacggcagcctaagacgataaagaattgttctcaggactttaagaagactgctgatcagctaactactggtttagaacgttcagcctccacacacaggactgtttttgactcatcatctgtaatgttggacactaacactgcagaagaaatgatgaagcatgactacagcacatcataattttgaacattaagcattgctggnaaagcgcttgacacatgcagagcaacgatagaggaagagagaagtacagagttgtggaaaacgttgaccactttggctttttgatcaggaaagaactggtgaaaatggcaaactctatgtttcttcaattaataggtaan

SEQ ID NO: 37744 - DNA, 700 bp, Macaca Mulatta
  misc_feature (1)...(700): n = A,T,C or G
gcatgcaggagcacatggccatcgatgtgagcccgggccccatccggcccatccgcctcatctcccactacttcccgcacttttaccctttgacggagcctaccctgcaccctccggaccagcgccccgcggcggcgtctaccatccgctctgcaccccagccgcagcccgacccagagccagagagagactcagacgacagcanctgccctggccaccctggagttcacacttctttttgatgcggacaacagtgccttgcactgcacagctcatcgtgccaaggnagggcctcaagccgttggcctcaggttccgtggacacctatgtcaaagcgaatctgctgccagggaacagcaaggnnnnnnnnnnnnnnnnnnnnnnnnnnnnnnnncgagggggcctgtctgggaggagacactcacctatcacggctttcacccgccaggatgctgtgtgcnnnnnnnnnnnnnnnnnnnnnnnnnnnnnnnnnnnnnnnnnnnnnnnnnnnnnnnnnnnnnnnnnnnnnnnnnnnnnnnnnnnnnnnnnnnnnnnnnnnnnnnnnnnnnnnnnnnnnnnnnnnnnnnnnnnnnnnnnnnnnnnnnnnnnnnnnnnnnnnnnnnnnnnnnnnnnnnnnnnnnnnnnnnnnnnnnaggaggaggtggagacagaggtggcctgggaggaacatgggcacgtc

SEQ ID NO: 37745 - DNA, 432 bp, Macaca Mulatta
ccaagtaattcttaacttcagttggagtaagccccctaaatccagcatcgttgaagattccaccttctatattatcctctgtcatttggccttcaaagttttcctttagggttaagacggctgtatgaatggcatcttcaagttccagatcttcattttattttttctcaagggaagttttcccattcacatagttctttcccattgctgtggctttccatgccaagtaagctccagatggatctgactgaaataaatatggtcgtcccttattccaaccacaaacaagtaaagaaactccaaatgaacgaacaccacctgactgagtacattcttatatcacagaagccactctctgtactaggtgagctgtgggaatgggcacttggtacacaagatagtattgttgagctagttttgagctctgtgcac

SEQ ID NO: 37746 - DNA, 725 bp, Macaca Mulatta
  misc_feature (1)...(725): n = A,T,C or G
ggataggaattttgcttttgtttaaaaatatatgcaaatgttcagtatttnnnnnnnnnnnnnnnnnnnaacaattgtatgaagaataagggaaaactacatagaccttaatcatgctcccgagatacaaaaaccaaaaatgtaaatttaaaagatggcaatggatttgaagactaatacatgggttgctttcaatgaaaataagaataaaaagtcaatcaaatttttataaatgattatatgaaaaccattatattatatcaggccattttggggaagacaaagatgaacaaaacatagttctttgtcttcaaggaatttatctagtctcaaatgaaataatcagatatctatctttattaatattatttttagcaatgaaaagaagtattaatgattcttaatatattaatttaaatatggaactataattataaatagaatttgttaacatatccctttaattttaattacgactgttataatcttcaagagttcacttttaagtactaattacagatgttaattaccttgttgtgttgaactttatggactttcaaactaatgcctattaattgaacaaggaaattaagtgacacaaatccggactgtatagaaaaataatgtacacaaatgatactacaggtgttgagattataacatttttaatatttaaatgaaaatcttttcctctggttttgggcccttnaaaagataatttatcc

SEQ ID NO: 37747 - DNA, 668 bp, Macaca Mulatta
  misc_feature (1)...(668): n = A,T,C or G
tggtgcgatctcggcccattccactacacctcgcttgggttcaagcaattctagtgtnnnnnnnnnnnnnnnnnnnnnnnnnnnnagcatgcgccaccacannnnnnnnnnnnnnnnnnnnnnnnnncatgtttggttagactcgtcctgaactcctgcttcatgtgatctnnnnnnnnnnnnnnnnnnnnnnnnnnnnnnnnnnnnnnnnnntcaccgcgcccagtcgagaaggtggtcattttaaatgatagggtcaaggaaagctttactgataaagcgatagtggagaaataaagactagagaatattccaaatagaagaccaagtagcaaagcctggagatagcagagttattgtggctgggcaaaagggcagaagaggtgcagaggaatggagatgaggtctgaaaggcaaatggaggcaagctgttcctatatggccttgtatgtaggccagtgtaactactttggttttattcctagtgaggtgggagccactcagggttttgagcagaggactgagatgatctgatttatattttaaaatgagctgtctggatgcctaatgaagaataaactgtgatggagcctggataggagcagagatcagttagtagggtactaaaaaaaaggagttgagatggcagtggcttgctctgtgtatta

SEQ ID NO: 37748 - DNA, 631 bp, Macaca Mulatta
ctcttcttggagaaaattgttacctaatagtttttcctcatgaatgttattactactggtataaaccaaatttctataaatttcctacttaagtcttgagaactgggttcttcctttgatgttattcatgttcagaaaggaaataacactttactcttttaggacagttcctagaatctatagtagtatcaggatatattttgctttaaaatatattctggttattttgaatacagacattggctccaaattttcatctttgcacaatagtaatgagttttcactagaacttctcaacatttgggaactttgcaatataagcatcatatgtgttaagactgtatcatttaatgctatgagatacattgttttctccctatgccaaacaggtgaacaaacgtagttgttttttactgatactaaatgttggctacctgtgattttatagtatgcacatgtcagaaaaaggcaagacaaatggcctcttgtactgaatacttgggcaaacttattgggtcttaattttctgacaggatttgactcaatatttgtagagtttgcgtagaatggattacatggtagtgatgcactggtagaaatggtttttagttattgactgagaattcatctc

SEQ ID NO: 37749 - DNA, 83 bp, Macaca Mulatta
tcttcaccaccaggagtgttccttgataaggactatgagatttaccgggattacagtgcggacggccagcttcttcactacag

SEQ ID NO: 37750 - DNA, 3625 bp, Macaca Mulatta
  misc_feature (1)...(3625): n = A,T,C or G
cttggagacctgagccaggctctactgggttagatgcgagtgagacaggcgacccacggagttcttctttaagcctccctcgcctcagcaaggagagggagcgttttccttattttaataaccgcctttgcctcccttggggtcccagttcaccctgaacctttccacagccttaaaagtccgctctccctaggggggtgttgcggcagttcttcagaagacacggggccaaatgaaacttacttaaagtggttatcgcgtttcaagctgatttgttcctagtaactacgttttggaaagcagctgtggactctcagggacaggcaggaatgaagaccccgtcagagtcccggtgtcgcttcccacagttagattaccagtgaatttccttcattctgtaggtctcaagaacctcatgagcccccaaccacctccacctnnnnnnnnnnnnnnnnnnnnnnnnnngaaatttttagcaaaaataatctgtcctcaaggaatattgaaagcgtcatcagtgtcttgaaagaaatcactgtatctgagaactgaaactagtatttgaggtttcactttcaaatacatttttttttaataaaaaggataactttaagtaaaacaccaccaccactatttaagtttaagtagattctgaattcatattaagcagtagtgtgcttttttggaaaaatgatggactgggactaataatccctgggttttgtttctaattgtagtttcttgagtaagtcagcactttccctggttgagaaatgacctcatctgtaaaatgaacctgacctctaaggtnnnnnnnnnnnnnnnnnnnnnnnnnnnnnnnnnnnnnnnnnnnnnnnnnnnnnnnnnnnnnnnnnnnnnnnnnnnnnnnnnnnnnnnnnnnnnnnnnnnnnnnnnnnnnnnnnnnnnnnnnnnnnnnnnnnnnnnnnnnnnnnnnnnnnnnnnnnnnnnnnnnnnnnnnnnnnnntgcatcagactgcttccatctcatgatgcaattgcaatgcagagtgggaggccatccgcagggctgtccctctgcctcagaactcatctcaagtttgcccttctctatagagaaggaaaattggagtctccagaaggaaagtattttgctaaaggccaagcaagaattagagggtaagggggctcctgatgcctggtccaaggctcttcttagaagaagaaggaggagaaagggagaaagcccaagaaaataatgcacagatcaccgcagctacaggttgccttagtgcctaagtttataaactacccccgcccttcccggagagaaaggagcttgtataaagggaacaatcctaggacctaagcttaacaaggaaggagaaggggagaagcagggggcgttctgttctcaagtggtttgttatatctgtgtttatgccacatttcatcaggcagtgggtcccccggaaagtaagctgaagtgttttgtgggacaggcatatcatttggtcaattccttttccctggttatttgattccctccttttcctgacccatctcccccttcctactagaggcaaccaaggcctttccaggcaacagcagacattatttaccccttnnnnnnnnnnnnnnnnnnnnnnnnnnnnnnnnnnnnnnnnnnnnnnnnnnnnnnnnnnnnnnnnnnnnnnnnnnnnnnnnnnnnnnnnnnnnnnnnnnnnnnnnnnnnnnnnnnnnnnnnnnnnnnnnnnnnnnnnnnnnnnnnnnnnnnnnnnnnnnnnnnnnnnnnnnnnnnnnnnnnnnnnnnnnnnnnnngaagatccagaagctagtgtcacatctagcaacagagccagatcagaacccaggtaagctaggtctccggccaggcttccttttacatctcctctctttctcaggagccagtcttcctgcaccagcttcctcttttctcctagctcccctgcccctgcagcctggagggctcaaccacccctcctttggctcccactcccagctgaggctcagcctggcagtgcttttctgacacccacttcttttctccttcctccaggcaagaagcgcacgtttaaacctcattatctggctaagtataaacctcagggagaaaaggnnnnnnnnnnnnnnnnntcagtctgtaagctaacgttgagctgactttcagagtccaggcaaatatctctttggcgggtcaacacccagaaaggaattctcttagcactgaatcagggctctgtatgtaaagcataaatcccctaagagaactcctcaccctcctacacagacacattggtgcatgcacacacaccccactctctnnnnnnnnnnnnnnnnnnnnnnnnnnnnnnnnnnnnnnnnnnnnnnnnnnnnnnnnnnnnnnnnnnnnnnnnnnnnnnnnnnnnnnnnnnnnnnnnnnnnnnnnnnnnnnnnnnnnnnnnnnnnnnnnnnnnnnnnnnnnnnnnnnnnnnnnnnnnnnnnnnnnnnnnnnnnnnnnnnnnnnnnnnnnnnnnnnnnnnnnnnnnnnnnnnnnnnnnnnnnnnnnnnnnnnnnnnnnnnnnnnnnnnnnnnnnnnnnnnnnnnnnnnnnnnnnnnnnnnnnnnnnnnnnnnnnnnnnnnnnnnnnnnnnnnnnnnnnnnnnnnnnnnnnnnnnnnnnnnnnnnnnnnnnnnnnnnnnnnnnnnnnnnnnnnnnnnnnnnnnnnnnnnnnnnnnnnnnnnnnnnnnnnnnnnnnnnnnnnnnnnnnnnnnnnnnnnnnnnnnnnnnnnnnnnnnnnnnnnnnnnnnnnnnnnnnnnnnnnnnnnnnnnnnnnnnnnnnnnnnnnnnnnnnnnnnnnnnnnnnnnnnnnnnnnnnnnnnnnnnnnnnnnnnnnnnnnnnnnnnnnnnnnnnnnnnnnnnnnnnnnnnnnnnnnnnnnnnnnnnnnnnnnnnnnnnnnnnnnnnnnnnnnnnnnnnnnnnnnnnnnnnnnnnnnnnnnnnnnnnnnnnnnnnnnnnnnnnnnngctccaactcttctcttccgctcctgcctcctgtcggatttttaatttctgcgcacccccagtcaaattaaatcaatcaacaaaaagcagggcatcccccctgaaagcagcgtcttatttaccttgttctcccacttcctgaagatgctaaactcctggcggactgcagaggagaggggttcagtcttctcctgatgtgtgagtaacccccacctcnnnnnnnnnnnnnnnnnnnnnnnnnnnnnnnnncctgcccccagcccccgattcctgattttcccatcccnnnnnnnnnnnnnnnnnnnnnnnctaaagcggttgcgatttctgctgggagctcaagacgggcgagccgcccaagatctcttcgagataccccaggggaggaggagatgggcaggatttagtaggacaactcggttactaatgacttggctgctggctgcgaccccccgggaaatcaggtgcaagcatgtgtgttcccggggcacgtgtgtgggtggcctcggggtgggggaatagggagcggagaaaagaaaccgctttgaaaaatgcaatgatttcattctgccgtgttgccaaccccctcattctccctcgttcccactccgcctccttgctt

SEQ ID NO: 37751 - DNA, 1206 bp, Macaca Mulatta
  misc_feature (1)...(1206): n = A,T,C or G
ataattattcttcctggtatgcctgttttgcttcacaaaggctactatcatgctggatggttaagaacaggagatggcagtggaaagggattgcttgttaccacagagaattctcttcaaattaagatatgtctttagaatgcttggaccagtcgatctttcgtacttacttgaaaataaaggaacaatttagcagctgcaaatatgcccaagctatttttgatacactaaacttattgttgacaaatttcagcctccgtaatttttttttgtaattacctataggcttaaaagtcattcattgctcttctagtataattagtagttccgtgattgaaagtttattgtaattctactatcttcaaattagatacattttnnnnnnnnnnnnnnnnnnnnnnagaaacatcttatattgactatttcctgaaaaaaatccaagcagttaagctttctggatggtaacaaagtaccttctaaaagataagtgctatgacaccatgtatgaatgtaattctcttagtaatttacctctgactatttggtgtcttaatgctttggtttatataatctcaggggttgtctgcaaaccaaaactgacatattctgtggttagcttttannnnnnnnnnnnnnnnnnnnnnnngaatgctttgctttggttctatttcttctttcttcttttgtcttatgtggaataactagtctccatgaacttcacttgaaagagcctgtgaaagttagatgagtctaaaagtgctctttgaagtagcagcaaactgggagtatatgctctgttatatagaaataaattgtccttgctattttcttacatttagctttgctaaattgtatatacattgagctaagaccttaggtaattcactttctgcatgataaaatgacccaataaatattccactttgcttaataatgtacatacagtgcattattttttctatttgtagatgaattcaatgacagataattgtctgttccctgctgaaacggaagaaatctagttttttgtggacatttttgcggtcttacagataaggtacatgaagagttttgcagcagtattagtggttccgtggctgcactctattatcatgtgtaaatttttgacaatgattgggactagaactttttcaaatagagtctggaacctgtcagaacagtggaaaatgtgccctataaacctat

SEQ ID NO: 37752 - DNA, 759 bp, Macaca Mulatta
  misc_feature (1)...(759): n = A,T,C or G
ggcgtnnnnnnnnnnnnnnnnnnnnnnnnnnnnnnnnnnnnnnnnnnnnngcggatcacttgaagnnnnnnnnnnnnnnnnnntnnnnnnnnnnnnncgaaaccccgtccctactnnnnnnnnnnnnnnnnnnnnnnnnnnnnnnnnatnnnnnnnnnnnnnnnnnnnnnnnnnnagctgaggcatgaaaatcannnnnnnnnnnnnnatnnnnnnnnnnnnnnnnnnnnnnnccgccactgtnnnnnnnnnnnnnnnnnnnnnnnnnnnnntgtannnnnnnnnnnnnnnnnnnnnnnnnnncataaaaattagccaggtgtggtggcatgcacctgcagttnnnnnnnnnnnnnnnnnnnnnnnnncaggatcgnnnnnnnnnnnnnnnnnnnnnnnnnnnnnnntggagatcatgccactgtnnnnnnnnnnnnnnnnnnnnnccagactctgtccctcccccacctccccacnnnnnnnnnnnnnnnnnnnnngtatagaaattataatctgggtaaactgcacatcaaatccatgcctccaactactgtacctgtaatttctttcactaaattataaatgcttccttctgataaacagaaattaaagcaattctgctccttaagttcttgattagctatttcacaacattatgttggcaaatatttactgattgctaactgtatgccagcactattctagttgtttggggacagagcagcaaacaagacagccctgtcatctgggtggaaggaa

SEQ ID NO: 37753 - DNA, 1353 bp, Macaca Mulatta
  misc_feature (1)...(1353): n = A,T,C or G
tcgcgcttccgctgcgggcccagagcaagaggcaggcggcaggtaagtttgactctactggaccggactcgcacncgctctgcacgccaggggctcagggctgccgcncctttcgtgttcccagggcccttccaagaaccggctaaaccaacccaagctgcgcgcacacacacttgtgcacacacggagtgtggagccagattcgataaggcatcacgtgtgccccagctccatgaccaaggaactcagccacaagggcatccctggccccatgcagggctcaggaggcagcggaaagggttgagtccaggcctcaaggacaggaggggaaggtggagggcctgtggtgtgcatccagcatccctacgtggtcagggcccagaacccatccctatttcccttctggtggtagagggctgcctgacttgggcagtgacacaaagcatgcaggctttgttgtctgcctcctccacccttcagcctggcagtgtttggcaagggacgtccctgatgccactgggcaaggcatcttgtctaactggtctgaatgaatagcccagaggtgggactagaagcacccactgggaggaatggtgggaaagcagccccactcaagggctgaaacagtccttgtccaaaacaagggggacttgaaaagatctcaccaagaaggcagagannnnnnnnnnnnnnnnnnnnnnnnnnnnnnnnnnnnnnnnnnnnnnnnnnnnnnnnnnnnnnnnnnnnnnnnnnnnnnnnnnnnnnnnnnnnnnnnnnnnnnnnnnnnnnnnnnnnnnnnnnnnnnnnnnnnnnnnnnnnnnnnnnnnnnnnnnnnnnnnnnnnnnnnnnnnnnnnnnnnnnnnnnnnnnnnnnnnnnnnnnnnnnnnnnnnnnnnnnnnnnnnnnnnnnnnnnnnnnnnnnnnnnnnnnnnnnnnnnnnnnnnnnnnnnnnnnnnnnnnnnnnnnnnnnnnnnnnnnnnnnnnnnnnnnnnnnnnnnnnnnnnnnnnnnngagaggctgtcgatgctgaggcacgagagaatttgctcctgctcctccagagaaaatggctgggacaggctgttcaggaataattctgcagggaaaagtggaagaaaatggctgtgaaagattgggaggaggctggctatgttttcaggggttcttcctgcacagtctgtagaagctgagctgctggggaaggggctggaagaaagcccacaccgcagncagctgctgcagttcctgctccgggaaggttgctttccgctctggtgagctggggtttctggcaggggctggctccagggaagacagacgtaagggttcccacatcccagactcctccttgctc

SEQ ID NO: 37754 - DNA, 151 bp, Macaca Mulatta
tcttcagaagagtccgttgcatataaaagatgatgttttacctaaacaaaaactgatttctgaacaaactgtaccggagaatttaattgagaaaggaaataatttacatgagaagactcttggggaaaccagtgctaatgcagaaactgaa

SEQ ID NO: 37755 - DNA, 245 bp, Macaca Mulatta
agagagaaagttaaacaacattttggtgaatcattttttaccctacttctaattgcaggtagctattttgaataggaccaaagtcagtgctctgatttttaaaggaaatgctgatttacttttgtcatctgacaggagaaaatagaatttgacatttaaggttcttcccaaccccaagagtcttcttatttcttctagcagaaggaggatgagattgctgtgcagcatggatagaaaagtctccc

SEQ ID NO: 37756 - DNA, 397 bp, Macaca Mulatta
gtgctaaacgaagagctgcagtaagtgctgcggcagacacccacctccagaaagttcatgatgaggaagaacaacatgaggaaggccggtgcaaagacgaggcggtccaggaggagcctcctgagccctgccagcgggacctctggagggatccagtgttccatgaagaggtagaagaagtgactcagcggccctgtgaagaagaatctgaggcccccggggggtgtgagccaggctgtggttctctgggtgtgctcttctctggtctagcttcacccccaaatcccaggtcctaagccctgcttcctaatgtccctcagtattggccacacaggtctgtacagacaagtcagcttcaggggcgctctgttgttctaacagaccagacttgctcctg

SEQ ID NO: 37757 - DNA, 705 bp, Macaca Mulatta
  misc_feature (1)...(705): n = A,T,C or G
cggacgagcaggcgctgaactggagtgagtaacgaccccacgattnnnnnnnnnnnnnnnnnnnnnagaggnnnnnnnnnnnnnnnnnnnnnnnnnngacctaacagacatctgtagtacactccatctgacagcagcagaataatacattaatctatgaactaagttcctcccaaaatcagtttggcctctgcccaggaatgaacaaggacagcttggaggttagaagcaagatggaattggttacgtcagatctctttcactgtcagaatttttgttacaaattttgcaaaggcaattttacctcctctcttacaaaagtagaaaaagaagtgctaactaaacctaaagcaatgaaaagaaaggaaataatcaagactagagtagaagaaaatgaacctgagaatagaaaaggaatacagagaattaatgaaaccaaaagttggttctttgatatatcaacaaaataagagaagatgcaaattactagaatcagaaatgaaaggggggaaattataactgaacttacagagataaaaagaattatgaaaggaactgtgagcaattgctgccaataaattggataacttaaatatagtggacaaattcctagaaagacacaaactactgaaactggctcaagacaaacagaaaatatgaacagacctgtaataagtaaggaggctgaatttgtaaaaataatct

SEQ ID NO: 37758 - DNA, 428 bp, Macaca Mulatta
  misc_feature (1)...(428): n = A,T,C or G
ggggggacaaatggatttagggtaggagagagggacaacagtaggagcaggtggatattgctgtttcaaccaaaacctcgtactgaccagagctgaggaacagaagatggtgaaggcctgcagatgtaggtattcagcatgtcatctgaaatattccccacagaggcaaaaagcaaggaaattatctctgaaaaggaatgagaagacaagtcagcagaatatgtcaatgttttggttgaagaagctgcttgaatctgggcttttctgggccatgtgttctcccacaaccagcactaagaaaggcttttggtacaggcccaagaccaccataatcatcattgattattcctctccaccccagtgtctctaaataaaatttctcttctttctcnnnnnnnnnnnnnnnnnnnnnnnnnnnnnnnnnnnnc

SEQ ID NO: 37759 - DNA, 690 bp, Macaca Mulatta
  misc_feature (1)...(690): n = A,T,C or G
agttgagggcacctgggcaacacagtgagaccccatctctattnnnnnnnnnnnnnnnnnnngnnnnnnnnnnnnnnnaatttggagacatttgtagacctaaaactataatatctatatccgcctagtatctaatacatgtgatgctgtagaatcctgattatccttctgacatgttggttaaaaaacatttctgtaatagaatgtttatattgaccttcggcaacatagaaatagataatagtccaatggtaatacctgtgtattttacttaatattattaattttgttcatctttattgttagcctttgcagaaaagatgctggcccaggcattctaaatacatagaattgtttcattcttcaacactttagctcttagtcctccttgattcttttgaaagatgtgattgttttatattcaggtagccacccataaaaaacattcacataggttcacgctttgttatccagaattcttggggtcaggtgggtttttagaatttttcagattttagaaaagcaatacagtatatatactgtatattatataatcactctaagcacatgtttttgcaacaaaaaaatatggatagtcactctaaacactataaataggccccatgtcagttcaggtcatgttttaccattgcaaattggttctggtgccagctttgtctgggctttcag

SEQ ID NO: 37760 - DNA, 829 bp, Macaca Mulatta
  misc_feature (1)...(829): n = A,T,C or G
gggnnnnnnnnnnnnnnnnnnnnnnnnnnnnnnnnnnnnnnnnnnnnnnnnnnnnnnnnnnnnnnnnnnnnnnnnnnnnnnnnnnnnnnnnnnnnnnnnnnnnnnnnnnnnnnnnnnnnnnnnnnnnnnnnnnnnnnnnnnnnnnnnnnnnnnnnnnnnnnnnnnnnnnnnnnnnnnnnnnnnnnnnnnnnnnnnnnnnnnnnnnnnnnnnnnnnnnnnnnnnnnnnnnnnnnnnnnnnnnnnnnnnnnnnnnnnnnnnnnnnnnnnnnnnnnnnnnnnnnnnnnnnnnnnnnnnnnnnnnnnnnnnnnnnnnnnnnnnnnnnnnnnnnnnnnnnnnnnnnnnnnnnnnnnnnnnnnnnnnnnnnnnnnnnnnnnnnnnnnnnnnnnnnnnnnnnnnnnnnnnnnnnnnnnnnnnnnnnnnnncaccgcgtgtgaaaagttattaacttggctttgcatacactatcatgtgggggcaacaatccaaaatggttcccccagacaaaaacttttgaagccccctaagcctttgaatctttcacaaatttaacctggtaaaggggggttcctaaaaatggggcattcattctttaagacaaaaaattacattcgccccgagaaaaaatcctttaacccacccatctaatagacagtaatcaaaccggatgttattcaatccccaaacttttcacaaatataagggtttttccctattcccgcaagagaatgatattatttatttaattccacacacccacaaccacacttaattaaacncgctgatactcgggactaccccccacaccctacgtgagaccacacattaaag

SEQ ID NO: 37761 - DNA, 950 bp, Macaca Mulatta
  misc_feature (1)...(950): n = A,T,C or G
ggcgggtattgcgcaaaggcgtgtatatggtgtgttataaatatattcctttatttctgcgaatagtgcacctcatagggggctcgccccggtacgcacactgttttttctaacgtattatgattagtcaacttggtaantgaggtagtanttgcggtgacaaatgtgtgtgcgtttcaaagtatttaagggttatgagacaagaattcttatttatttcaaaaaaaagttgtttgaaattttgtcttttagagagaaaaatgttgttattctatgaatctggttttataatacggggtcggattgtgttcaaacgaaaatatttttcttggtttgggggaaggaaattattggaaaaatttaaaatgtggggatttatttaattgaccatttttagtagctaaatggttaataaaaaaaattaaggttttttttaccaagttttcatttgttagattttgggagaaggaatttaaatcaggcatttcggaacactcaagggaaaaccacaatattagcaataattaaccacaggaaaaattttaagttaccaaataaacaattatttatactacttaattcagcagtaagcaatattttacagtcataataatgtaactgtggaccatggttttacgtattagaattgctgaggtttcaaagatctgaaagtggcttcccctagacaaagggattgatgaggtcgggtagacagatggggcaagggaccactgatgtacttgattagaaaaagttgaataatgcccaaagatatgtatgtatatacaaagcagtgaaaattcagtttaaaaacatactaataagtaacatacccattgtaggacacattaatagaaagaaagttgttcaattaacttatttggagacctcttgatacttgccaaaaaatacttatcaggaacaaatcataaaaatgttccaggtaaccc

SEQ ID NO: 37762 - DNA, 1227 bp, Macaca Mulatta
  misc_feature (1)...(1227): n = A,T,C or G
ggatgaattccaaatttactcttggaaaaaggtaatatggatctacctgtcagcattaaacagcgcatttggtctcactcctgaccaccctgtcattacagatgaggagtatatcataaacagagccataagaaagccagacctaaaggnnnnnnnnnnnnnnnnnnnnnnnnnnnnnnnnnnnnnnnnnnnnnnnnnnnnnnnnnnnnnnnnnnnnnnnnnnnnnnnnnnnnnnnnnnnnnnnnnnnnnnnnnnnnnnnnnnnnnnnnnnnnnnnnnnnnnnnnnnnnnnnnnnnnnnnnnnnnnnnnnnnnnnnnnnnnnnnnnnnnnnnnnnnnnnnnnnnnnnnnnnnnnnnnnnnnnnnnnnnnnnnnnnnnnnnnnnnnnnnnnnnnnnnnnnnnnnnnnnnnnnnnnnnnnnnnnnnnnnnnnnnnnnnnnnnnnnnnnnnnnnnnnnnnnnnnnnnnnnnnnnnnnnnnnnnnnnnnnnnnnnnnnnnnnnnnnnnnnnnnnnnnnnnnnnnnnnnnnnnnnnnnnnnnnnnnnnnnnnnnnnnnnnnnnnnnnnnnnnnnnnnnnnnnnnnnnnnnnnnnnnnnnnnnnnnnnnnnnnnnnnnnnnnnnnnnnnnnnnnnnnnnnnnnnnnnnnnnnnnnnnnnnnnnnnnnnnnnnnnnnnnnnnnnnnnnnnnnnnnnnnnnnnnnnnnnnnnnnnnnnnnnnnnnnnnnnnnnnnnnnnnnnnnnnnnnnnnnnnnnnnnnnnnnnnnnnnnnnnnnnnnnnnnnnnnnnnnnnnnnnnnnnnnnnnnnnnnnnnnnnnnnnnnnnnnnnnnnnnnnnnnnnnnnnnnnnnnnnnnnnnnnnnnnnnnnnnnnnnnnnnnnnnnnnnnnnnnnnnnnnnnnnnnnnnnnnnnnnnnnnnnnnnnnnnnnnnnnnnnnnnnnnnnnnnnnnnnnnnnnnnnnnnnnnnnnnnnnnnnnnnnnnnnnnnnnnnnnnnnnnnnnnnnnnnnnnnnnnnnnnnnnnnnnnnnnnnnnnnnnnnnnnnnngaacctccagaggaggtgatgaggaaagcccttgacgtcatcacaattgcggttcctcctgctctgcctgctgctctgaccacaggcattatctatgcccagaggaggctgaagaagagcggcatcttctgcatcagcccccagaggatcaatgtgtgtggacagttaaacctggtctgctttgacaagn

SEQ ID NO: 37763 - DNA, 811 bp, Macaca Mulatta
  misc_feature (1)...(811): n = A,T,C or G
ggcaggtttaaagtaggctaggctaagctatgatgttttgtagttatgtgtattagatgcattttcactatatggtattttcagtgagcttatcgggatgtaactccgtcataagtcaagcagcatctgtatactaaaatgtttacctacaaatcaatgggttctttacctgatatccatagaaggacttcatacgtaactaggccattgaccgttcctatgggtggattggagtattcatcctacagcgatattagagatacagatccaatccctgagcaggcagtgttgcttcctacaaattgtaatctgcacagccttcacaattttcatcagccttgtttcacagtaggaaaggtttgccccagccttacacagtagacctgattccatgtctcctatatctgggttcctacctcctggctgcttctggatacagaaacagggagaccatggcttcagcccttttattatactgcagcatttttctgttctgtttctgagccacagagttgcagagacaccatgggacgtnnnnnnnnnnnnnnnnnnnnnnnnnnnnnnnnnnnnnnnnnnnnnnnnnnnnnnnnnnnnnnnnnnnnnnnnnnnnnnnnnnnnnnnnnnnnnnnnnnnnnnnnnnnnnnnnnnnnnnnnnnnnnnnnnnnnnnnnnnnnnnnnnnnnnnnnnnnnnnnnnnnnnnnnnnnnnnnnnnnnnnnnnnnnnnnnnnnnnnnnnnnnnnnnnnnnnnnnnnnnnnnnnnnnnnnnnnnnnnnnnnnnnnnnnnnnnnnnnnnnnnnnnnnnnnnnnnnnn

SEQ ID NO: 37764 - DNA, 419 bp, Macaca Mulatta
tataagaaacatcagtgacctgatctgtccttcctcctccttcccccttcccccaaaatcacatttcagtttttattgtctttgtgtccaaagtaaactaggtgacttatttgtataaaatgttattttgccacaagagacagtaataaagattttcacagtacgtctctctcatcctgtctcctgattgttggggcccttgtgttgctgagggggagcaggggcgggtggggcctccaggtttctcttactttggctattatgtggcccttctgtaagtagtttaactagagtatagctggcttctagggtgattgaggaattgtactggactttaggcttaatatttttgctttgtatttttccagggtgagtggctttgtaaattgaaagtttacatgcacattttaaaggtaggc

SEQ ID NO: 37765 - DNA, 814 bp, Macaca Mulatta
  misc_feature (1)...(814): n = A,T,C or G
gggggaaacaggtgaagaggaacttggagtggttgccaagtaatctccacggtctctttcaactcttaagagtctgtatcacagaacacccaacatgtgctactcaaagtcatattcagctttaaaggatgaaaacaacctgagtctgtcacattaatacctgtatccagcaaagcatgcatgtaaatctgagcttttcaggaatattaatgaatttcctacctcccctctttttttgcttaaatatgtttaagtgggggttttgacactgaaagagtcatactacatggcttgatattacgattatctggcanacatgtagacagtactttccatatgccataatcctgcctccctgctttgaactctgtgtgtctctgatncctccatccatccatgacatccaactgatggcttcctggaggctgggaacactgagacttgctctccattgctttgctttgggacccccagaagaagatcttcctgccttacatttttctctttattgagcaccacagtgagctactagtgtttccctcgaggaagctgtgaaatcccctagggcaaagaccacatttttcaaatagtcattgcctccctggaaagcaacgtgttttcaccaaaatggggntgctcaaatagcctgtttgactggacactcttcaaaactccaattaaagttggaaaggacaatcccccaagtttgttgatccatttaaagcttggtacccataactaataattccaagtttgaatcagccaactttctggggcatttagaaaagtcttggatggcccttaatgggtcccc

SEQ ID NO: 37766 - DNA, 3903 bp, Macaca Mulatta
  misc_feature (1)...(3903): n = A,T,C or G
gacatcgtaatgccaaagcaacagaagcagcaccagaaatgttgctgaggccaccatttagttaatgcaagttgaacatatggctttggttacctgtggttccaggccagaggcatgaaagtcagtgtttgtggaaaagccaggaggaaaagctcctctccccacccccaccttgtcactcaaggttctggtgcccaaatctcaggacacgtcctcccatttcactcatgcaccagccccactcttgtaacactgcacatgcaagattgtgagaatcttcaaagtgcaaatattgccttcttcattttagaatccatgatgtgcttgtggagagaatgaatgaatgctcaaacatgaatggagacagacagagaggaagggcaggcctaaccaaggaaacttattatttcctagaaaatctttgatgagcctggagagagttggctgaacgaaggtaacnnnnnnnnnnnnnnnnnnnnnnnnnnnnnnnnnnnnnnnnnnnnnnnnnnnnnnnnnnnnnnnnnnnnnnnnnnnnnnnnnnnnnnnnnnnnnnnnnnnnnnnnnnnnnnnnnnnnnnnnnnnnnnnnnnnnnnnnnnnnnnnnnnnnnnnnnnnnnnnnnnnnnnnnnnnnnnnnnnnnnnnnnnnnnnnnnnnnnnnnnnnnnnnnnnnnnnnnnnnnnnnnnnnnnnnnnnnnnnnnnnnnnnnnnnnnnnnnnnnnnnnnnnnnnnnnnnnnnnnnnnnnnnnnnnnnnnnnnnnnnnnnnnnnnnnnnnnnnnnnnnnnnnnnnnnnnnnnnnnnnnnnnnnnnnnnnnnnnnnnnnnnnnnnnnnnnnnnnnnnnnnnnnnnnnnnnnnnnnnnnnnnnnnnnnnnnnnnnnnnnnnnnnnnnnnnnnnnnnnnnnnnnnnnnnnnnnnnnnnnnnnnnnnnnnnnnnnnnnnnnnnnnnnnnnnnnnnnnnnnnnnnnnnnnnnnnnnnnnnnnnnnnnnnnnnnnnnnnnnnnnnnnnnnnnnnnnnnnnnnnnnnnnnnnnnnnnnnnnnnnnnnnnnnnnnnnnnnnnnnnnnnnnnnnnnnnnnnnnnnnnnnnnnnnnnnnnnnnnnnnnnnnnnnnnnnnnnnnnnnnnnnnnnnnnnnnnnnnnnnnnnnnnnnnnnnnnnnnnnnnnnnnnnnnnnnnnnnnnnnnnnnnnnnnnnnnnnnnnnnnnnnnnnnnnnnnnnnnnnnnnnnnnnnnnnnnnnnnnnnnnnnnnnnnnnnnnnnnnnnnnnnnnnnnnnnnnnnnnnnnnnnnnnnnnnnnnnnnnnnnnnnnnnnnnnnnnnnnnnnnnnnnnnnnnnnnnnnnnnnnnnnnnnnnnnnnnnnnnnnnnnnnnnnnnnnnnnnnnnnnnnnnnnnnnnnnnnnnnnnnnnnnnnnnnnnnnnnnnnnnnnnnnnnnnnnnnnnnnnnnnnnnnnnnnnnnnnnnnnnnnnnnnnnnnnnnnnnnnnnnnnnnnnnnnnnnnnnnnnnnnnnnnnnnnnnnnnnnnnnnnnnnnnnnnnnnnnnnnnnnnnnnnnnnnnnnnnnnnnnnnnnnnnnnnnnnnnnnnnnnnnnnnnnnnnnnnnnnnnnnnnnnnnnnnnnnnnnnnnnnnnnnnnnnnnnnnnnnnnnnnnnnnnnnnnnnnnnnnnnnnnnnnnnnnnnnnnnnnnnnnnnnnnnnnnnnnnnnnnnnnnnnnnnnnnnnnnnnnnnnnnnnnnnnnnnnnnnnnnnnnnnnnnnnnnnnnnnnnnnnnnnnnnnnnnnnnnnnnnnnnnnnnnnnnnnnnnnnnnnnnnnnnnnnnnnnnnnnnnnnnnnnnnnnnnnnnnnnnnnnnnnnnnnnnnnnnnnnnnnnnnnnnnnnnnnnnnnnnnnnnnnnnnnnnnnnnnnnnnnnnnnnnnnnnnnnnnnnnnnnnnnnnnnnnnnnnnnnnnnnnnnnnnnnnnnnnnnnnnnnnnnnnnnnnnnnnnnnnnnnnnnnnnnnnnnnnnnnnnnnnnnnnnnnnnnnnnnnnnnnnnnnnnnnnnnnnnnnnnnnnnnnnnnnnnnnnnnnnnnnnnnnnnnnnnnnnnnnnnnnnnnnnnnnnnnnnnnnnnnnnnnnnnnnnnnnnnnnnnnnnnnnnnnnnnnnnnnnnnnnnnnnnnnnnnnnnnnnnnnnnnnnnnnnnnnnnnnnnnnnnnnnnnnnnnnnnnnnnnnnnnnnnnnnnnnnnnnnnnnnnnnnnnnnnnnnnnnnnnnnnnnnnnnnnnnnnnnnnnnnnnnnnnnnnnnnnnnnnnnnnnnnnnnnnnnnnnnnnnnnnnnnnnnnnnnnnnnnnnnnnnnnnnnnnnnnnnnnnnnnnnnnnnnnnnnnnnnnnnnnnnnnnnnnnnnnnnnnnnnnnnnnnnnnnnnnnnnnnnnnnnnnnnnnnnnnnnnnnnnnnnnnnnnnnnnnnnnnnnnnnnnnnnnnnnnnnnnnnnnnnnnnnnnnnnnnnnnnnnnnnnnnnnnnnnnnnnnnnnnnnnnnnnnnnnnnnnnnnnnnnnnnnnnnnnnnnnnnnnnnnnnnnnnnnnnnnnnnnnnnnnnnnnnnnnnnnnnnnnnnnnnnnnnnnnnnnnnnnnnnnnnnnnnnnnnnnnnnnnnnnnnnnnnnnnnnnnnnnnnnnnnnnnnnnnnnnnnnnnnnnnnnnnnnnnnnnnnnnnnnnnnnnnnnnnnnnnnnnnnnnnnnnnnnnnnnnnnnnnnnnnnnnnnnnnnnnnnnnnnnnnnnnnnnnnnnnnnnnnnnnnnnnnnnnnnnnnnnnnnnnnnnnnnnnnnnnnnnnnnnnnnnnnnnnnnnnnnnnnnnnnnnnnnnnnnnnnnnnnnnnnnnnnnnnnnnnnnnnnnnnnnnnnnnnnnnnnnnnnnnnnnnnnnnnnnnnnnnnnnnnnnnnnnnnnnnnnnnnnnnnnnnnnnnnnnnnnnnnnnnnnnnnnnnnnnnnnnnnnnnnnnnnnnnnnnnnnnnnnnnnnnnnnnnnnnnnnnnnnnnnnnnnnnnnnnnnnnnnnnnnnnnnnnnnnnnnnnnnnnnnnnnnnnnnnnnnnnnnnnnnnnnnnnnnnnnnnnnnnnnnnnnnnnnnnnnnnnnnnnnnnnnnnnnnnnnnnnnnnnnnnnnnnnnnnnnnnnnnnnnnnnnnnnnnnnnnnnnnnnnnnnnnnnnnnnnnnnnnnnnnnnnnnnnnnnnnnnnnnnnnnnnnnnnnnnnnnnnnnnnnnnnnnnnnnnnnnnnnnnnnnnnnnnnnnnnnnnnnnnnnnnnnnnnnnnnnnnnnnnnnnnnnnnnnnnnnnnnnnnnnnnnnnnnnnnnnnnnnnnnnnnnnnnnnnnnnnnnnnnnnnnnnnnnnnnnnnnnnnnnnnnnnnnnnnnnnnnnnnnnnnnnnnnnnnnnnnnnnnnnnnnnnnnnnnnnnnnnnnnnnnnnnnnnnnnnnnnnnnnnnnnnnnnnnnnnnnnnnnnnnnnnnnnnnnnnnnnnnnnnnnnnnnnnnnnnnnnnnnnnnnnnnnnnnnnnnnnnnnnnnnnnnnnnnnnnnnnnnnnnnnnnnnaaagacctaactctctccagcgtgcaggcatcccaactagaagaagcaaggaggcagagaccatcaggacgtcaagaggcgtttgaacccgcagagagggcctgggnnnnnnnnnnnnnnnnnnnnnnnnnnnnnnnnnnnnnnnnnnnnnnnnnnnnnnnnnnnnnnnnnnnnnnnnnnnnnnnnnnnnnnnnnnnnnnnnnnnnnnnnnnnnnnnnnnnnnnnnnnnnnnnnnnnnnnnnnnnnnnnnnnggagaaagaattgtgccatgaaaaatggaaaactcccgagaagctgttccagcgtcaggagagcagcagacaagctggactggggaagattcttcctggaagttt

SEQ ID NO: 37767 - DNA, 231 bp, Macaca Mulatta
  misc_feature (1)...(231): n = A,T,C or G
ttgaccaatgaggtggtccatacgtgttccaccactggcagcaacatggaggnnnnnnnnnnnnnnnnnnnnnnnnnnnnnnnnnnnnnnnnnnnnnnnnnnnnnnnnnnnnnnnnnnnnnnnnnnnnnnnnnnnnnnnnnnnnnnnnnnntcatccttgtgattgacagcatggaccgggatcggctgctgactgcttgagaggagctatataaaatgctggcccatgag

SEQ ID NO: 37768 - DNA, 2019 bp, Macaca Mulatta
  misc_feature (1)...(2019): n = A,T,C or G
acacaaagggagagagaggggcgtggggaggctggaaagcatnnnnnnnnnnnctggcccggcgacgtccgctcagcagcctgctgaggagtggggacgaagagcagcctaaacttagtgctcgggatatttcgatgccacccaaattgccgtcctaccccaaccaggcagggagaggagcggagtgcgctcgcgagctgagtgagtgcttacgtcgcagcgagatctgtgctgggataattagagaggagttgggctgagccgagtcctcttttagcagcagcagccggagccgccgccgcagcccggaggggcgcgcccgactcggacagctcgggagagccccaggagaggccagcgccgcacagcagccgcccggcttttcccaccgccccggctgctcccggagggcgcacaaaggcggtgaccgcccgagtggccttctccgtccaggcattcgggtcctcctccccaccttctctcccgaaggcgaaaatggcagggccaggcgaggacctggcacagcggtggccctagccctgcgatccccacccctcctgctgggagaggctgcgggctgcccgcggacgatgtggccgcggctgcccccgagcgcatcttcggcccgggtccctgccgccgcctctcttctctgctccttccatcccgcccagaggagttgatgccgctgtcgccgccgctgccgctgctgaagccgcggctgatggatgccagggagtgccgcattgcttagcgaccccgccctccgggtttgctgngatgatctctctccgccccggagctccgcgctgaagagctaccttattattaatcagaatttccatcgccacccctggcaggcgtatccttcagcagggaccgcaggaacattcacagtgcaggggctgagatgtgcgtgggggttgtttttgttacatcttggaagagaagagaagaggacagtaccaagatcagaaccacccgtgctaggtgggattaggggtgatttgttaggagagagaaaggacaagaagaggagtgcagagcccttcaggggtttacatctctttaaaggaaagggaagagggagccaaagtggggtgttgtattttagggggcggaggaagaagtttacannnnnnnnnnnnnnnnnnnnngctgggggaaagtaggagcaacagggcacttgattggacaccaagattattaatttcctgtaggggagaggaagcaggcagcaggaggtctgggggttagagtctggtggtggcaagggccaggtttgctttgggacagtcaacaagggcttctgagggaaatctccgggataggcagaacaatgactcatttgcaagctggtctctcccctgagaccctgnnnnnnnnnnnnnnnnnnnnnnnnnnnnnnnnnnnnnnnnnnnnnnnnnnnnnnnnnnnnnnnnnnnnnnnnnnnnnnnnnnnnnnnnnnnnnnnnnnnnnnnnnnnnnnnnnnnnnnnnnnnnnnnnnnnnnnnnnnnnnnnnnnnnnnnnnnnnnnnnnnnnnnnnnnnnnnnnnnnnnnnnnnnnnnnnnnnnnnnnnnnnnnnnnnnnnnnnnnnnnnnnnnnnnnnnnnnnnnnnnnnnnnnnnnnnnnnnnnnnnnnnnnnnnnnnnnnnnnnnnnnnnnnnnnnnnnnnnnnnnnnnnnnnnnnnnnnnnnnnnnnnnnnnnnnnnnnnnnnnnnnnnnnnnnnnnnnnnnnnnnnnnnnnnnnnnnnnnnnnnnnnnnnnnnnnnnnnnnnnnnnnnnnnnnnnnnnnnnnnnnnnnnnnnnnnnnnnnnnnnnnnnnnnnnnnnnnnnnnnnnnnnnnnnnnnnnnnnnnnnnnnnnnnnnnnnnnnnnnnnnnnnnnnnnnnnnnnnnnnnnnaggatagtttcccagcgcgatttggaggaattcattttgtgaatcaaccatggtatatacatgccctgtacaccgtgatccggcctttcctgaaggagaaaactcggaaaagggtatt

SEQ ID NO: 37769 - DNA, 771 bp, Macaca Mulatta
  misc_feature (1)...(771): n = A,T,C or G
ggngaaaaagtattaaaacagttattatatcaattttcgatacgttcaaaacggtagaagaaaatataaatatgttaaggagaaagatgaaggatttaaaaaaatgacagaggtgaaaaaacatgccagatggtattaacagatgattagacactgcaggaaaataatttagtgcttcatcacatagcaagtttagatagtttagaaactacctaaaatgaaacagaaaaaaagacaaatagaaccgataatcagtgaactctggcacatcctcaagctgtttaatataagtgtaattgtagtcctcaagaaaagggggcagaaaaatattttgaagaaataatggccaaaggagattagttctagaatggtggtgtaaggaattccacagacactccccccagcaaaagcatcataactggtaaaacaatatttttaaataaatattttaagtctctgaaaattgtcttaagagcacatagcaaatgaaacaatgattcaagaaaatctatcaaatctcactatgaacagtaagactctagcacttgaaacacagcctgctccctccattttccctccactccaccagctcagcctgatccaagctctactccaagtgggtgcagccaaaaacacagactactccctacttcttaccagtgaagacttcagtatctgccctggagtggcaggccaccaacatttttaacccctctctagttccacatgacagaagctctatcctaggcaggagcgacttagaactttgac

SEQ ID NO: 37770 - DNA, 813 bp, Macaca Mulatta
  misc_feature (1)...(813): n = A,T,C or G
ggggattgnnnnnnnnnnnnnnnnannnnnnnnnnnnncccatgatcacaccactgcactccagctgggtannnnnnnnnnnnnnnnnnnnnnnnnnnnnnnnnncaataaaaaacagaaccatctactggcagtcttctaaactctgcccagcacaataaccatggccatgaaccactgggctccttcattcctgtctgacctcatcctctatcctgctaccacggatatcctatacaaagccaagctacctgcaatctccaagcactttacctttcacagccccatgccttttacacaggctgtcccttctgtaagcaatgtttttatcctctcgcctgcatgaccatgtgctacttagtctccaggctcagattttctaattccttcaccaaaagctcagtatctgagtaagatgtccccagagcctcctacatctatttcttaaaacattaagcacattacattgtgaaatattatcatttacagaaactgctgtctcaccaattagattcaactctttgaaggcatcaaggattatctgcttctcaatttaaaaacctatgtacttagcagagtcatctggtacagaaatcatttttactgaagatgttgaagaacatccctgcttaaaatttcataactccccctactcctggtgcaaaaaaggtttccttactttttaagacattagggttcctttccctatttgtaaggaaaccacctagccttttctccctttcccagggccaaagaccgaaaaaaacgaattttctttttattttttgtaaaagatacacaaacggccaccct

SEQ ID NO: 37771 - DNA, 484 bp, Macaca Mulatta
  misc_feature (1)...(484): n = A,T,C or G
cggccgcggaagccggggtcggggccgccctgcgcgcccctcgccctcgcccacaggtnaggtggtcgcgcgctccgcttcgaccccacggcctttgtgaaagccaaggaaaggaagcagagagagatcaagatgaagnnnnnnnnnnnnnnnnnnnnnnnnnnnnnnnnnnnnnnnnnnnnnnnnnnnnnnnnnnnnnnnnnnnnnnnnnnnnnnnnnnnnnnnnnnnnnnnnnnnnnnnnnnnnnnnnnnnnnnnnnnnnnnnnnnnnnnnnnnagtggatagtttccgcagccgctgctcgtctgccagctcctgcagcgatttggaggatttctccgagtcgctctccagaggnnnnnnnnnnnnnnnnnnnnnnnnnnnnnnnnnnnnnnnnnnnnnnnnnnnnnnnnnnnnnnnnncccccgtggaacgcagccaccagaaatctctgaccaactctgggggctgggtgcccatcaaa

SEQ ID NO: 37772 - DNA, 756 bp, Macaca Mulatta
  misc_feature (1)...(756): n = A,T,C or G
gggaaaaatagcaaatgcatttatagtaattaatggcaccaaacaaaattgtgtgcctgctttgcctcccagactccagctgttcatgttctccatctcttctcgcctccaagaaggccactgaccttcaagaaggtcaagatgactgacctggcctggttatcccaacaatctcgttgtccatccatcttctttaaccctcacccctcataagccttgttagcctctgttaaagtaagctaggattgagtccaaaggctggaattcagtcatagccaaaatatatctaattcctagaggcaacatcttgagcagaaaataagcacacaccaaactctgcctttaaaaaagcatgccaaaaaaaaataaagaaacagcatgcaggtgttcattaagaacatggaacagtaatacattcccatgctagctactatatagaactactgtagtgaaaggacagcagctacattcagtagattaataattacagagatcgatcatcttcgtctgctgtacagtttttgtttactggaattcgtggactccacatcagcaaagtattatcttgagctagttcctgggttgtggaagtagctttaattttctacaactgaataatgagctcttatttttctcttggaattatatacatgtatagcagtccttcataaatatactattagntagaaaagcttacgtgacatcatcaaatttcccacagtgatctttttctcacctggaaagaaaatgttttaa

SEQ ID NO: 37773 - DNA, 834 bp, Macaca Mulatta
  misc_feature (1)...(834): n = A,T,C or G
ggcnnnnnnnnnnnnnnnnnnnnnnnnnnnnnnnnnnnnnnnnnnnnnnnnnnnnnnnnnnnnnnnnnnnnnnnnnnnnnnnnnnnnnnnnnnnnnnnnnnnnnnnnnnnnnnnnnnnnnnnnnnnnnnnnnnnnnnnnnnnnnnnnnnnnnnnnnnnnnnnnnnnnnnnnnnnnnnnnnnnnnnnnnnnnnnnnnnnnnnnnnnnnnnnnnnnnnnnnnnnnnnnnnnnnnnnnnnnnnnnnnnnnnnnnnnnnnnnnnnnnnnnnnnnnnnnnnnnnnnnnnnnnnnnnnnnnnnnnnnnnnnnnnnnnnnnnnnnnnnnnnnnnnnnnnnnnnnnnnnnnnnnnnnnnnnnnnnnnnnnnnnnnnnnnnnnnnnnnnnnnnnnnnnnnnnnnnnnnnnnnnnnnnnnnnnnnnnnnnnnnnnnnnnnnnnnnnnnnnnnnnnnnnnnnnnnnnnnnnnnnnnnnnnnnnnnnnnnnnnnnnnnnnnnnnnnnnnnnnnnnnnnnnnnnnnnnnnnnnnnnnnnnnnnnnnnnnnnnnnnnnnnnnnnnnnnnnnnnnnnnnnnnnatcaagccatcaactttcggcttcaaaacccacccgctagaaatttgacacgtccctgggaatgttaattgaagtaactccaacaaaaaattacccggcccaaatgaaggaaagaattnnnnnnnnnnnnnnnnnnnnnnnnnnnnnnnnnnnnnnnnnnnnnnngttgcggccgccacccatagagcccccagcaaaagaaagcgtttatcattaagaacaaattntgcatatctcgtgangcgccaccagaaaacaccaanaat

SEQ ID NO: 37774 - DNA, 710 bp, Macaca Mulatta
  misc_feature (1)...(710): n = A,T,C or G
atgctcctgagtagaccaggtggcgggtcgcagttgggtgccttccattctcaccacacagactctgggcctccccgntaaaatggctccagacctagggtaattatgagatggtgggaaccagggcagctcaggtgcatgaaacaaggagtggttgtcatctgggcagggcagagaggaggccttgctgatctgaaaaggggtgtatttcattccaggctctcagtctttggcaatggccaccctggtgttggcatattggccccactggaacttttgggggcttcccggtctagccacacccctgggtagaaagacttgactgcataaagatgtcagttctcgctgagttgattgatagacttgtcaccctaaaaacacccacatatgcttttctatggaaccagataagttgacactaaagttcttatggaaaaatacacacacaatagctaggaaaacacaggaaaagaagagtgctgagcagggcctagtcttagccaatattaaaacacactatgaagcctctgatatttaaacagcatagtgctggtacgtaaattaacagaccagtgcattgggtgactctctccaagactctggggaaaaaagtaataaaaagctaaatgcaatcaatcagcaattgaaagctaagtgagagagccagacgggctccttggtggtgaaagaggcttgcatttcttgcaggc

SEQ ID NO: 37775 - DNA, 943 bp, Macaca Mulatta
gggctttttcgcaacgggtttggcgccgaacacaggtgtcgtgaaaactacccctaaaagccaaaatgggaaaggaaaagactcatatcaacattgtcgtcattggacacgtagattcgggcaagtccaccactactggccatctgatctacaaatgcggtggcatcgacaaaagaaccattgaaaaatttgagaaggaggctgctgagatgggaaagggctccttcaagtatgcctgggtcttggataaactgaaagctgagcgggaacgtggtatcaccattgatatctccttgtggaaatttgagaccagcaagtattatgtgactatcattgatgccccaggacacagagacttcatcaaaaacatgattacagggacatctcaggctgactgtgctgtcctgattgttgctgctggtgttggtgaatttgaagctggtatctccaagaatgggcagacccgagagcatgctcttctggcttacacactgggtgtgaaacaactaattgttggtgttaacaaaatggattccactgagccaccctacagccagaagagatacgaggaaattgttaaggaagtcagcacttacattaagaaaattggctacaaccccgacacagtagcatttgtgccaatttctggttggaatggtgacaacatgctggagccaagtgctaacatgccttggttcaagggatggaaggtcacccgtaaggatggcaatgacagtggaaacacgctgctttgaagctctggactggattctacaacaagttcgttcaatttttagccttgtggctgctctcaagattctacaaatggtggtttgtatgtcctgtggccgatggactgtgtttaaccgttgtggtccttgccccaaggtccgatatattttagacgcacttataactcggcaaagccgtcatttgtgactgc

SEQ ID NO: 37776 - DNA, 809 bp, Macaca Mulatta
  misc_feature (1)...(809): n = A,T,C or G
ggggaaatgctggaaagcttctgaatttctgtgaaacaaatatactattgatacttaaacctggtaagaacagcattgaagaaagctataaatcagcatcgcataagaatattgatgtagaaatactgaattaaatattatcattatgaagtgatataccatgaccatgtgagatttatttcagggatgcaggactggcttaatactaggatactcattagcatactccctattgatagatttgtgaggaaaactcattatttccataggtgctgaaggagccttcaacaagatccacccattttgtgctcgnnnnnnnnnnnnnnnnnnnnnnnnnnnnnnnnaatagggattgtgggatacatttttgaaatgatgaaatttatatatcttagtcctaaagccaggagtcttatatataatgggaaatactggaagtatttccacaatatacagaaacaaggcaaatgtgcattatacaagggcaaatgtgcactatcttaatgctgttcaacattataatggaggtattaaccaatatagttagatacattgattagaggcataagaatgggtaaagaagaaagaccatctctgcagattatataatacggggttgagtattccttaatctgggagggctcccaaaattcaaaacttttttaaagcagtcttatgatggcacaaagtaaaatgctttaattgaagccatttcagaatttttggattaaggccgcaagaaaattaatgaaagaaatccttaaaatgcaaaaaaaattgaaaatatctcgaaccaaaactttttttgg

SEQ ID NO: 37777 - DNA, 201 bp, Macaca Mulatta
agatggaccctgaagaagcactttgttggcaatcctactaatggtgactttgagctgaagatcgctgagctctcacccttaaaaatagagaggtcctgcttgaagctttgttcctcactgtggacccttacatgagagtggcagccaaaaaaatgaaggtgatacaatgatgggtcagcaagtggccagatttgtggaaag

SEQ ID NO: 37778 - DNA, 841 bp, Macaca Mulatta
ggaacatcattcctgttctggacttcttgtaatcatcagattgtacagatccgacctaacatagacatagatcatagcagagatgaatccaggctgtaatgtttaacaggaccttattaaaagcttcaagatgtcagcctttatctgttccatatctagcttacttggttgtttttgggggatcacatgtctgtcctccaaattggaaacccctaactctccaggagatgcagtagcattatttgttggacagtggcacctactggtagtttgtaatttttatagcctagtgtgaaaggcattgtaaatgtatacctagcaaaaaggggagtagagcaaaatttcagagttttaccaatgaagtgaaaggatgatatggggggagagtccttttgggggccagccagaagagaagaccttagacttgaaaagtattaccagcccgaaaggaaagggggccaaccctgggggtctggggggggaaaaggggtatctttttccctcccccccggggaattgccccccgaaaaagggccccccactggctttagggccccccttggccgggccaaggggctttggaaaccccttcccgaattctccacggcccttattttccaaaaactgcgccttttttttccgcagagggggaaaaaaaaacggtccaaaatggggggccctccccaaatttttggggggcgcccaaacttttgtggcgccccgaaggggggcacacccttttccggaaaacggccctttcctcccccccaaaggggccggccccagatggtccccctgtttgcaccaaggcggggggaggggagaaaccaccccgcgtttg

SEQ ID NO: 37779 - DNA, 707 bp, Macaca Mulatta
  misc_feature (1)...(707): n = A,T,C or G
caatgagccaagtgggagaaaactcttctcatcctctgattgaaagtgatacaatttgaatattggtatattgtcattggtcaataatggaaaaatgagattccaccaatgggttgctcctttcctgtcttggtttgctatgccttatcccagatcagtgttttgttccatccctatggccatcaggcttgtcctctaaagccctgacaggagcatcccagactggagaaatgcagggtatttgtggcccagaattttgtttgaaactctaaacagcaatgctaagactgcaaaattacactattctaaacagttgttttcagcttattttgaagattgacctggaaaacacatggatatagaatatacacatttaatctttgcttgtgattcactgtgtcaaaaatgacatttaattttcactctgattaatctttattttcaatttaaaagatttcagtctacttaaatacaagactttatattccaatttttgaaagctagtgttttccctaagctctctctcaactctgacagtttgtgaatgataaaaatttactaagtttgtcctttccttgattgatgtagagcagttcatctgttttgtaaaggtacaattaagtataactataggctgggcataannnnnnnnnnnnnnnnnnnnnncactttgagaggccgnnnnnnnnnnnnnnnnnnnnnnnnnn

SEQ ID NO: 37780 - DNA, 296 bp, Macaca Mulatta
  misc_feature (1)...(296): n = A,T,C or G
ggtcacagaaacatccagccatgacatatatgaagaggctgaggctgacaacgaagaaagcgacaaggactcattgaatgaaatgtttccatcagnagccattctaaatggcacaggctcacctcccaaatttaaaataccgttcaacaatgccaagaaaatgacacacaagctggtatttctagaagacggttccagccaggtccgtaaagagccaaaaacatattttaatggtgatttgaaaaacttcagacaaaaaagcatgaaagacacttcaacacaggaagtagtttcaa

SEQ ID NO: 37781 - DNA, 600 bp, Macaca Mulatta
gcggtgaaggagagaccacaccgccatgcctccctctgggccccgaggaaccctccttctgttaccgttgctgctgctggtcctgcttcgcgctgtgctggctgtccccctggagcgaggggcgcccaacaaggaggaggcccctgcgactgagagtcccgacacaggcctgtactaccaccggtacctccaggaggtcattgatgtgctggagacagatgggcatttccgagagaagctgcaagctgccaatgcggaggacatcaagagcgggaagctgagccgagagctggactttgtcagccaccatgtccgcaccaagctggatgagctcaagcgacaggaggtatcgcggctgcggatgctgctcaaggccaagatggacgccgagcaggatcccaatgtacaggtggatcatctgaatctcctgaaacagtttgaacacctggaccctcagaaccagcacacattcgaggcccgcgacctggagctgctgatccagacggccacccgggaccttgcccagtacgacgcagcccatcatgaagaattcaagcgctacgagatgcttaaggaacatgagaggcggcgttatctgga

SEQ ID NO: 37782 - DNA, 255 bp, Macaca Mulatta
tttatcaaatcttttatcctcagaaggtaacttaactcaatgtcaacagatcagagaaaactcaactatgtacttaaagaatctaattagtaagtgggagctgaatctagcttaaggaataagaagatgagttaaggtattgctttcttgaacttgggtccatacagggcaatgtattacagattggcagataaagtcaaattaaaggcaaccatattcttgaatattttgccatgacttcaggagaatgctata

SEQ ID NO: 37783 - DNA, 999 bp, Macaca Mulatta
gggagttgcttcagcgtcttggtgctgctgtgccgtggaacgtttgcagccttttagccaagatgcctgaggaaacgcagacccaggaccaaccgatggaggaggaggaggttgagacgttcgcctttcaggcagaaattgcccagttgatgtcattgattatcaatactttttattcgaacaaagagatctttctaagagagctaatttcaaattcatcacatgcattggacaaaatccgctatgagagcttgacggatcccagtaaattagacttctgggaaagagctgcaaattaaccctgatacccagataacacagatctgaacccttccttatagtggaaaactggaaattgggtttaacccaaggtcgacaattctttaataaactctggggtatatattgttgcaaatttctgggacaaaaaaagtcatatattagaaaaatatttttgatagtgaggcccaaaatcacttactatatgagtggacccaatgctattaggcaaaaactaaaattaataaagtgtgttaatacaatagaatacagagaacttattttgattatagtcatcatgcaacattatataacaaagctcattattacttatatcgggtataagtgtcatccgcgccctcacagaaattatattctctaaaaaactggagtaagagaaccaataagtaggatatgatgttggcagtccatcactatatgtgaatttttatttactacactaacatgaaatacatgagactaagtttgcaagaaaatatcatccagcaactaactataaatgtgatcacgaggtgacttattgtgtcgcatactcatcgaacagacattaataataacatcgctgaaatgttaggaatagagtcggtgaacacgtcagggcggtgatatttccaagactataacactcgtcgaacatgtatccaggataatcgtcgtctgcacgtcacattatctcatagttgattctatcacgctttt

SEQ ID NO: 37784 - DNA, 826 bp, Macaca Mulatta
ggcctccttagaagcaggccacaggaaagggagaaattgaaaatataaaagaagatgggatgagagatagagatgatgaactcagaagttcaaatgggatcattagccttagaaatgacacagagtgttttttacttccaaggcaaataagagggtgggaaagatgggtaatgaacccaacatgattgagatagcgaggaggaaagtagggaacttaagtgggtagaagaaggggttgtatattctctaacttggaaccttggtggtctgttggactccagaatagcagcagaggtcaggttggctatatggggattctgacagagagtcagtggtgaatacaagtactgatagggcactgtcccctaagaatgaatgtatagcatagacttcaaatgaccttcatcagcttgacaggactttatgtgctcattggctggattcttatcttcagaagtggcaatcaggtccacctgagagaaaaggggactgcagaggaatgtatacatggtgcacatgcttttcttaattttaattcttaattttaacatttaaatggctatttaccaaaatactattgaaagtccttagtctgtatattcttgctgaaacaccttgcagagaaatattcttggctttatttttttgtaaattaaaatttgggcagcaagcctagtgattgagttaaacactgtgttttcactggaattcttttcaacatctttcacgattttgaagaaagtctccttttgagagtaataatatgggttatagctagaatcgaaatgttaaggtagcttttctctttatgggaataaaatgtaag

SEQ ID NO: 37785 - DNA, 1019 bp, Macaca Mulatta
  misc_feature (1)...(1019): n = A,T,C or G
atggggggggggtgtcttacaccaggggggaggcaaaaagaggtttaattaggaattttcacaacccctctttattccccaaatataaggcacacggggcgggggggtttaaatattttatattttggggggcccggcggtggaaaccccccgctggggaagaaaaccccccgtataaagcgccttaaaaaaaaccccctttttggagtttttttttataaaaacctttttgtattnnnnnnnnnnnnnnnnnnnnnnnnnnnnnnggaaatacccagnnnnnnnnnnnnnnnnnncggatttttttttgggaaaacagtattgtcccctttttccttttcccaagggggggcccgggcccnnnnnnnnnnnnnnnnnnnnnnnnnnnnggggccaagggggccccaaaaattttccccttctcctattttctcggcggcccgannnnnnnnnnnnnnnnnnnnaattnnnnnnnnnnnnnnnnnnnnnnnnnnnnnnnnnnnnnnnnnnnnnnnnnnnnnnnnnnnnnnnnnnnnnnnnnnnataattgagattttattggttgaggatcagtacagacatttcaatttgtacacaattcttaacatatgtaacgaaattctaaaaagccatgtattgtaattcttttttaaagttattccagtgactttccagcttaaaatttggaagcaaattttccttaagaggctatcaagtaccagtatcttcacatgttggtcagctgttacgtatggcccaccagttcacaactgaatagcatgtacactacatattcaaatctgtaatctttcacagcacagtaacgaagttagtaggcaaacaggacgaccacaaccaaacatgttacagagtgcacacgattccgacagggagcgccatgatcgaggagtggtttgctttaggaaacaattctactaaaaaacatgagaagagaagtaaaataaaatgttcaagacattaaatgcaggactgactccatattccatttaatatgcttg

SEQ ID NO: 37786 - DNA, 484 bp, Macaca Mulatta
tgtctctatcgtttttgtctagttagatgggaatacaaactggggaaaggcctgtgttttcaaaatgggaaaagctatgagcaaacaaatctatgagctgggagaagcaacagagagagggagaggacaaaggcttaaaagaaaggaacaatgaatgtcaccaggatcctgcagaaaagagacatcaagagaacaggtcgagagacttgtctaggagggacatctttcctttgatacctgtgaggaggaagtactggagaggtgcaaatacagatcgatttatgtgcaggtaatgggagcagaacattcactgaactcagagatgttcacttttactacctaagtcaagcatgaggcaagctcatcagctgagactgaaatagaacttgagaagagtgataaagattatgaaaactgaatgggagcaggagttaattaaaaatagggaaaagaactatactagtatttctgtttacctaaacat

SEQ ID NO: 37787 - DNA, 887 bp, Macaca Mulatta
gggatccaatcctccctcctcccttcgcacgtggtgccgtcgctgctgcctccagctcgccccgaacccagttcctgcagccatggctcctggccagctcgccttatttagtgtctctgacaaaaccggccttgtggaatttgcaagaaacctgacctctcttggtttgaatctggtcgcttccggagggactgcaaaagctctcagggatgctggtctggcagtcagagatgtctccgagttgacgggatttcccgaaatgttggggggacgtgtgaaaactttgcatcctgcagtgcatgctggaatcctggctcgtaatatcccagaagataatgctgacatgaccagacttgatttcaatcttataagagttgttgcctgcaatctctatccctttgtgaagacagtgggcttctccaggtgtaactgttgaagaagctgtggaacaaattgacattgggggaagtaaccttactggaaagcgctatcaaaaacaatgctagaatagaaagtagcggtgtaacccaagggctatcatgccagaaccccacagagacagccgaccatccacaagtaagagacgctatcatggtaaaaaaaactacctataagcgtttaagcccacttctacataaatccgaacttatgcgggaaacccacttacctactctgcttcaatggaaatagtcaccgagatagtgacaaaatataaatatgaacgcggctgacaaaggactgggacccatactctagaatcctaaagtgcatgacttaacaaccagagtcaccaattgttcataggacccacccgcatcaatgaagaacgcacccatacgaacctataagtacgcgacagcaaacgacgcaagtaactctctgtacgg

SEQ ID NO: 37788 - DNA, 915 bp, Macaca Mulatta
ggtggggtctggagcttatgaacaagttgtgatcaaacgctagaagtcaagccggtgaaaacatttccctgtggatttaagatgtgagtagttgatgtatcaaggcattttattcaagcacttaatagaaaatgaacctcaactatcaagaggaaagccaatgctgatttcttctctggaaggacccaccaccatcctgtagcagccaccaaaggggaacatctgcatggcagtctccaggcaccgtgctgctatgtgccttggaagcacctggcttctgtggtcactgcacatgataatgaaaagcctgctttgtcttttagaacaccccagtggagaaaacagcattatacacatcagagtatcattttaggattcaagtgtaaaaatctgtgatcaaggtgctcaatagatttgggctctatggtttggtttttttagtttgagagacagtacatgaatataacttaaaccctatagatttgtcaagataggcacaattcctgttctggaaatcttccctattacactacctacagcgttgtataaagcgtgggtgttcatgttttgagaaaatgttagactacaattgaaacatgtgatgtgcttattcataattctcaatgtatcagtcataaatgaaataacaagtgcatttcagtctgagatacgtgaatggatgtaatgccgtttttatgcagtatatattgttaattgtcattaatattagatgaactgcagaatcacccccaagcactacataaaaggctcaaaataagtttaacacccactgtgttgggcaccctaacagaagagctgtcttaactcactgaatagtaaggtctactggtttcaggagtcaaaatgtagaaaaagaggagaattgtaatatggtcagaaacagagaagcctttt

SEQ ID NO: 37789 - DNA, 312 bp, Macaca Mulatta
  misc_feature (1)...(312): n = A,T,C or G
cttccccctggcggatttaaaaatctttagcaggcttatcaacagtttaaaatttacaaatttagatgtaaactttaaatttactctttccatagttgttcattttttgctctggtatatctgcccatnttctaaaaatttaacagcaatctgatgcagtgggacaatctgaagctgaattaccaaaaccaaacaaaacataacatcaggccacaaaagaacaatcaacttattcccaaataaaacatttaaagatcttgaaaaacagttcaactttaaacacataaggaaaacaactgactgacctccaca

SEQ ID NO: 37790 - DNA, 771 bp, Macaca Mulatta
tatttcagtcttcatttcatataatttctctttaacatttagaagtaaaaataactccttatttttgaaatactctcattttaaaaaatttctatgacactatacgctgctggttttccccacatccctcttctttctccttctccacacttcctccgcttccacctccttattttcttcctcccacattcttccttggtttattctgtatgtgtttgtgttattcagggctgtataggtttccttctgttgacactctgcacattttacctgagcaatctcatctatcccttgattacaattacaacatatagtaggatgatcccatatatatacacacaaaggtgaaacacaatgactgaactccagaccagtatatctacttcatagatacattcacaaacatcttaaattcaattattcaaatctgtattgattatcttctcctaaaacatgcttatactttcacctttgtgtgatttttatatacaacctattggaggcagatgcagccaaccactagggcatataatcctataattttcagaccctgcactcccagtcatcatccaccattttgcaggacgtcacaaaaaccatcatgtatggcaagcttgctgccatctaccccttcagaaaactgtgtgacaggaatgtattactgattccttccatcacacttcccatctcgggtcaataatcaaattctatgggttcttaatcttgagtatatttatctcctatccataattattatctcaaattacttcc

SEQ ID NO: 37791 - DNA, 805 bp, Macaca Mulatta
  misc_feature (1)...(805): n = A,T,C or G
ggggatttccgttggcggggggctcccgggggaggtgaagagaggtcggcagatccagctcttctgcttagcaacctgcttagtctttcggaatctggtacaccaggggttggaaaaactacactaggcaaagaacttgcgtcaaaatcgggactgaaatacattaatgttggtgatttagctcgagaagtctgatcatcggatatcatggagtctggcaagatggcttctcccaagagcatgccgaaagatgcacagatgatggcacaaatcctgaaggatatggggattacagaatatgagccaagagttataaatcagatgttggagtttgccttccgatatgtgaccacaattctagatgatgcaaaaatttattcaagccatgctaagaaagctaccgttgatgcagatgatgtgcgattggcaatccagtgccgcgctgaccagtcttttacctctcctcccccaagagattttttattagatatcgcaaggcaaagaaatcaaacccctttgccactgatcaagccatattcaggtcctaggttgccacctgatagatactgcttaacagctccaaactataggctgaaatctttacagaaaaaggcatcaacttctgcgggaagaataacagtcccgcggttaagtgttggttcagttactagcagaccaagtactcccacactaggcacaccaaccccacagaccatgtctgtttcaactaaagtagggactcccatgtcccntcacaggntcaaaaggtttacaagttacagatgccctaacttcgcaagtctcc

SEQ ID NO: 37792 - DNA, 637 bp, Macaca Mulatta
gattttgaatgtgaatgccctgaaggctacagatataatctcaaatcaaagtcttgtgaaggtagaatgatggtagtatcattactgattgtggagagggtgtgtgtgaagcctgaactgatatttgaaagcattggttttgtttgacttcaacagtcatattttcttatccctagtatagcttgttcaattgggtaatcattggctttcttccagagtaaaagtgtgtaagacacatggtctttaagtttagtggtatgcgcgccgattggccctttgcgctacctatgaattggagacctccatgtgtgatataaacatattaaacatattttcacgtcatttacattatattcaaagataaagagaatttcagtttggaaggaaaaacagtagatagaaaagaaagacacaagcttaaaagtcatctgagtgagacaatgagcatggttataaactttagtttttattccaagcttttcagtgatttttctgggcatatataaataagtcatttattctaaaataaaaagtgacacagttctattatctcatgataaagaaatgataacaatacactagaaatttaagaaatattgatcagtaatgtcagagcctgtgggtttggggcaacccc

SEQ ID NO: 37793 - DNA, 781 bp, Macaca Mulatta
ggggaaaggaaaccaactgaaatgtttgctttaacaaacattttaagaagttctttgggttttttcctcccttttaaaaaaattaggatataccatagcaacaaaagaactaatgtaaactattgtacgctacaacttaagtgatttttttctaaagaagcacaatgtcattgaaagtattattgagaaggatcatagtcacattgaatttgtgaaggccaaagaaattgaagggaatgatattttctttttatgatattcacatatttagtaaattttgtgtacaagaataccaggcagagtattttacccatggaaacaggtttcagattgctttgtttttactgttagagtctcaagtttagaaatgttagcacttaaatcagttttttctcactatacttaaagattgttaatattttggtatcttcctagcttgatgaatttaaacatatcttcagatctgtgacagtgacaaccaataggactgataatattagcttcaaactgataatatccagggttaaaataaaaatcatagtgaaagcatgattgtaaaattatgccatattaacttttaagtctgtaatagcttgatatcaaaatgttatgttatataccataaataatggctagcgagaacatctttggaaaatctcaaattacctttcctactacactgtttttcagaatgaaagtagaaatgatcccgttagctttttcaaatgttccgtgaatggaaaaggttttttgcttaaaaaaagctttttgggatttggtt

SEQ ID NO: 37794 - DNA, 606 bp, Macaca Mulatta
cgcaataatggtattgctgcattgaatggtagctctgtttttagttatttgagaaatctccaaactacttttcacagtggctgaactaatttacattcccaccaacagtgtatatgcattcccttttttccacagcctcaccaacatctgtggttttttgactttttattaatggccattctgactgttgtaagacggtatctcattgcggttttgatttgcacttttctgatgattagtgatgatgagcatttttcatgtttgttggccacttgtatgtcttgagaagtgtctgctcatgtcctttgcccattttttaatggggttgttcttctgcatttcattttaaaaggaaaattctcagtctcccttgaagaagtgaagcctccttctttatgcgctggccactgtctaatacctcccaacaatacttagaggagactacctgctggagcctcactagaattgagggatcaaatggttttggttgttttcccactggggaatattataaatacacagttaattgcagaaacaaaggctgggcatgattccatcctaagcagcgattcttcaggtagctgcccagaaggggctggagctcct

SEQ ID NO: 37795 - DNA, 778 bp, Macaca Mulatta
  misc_feature (1)...(778): n = A,T,C or G
ggagatatgtggtatctcatataagtaggattttatttaacctacagttttaacacgtaacttttacaattaaatatagtacactgaatacattaaattaattcaactttttcttaagattcaaagaaggtcactgttgtgaatgtaattgtagtgaaccataatataatgatgccttcatggctctcaaaaaatggtttttgcccttgttctaattaccctcaaatataaggttgctagttaaggtaccagagaaagtgaactagaaagactagttgccttaaacactgatctttcttttcttctccctcacttctgattttgttccctgtcatttactgatgttgtcaatggaattgctttctattatttttagttacagttatgcctgcttctccccttctattagactgtcttctttatttcttagttttatcctcaatttctcttcagtttagactttacagtangctgaggttgactttgagagctactgtaagccaacataggaattctattttctgactggtatactgactaatcacagtacatattctaagatctctatatctatgattcatttaagaattgtcagtcagttgtggtagctcatgcctgcaatgccagcacttttgggaagccaatttggggatgattgcttgggccccggaagttttgagaaaagccttgggcaacataaaggagtcttctgtctctacaaaaaaaaagttaacatttacctggggcatggtgggcatatttcttgttcgtctaagcc

SEQ ID NO: 37796 - DNA, 922 bp, Macaca Mulatta
  misc_feature (1)...(922): n = A,T,C or G
gaggacannnnnnnnnnnnnnnnnnnnnnnnnnnnnnnnnnnnnnnnnnnnnnnnnnnnnnnnnnnnnnnnnnnnnnnnnnnnnnnnnnnnnnnnnnnnnnnnnnnnnnnnnnnnnnnnnnnnnnnnnnnnnnnnnnnnnnnnnnnnnnnnnnnnnnnnnnnnnnnnnnnnnnnnnnnnnnnnnnnnnnnnnnnnnnnnnnnnnnnnnnnnnnnnnnnnnnnnnnnnnnnnnnnnnnnnnnnnnnnnnnnnnnnnnnnnnnnnnnnnnnnnnnnnnnnnnnnnnnnnnnnnnnnnnnnnnnnnnnnnnnnnnnnnnnnnnnnnnnnnnnnnnnnnnnnnnnnnnnnnnnnnnnnnnnnnnnnnnnnnnnnnnnnnnnnnnnnnnnnnnnnnnnnnnnnnnnnnnnnnnnnnnnnnnnnnnnnnnnnnnnnnnnnnnnnnnnnnnnnnnnnnnnnnnnnnnnnnnnnnnnnnnnnnnnnnnnnnnnnnnnnnnnnnnnnnnnnnnnnnnnnnnnnnnnnnnnnnnnnnnnnnnnnnnnnnnnnnnnnnnnnnnnnnnnnnnnnnnnnnnnnnnnnnnnnnnnnnnnnnnnnnnnnnnnnnnnnnnnnnnnnnnnnnnnngactactatattctacattctattttgaaacacccctaaattccacccctaaatatccatttcctaactgtggggtcacacaagtcaaaccggccgtaaaagcagttactaacgtcaatgctttaaacaaaaacgggacttatcccatatcaccaataaaggcacacctgacaaaacagggcacgtcacttaaatatgataccttcgagagaacaataagacacgttatccattgctaaccgatagataaagcttgtagaaaccccttgtgggcactgatataaccagttacaccatcggggaa

SEQ ID NO: 37797 - DNA, 877 bp, Macaca Mulatta
  misc_feature (1)...(877): n = A,T,C or G
gggttcatttatttattttgtatatttattattttatttatccctggagtttattcaactctgtcttgaagaataaacatccattgtagtaatgatgtattagtcccttcttacattgttatgaacacctgagactgggtaatttataaaggaaataggtttaattgattcacagttctgcatggctgggaaggcctcaagaaacttacaattctagcataaggggaagcaaacatgtccttctttacaaggcagcaggagagaaaaatgcagagcaaagtggggaaaagcctcttataaaaccatcagatcttgtgagaactcactcactatcataagaacagcatgagagaacacccccataatctaattgcctcccaagacacatgggggattatggggacccacatttcaacattgagattttgggtggggggcacagccaacccatattaaaatngtttcatgaaaaaaagtgttgttttcagaagtttttccataaggaatggaaggggaaaannnnnnnnnnnnnnnnnnnnnncccaggggtaaatggttggggaagaagttcttttaaattcctacccttatttaaaggaaaaacccctggtccccctggggttcccatattccccccatccccttgggggttttttttccccggcccttcccgggaaaaagaaagccccccgtccttttccaaaatctctgggcgcccaatttatattttttaaacccggttcccagggggtccaaagggggggggtaaattataaaaaaggggcccaataacccttcttccctttgggaaattttggggaaaaaaggtttaaaaatctccgcgcccccaaaatttttggaaaatttgtgggggccc

SEQ ID NO: 37798 - DNA, 789 bp, Macaca Mulatta
  misc_feature (1)...(789): n = A,T,C or G
gtattctgagttggcgaataagggggttgtttgctggggaggttgtaatgaagttggctttattgggcggggggcactgtgggtcttatagacaaaggttcccaaaccgctttggtgaggacatacggtggggtttcatatgaagtagggggggtgtggaggactgggcgggccaaccaggggggaaacccctgtgggtggggttaaacataaaaacttagccaggggtggtggtggggcaccagaattaccagctattggggaggttagggccagaagaattgcttgaacataggaggtgnnnnnnnnnnnnnnnnnnnnnnatgccacggcactccagcttgggcaacagagcgagactccatctaaaaaacaatnnnnnnnnnnnnnnnnnnnngggagtttccctgcacaagctctttctctttgcccgctgccatccatataagatgtgacttgctcctccttgtcttctgccatgattgtgagggctccccagccgtgtgggactctaagtccattcaacccctttcttttgtaaattgcccagtcttcatcagcagtgtgaaaatggactaatacaggcagcttggatgttaaaggcaagatggatttggtcaggccagatctccttcactgtcataattttctttcagcttcactctccaatagaccatcctcttgtggtaataagatagcttcagcggctcctgcccagcccacattctcctaggtatcccgtcctgctggggaagacagcctgagtctcagttgtctcaggtactggtc

SEQ ID NO: 37799 - DNA, 558 bp, Macaca Mulatta
  misc_feature (1)...(558): n = A,T,C or G
gccggttggcaaggaaggtctcctttcagctcgcagttcctcagcggagaggaggaccctccacagacccgnnnnnnncccacactggggagaagccattcagtgggccatctgtgtcaggcctgcatcactaagggcaacctccaggtacacttggtacatgtggaataacgacccctacatcctcccccaaggcgagctgcctcggtggaacaatccaaggctctgctagggggtgatggcctgaagttctctgaaacattcccgaaggatctggcagcccaaagaatgaatggcgaccccaatatttggaaccaggatgctgctggctcggaggagcttgcagtaaagaagaatgagattttcatcattcaggacacaggcttttcccacatcccaggaagttttggctgctgcaccgcccctctgggtaccctgggacgcaaaaacgctcaaaattgtcctcccattgtcagcctggacaaatcacctgagcagcctgcacagcaggcaacctccatttgccaggtcacccaggagaacaaggagatggtctaa

SEQ ID NO: 37800 - DNA, 776 bp, Macaca Mulatta
ggtattaaatattattttgataaatttcatgaagtaaatatacattcagtgtagttttactagatgaaagaaatgttacagattataattttacttgctgaatgtacttaatgataaacttaccttcatctctcccagagctaagcttcactgtaagtattcttaatatataccatgctgtagatagtacaatctgttcatattttaaaagacaaatactgtcttagacaaattgtcacaactaaatactatagactaggtggcttaaataatagacatttctcacagttctgaaagctgggaagtccaagatcaaggggctggcagatctggtgtctgatgaaagtttacagatggccatcttttccttgtatcttcacactgtggagggaagaaagagaaagcaagccctctctctttttacaagggcactaatcccaccatgaggggctgctccactctcgtgagcttattacttctcgaagacctcacctcctattatcatcccactgggacttaagatttcaacataatgcatcttgtggggacacattcagtccataaccatactaactagattttttttaagtgtacaatttttgaataaatttatcattctccactgtactagatttccttccaagaaaccgaaaccgaattaatatatggaatattttataaattaaaaagccttccttaaatttttgttttaaatttccgtcctccaaaaaacaaatcctccttccggaaaacaccccttctaaaaaaaccacccg

SEQ ID NO: 37801 - DNA, 809 bp, Macaca Mulatta
  misc_feature (1)...(809): n = A,T,C or G
gggggattgaggtgcttgagaaccaggagtctaggtggagggcggttcccggattggctaattcagcagctgaacagtgtcatcaagagccttagtaccttctgcctttcattgccattctcaccaagtgagtctgatttctccccttacggctccaaagtgaccacaaaggttccaggtggtggatgataagaggctgnnnnnnnnnnnnnnnnnnnnnnntnnnnnnnnnnnnnnnnntaagaggaaggtttctccagcccccattcacttgctctcatggccacaacaatgtgcattatctccaaagcaatcacttttcaaagggaataaagctcctatgattggctctgaccatgaagatttgcccttgaaattaaaaatgacctccccttgatgaatagctgctcagacaaaggggaacaacttccaggttctggataaagttggtggggtaggagtttatagggagtttggaacatagctgttcggtgggcaacagaccatgtgttgttttactgacccaagtatttcctataattttcaggtgggatcaaattttcacatctagagaaagagcaaccctttttccgtcacagaaaccttaatgttttgcttttaaaaaagtcccctgttacggctggcgcatggggatgggcttaatggccctgataaatccccaggcacctctgggtgtaggccttgaagggcgggggccgggattctttcaatagttcaagggaagaattcaaaggaactcccttgccctgtgggcccacatcatggtgtttttaagaatatccctccca

SEQ ID NO: 37802 - DNA, 4152 bp, Macaca Mulatta
  misc_feature (1)...(4152): n = A,T,C or G
tggtaataaatctttgcctcccgcagttcagaccaagaattcactgcaacaagnnnnnnnnnnnnnnnnnnnnnnnnnnnnnnnnnnnnnnnnnnnnnnnnnnnnnnnnnnnnnnnnnnnnnnnnnnnnnnnnnnnnnnnnnnnnnnnnnnnnnnnnnnnnnnnnnnnnnnnnnnnnnnnnnnnnnnnnnnnnnnnnnnnnnnnnnnnnnnnnnnnnnnnnnnnnnnnnnnnnnnnnnnnnnnnnnnnnnnnnnnnnnnnnnnnnnnnnnnnnnnnnnnnnnnnnnnnnnnnnnnnnnnnnnnnnnnnnnnnnnnnnnnnnnnnnnnnnnnnnnnnnnnnnnnnnnnnnnnnnnnnnnnnnnnnnnnnnnnnnnnnnnnnnnnnnnnnnnnnnnnnnnnnnnnnnnnnnnnnnnnnnnnnnnnnnnnnnnnnnnnnnnnnnnnnnnnnnnnnnnnnnnnnnnnnnnnnnnnnnnnnnnnnnnnnnnnnnnnnnnnnnnnnnnnnnnnnnnnnnnnnnnnnnnnnnnnnnnnnnnnnnnnnnnnnnnnnnnnnnnnnnnnnnnnnnnnnnnnnnnnnnnnnnnnnnnnnnnnnnnnnnnnnnnnnnnnnnnnnnnnnnnnnnnnnnnnnnnnnnnnnnnnnnnnnnnnnnnnnnnnnnnnnnnnnnnnnnnnnnnnnnnnnnnnnnnnnnnnnnnnnnnnnnnnnnnnnnnnnnnnnnnnnnnnnnnnnnnnnnnnnnnnnnnnnnnnnnnnnnnnnnnnnnnnnnnnnnnnnnnnnnnnnnnnnnnnnnnnnnnnnnnnnnnnnnnnnnnnnnnnnnnnnnnnnnnnnnnnnnnnnnnnnnnnnnnnnnnnnnnnnnnnnnnnnnnnnnnnnnnnnnnnnnnnnnnnnnnnnnnnnnnnnnnnnnnnnnnnnnnnnnnnnnnnnnnnnnnnnnnnnnnnnnnnnnnnnnnnnnnnnnnnnnnnnnnnnnnnnnnnnnnnnnnnnnnnnnnnnnnnnnnnnnnnnnnnnnnnnnnnnngccacctgcttgggaaagcacagacggcattggcagtgatcccttcttccattgttctgccctctcagaaaaggaagatagagcaggctgaacatgtcccagacagtacccttggtataaatgcttccggtttttctgccacaagccctttggtcttacccactacctcagagcacactgctaagaaaatgaaagccaccaatgaacccagcaaaaacacacatggactgctcgacaggnnnnnnnnnnnnnnnnnnnnnnnnnnnnnnnnnnnnnnnnnnnnnnnnnnnnnnnnnnnnnnnnnnnnnnnnnnnnnnnnnnnnnnnnnnnnnnnnnnnnnnnnnnnnnnnnnnnnnnnnnnnnnnnnnnnnnnnnnnnnnnnnnnnnnnnnnnnnnnnnnnnnnnnnnnnnnnnnnnnnnnnnnnnnnnnnnnnnnnnnnnnnnnnnnnnnnnnnnnnnnnnnnnnnnnnnnnnnnnnnnnnnnnnnnnnnnnnnnnnnnnnnnnnnnnnnnnnnnnnnnnnnnnnnnnnnnnnnnnnnnnnnnnnnnnnnnnnnnnnnnnnnnnnnnnnnnnnnnnnnnnnnnnnnnnnnnnnnnnnnnnnnnnnnnnnnnnnnnnnnnnnnnnnnnnnnnnnnnnnnnnnnnnnnnnnnnnnnnnnnnnnnnnnnnnnnnnnnnnnnnnnnnnnnnnnnnnnnnnnnnnnnnnnnnnnnnnnnnnnnnnnnnnnnnnnnnnnnnnnnnnnnnnnnnnnnnnnnnnnnnnnnnnnnnnnnnnnnnnnnnnnnnnnnnnnnnnnnnnnnnnnnnnnnnnnnnnnnnnnnnnnnnnnnnnnnnnnnnnnnnnnnnnnnnnnnnnnnnnnnnnnnnnnnnnnnnnnnnnnnnnnnnnnnnnnnnnnnnnnnnnnnnnnnnnnnnnnnnnnnnnnnnnnnnnnnnnnnnnnnnnnnnnnnnnnnnnnnnnnnnnnnnnnnnnnnnnnnnnnnnnnnnnnnnnnnnnnnnnnnnnnnnnnnnnnnnnnnnnnnnnnnnnnnnnnnnnnnnnnnnnnnnnnnnnnnnnnnnnnnnnnnnnnnnnnnnnnnnnnnnnnnnnnnnnnnnnnnnnnnnnnnnnnnnnnnnnnnnnnnnnnnnnnnnnnnnnnnnnnnnnnnnnnnnnnnnnnnnnnnnnnnnnnnnnnnnnnnnnnnnnnnnnnnnnnnnnnnnnnnnnnnnnnnnnnnnnnnnnnnnnnnnnnnnnnnnnnnnnnnnnnnnnnnnnnnnnnnnnnnnnnnnnnnnnnnnnnnnnnnnnnnnnnnnnnnnnnnnnnnnnnnnnnnnnnnnnnnnnnnnnnnnnnnnnnnnnnnnnnnnnnnnnnnnnnnnnnnnnnnnnnnnnnnnnnnnnnnnnnnnnnnnnnnnnnnnnnnnnnnnnnnnnnnnnnnnnnnnnnnnnnnnnnnnnnnnnnnnnnnnnnnnnnnnnnnnnnnnnnnnnnnnnnnnnnnnnnnnnnnnnnnnnnnnnnnnnnnnnnnnnnnnnnnnnnnnnnnnnnnnnnnnnnnnnnnnnnnnnnnnnnnnnnnnnnnnnnnnnnnnnnnnnnnnnnnnnnnnnnnnnnnnnnnnnnnnnnnnnnnnnnnnnnnnnnnnnnnnnnnnnnnnnnnnnnnnnnnnnnnnnnnnnnnnnnnnnnnnnnnnnnnnnnnnnnnnnnnnnnnnnnnnnnnnnnnnnnnnnnnnnnnnnnnnnnnnnnnnnnnnnnnnnnnnnnnnnnnnnnnnnnnnnnnnnnnnnnnnnnnnnnnnnnnnnnnnnnnnnnnnnnnnnnnnnnnnnnnnnnnnnnnnnnnnnnnnnnnnnnnnnnnnnnnnnnnnnnnnnnnnnnnnnnnnnnnnnnnnnnnnnnnnnnnnnnnnnnnnnnnnnnnnnnnnnnnnnnnnnnnnnnnnnnnnnnnnnnnnnnnnnnnnnnnnnnnnnnnnnnnnnnnnnnnnnnnnnnnnnnnnnnnnnnnnnnnnnnnnnnnnnnnnnnnnnnnnnnnnnnnnnnnnnnnnnnnnnnnnnnnnnnnnnnnnnnnnnnnnnnnnnnnnnnnnnnnnnnnnnnnnnnnnnnnnnnnnnnnnnnnnnnnnnnnnnnnnnnnnnnnnnnnnnnnnnnnnnnnnnnnnnnnnnnnnnnnnnnnnnnnnnnnnnnnnnnnnnnnnnnnnnnnnnnnnnnnnnnnnnnnnnnnnnnnnnnnnnnnnnnnnnnnnnnnnnnnnnnnnnnnnnnnnnnnnnnnnnnnnnnnnnnnnnnnnnnnnnnnnnnnnnnnnnnnnnnnnnnnnnnnnnnnnnnnnnnnnnnnnnnnnnnnnnnnnnnnnnnnnnnnnnnnnnnnnnnnnnnnnnnnnnnnnnnnnnnnnnnnnnnnnnnnnnnnnnnnnnnnnnnnnnnnnnnnnnnnnnnnnnnnnnnnnnnnnnnnnnnnnnnnnnnnnnnnnnnnnnnnnnnnnnnnnnnnnnnnnnnnnnnnnnnnnnnnnnnnnnnnnnnnnnnnnnnnnnnnnnnnnnnnnnnnnnnnnnnnnnnnnnnnnnnnnnnnnnnnnnnnnnnnnnnnnnnnnnnnnnnnnnnnnnnnnnnnnnnnnnnnnnnnnnnnnnnnnnnnnnnnnnnnnnnccccagcatgtagcaaaagcatttcttggtgagtgtgggggctggtgattcccaccttccacctgtcatggtctcagggaacagcctacttcccaccagcatcttgacacctacagtgtactctggctgctgggaacccatctctcttggagaaatcctgtccacccaaccccaagagccctagcgtgcagtcagtgtcagcacagcgctcccagatgagggccggactgcctccccttaaacagctgtgttggaggtactgcccagaccgcctgcagggccccggggatctgcatttctaacaggctcctgcccccaagactggtctggtggaaaacccagcctgggagcccctggaatggcaggccctgtcctagatacaggtggagccatgcccaggagttgcattcgtttttcttatttgaaagacttcccccaaaaggaagtggtcttttcactacccttgccagaaacatgctaaccagctctgtttctgtcccctagaaaatgggaataaaatttcttttgctgtc

SEQ ID NO: 37803 - DNA, 808 bp, Macaca Mulatta
  misc_feature (1)...(808): n = A,T,C or G
tagatgcaaactttcaaaggattctggaaagttttaaaaaatgcaaatcctctataaattgtaagccacagggtatgagggcaaagcacttaaagtcatataaatctaggcattcaagatcttagtgtccaccctactagtaagtgtggatttcaaacttcctgtccaatcaacnnnnnnnnnnnnnnnnnnnnnnnnnnnnnnnnngtgtctcatgnnnnnnnnnnnnnnnnnnnnnnnnnnngcnnnnnnnnnnnnnnnnnnnnnncnnnnnnnnnnnnnccgcnnnnnnnnnnnnnnnannnnnnnnnnnnnnnnnnnnnnnnntgcccgccaccgcgcccggntannnnnnnnnnnnnnnnnnnnnnnnnnnnnnnnnntgtggtctcgatctcctgaccttgtgatccgcccnnnnnnnnnnnnnnnnnnnnnnnnnnnnnnnnnnnnnnnnnctgcgcccggccccaatcaactttaagtaaaaatcttcatctagtgctgtcaggtggtggtaccagtgatgcttgttatttgtatgccaaaagttcaacaaaaatggtttgtaaactatttagatcagtgatattctagcagtgatacatattgacaaaatttgttgatattttcctatacaaannnnnnnnnnnnnnnnnnnnnnnnnnnnnnnnncctcgctgtgtcgcctaggctggaatgcagtggtgtnnnnnnnnnnnnnnnnnnnnnnnnnnnnnnnnnnnnnnnnnnnnnnnnnnnnnnnnnnnnnnnnnnnactgagactacaggcacgtgccaccatgcc

SEQ ID NO: 37804 - DNA, 796 bp, Macaca Mulatta
  misc_feature (1)...(796): n = A,T,C or G
caaaccaaacccttttgccggaaaaaagcccaaacaaccaaagtttnnnnnnnnnnnnnnnnnngtccagtgtaaaaatttgcatttgctaacagaaactcagaaccgttttaaatttgaagcccccataaccccaggaaatatcatctgtttctagaaaacattctccagcttttcgccaggaaatgcccatggtccttcaaaacactcagttttaatttatggtagggtctccaattaaccttgtttttgaattcagcaaggtcagggccagtattattcatggctgttgctttaattgggttagtcagttttgttggtgtagaaacaaaaacacagtacctgacattcagctagagttctctcagagcactctgttgtaaagaatcacattgttaaggcatgccgcttacacaatcatgtattataccttttagtatttcaatttgagtcataataaggtccaatttgaggtgaataatggctaagcctgttcagactcagcttctcatttcagacttctttgtaaatgacacattaatccactgaaatggtgagctgaacagaagcttgtgaaaattgtgaaattgctaagcacctgcctgaacaaataatcttttcttttggaatttctattttaggaggaaattattgtgacaagactcatgtaattgtaaatcagcccctggagggagaagaaacacagaaatgggacattgaaatattatgagagaatcaacatccctagaaagagtgaaggaggaggaaactcacatctgtcattgtctcgtagacc

SEQ ID NO: 37805 - DNA, 77 bp, Macaca Mulatta
aagggtggcccatatcatgatgtcttacatagtattttaggggcatacacgtgctacagacctgatgttggttatgt

SEQ ID NO: 37806 - DNA, 610 bp, Macaca Mulatta
aaacatctcatgtcctcataaatatatacacttactatatgcccacaaatattaataataaacacaatttaaacaaatcagagctcatacagcccatatacatacttcccatgttaaatcccaaacatctcatataaacactttattatctgaaattcttggccatggactatggtatactttcatttaatttcttcaccaacttctacccaaaaacaaaaaatacccttcaatccccatgtgcacagacctttgttagtcatatctgctcatggactcaacaagcagtaattgagtccactgactgcatttctgaaatccacactcatgatcttcatctgtatgttaaataaatcagagccatcatgagagcatgtcttcatggggaacacatgtgcctgagttagattcatcagaaagataaaatttgttatcataacaaagggctaactcacagaagccaaagaagttatgtaaaaggattgatctaaggatagtaccctgttatacaagaaatcctctgtttatttcttatctctaattttctctgcctgtcatcttcattcttgtacatatctctgctttcaaattcacatagtacaaaatggtc

SEQ ID NO: 37807 - DNA, 748 bp, Macaca Mulatta
  misc_feature (1)...(748): n = A,T,C or G
ggaagnnnnnnnnnnnnnnnnncnnnnnnnnnnnnnnnnnnagagaggcatttttgtgtgtgtcctctattaaagctttgtcagcattttacagttttagaagatgaatttgtttttgttccaagtgtttttaagtgcttcagtcagtggtcaaacaggttttgagcctagctttcaacaccaacacagagagggagaaagaaaaataatcgaaaataaattccacagtctaaaatgaacttttatcaaggcttttgctcttttagacttgaggttatctttataattaaggagaatggtttttaaaatttagttcctctgacaccccaaaattatcaaaataaattatgccacagtgattctgtgttttgaaagtcattgataggacttatatgagtcagaattttatggattataaactaggctttatctggttgaaaaaaatcgcaacacaagaagcaactttattaaattagacctaaagtcacaatctgttctttcctgctttttaaaaattacctattacctttaaaagatcccaaatttagaagaggaattaaaataaaagttaatgtaatgaaacacttccacaatattctattacttcaacatctaatcaataaaaacattaatggactactcttttaccacaccctggtagagatatgtttggggacataaacacagtttaaaaccccttcaaaagacaatggactaantaattttccttggtaaaacaaagtattac

SEQ ID NO: 37808 - DNA, 567 bp, Macaca Mulatta
  misc_feature (1)...(567): n = A,T,C or G
gtcagctaaaccaagaccccacagtgatgaatattccaagaagattcctcctcccaaaccgaagcggaatccgaacactcagctgagcacatctttcgatgaaacgtacatcaaaaagcacgggccccggaggacatcgctgccgcgggactcctccctgtcccagatgggcagccccgcgggagaccccgaggaagaggagcccgtgtacatcgagatggtggggaacattctcagagacttcaggaaggaggacgacgaccagagcgaggctgtctacgaggaaatgaagtaccccatctttgacgacttgggccaagacaccaaatgtgactttgaccatcacagctgttcttcgcagtgtgctactcccacggtgcctgacttggactttgccaaggcctcagtgccatgcccccctaaggggctgctttgtgacatccccccgcccttccccaacctgctttctcacagaccccctctgctggtatnnnnnnnnnnnnnnnncattgctcccccaactccgaagagtccccgctcacccctctggaggtcacgaagcttccc

SEQ ID NO: 37809 - DNA, 1636 bp, Macaca Mulatta
  misc_feature (1)...(1636): n = A,T,C or G
gacattagaggaaatggagctgagaattgaaacgcagaaacaaaccctcaatgcccgagatgagtcgattaaaaaacttcttgagatgttacaaagtaaaggcttgccgtccaaaagcctagaggatgacaatgagcgaacgcgacggatggcagaggctgagtctcaggtcagccacttggaagtgattttagaccagaaagagaaggaaaacatacatcttagagagnnnnnnnnnnnnnnnnnnnnnnnnnnnnnnnnnnnnnnnnnnnnnnnnnnnnnnnnnnnnnnnnnnnnnnnnnnnnnnnnnnnnnnnnnnnnnnnnnnnnnnnnnnnnnnnnnnnnnnnnnnnnnnnnnnnnnnnnnnnnnnnnnnnnnnnnnnnnnnnnnnnnnnnnnnnnnnnnnnnnnnnnnnnnnnnnnnnnnnnnnnnnnnnnnnnnnnnnnnnnnnnnnnnnnnnnnnnnnnnnnnnnnnnnnnnnnnnnnnnnnnnnnnnnnnnnnnnnnnnnnnnnnnnnnnnnnnnnnnnnnnnnnnnnnnnnnnnnnnnnnnnnnnnnnnnnnnnnnnnnnnnnnnnnnnnnnnnnnnnnnnnnnnnnnnnnnnnnnnnnnnnnnnnnnnnnnnnnnnnnnnnnnnnnnnnnnnnnnnnnnnnnnnnnnnnnnnnnnnnnnnnnnnnnnnnnnnnnnnnnnnnnnnnnnnnnnnnnnnnnnnnnnnnnnnnnnnnnnnnnnnnnnnnnnnnnnnnnnnnnnnnnnnnnnnnnnnnnnnnnnnnnnnnnnnnnnnnnnnnnnnnnnnnnnnnnnnnnnnnnnnnnnnnnnnnnnnnnnnnnnnnnnnnnnnnnnnnnnnnnnnnnnnnnnnnnnnnnnnnnnnnnnnnnnnnnnnnnnnnnnnnnnnnnnnnnnnnnnnnnnnnnnnnnnnnnnnnnnnnnnnnnnnnnnnnnnnnnnnnnnnnnnnnnnnnnnnnnnnnnnnnnnnnnnnnnnnnnnnnnnnnnnnnnnnnnnnnnnnnnnnnnnnnnnnnnnnnnnnnnnnnnnnnnnnnnnnnnnnnnnnnnnnnnnnnnnnnnnnnnnnnnnnnnnnnnnnnnnnnnnnnnnnnnnnnnnnnnnnnnnnnnnnnnnnnnnnnnnnnnnnnnnnnnnnnnnnnnnnnnnnnnnnnnnnnnnnnnnnnnnnnnnnnnnnnnnnnnnnnnnnnnnnnnnnnnnnnnnnnnnnnaaggcacataatattgaagatgactccaggatgaaccctgagtttgcagaccgaataaaacagctagataaagaggcgtcttactaccgcgacgagtgtggcaaggcccaagcagaagtggaccggttgttggagatcctcaaggaggtggagaatgagaagaatgacaaggacaagaagatcgcagaactggagagnnnnnnnnnnnnnnnnnnnnnnnnnnnnnnnnnnnnnnnnnnnnnnnnnnnnnnnnnnnnnnnnnnnnnnnnnnnnnnnnnnnnnnnnnnnnnnnnnnnnnnnnnnnnnnnnnnnnnnnnnnnnnnnnnnnnagatagaggaactgatgaatgcactggagaagaccagacaggaactggatgccaccaaagcacgcctcgcctccacacagcagtccctggccgaa

SEQ ID NO: 37810 - DNA, 825 bp, Macaca Mulatta
  misc_feature (1)...(825): n = A,T,C or G
ggcannnnnnnnnnnnnnnnnnnnnnnnnnnnnnnngagacagtctgattgtaaagatgttgttgattctgacccatgggtgaccacaagaaaaagatatttatttctgcctggataattgagagttgactaattttggaagtcagaattcccaggaattagagtaactgttctggaaagttaaagtgtgaagttttttagataatttcataaaaaaattctggtttctttttgcttgtgctgactttcttggattttaatctacctcatcttgtctttttagagttacttcaacttgtcactttaacattgtgcttgactttggttgttttctatgatggaatttttcggattcattgacagcgtgttctcttgccttttcattctgatcctcatttcgtctaacatcatctcgtaaggctcctctgtcaagagaaatattttaaaatagtttaaagtcttgttttatggaaagaaagtgattcctccaatgctatttgtttctgaggtcagtaagaggaattaaggcagtgggggagggaatgaatcctgcactggaggcaaaagctgacaaggaaagagccattaattaagacaatttcaaagtcaactgattgtgatcattaatgtcacaatagatcaaaacctaattatcacagcctaggtaagagccatcagtattaatcggaaaatctaataggaaactattatcaagaaaataggtcaaattgaatgncatgaactttttatcttgccattccctatttttttgtgatgtccccctggcattggcaggtgtgaccctaacagtctctactaaaaata

SEQ ID NO: 37811 - DNA, 625 bp, Macaca Mulatta
  misc_feature (1)...(625): n = A,T,C or G
gggtgcgtttttgtactttcagagcaggtttaaacggttttttccccccccctatatctgaactgttgtcctcatggaaatccttttcccgatctttgtagcaccacctactggcagaatggcagagtagctgcgaaacaatttgtttaaaaacttgcttaggacaattgcatcagatatagaagttttgccatcagaattctttgcagacttggaagttacacgtttgcttgtaactgagatgggcttcacaggaatgtagttgccagttcatatcacaattgccctttctatatgaggtttgaaaatgtaaactgctatgcatagcttgggcaatagccctaaattgctatgacaactaatgaaccagctacgtatactggtattttaggtgcaagttgtaaagcaaaatatctgtgtattctgcttggttaacaaatgtatatttgtagccctttcatgcaatagcattcaagttgttgtttataagagaagaaaaaactgataataggagaaaattgcctttctgaatagaaatatagaatagcaacgtttatggatatcacaaataaagaattcaattctttaaannnnnnnnnnnnnnnnnnnnnnnnnnnnnnntgtc

SEQ ID NO: 37812 - DNA, 190 bp, Macaca Mulatta
aacggattgacagcaacatttttgacatctttcatacccagcactacagctagaatgaagttttattttacaagaggacaaataactatatatgaaagggctaaaaagagcattttcatgaaaacttacttttaaaaaattatatctccattctctatagtatacaatatctacaaaaagaattgaaagt

SEQ ID NO: 37813 - DNA, 2049 bp, Macaca Mulatta
  misc_feature (1)...(2049): n = A,T,C or G
actccaaactcaaccatctccagagagaccagcacccagtctgcatcagctgcagctagccacggccatgttttaccagaaggcaaaatcatgccaaacactgtttttgttggtggaattgatgatagggtattgtattcatacttcatttttatcttaaaatacattatgaacaatgggatttgggccttgttactgatgtaattttttttgtgtgtgtatttcatggaggtttagaattggttttacatttgacccattggtactaaaaatannnnnnnnnnnnnnnnnnnnnnnnnnnnnnnnngcagtcttgttctgtctcctnnnnnnnnnnnnnnnnnncggatctcagttcactgcaagctccgcctcccgggtttatgccgttcttctcnnnnnnnnnnnnnnnnnnnnnnnnnnnnnnntgcccgccaccttgcccgggtagnnnnnnnnnnnnnnnnnnnnnnnnnnnnnnnnnnnnnngggttagnnnnnnnnnnnnnnnnnnnnnnnnnnnnnnnnnnacccgtnnnnnnnnnnnnnnnnnnnnnnnnnnnnnntcttgaaccactgtgcctggccctaaaaatatctttgacaaagaaccactcatcgtttggggataaatgtggggagaaattttcaccttatggtagtaaagttgtggtgaagtagaaatttttgaatgctcttcttactcttgacgttcaattcttttccatagatggatgaaactgagattggaagctgctttggtagatacggttcagtgaaagaagtgaagataatcacagatcgaacgggtgtgtccaaagggtgagtaattttatcaaaaatatctgaactctagtcacctataggtatcagagacgacttcaaaactgatattctgacactggtgtaaatgaaattttttacgttgttgatttctttcatgtaggagataacatgttattaccagctcttttatttcatcatttttctaatgtttgtttttaaatatccccaatttttattttgtacaaatgaattaatcatttttctcaaataattgttttcttcatacgctgcacagtatcttaaattttaaccaccttatcttagatagtaagtgaaattcaggttcacagataatgaattttttgttaatcagtagagttttcacactgccctaatcttagcacactttaacatagtaccgcttaagaaaaggtagtatttgcagaggatctgtcgtgtacatcttaacaaatacttatcatgatgtattactcatcttttgtcataatcccttctgtatatagaatagtagaagttctggaccatgtactgtatgctaattattttatacttcaccttttctctgcctttatagctatggatttgtttctttttttaatgacgtggatgtccagaagataatagaagtgagtaatctaataaaaaatctcttgtttattttattgatacgacatttagacttagtgatataactcagtgttgtgtaaaatttggagaatgatatgatacactttctattcaaaaccgaaacttagagtaacctcacataacttgttagatcctgtttatttttgactggtcacctaggttcatgaactacagacaggaagggttggagatagggtgatgaaaggtttctgattgactttcacttaatgcttcttgatacgattagagtagtaagggtaaataaggtagcttcagggtgaccaactttaatttggtgtgtagttgtcactgatcttctctgttaataggaactttagaaggctttaggtatttacccaggtcttggaaataagacttgaaaattgattctcattttgttattgttttattttcagtcacagatacatttccatggtaaaaagctgaagctgggccctgcaatcaggaaacaaaaattatgtgagtaggaaaagtaattgttattttttgacacgtgtagcttttcaaataactaaaactatgctttttattcttgctttttataaggtgctcgtcatgtgcagccacgtcctt

SEQ ID NO: 37814 - DNA, 938 bp, Macaca Mulatta
  misc_feature (1)...(938): n = A,T,C or G
gggtaattgtttagtttatgattggggataaactcatgccagagaacttaaagtcttagaatggaaaaggtaaagaaatctcaacttccaagttggcaagtaactcccaatcctttagtttgtttcccccaatttttgaattgggaagctgggggaagttaaataggagccactgggtgtaccagtgcattaatttgggcaaggaaattatcataatttgatactgtatctgttttccctcaaagtatagagcttggggaaggaaagtattggaatgggggttggtctgaagcactgggctgacattagctacaattatgggaaatgctaaagttgtttggatatggtagtgtgtggttctcttttggaatttttttcaggtggtttaataataacttaaaactactatagaaacttcagagcaaaggaagtggcttaatgatcctgaagggatttcttctgatggtagcttttgtattatcaagtaagattctattttcagttgtgtgtaagcaagttttttttagcgtaggagaaatatttttccgttgttcagctgcaaaacaagatgttaaggtatgcttcaaaaattctgtaaattgtgattttaaatttatctgtttgtaaatcgtaattaagaattgtgatagttcagcttgaatgtctcttagagggtgggcttttgttgatgagggaggggaaactttttttttctgtagacttttttcagataacatcttctgagtcataaccagcctggcagtatgatggcctagatgcagagagaacagctccttggtgaatgataagtaaaggcagaaaagattatatgtcatacctccactggggaataagcataaccctcagattcttactactgatgagaacattatctgcgtatgccaaaaannnnnannnannaataaaaannccttgtc

SEQ ID NO: 37815 - DNA, 223 bp, Macaca Mulatta
cttctctcccactccccccaccaccaagaagcccccgttcactcccctgaaactcctgagaaagaccccctgaccctttccccaacagttcccgagactgacggggaccccctgctccagagcccggtttcccaaaaggacacccccttccagatctattctgcagtccagaaggaacagccgctccccacagcggaaatgacccgcttggctgtgtgggctg

SEQ ID NO: 37816 - DNA, 382 bp, Macaca Mulatta
ttccatgatgaaagagtttatatagtgtcattgtgcgttgttcattgtccaataatgccagctgttaaaagtctttcttgacttttgctttaaaatggtaagtggccagcagttattgaattatcctcatttcttctctcctcacatttgatactactcagcaactgtagctcccagtaagtagcatatagatactagagagaaggtggcagtgaccttctggaggaagatataaaggtctgcttatagaagcagatccaggaagaattctgttaacagcatggtcagggatttcagtttttaatgttcctcttctatttggtgttagcgaatgagacagtaggaggagagggtgattccacctcagtcagcagatagtctg

SEQ ID NO: 37817 - DNA, 527 bp, Macaca Mulatta
  misc_feature (1)...(527): n = A,T,C or G
gttgnnnnnnnnnnnnnnnnnnnnnnntttatttattattattatactttaagttgtagggtacatgtgcataacgtgcaggtttgttacatatgtatacttgtgccggtatgatcttgaagttatcagaaactggtattcaagggtcattgtcagagtcttttccatatatctcgttgaagaaaaagcaattttggactgtagctgaatataaatactttgaggaagaatcaaagcaactgtctgggaatgacaaagatttaaaatgactctggtgaaaaatctaatgagatttttattcggtttattaaggtaaagacacagctcacatagaaatctagttacttctgtggcatacgacactatgactgataacatattcgatttccagaaatttcatatagtttttagaatattnnnnnnnnnnnnnnnnnnnnnnnnnnnnnnnnnnnnnnnnnnnnnnnnnnnnnnnnnnnnnnnnnnnnntgtggcatgatctatgctcanctgcaagctccgcctcccag

SEQ ID NO: 37818 - DNA, 712 bp, Macaca Mulatta
ggagtaggaggaggaggagacaaggttgtagataaggaatcatggagtagagatgagtggagtggttgacacacaagataataggagactgggaatggtggtgaagacatacaaatagggccggtattagccctttttaatgaattagattaaattgcaacagagggaagttcttttgactagtgaaacaggaaccaaggaaatatagaaagtaattgaatcactttaagggaaagagcagtagagcactccctagacagctgctgagctctccatagcaacctccaattccaaaccaaaccccataaggtgccatcagtattgtcgctatcctggagtttcaagtaaatcttttttcttcagctcgatctccggtgcctatttcttacaaatagtcttgatgagaatagaactattcaagtcgtattttgctcctatctgctgtgaagatgtatttccctgtgatctttgtcagctggatgctatcatgggggctgttttctggcattctcctccctgggttctgggttgtcctttatgattccagtagatttccattttcctccttgaattaaaactcacagagttgatctttatgtactatcttgccatttccaagggtccgaggcatgctgaaagccgctaatccaccatctgttactgctggaaagagggttctgactcccggtgatctccactgatatcattcccc

SEQ ID NO: 37819 - DNA, 677 bp, Macaca Mulatta
ggggggccgggaagatgccagtggcggtgatggcggaaagtgccttcagtttcaaaaagttgctggatcagtgcgagaaccaggagctcgaggacgcttgatgtaatgggcagaatcagaatgcttcaggaatctgtcgaaattgtttcttatactagcccctggaggaattgctacacccccagtgtatggtcagcttctagctttatatttgctccataatgacatgaataatgcaagatatctttggaaaagaataccacctgctataaaatctgcaaattctgaacttgggggaatttggtcagtaggacaaagaatctggcagagagatttccctgggatctatacaaccatcaacgctcaccagtggtctgagacggtccagccaattatggaagcacttagagatgcaacaaggagacgcgccttcgccctggtctctcaagcgtatacttcaatcatcgctgatgattttgcagcctttgttggacttcctgtagaagaggctgtgaaaggtatattagagcaaggatggcaagctgattccaccacaagaatgttctgcccaaaaagcagttgcaagggcctggatgttcctttacagtttatccctatcaagctgctcagtccccatcccatgacacagtagcgacgacggtttgtgcttcttgaac

SEQ ID NO: 37820 - DNA, 626 bp, Macaca Mulatta
  misc_feature (1)...(626): n = A,T,C or G
gaactgagaacgtccatttacgtagcagcgtcgaagtcattaaaccttagtgggctactttggtgtatgctgaatgttgcaatcagaaggttgaagaatcagtggaaggcaaggaattaaacattgctagtgtagataattataaaagtaagctttaaaggggaagagagaactgacaatagttggtagggaaataggaggttccagctggggnnnnnnnnnnnnnnnnnnnnnnnnnnnnnnnnnnnnnnnnnnnnnngaggattccttgagttcaggaattaaaggttacagtgagctatgatggtnnnnnnnnnnnnnnnnnnnnnnnnnngagtaagattttatcttttaaaagagggaatagtgatttctaatataaaataatttctgaataggcagcagggagttggatccagagcacaagatgagagagtgagaaaggtgttgaggatgcagatgggtttgtaaatttgacgttggtaagctgaaaggggacttctgtcttgaagctattatttcctttgtgaggtaggccagaagtggggctatctactataacaagagggaaacagggtttggtttcgttttgacttctgtgattggatggatggttatgcacatta

SEQ ID NO: 37821 - DNA, 1195 bp, Macaca Mulatta
  misc_feature (1)...(1195): n = A,T,C or G
gnnnnnnnnnnnnnnnnnnnnnnnnnnnnnnnnnnnnnnnnnnnnnnnnnnnnnnnnnnnnnnnnnnnnnnnnnnnnnnnnnnnnnnnnnnnnnnnnnnnnnnnnnnnnnnnnnnnnnnnnnnnnnnnnnnnnnnnnnnnnnnnnnnnnnnnnnnnnnnnnnnnnnnnnnnnnnnnnnnnnnnnnnnnnnnnnnnnnnnnnnnnnnnnnnnnnnnnnnnnnntatatttggatccataagaaaccattgggcatttaggtctttaatgtaagagacaacaccatgtatataagttggaaataaatttagatacccttaatcttatttccacccaatatcacaaataagcatggaattccacccaccagaggcgaatggaatttaatattggaaatggtgaaacaaacaatgagcgaacacaaatactattgaggtcccaatacaagacacattgtcttatcttaaagagtagtacaagaaccgtccagcatgccaacaccggaagcgcgcgcgactcataaaacgagtgcgacgggagaccgataggacgggatgagggcgcggtcgcgttgatagaaaatccgattcgacagctaacgatttgattatccaagacatccgtacatatgttgcaaataaagaaaaccaaccgctaaacgagtgactgctcgagatgctagatgtgtgtacacgagcaagaaaaagtgagcgcctcatgtgtatgaaggcataattaggtgtttaattgggtgtcacgatagtcgcggtcgctaaagtatatatatacggcccgaccggttctttgtgacaaataggtacggcggtgaatttactgctaagaggagcgatggtgtagncccaaccaatcagatggcttcatatcacctagaaatcgttagatatgccactgcattacacctgtgtagtgatagaatagaaacaaaaagaatccaaaaatagcaagtgacgcagaaaatactggaggaaatctcaatatataccaaagaaggcattatgaaaatatgagatgataaaggagctccggcaatggagtgcacgacaacacgtagatggataatattcagaattgttaaagaataagacatatttatcacgataacgacatataaacaagcagcaaaataacaaaacaagcatagaaagacactgtaattatgactaacgtctaatcgaa

SEQ ID NO: 37822 - DNA, 388 bp, Macaca Mulatta
  misc_feature (1)...(388): n = A,T,C or G
caggagctgactactgggcaggaacgtctctcaggagaaagagtggaagagaatattgtgaactaaggccccctgcccccttttcctgttgcatgtgaagttatcaaaaanngaaacaagtgttgaaaatgttaaaggcagtgctgaagaagagccgagaaggaggaaaaggaggcaagaaggaagcaggnnngactttggtccagagacttctccagtcctgccccttgaccacggtgctgactctcctgtgagcagtcttcccgcagcagaggacacctatagggtgagcttggccaaaggtgtctcgatgtctctgccttcatcacctttgctgcctcgacagtctcacttggtgcaatcaagagcaaacaaaaagtccccaggt

SEQ ID NO: 37823 - DNA, 828 bp, Macaca Mulatta
  misc_feature (1)...(828): n = A,T,C or G
ggcacacacacacacatccccagcctgagcaacaagagtgagacttcgtnnnnnnnnnnnnnnnnnnnnnnnnnnngcatgcacacacacacacacacgcatgcgcacacacacacacacacgcatgcacgcatgcacacacacacacacattcccagcctgagcaacaagagtgagacttcgtnnnnnnnnnnnnnnnnnnnnnnnnnnngcttgnnnnnnnnnnnnnnnnnnngcacgcatgcacacacacacatcaaatggagctgttctgtatagatagtagtattgccttctgtttctagagggggaaattgaagctctgagaagttatataacttccccagcatcacatagctaaaatgtggcattgatagtcaaggaatgcaggagtatatgaggacagagccgatgcatataactactgtaatgcagtgccaaacatagatttccccaggaaggccagaaatctcagcagggggcttgggactaaaagcctgcgtgaaaccccagtcaaaaaaagctactctggaaaaattttcccaccacaaccatgggaaatgaaaaaagaatggttacatactagaaaaagcaaattcttatgcaacagctagggggccttttcaaggccaaaatgtttcatctaaaaaaagctcttaccaggtattaannnnnnnnnnnnnnnnnnncctctttttaaaaagagactttgtttaaaagaccgaaggaggaaacagaaagggggggcataagaggggggagaggaaggagaggaagtatagaacagagacaataccggggtcgggagtttatcggcaggtcgtcggg

SEQ ID NO: 37824 - DNA, 623 bp, Macaca Mulatta
ctacaaatgtgaagaatgtggcaaagcctttagtgagtcctcaaaccttaatagtcataagagaattcatcctggagagaaaccctacaaatgtgaagaatgtggcaaagcctttagtgagtcctcaagccttaataatcataagagaattcatactggagagaaaccctacaaatgtgaagaatgtggcaaagcttttaaaatacgtgcataccttactacacataacagaattcatactggagagaaaccctacaaatgtaaagaatgtggcaaagcctttagtgggtcctcaagccttaataatcataagataattcatagtggagagaaaccctacaaatgtgaagaatgtggcaaagcttttaaaatacgtgcataccttactacacataacagaattcatactggagagaaaccctacaaatgtgaagaatgtggcaaagcctttaaccgatcctcatcccttactatacataacagaattcatactgtagaaaaaccttacaaatgtaaacaatgtggcaaaggttttagccaatcctcatcccttactaaacataagataattcatactacagagaaaccctacaaatgtgaaaaatgtggcaaagcctttaaca

SEQ ID NO: 37825 - DNA, 859 bp, Macaca Mulatta
  misc_feature (1)...(859): n = A,T,C or G
ggnnnnnnnnnnnnnnnnnnnnnnnnnnnnnnnnnnnnnnnnnnnnnnnnnnnnnnnnnnnnnnnnnnnnnnnnnnnnnnnnnnnnnnnnnnnnnnnnnnnnnnnnnnnnnnnnnnnnnnnnnnnnnnnnnnnnnnnnnnnnnnnnnnnnnnnnnnnnnnnnnnnnnnnnnnnnnnnnnnnnnnnnnnnnnnnnnnnnnnnnnnnnnnnnnnnnnnnnnnnnnnnnnnnnnnnnnnnnnnnnnnnnnnnnnnnnnnnnnnnnnnnnnnnnnnnnnnnnnnnnnnnnnnnnnnnnnnnnnnnnnnnnnnnnnnnnnnnnnnnnnnnnnnnnnnnnnnnnnnnnnnnnnnnnnnnnnnnnnnnnnnnnnnnnnnnnnnnnnnnnnnnnnnnnnnnnnnnnnnnnnnnnnnnnnnnnnnnnnnnnnnnnnnnnnnnnnnnnnnnnnnnnnnnnnnnnnnnnnnnnnnnnnnnnnnnnnnatttaaactaggtcgaaaaagggaagggaggccgaaacccccctaaaaccgggttttcaagcccaatccttaatagcccccctattaaattttttccggcccaaacagaaatatttgccaccaagattgccacgcgaagggttgaggaaccctgtgtcgggcccccccttggccccctccgaaagaagatttttcttaaaaaacaattctgctttgtgggcgcggccggggcgccccatctagagggaaaatgggcacaactggggcctaataccctgggtttttcccaaggggacaaacacncggggaccccctgaaacgagcgcgccctgtgaggaattcttccccctcacaatacacaaagacaatccgcccgcccggga

SEQ ID NO: 37826 - DNA, 673 bp, Macaca Mulatta
gtggttgatgctttaaaatgtactgttctatcctttttgtcttcagctgttatctaaaagaagtgcttgttttgcactgggccccacttacacagtgcagggttaaagttgatttggaaaaattaatttctgcaaagaatagctgtcagagtgactataaatttatcaagtctattcaaatagcctctacccagtgtcttctgagtaacctttaagactacagaggactaaagtgccttaaaaataatgtctcttctgtgctccagttaattttcattattttgctttgtttgatagttaacagtgggttaccttgctggagtgaaatttggcctaaaaggaagcacagaagaatcagataagaaaacattgtatggtcctaaccgtggacggtaatgacaggcattggtggcagctctgtgtgaggtgctggaactgtgctgtggacacatctgtaggtcaggaatgtgatccaagggtccacttaccaactcaccataaacctgagaagtgttcttgggaattagaaaacaaatgttcatcaagatatattttgactatctggacacaaaagtgggcatttctttgaagtgtctgtataggtcttagtactttgtagttagtttagcacaaaactgggattcgtaaacttagacctgggtaatatgatgat

SEQ ID NO: 37827 - DNA, 789 bp, Macaca Mulatta
  misc_feature (1)...(789): n = A,T,C or G
ggggggaggccagtactcagcattggtactgtgtattatctcaagtatctagtttctatccgaaaattataagacattcagagaaacaagaaaatgggacccagacatcccattaaaaaagcaagcagcagttactacctgtgagagtgactggttggatttagcacagagctttcaaggtagccattattaatatattcagcaaactaaaggaaatcatggttaaagaaattaaggcgtgatgatagtttcacatgaaatagagaatattaataaagagaaatcattttaaaaagaactaaatggaaattctggaaaggaaaatcacagtaactgaaatgtaaaactcacttgtggggcacaacagtacatttcaactggcaaaagaaagagttaatgaacttgacgatagattaatagaaattacacaaagaacatgaagaaaaacaatgtagaaaaaaacaggctcagaaaaatatgggaagctgttaagtgtgccaacatgcttgtaataggagtatcaaaaggagaggagaaagagaaatgactagaaaaaattttaagtaataatatcccaaaatatcccaaatttatttaaaaaccataatttataccaaatacaaaaaacaataaattatatattataatatatggtgaagttcagtgaaattccacatgggaataagatgccaaaaagattcacaaaaaaggaatatctttgggtaaaaatgcttaaaaaaccnnnnnnnnnnnnnannnnnnnnnnnnnnnnnccccttgtccggcccc

SEQ ID NO: 37828 - DNA, 665 bp, Macaca Mulatta
  misc_feature (1)...(665): n = A,T,C or G
ataaaaacaaacaacttgttaaaagaaaatatctgaaatgtgataangttcttatgccatgttaatttcatgtgtcaacttcaacatttacatgtattatttcattatgtaaaatgttttagcaatttaatattttgcacagttagcaaactttgtatgtcatttccttcaaggtatcatgcagagtttacatgaaatttataaggttttaagttgtttgcatgtgaaaatcaaatacatactttggtagtctttgaatacaaagtcatctgctcttgtttttcaagaattttgagacacaaagttgtatgtaaaggaatatatttgccgttttataggtagatttgctcaaaaagagtgaatcaacttaacatgtacaaatgatagctgtgaaactgtagaatatctatgtgtcaggcttggagttcattgtgacctccaaattttgcctgaaggaccagctgggcaaagcattttttaaatgttcagaggccaaaagatnnnnnnnnnnnnnnnnnnnnnnnaaaatcctacctctttaaacagccttcaaataagaatcctcagtgcaatcattattttgattcttttggtacctgttttcctggagttcccaattttattattttggagtggctccaagcattaagaggtttaatctttga

SEQ ID NO: 37829 - DNA, 222 bp, Macaca Mulatta
aacgcgcccctgcaggccataatcatcctgcccgaaatgggagacaaggatggtgatagcaaggtgggcgtatacaacgcaaagccttcaaccaggtggagggcaagcccgagaggattggcccttacctcgatcacctacaagctggggaagcactgcccggccaggcatcagaaccacccactcttcccgtttcaccgccatcaaggagtctgctcagcc

SEQ ID NO: 37830 - DNA, 704 bp, Macaca Mulatta
  misc_feature (1)...(704): n = A,T,C or G
tggaaagagagctggccttgtcactagaacaagtcaaagaggaggaggagttgaactataccatagatgctcaggaggaatccctgagggagctggaattggagacagcaaagctggnnaaaagtaatgcaatcctaagcaggaatgtggtggagcttcagaaaaaggtaaggggagcaatgggttttttaggnnnnnnnnnnnnnnnnnnnnnnnnnnnnnnnnnnnnnnnnnnnnnnnnnnnnnnnnnnnnnnnnnnnnnnnnnnnnnnnnnnnnnnnnnnnnnnnnnnnnnnnnnnnnnnnnnnnnnnnnnnnnnnnnnnnnnnnnnnnnnnnnnnnnnnnnnnnnaaagaaataccaggaagttctgaggaagatgaaagaggaaaaggagacgctgcttcttgagaaagaaannnnnnnnnnnnnnnnnnnnnnnnnnnnnnnnnnnnnnnnnnnnnnnnnnnnnnnnnnnnnnnnnnnnnnnnnnnnnnnnnnnnnnnnnnnnnnnnnnnnnnnnnnnnnnnnnnnnnnnnnnnnnnnnnnnnnnnnnnnnnnnnnnnnnnnnatttccagtatctcaccttcatggccctagtcttcattaggttgctggcttatgtgtttttccatctgcagtacataaacccagatcttttcgtggatgtcctgcccctggtgctgagcagggacaccttggaga

SEQ ID NO: 37831 - DNA, 757 bp, Macaca Mulatta
  misc_feature (1)...(757): n = A,T,C or G
ggatagaaattatgtaaaaactagacattctcctctcccttacacagtcagttgcatctttcccaaaaatggaaggggaaaaagctttctttggctgagccatatgcaaaaaattatggaacatctgtgtaagtaacaacatacaacaagacaaattattggtggtaaaaggcaaagcccttgtttcaaaaacatgtctggaaatagtgtgtatacagaaccttcctttgtgctaattactcataatagctgtcagctttgtgtaccacaggctgggctgttaataactagtggtcggagtacggtgnnnnnnnnnnnnnnnnnnnnnnnnnnnnctagcctttcttccctctttcctgccttcttttcattgttgttacacaaatcacatagccttattctaatagttgctggaagaccaaatcagagatgtgggggattcggggactcgcgacatcttgtcacccctgaagtggccgttttcctccaacgcttgtctgaggagtgcagggacctttgaggtccaagccatgtatcagtaaacttcagaattttgttcctaacatttaattctattctcagtctcaacacccgccacaaaaataatgtcactccaggcaaatttagtcgcttacggattctgagtctcattgtgattttgcctgagtggcaaggttttcaggcacgtgtacttaaaaatgtgatgtgggtagaattttgcctcccgctaggaaatccaccagaccttggggtttga

SEQ ID NO: 37832 - DNA, 428 bp, Macaca Mulatta
agggggcacataggtataccgcttgcctcacccagcccatctcagtgtttctaagccatttcttctggattgacctgtgtgttaattgtacttgcccagccccatctcagtgtttctaagccatttcttcttgattgccctgtgtgttaattgtaagttgtccacactggtagagggagtggcagtgtagatgatccaaattagccagtaatcagtttctcttcagccttggaatgtatttctctagtgttttcccaccctagcagatttgcctcattaatatgtattgcttaagttgatattaaagtgagcttgcttgccttgaaaaggggggaatgaagctggaggtatgcttagagcacaccagagagggggcaggccagcacaaaagtggagaggtgggtgttcactggaaagatggatgatgc

SEQ ID NO: 37833 - DNA, 793 bp, Macaca Mulatta
gggaataatgccattgatgatgggggtcagaaaggtatattaactcaacatagagggcttttagatttttcttcaaaaaattttcaagaaaaatactcttttaccctccaaagtaacagctcttagttgctccaaaatatgctctttgatttacttcttatttttaattaaagatggtaatttattgaacaatgaaatccgtaatatattgatttaaggacaaaagtgaagtcttagaattataaaaatacttaaatattatatattttccatttcataattgttttcctttctctgtggctttgaagtttttgactattttacaatgttaattactaggtaacttgccatatttctggttctgtattaagttctaccctttataatgctgttattgtaaagttggtttttagcatttgtctgtagcaatagaaattttactaagtctttgttcttccagtaaggtttttcttttctcagtaagtccctaagaaaacatttgtttgccactcttactatttccagtgttgaattgttcaagctgaaacaaaatttggtgagaaacaatagggtccttttctggtgaatataggttcctgctttaagaatgtggaaatccattcctttatataactgatatacacacagattaattaaatcgtgagaaataattcacacgtaacaagtaggtaacatgcatgaagttttgaattttttaaaaaaacttttactgtttgacaaaatgcagaacccaaattagtacttttcttagaccagttttaaccctcacgcc

SEQ ID NO: 37834 - DNA, 1687 bp, Macaca Mulatta
  misc_feature (1)...(1687): n = A,T,C or G
aagacagctttgctggagggcctggaggtggaccagtacatgctgggcatcctgatttacattcagaanctctgactatgaggagatcaccatcgaccccacatgcagctggaagccagtgcccgtgaagcctgacatgcacatcaaggaggagccggacgggccggcactgaagcgctgccgcaccgtgagccccgcccacgtgctcatgcccagcgtgatggagatgatcgccgccctnnnnnnnnnnnnnnnnnnnnnnnnnnnnnnnnnnnnnnnnnnnnnnnnnnnnnnnnnnnnnnnnnnnnnnnnnnnnnnnnnnnnnnnnnnnnnnnnnnnnnnnnnnnnnnnnnnnnnnnnnnnnnnnnnnnnnnnnnnnnnnnnnnnnnnnnnnnnnnnnnnnnnnnnnnnnnnnnnnnnnnnnnnnnnnnnnnnnnnnnnnnnnnnnnnnnnnnnnnnnnnnnnnnnnnnnnnnnnnnnnnnnnnnnnnnnnnnnnnnnnnnnnnnnnnnnnnnnnnnnnnnnnnnnnnnnnnnnnnnnnnnnnnnnnnnnnnnnnnnnnnnnnnnnnnnnnnnnnnnnnnnnnnnnnnnnnnnnnnnnnnnnnnnnnnnnnnnnnnnnnnnnnnnnnnnnnnnnnnnnnnnnnnnnnnnnnnnnnnnnnnnnnnnnnnnnnnnnnnnnnnnnnnnnnnnnnnnnnnnnnnnnnnnnnnnnnnnnnnnnnnnnnnnctgctcccagaactgaccaaccctgatgagctactgtcctacttgggaccgcccgacctccccacaaacaacaatgacgacctgctctctctgtttgagaacaactgatcctgtgtttaccccaggcctggcggggacacgctcacagatgtcaccacagccctgcccttcatgcccagccccctgagacacccggtggtctctcccaaacctcccccaaaacacacctggagccagagccttctgccgccagccctnnnnnnnnnnnnnnncagccctgtgctcgattggaggggctcccagcccggcagccctcgccacctccctctaccaagcctgctgctgcagaacggtttttgctgaggtgcccctgcccagccctctccagccttgtccacgcacacctcacacccctggtctcacagcctcacaccttgtccttccacccctgcctgcccccgcccagcctgcttcttgtccagcattgatccttctgtttcaacaactcctccactgggcagagctgggcatctggcggggctggctctgtcccctgcgcctttggctccagtggtccctgtgcctggcagtccagctcttggaacctcgctgaatggcagcctcttgggggcctggagctctggcagcccagccatgtgtcgtgtcgggttcctctccccaccccagcttcaggcagaatcctcggggtgggggagctacaaagcacaacaatgtacatagtgtagaaacactaacagctgggaaaggggagccagctgtccagccagcatgttcctgttgtacagcccggtctccctgtgcactaagctccttcccatgtgcagacagatcagggaggaacctccagtgggtgggggacaatgagctnnnnnnnnnnnnnnnnnntgggtgggctctcagattcagctctgtttaaaaggtctagcgggctgcgctccc

SEQ ID NO: 37835 - DNA, 134 bp, Macaca Mulatta
caagcaggcagcgtccagagcacctgcgaacaccaggtccggcagcatctgtcttttcccgcagcgtgcagcgcctgaccatgaggaacacgagcaaggaacttcagggcgccacgcaccgctacgctccctgc

SEQ ID NO: 37836 - DNA, 672 bp, Macaca Mulatta
gattcatgctgtcgcgggaaccccgaaggtggggccccacgtaacaagaagatgacccgaagttgctccgcagtgggctgcagcacccgtgacaccgtgctcagccgggagcgcggcctctccttccaccaatttccaactgataccatacagcgctcaaaatggatcagggctgttaatcgtgtggaccccagaagcaaaaagatttggattccaggaccaggtgctatactgtgttccaaacattttcaagaaagtgactttgagtcatatggcataagaagaaagctgaaaaaaggagctgtgccttctgtttctctatacaagattcctcaaggtgtacatcttaaaggtaaagcaagacagaaaatcctaaaacaacctcttccagataattctcaagaagttgccactgaggaccataactatagtttaaagacacctttgatgataggtgcagagaaactggctgaggtgcaacaaatgttacaagtgtccaaaaaaagacttatctctgtaaagaactacaggatgatcaagaagagaaagggtttacgattaattgatgcacttgtagaagagaaactactttctgaagaaacagagtgtctgctacgagctcaattttcagattttaagtgggagttatataattggagagaaacagatgag

SEQ ID NO: 37837 - DNA, 300 bp, Macaca Mulatta
tgaggaaccacttaattaggccccactggatgtttgcaatggacaacatcatccgccgagcggtgcaggccgcggtcaccattctcatcccaggtgagcgccccctttgtggtcaaggtcagctttaggccgtgaaaagataagaagtatcctcttcattcaacagttgttgcttttctcttttccatcttggttatctacttccttgcaattaaatgcctgtatgatagacctcttgcagggctgatgctgcagttctagtaacaggtcatggtgctgtatttacatgttcctgaagca

SEQ ID NO: 37838 - DNA, 763 bp, Macaca Mulatta
  misc_feature (1)...(763): n = A,T,C or G
gggcaagaaaatgaaaaattgaaggctgaattagaaaaacttaaagctcattttgggcatcagttgagcatgcactatgaatccaagaccaaaggcacagaaaaaattattgctgaaaatgaaaggcttcgtaaagaacttaaaaaagaaactgatgctgcagagaaattacggatagcaaagaataatttagagatattaaatgagaagatgacagttcaactagaagagactggtaagagattgcagtttgcagaaagcagaggtccacagcttgaaggtgctgacagtaagagctggaaatccattgtggttacaagaatgtatgaaaccaagttaaaagaattggaaactgatattgccaaaaaaaatcaaagcattactgaccttaaacagcttgtaaaagaagcaacagagagagaacaaaaagttaagaaatacactgaagaccttgaagaacagattaagattcttaaacatgttcctgaaggtgctgagacagaccaaggcctcaaacaggagcttcaagttcttagattagccaatagtcagctggataaagagaaagcagaatttaatccatcggatagaaactaacaaggacccaaagggaagctggaaagcaccttaccctgaaggcctgatcaaattnnnnnnnnnnnnnnnnnnnnnatctaggagaacaacaggcttcaaaaaatgttgccagaattcctaaggaaaaaaaccataccaatttttttaaaggggagggggaaaatac

SEQ ID NO: 37839 - DNA, 446 bp, Macaca Mulatta
atacgagtaatgagtccttttgtccacccacccacacgcgcacgcgttgccgaaatatccatattgtttagtgctttgccccggatttatccagctcactgcttcaattcttcactccctttgcggcccccgacaccaccggcctttgtggattccaaagcgtttatccagttctccccaaccctctcctgctaagcccgaactgcaaagcaaaacggacggaaaaggaatcttttatgccacagcggtttgtctgtttgttttctcttttcccacttcatttgctgcacccgacctttacatgtgagcggaagcggtgttctcgctcttgggcactaggggagcagactgggagccaggaaagtcaaacgctggcctcggtccggcgtggggagccggggaagccgcgggagggaggcggtgggccggggagagccctccgaagg

SEQ ID NO: 37840 - DNA, 3797 bp, Macaca Mulatta
  misc_feature (1)...(3797): n = A,T,C or G
gggtccagcctctcctactgttgcagggctagggctagtagctgcagattctgaccccacaactgccttagacatgccagnnnnnnnnnnnnnnnnnnnnnnnnnnctatgaaatgagcagtcagtccaaatagatgcactaaagaagggctgtgggatggacccagctgtagcctggggctacagtcaggcttccagggtactcaagcagctgaaatctggggtagaagccccgggtatgggaggcaggactcagaatctaggccaagcctccacaggaatcccctctggagagcccgggcactctgcaggaggggcagcaggcagcaggtgcaccaggagcacgtttcacaaggtgcccaatattgcatctcctcagatgggcagcgagttggaaagtggacacagtaggcagggtggcggctgctccccacggccaggagtccagcccagcacccacctgagtccacctctgtcttgatcagttgggtcatccgtgctctgggctctctagtctcacctcaaagagggaggtctttggggcgaccaggtgagctggcccttgtgggaggatgtaaccgactcctgagcctggcaagccaggaagcccctcgccagcatccctacccccacctctccagccccctcattccctgatcctcccatccgctccccgccccagcagtttcctctgctcacgctcatctcttttcctgctcccaggctcgcctggtcagtgtccttcactctcctctgagtctccctctttccaagccacctccactctacttgacacattctccattaagacaccagagtacacaagctcaagtccctgcacctcacctttactcccggacatgggagggagatgacatgaagaaccaaatgccactaggcaagagatctggggtatgcagaggggcagagtgaggctgtggaagctccagggactctctgcaggannnnnnnnnnnnnnnnnnnnnnnnnnnnnnnnnnnnnnnnnnnnnnnnnnnnnnnnnnnnnnnnnnnnnnnnnnnnnnnnnnnnnnnnnnnnnnnnnnnnnnnnnnnnnnnnnnnnnnnnnnnnnnnnnnnnnnnnnnnnnnnnnnnnnnnnnnnnnnnnnnnnnnnnnnnnnnnnnnnnnnnnnnnnnnnnnnnnnnnnnnnnnnnnnnnnnnnnnnnnnnnnnnnnnnnnnnnnnnnnnnnnnnnnnnnnnnnnnnnnnnnnnnnnnnnnnnnnnnnnnnnnnnnnnnnnnnnnnnnnnnnnnnnnnnnnnnnnnnnnnnnnnnnnnnnnnnnnnnnnnnnnnnnnnnnnnnnnnnnnnnnnnnnnnnnnnnnnnnnnnnnnnnnnnnnnnnnnnnnnnnnnnnnnnnnnnnnnnnnnnnnnnnnnnnnnnnnnnnnnnnnnnnnnnnnnnnnnnnnnnnnnnnnnnnnnnnnnnnnnnnnnnnnnnnnnnnnnnnnnnnnnnnnnnnnnnnnnnnnnnnnnnnnnnnnnnnnnnnnnnnnnnnnnnnnnnnnnnnnnnnnnnnnnnnnnnnnnnnnnnnnnnnnnnnnnnnnnnnnnnnnnnnnnnnnnnnnnnnnnnnnnnnnnnnnnnnnnnnnnnnnnnnnnnnnnnnnnnnnnnnnnnnnnnnnnnnnnnnnnnnnnnnnnnnnnnnnnnnnnnnnnnnnnnnnnnnnnnnnnnnnnnnnnnnnnnnnnnnnnnnnnnnnnnnnnnnnnnnnnnnnnnnnnnnnnnnnnnnnnnnnnnnnnnnnnnnnnnnnnnnnnnnnnnnnnnnnnnnnnnnnnnnnnnnnnnnnnnnnnnnnnnnnnnnnnnnnnnnnnnnnnnnnnnnnnnnnnnnnnnnnnnnnnnnnnnnnnnnnnnnnnnnnnnnnnnnnnnnnnnnnnnnnnnnnnnnnnnnnnnnnnnnnnnnnnnnnnnnnnnnnnnnnnnnnnnnnnnnnnnnnnnnnnnnnnnnnnnnnnnnnnnnnnnnnnnnnnnnnnnnnnnnnnnnnnnnnnnnnnnnnnnnnnnnnnnnnnnnnnnnnnnnnnnnnnnnnnnnnnnnnnnnnnnnnnnnnnnnnnnnnnnnnnnnnnnnnnnnnnnnnnnnnnnnnnnnnnnnnnnnnnnnnnnnnnnnnnnnnnnnnnnnnnnnnnnnnnnnnnnnnnnnnnnnnnnnnnnnnnnnnnnnnnnnnnnnnnnnnnnnnnnnnnnnnnnnnnnnnnnnnnnnnnnnnnnnnnnnnnnnnnnnnnnnnnnnnnnnnnnnnnnnnnnnnnnnnnnnnnnnnnnnnnnnnnnnnnnnnnnnnnnnnnnnnnnnnnnnnnnnnnnnnnnnnnnnnnnnnnnnnnnnnnnnnnnnnnnnnnnnnnnnnnnnnnnnnnnnnnnnnnnnnnnnnnnnnnnnnnnnnnnnnnnnnnnnnnnnnnnnnnnnnnnnnnnnnnnnnnnnnnnnnnnnnnnnnnnnnnnnnnnnnnnnnnnnnnnnnnnnnnnnnnnnnnnnnnnnnnnnnnnnnnnnnnnnnnnnnnnnnnnnnnnnnnnnnnnnnnnnnnnnnnnnnnnnnnnnnnnnnnnnnnnnnnnnnnnnnnnnnnnnnnnnnnnnnnnnnnnnnnnnnnnnnnnnnnnnnnnnnnnnnnnnnnnnnnnnnnnnnnnnnnnnnnnnnnnnnnnnnnnnnnnnnnnnnnnnnnnnnnnnnnnnnnnnnnnnnnnnnnnnnnnnnnnnnnnnnnnnnnnnnnnnnnnnnnnnnnnnnnnnnnnnnnnnnnnnnnnnnnnnnnnnnnnnnnnnnnnnnnnnnnnnnnnnnnnnnnnnnnnnnnnnnnnnnnnnnnnnnnnnnnnnnnnnnnnnnnnnnnnnnnnnnnnnnnnnnnnnnnnnnnnnnnnnnnnnnnnnnnnnnnnnnnnnnnnnnnnnnnnnnnnnnnnnnnnnnnnnnnnnnnnnnnnnnnnnnnnnnnnnnnnnnnnnnnnnnnnnnnnnnnnnnnnnnnnnnnnnnnnnnnnnnnnnnnnnnnnnnnnnnnnnnnnnnnnnnnnnnnnnnnnnnttggcctcttgcttaacaggtgagcccagctgctccggtgcacctgccaccctagtgagggtgaaccagcaggcgagtgacatgtctgatagtttggggttacaggaaagattaggttgtgggctgctgggccaggaaggggtgtttattttcagggtttatctactgacttgaccagggagggttataggtacaaccagtttaaagatggaaatcttgagagagcaggcagggacttagtgctgggtaaggcaagcaggcttgtcaaagcagctcttttggggaggccagaatcctgtaccaatgtcgtcagcacgttcatcagctgctgggggagtgccggacagggttaaagcacaggagaacattctggatgataggaatgttctatatcttcaaaggaggtgggatacatgggtaatgcatttgttgaaattcatcaaaatatataccagatctgtgcatttcactgaagataaattatacctcaaattaaaaacattttttaaaagagagatgggccggacgcagtgactcacgcctgtaatccnnnnnnnnnnnnnnnnaggcgggtagatcacctgagtcaggagctcgagaccagcctggaaaacatggtgaagtcctgtctctattaaaaatataaaaattagccagctatggtgacatacgcctgtaatgccagctactcaggaggctgcgtcaggagaattgcttgaacccaggaggctgaggttacagtgagccgagatcctgccattgcattagagcctgggcaaca

SEQ ID NO: 37841 - DNA, 87 bp, Macaca Mulatta
tgtgctagagatctattgtagtggtggtgtctgctacggaatgcttttgatttctggggccaagggctcagggtcaccgtctcttca

SEQ ID NO: 37842 - DNA, 1095 bp, Macaca Mulatta
tggagatttggataaaggttactgaggaattaggtagctgggtggcttactccaggcacgtcttagtaggtaatgtttgagaaaagaaaaaaaatcaggaggtcagggaaagaatgtaaaggtatttgtgagctctgaggggatatagcagcttaagtcccagagaaaaagtgagaggagaaacatttagaggagaaaagggatatgataaattaggccacagaatagtcctaagtcatgtagcaagtctactcttctgctcctgtagatggtgatgtaccttcattttcagggtgggattcacaagggcccttggtgtctggaagcaccaactgaacgtaggccttgaatgatgaagacagtgcccaccacaatgcccacgaggcccacagacaaccccagggcgcagaccacagtctctgtgagctctgacatgggcgctggaatctccggctcccagtgtttcagaagaggctcgtccaggccccagtgctccaccctgcagtcataaatctcatcagcagaagggaggaaggtgaggtaactgatcttgatgaaggaatgatcactcttggagaggaagctggtctcagaaaccccttctgtgactgagcgcccactgctcaaccatgtgatgttcaccacaggaggaaagatgttgtccacaagacagatgagggtgttgggctgacccagtgtcacgggagacttggaaaacactgtgacctcgggaacctcattggtagcagcggtagagttgtagcgtttagtcatgatgttcaagttgtgttttactacagccaagtttctcagtgcaccctgcgggtcaaaacctccaaatttgcttaacacaggcaaccgccagaccgtctccttcctctccaggtccacgtagaactgctcgtctccgtcaaattcatgggtgtactggccagagggaccgtaagactggtacaagtttacaccgcaagaggcaacgtggtcagccacaatgtcttcacctccacaggggctcatcacggtggtcagggcgagggcccccagcatcagagctttgtttaggatcatcttcttcccaaggcagcctcagcagtg

SEQ ID NO: 37843 - DNA, 117 bp, Macaca Mulatta
tgtgacacactgatatcatgtagacactcatatctgtgtgcttctgatgcatacctctgttctctagatatgggtttgctatagagggaagacacataggccctgtggattcactat

SEQ ID NO: 37844 - DNA, 673 bp, Macaca Mulatta
atagccaattactacaacaaataatgcaggaagccagacaaaatcttccacctaacctcccccctgggtccctggtgatgctctatgaacctaaatgggctcaaggtgtcccaggcaacttagagattattgaagacttgaacttggaggagatactggtctatgtagcggataaatgccgtttcctcttgcagaatggttattctccgagggatattgctgtgcttttcaccaaagcaagtgaagtggaaaaatataaagacaggcttctaacagcaatgaggaagagaaaaatgtctcagctcgatgaggaatgtgatttgttactacaggttggtgacgcattggatgttctgaccaatcacattgtgttggacagtgtctgtcgattttctggcctggaaagaaatatcgtatttggaatcaatgcaggagtaacccaacaagctggggtctacaatcttctgctctgtttggcttctagggcaaaaagacatctgtatattctgaaggcttctgtgtgacaggaaaacccaagcctaagaaacaattaagtgattctcatctctaattaactgtgaaaccatttgatccaaacatgtaggcacacactcacttactaagtcacatacttttctaggtgctggggattgaggacgaatcgatgtaagat

SEQ ID NO: 37845 - DNA, 1307 bp, Macaca Mulatta
  misc_feature (1)...(1307): n = A,T,C or G
gactgcttctgggagcgtgacagttggctgctggagagaaaggggcactggcactgagagacctccagactggacatggccctgagcccaggggctaacctggtcttccatgaagacccaaagatgacaccaagtctcccctcctgtggggccccaggattagggtctggtaccatccctcggccccacccagacacggctcatgtgcctatgttgaatctactcccaagtcctggcttggctctcgttccagatcttaatccttctctgagtcctgtctcaggggaggcctcgggcctggtgcctgaaaacacccccagacctgatgacagcagggccgtaactccagcctccctccacatcaccagttcttgctctggtgaagccctggacctggattccatggatgtctcaaggcctgaatcacaggggcacctctgtccagcctcaaaccccattctgagtcccagctctactgaggcccctggtctgagctccgggaaccaccctcagtcaaattctgaagatgccttcaagtgcctctcaagtaagatttttgagttgggtcagagaaactccaacccttctaggcatgaattaaacccnnnnnnnnnnnnnnnnnnnnnnnnnnnnnnnnnnnnnnnnnnnnnnnnnnnnnnnnnnnnnnnnnnnnnnnnnnnnnnnnnnnnnnnnnnnnnnnnnnnnnnnnnnnnnnnnnnnnnnnnnnnnnnnnnnnnnnnnnnnnnnnnnnnnnnnnnnnnnnnnnnnnnnnnnnnnnnnnnnnnnnnnnnnnnnnnnnnnnnnnnnnnnnnnnnnnnnnnnnnnnnnnnnnnnnnnnnnnnnnnnnnnnnnnnnnnnnnnnnnnnnnnnnnnnnnnnnnnnnnnnnnnnnnnnnnnnnnnnnnnnnnnnnnnnnnnnnnnnnnnnnnnnnnnnnnnnnnnnnnnnnnnnnnnnnnnnnnnnnnnnnnnnnnnnnnnnnnnnnnnnnnnnnnnnnnnnnnnnnnnnnnnnnnnnnnnnnnnnnnnnnnnnnnnnnnnnnnnnnnnnnnnnnnnnnnnnnnnnnnnnnnnnnnnnnnnnnnnnnnnnnnnnnnnnnnnnnnnnnnnnnnnnnnnnnnnnnnnnnnnnnnnnnctgagcagtcagcaggatgatgccgaggacaacagcatccacactgtacccctggaagagaatctggagagctggagtgagatggccagcattaaggtggaccagttcccgctgggactccccacctccaaccccgcaggcaaggatgccatgaccttgcaaggcatccctgaggg

SEQ ID NO: 37846 - DNA, 768 bp, Macaca Mulatta
  misc_feature (1)...(768): n = A,T,C or G
ggatggcacaatctcagcttactgcagcctccnnnnnnnnnnnnnnnnnnnnnnnnnnnnnnnnnnnnnngaatagctgagactacagttgcacannnnnnnnnnnnnnnnnnnnnnnnnnnnnnnnnnnnngcggggttttgtcattttggccacgctagtcactcctggcctgaagtgatccgctcaccttgggctcccagnnnnnnnnnnnnnnnnnnnnnnnnnnnngttcctggcctgcagataagttttttaaaacttatggatttgtaatcagcaatttatttcctaggtttttcttattgctctctatagccnnnnnnnnnnnnnnnnnnagccaaatactttgagagtttgctcaatcaaatttccctctaaatgaaacaaatacattaccatcttcatttacaaagcctttactgcatgcattcccttaatatactttagtgataagccatctgccttacaagagttgagcagattgtatgaggcatttgtgaagtttctagcacataggtgatggtagatttttgttttaagctggacttgttccaagtataatattgttagggattagaaaacccaaaaactgaaaaattgattttttccagctctcaaaaaaaggtattttgcctttggggtgggaagggaaaaaagcttgttttaacaaactaaannnnnnnnnnnnnnnnnnggtttgccttgggggcccaaatttgccaaaaaattggtggttttaaatttgggaaaggagacgcccccaca

SEQ ID NO: 37847 - DNA, 1364 bp, Macaca Mulatta
  misc_feature (1)...(1364): n = A,T,C or G
aaagggcgataatgttctggtgaacacctacagtggagtggtgaaaatctccgattttgggacctcaaaacgtcttgcgggtgtgaacccctgcacagagacttttactggnnnnnnnnnnnnnnnnnnnnnnnnnnnnnnnnnnnnnnnnnnnnnnnnnnnnnnnnnnnnnnnnnnnnnnnnnnnnnnnnnnnnnnnnnnnnnnnnnnnnnnnnnnnnnnnnnnnnnnnnnnnnnnnnnnnnnnnnnnnnnnnnnnnnnnnnnnnnnnnnnnnnnnnnnnnnnnnnnnnnnnnnnnnnnnnnnnnnnnnnnnnnnnnnnnnnnnnnnnnnnnnnnnnnnnnnnnnnnnnnnnnnnnnnnnnnnnnnnnnnnnnnnnnnnnnnnnnnnnnnnnnnnnnnnnnnnnnnnnnnnnnnnnnnnnnnnnnnnnnnnnnnnnnnnnnnnnnnnnnnnnnnnnnnnnnnnnnnnnnnnnnnnnnnnnnnnnnnnnnnnnnnnnnnnnnnnnnnnnnnnnnnnnnnnnnnnnnnnnnnnnnnnnnnnnnnnnnnnnnnnnnnnnnnnnnnnnnnnnnnnnnnnnnnnnnnnnnnnnnnnnnnnnnnnnnnnnnnnnnnnnnnnnnnnnnnnnnnnnnnnnnnnnnnnnnnnnnnnnnnnnnnnnnnnnnnnnnnnnnnnnnnnnnnnnnnnnnnnnnnnnnnnnnnnnnnnnnnnnnnnnnnnnnnnnnnnnnnnnnnnnnnnnnnnnnnnnnnnnnnnnnnnnnnnnnnnnnnnnnnnnnnnnnnnnnnnnnnnnnnnnnnnnnnnnnnnnnnnnnnnnnnnnnnnnnnnnnnnnnnnnnnnnnnnnnnnnnnnnnnnnnnnnnnnnnnnnnnnnnnnnnnnnnnnnnnnnnnnnnnnnnnnnnnnnnnnnnnnnnnnnnnnnnnnnnnnnnnnnnnnnnnnnnnnnnnnnnnnnnnnnnnnnnnnnnnnnnnnnnnnnnnnnnnnnnnnnnnnnnnnnnnnnnnnnnnnnnnnnnnnnnnnnnnnnnnnnnnnnnnnnnnnnnnnnnnnnnnnnnnnnnnnnnnnnnnnnnnnnnnnnnnncagagctccaagcccactttgagcctacctgtgagactgaaggggtagataaggacatggatgaagcagaagagggctatcccccagcggccagacctggccaggaggcccagccccaccagcagcacctgagcctccagctgggtgagctcaggcaggagaccaacagncagacttttggaacacctagttgaaaaagagagagagtaccagaatcttctgcggcaaactctagaacagaaaactcaagaattgtatcaccttcagttaaaattaaaatcaaattgt

SEQ ID NO: 37848 - DNA, 196 bp, Macaca Mulatta
  misc_feature (1)...(196): n = A,T,C or G
natcaaccagttcttcgggaaggcgaaccccaaggctccaccgcccagcctgactgactgcattggcacggtggacagcagggcagaatccattgacaagaagatttctcgattggatgctgagctagtaaagtataaggatcagatcaagaagatgagagagggtcctgcaaagaatatggttaagcagaaagcc

SEQ ID NO: 37849 - DNA, 552 bp, Macaca Mulatta
ctgcacctgctcgactggctggctgcgcgctgtccgcacgcgcgcttcctgctcagtggcgacgacgacgtgttcgtgcacaccgccaacgtagtccgcttcctgcaggcgcagccaccgggccgccacctgttcaccggccagctcatggagggctccgtgcccatccgcgacagctggagcaagtacttcgtgcccccgcagctcttccccgggtccgcttacccggtatactgcagcggcggcggcttcctcctgtccagcctcacggcccgggccctgcgcgcggccgccctccacaccccgctcttgcccatcgacgacgcctacatgggcatgtgtctggagcgcgccggcctggcgcccagcggccacgagggcatccggccctacggcgtgcagctgcctggcgcgcagcagtcctccttcgacccctgcatgtaccgcgagctgctgctggtacaccgcttcgcgccctatgagatgctgctcatgtggaaggcgctgcacagccccacgctcagctgtgaccggggacaccgggtctcctga

SEQ ID NO: 37850 - DNA, 102 bp, Macaca Mulatta
aggtagagtacgtgtttacagataaaactggtacactgacagaaaatgagatgcagtttcgggaatgttcaattatggcatgaaataccaagaaatcaatgg

SEQ ID NO: 37851 - DNA, 760 bp, Macaca Mulatta
  misc_feature (1)...(760): n = A,T,C or G
ggggcggccgccatgttctctgtgtgtctttgtcttttgtgtgttctttcattccccaccacccccggcacagaccccaacaagtggcgcagcgagcagggtcagcacgggttcccctgaggacagcctgagtttaaaatctctaccaccaagtgaggaagacaatgatgatgtccagattttaccatcagatgtccagggttcttctgaggacaacctgagtttagtatgcccaccaccaaatgaagatgatgatggtaatcatgatgttgatgatgcccagatttcaccatcatctgtcctgggtggctgttaccagtttgatagcagttgttgttcttctgacgacaacctgagtttagtgtgcctgccaccaagtgaagttgatgatttggatgatgatgatgatgcccagatttcaccatcacatgtccaggcttggcctgaggatggcctgttcttacgatgctcaccacgatacaaaannnnnnnnnnnnnnnnnnnnnnnnnnnnnnnnnnnnnnncctatataaaagcttggcttaaaaaagaaacttgaccgtggagagtctaattgatgaggaaattcatcccaggtgaaagcctttccgaagaagctgaaccggggtgcttgacccaaaggacaggccagttgcattcctacagggccccccaccttttgtcccctggaaaattctcaagttcccccccaagggtccgaggaaaaacttaacaccaagggccaacttcccaacccatt

SEQ ID NO: 37852 - DNA, 620 bp, Macaca Mulatta
gtgtcgtggctcgagagcgagagtcacgtcccggcgccagcccagcccgacccaggcccaccgtggtgcacgaaaaccacctcccagccatgcactccctcctgctcctcagcgccttctgccttcttgcggtggctctgaccgcggaggtgaagaaacctgcagctgcagcagctcctggaaccgcagagaagttgagtcccaaggcggccacgcttgctgagcgcagcgccggcctggccttcagcctgtaccaggccatggccaaggaccaggcagtggagaacatcctggtgtcccccgtggtggtggcctcgtcgctggggctcgtgtcgctgggtggcaaggcgaccacggcgtcacaggccaaggcagtgctgagcgctgagcagctgcgcgacgaggaggtgcacaccggcctgggcgagctgctgcgctcactcagcaactccacggcgcgcaacgtgacttggaagctgggcagccgcctatacggacccagctccgtgagcttcgctgatgacttcgtgcgcagcagcaagcagcactacaactgcgagcactccaagatcaacttccgtgacaagcgcagcgcgctgcagtccatcaacgagtgggct

SEQ ID NO: 37853 - DNA, 459 bp, Macaca Mulatta
gaatctagtagtcccagacctgccctcagggattgcttgctggccccttcctgccagactggaggggctgggggaatcccagcagagggaaggcactccctttacccccattgccaaacagacccccaactccctggattttcctcctctctccatccctgacagttctggccttcccaaactgcttggatattctgcttcctcttgggttgaagcagaccaacttcccccaggaaccccagttggggaaggcctatatatatattttaaaaacaaccccgctttccacctgttcctcccccttcccatgctacaacttctaaccacaacagtgactctgtgcttgtctgtttagttctgtgtataaatggaatgttgtggagatgaccccttcccacgccagctggttcctctcccttggttatggccactaatggaaaccagactagtaagcgacct

SEQ ID NO: 37854 - DNA, 820 bp, Macaca Mulatta
gggggataataagactaaggagataaataactacttctcaataaaggaaaccagtggtgaggaatccattgccttcctgtgctttgtttccagagaagatccgaggtattcatgtaataggtagtaataggtggattaggaagactgttgtattgggttaggcattgaggagaacacagaataaatacgattctgctccagtagcatagggtcttagttgcaagaatctaatgggagaaattatagaaaggttttacacataaaaaatgttacagggattctaggaaagtagttaagtatagggattacttgctcttatcattgtggttagtaaataacacacagagggggctttggtcttgagataagagggtggaaatgaaagatttttggtatgaagtgagcttaagtcagtggttttgccttgaaaattgacatggtgtatggaagaggcttggatgtgagtgggcactgggtactgaagagcgtattcaatttgtatatttctggagtgcgatagagggtttgtgccccggggaaaaagtttggatggggaacaacaatttctcggagaccaatggaatttaggctgcaattcgatcccctgaagcgttcccttttcccgtagacccggtctcccattttccgttctgaaaccttttccccaaaaaccacccttaggggcgccacattttcaaaccaccctccttccggggaaatccgggccctcgtccccccaatgaaccccttacaaacgcttggtacgtacattcaccgtgtgtagcccaggtgccacaggccgctttcgcacattttgtct

SEQ ID NO: 37855 - DNA, 457 bp, Macaca Mulatta
gtgaagagtaagaatttgaattctgacgtggatagtatcttagttagtctaaagatgcctcctaagtctaaagtctccttgggcgaagacatccagttccgcctggcgacaagatttgtggatgaggcagtcacgtgcctgcgagaggggatcttggccacacctgcagagggagacatcacagccatctttgggctcggcttcccgccttgtcttggagggcctttctgctttgtggatctgcatggcacccagaagatagtgggccagctcaagaagtatgaggctgcctgtggaaaacagttcactccatgctagctgctggctgaccacgctaacagccctaatgagaagttctcagtgagcgggtctcatgcctcactcggtcagtgcactaaccccagctgcaggcagtgctggttttccaacagagtggcgtctagatttatcagagtaa

SEQ ID NO: 37856 - DNA, 576 bp, Macaca Mulatta
  misc_feature (1)...(576): n = A,T,C or G
tatgtacgtattagatcgtattggatattttttttcttgaatttttagtggtattattagataggttatttccagttttacttcatgacagaatatctagagtaaacctacttaatacccccatggattctatgaaagtttaatgggatcagaagttggtgacttataagggggaagatattctaccatatttttataataacattattcatgtttcttgtctgaaggacactcaagttacagagcaaaatttctataggttcactagaatgttcataggcatggtcttccagttacaggaaagatcatgttctatctgtggacacctgttgtcctctaccacagctacatgctagagttgttttccacagatcttataaagggcatgatttaggctctttaccctccaacttaatgtttatacacaggaatcgtttactaggttaatgacatttaaactcncctctcttctgtaggtgagagaaaataagtaagtgtcggactgtatcttaccaaagagagaacgagctatgatggaaaatgatcatgtctcctgaatttttcctttaacggata

SEQ ID NO: 37857 - DNA, 310 bp, Macaca Mulatta
taggtacacattattttcgaggtattaacaacctccagcagccatggaacagttggactggacgtaaaaaacatgagctgaagccaaataatcccacagaggaaggactagcaagcattcacagtgttctgtttagaaaagacccctttttgtggcgggctgccctcctctactacactgtttatcgagccagccaaatgtctttttgtgaactcttcagagatattggcaggtttgtcaaggaccccaatacaagatgggattattgtgtacgggccaagaggggatggactgatacttcccaaccagg

SEQ ID NO: 37858 - DNA, 68 bp, Macaca Mulatta
tctggtgagatttgatccacttggacactacttactcacagcaattgttaacccctctaatcaacagg

SEQ ID NO: 37859 - DNA, 943 bp, Macaca Mulatta
  misc_feature (1)...(943): n = A,T,C or G
cgttactttgggtgtggggacaaaaaaccaaaaaggaggttttttttacgatctacgactcaggggaaaatttttttgttggagaataaaggtggattacacgtgtttaaaagagtaccgcgtctgggtaacccatttataaacccctttaaacaaattgggccacggggttagggggctttctccgaaactcttcaatcttaagggagacccccggggtaaagtgttgtctgagcgcgaaaggccnnnnnnnnnnnnnnnnnggnnnnnnnnnnnnnnnaaccaagggagggaaaattttccccccgcccccagggtttttactctgggcccacaaaatggggggggttatttaaaaaaaatatgcaccggggttttggcccccgtttgtctttcgccttgggatccccaagtagtaatgggttttttgccaatccaaattttagggcaatggccaacaacaattttgaaaaaaccagcaacaagccgtgctcttatcccatttttctttcttttctcttaatggaagaaaggcatccaagaggcctatgaagcaaactgttgctgatctcaaatcccaaaggacccaccattcgctctcaatttttttcataatgcatttcattacagcacaaccgtgacccagttctcctgaaccatacaggccacttctttctcatcacgcttccacttgccaatctaaaatgtacagaaacatatgccaatgcatttagaaaatatagcctttataattagtttttaaaaaaaggagaaggaaggaaggaaaagaaaagaaagaaggaaacttttgagattgcaatatccattgcacacacatcttgtggatttcggaaggacagaatatcttgataacgttttgctgataatttccagttgccagatgtaggttcagaccttcctgccgcgattcgtatttgcctct

SEQ ID NO: 37860 - DNA, 3302 bp, Macaca Mulatta
  misc_feature (1)...(3302): n = A,T,C or G
gaaatatgaaacgcaatgggagcagaaattgtttgaataggagaagtaggtttggttctcgagaaagagactggctaagagaagatgtaaagagaggctgtgtttacctttatggagcagacagtaccactgccactacaaccaccaccantgacttacatctcgtcctttgcactgtagagannnnnnnnnnnnnnnnnnnnnnnnnnnnnnnnnnnnnnnnnnnnnnnnnnnnnnnnnnnnnnnnnnnnnncaggagactggaacctactgaacgacctcttcagatcgtttatgattacttatccaggctgggatttgatgatcttgtgcgcatacaggaggaggctacaaatcctgacctcggctgtatgattcgattttatggtgaaaaaccatgccacatggatcatttggatcgaatcctactgtctggcatctataatgtacgcaagggaaagacccagctgcataagtgggctgagcgcctagttgtcctctgtggtacttgccttatcgtctcctcagtgaaggactgtcaaactggaaagatgcacattttgcctctggttggtggaaagnnnnnnnnnnnnnnnnnnnnnnnnnnnnnnnnnnnnnnnnnnnnnnnnnnnnnnnnnnnnnnnnnnnnnnnnnnnnnnnnnnnnnnnnnnnnnnnnnnnnnnnnnnnnnnnnnnnnnnnnnnnnnnnnnnnnnnnnnnnnnnnnnnnnnnnnnnnnnnnnnnnnnnnnnnnnnnnnnnnnnnnnnnnnnnnnnnnnnnnnnnnnnnnnnnnnnnnnnnnnnnnnnnnnnnnnnnnnnnnnnnnnnnnnnnnnnnnnnnnnnnnnnnnnnnnnnnnnnnnnnnnntttctcagctgaagggcctgaacttgtcccataataaacttgggttgtttcctatattattatgtgagatctctaccctgactgagctcaacctttcctgtaatggatttcgtgacctaccaagtcaaattggcaatctgctaacttcaaaccctctgtcttgatggcaactttctgactactttacctgaagaactgggaaatctacaacagctttcctctttgggaatttcgttcaacaactttagtcaaattcctgaggtttatgagaaactcactatgttagataaagtggttatggcaggaaattgcctggaagtcctgaacttaggggtgctgaataggatgaaccatatcaagcatgtggatttaaggnnnnnnnnnnnnnnnnnnnnnnnnnnnnnnnnnnnnnnnnnnnnnnnnnnnnnnnnnnnnnnnnnnnnnnnnnnnnnnnnnnnnnnnnnnnnnnnnnnnnnnnnnnnnnnnnnnnnngaacagctgcattgtgagcggaaccagctgagggagctaacactcagtggcttctcccttcggaccctctattccagttccaacannnnnnnnnnnnnnnnnnnnnnnnnnnnnnnnnnnnnnnnnnnnnnnnnnnnnnnnnnnaaacctgctagagtgtgtccctgactgggcctgtgaagcgaagaagatagaagtattagatgtgagctataatcttctcacagaggttcccnnnagaattctgagtagcttgagtgttagaaaactgatgctaggacacaatcacgtgcaaaacctcccaacactggtagagcacatccccctcgaggnnnnnnnnnnnnnnnnnnnnnnnnnnnnnnnnnnnnnnnnnnnnnnnnnnnnnnnnnnnnnnnnnnnnnnnnnnnnnnnnnnnnnnnnnnnnnnnnnnnnnnnnnnnnnccgcctgcactggcgaggagatttcgagtatgttgcagctgctttatctgaccaacaatctcctgacggatcagtgtatacctgtcctggtggggcacccgcacctgcgaatcttgcaccttgcaaacaatcagttacagacctttcctgcaagnnnnnnnnnnnnnnnnnnnnnnnnnnnnnnnnnnnnnnnnnnnnnnnnnnnnnnnnnnnnnnnnnnnnnnnnnnnnnnnnnnnnnnnnnnnnnnnnnnnnnnnnnnnnnnnnnnnnnnnnnnnnnnnnnnnnnnnnnnnnnnnnnnnnnnnnnnnnnnnnnnnnnnnnnnnnnnnnnnnnnnnnnnnnnnnnnnnnnnnnnnnnnnnnnnnnnnnnnnnnnnnnnnnnnnnnnnnnnnnnnnnnnnnnnnnnnnnnnnnnnnnnnnnnnnnnnnnnnnnnnnnnnnnnnnnnnnnnnnnnnnnnnnnnnnnnnnnnnnnnnnnnnnnnnnnnnnnnnnnnnnnnnnnnnnnnnnnnnnnnnnnnnnnnnnnnnnnnnnnnnnnnnnnnnnnnnnnnnnnnnnnnnnnnnnnnnnnnnnnnnnnnnnnnnnnnnnnnnnnnnnnnnnnnnnnnnnnnnnnnnnnnnnnnnnnnnnnnnnnnnnnnnnnnnnnnnnnnnnnnnnnnnnnnnnnnnnnnnnnnnnnnnnnnnnnnnnnnnnnnnnnnnnnnnnnnnnnnnnnnnnnnnnnnnnnnnnnnnnnnnnnnnnnnnnnnnnnnnnnnnnnnnnnnnnnnnnnnnnnnnnnnnnnnnnnnnnnnnnnnnnnnnnnnnnnnnnnnnnnnnnnnnnnnnnnnnnnnnnnnnnnnnnnnnnnnnnnntgtagccaatggtggcacgtgtcaagcaatcctgtgccgaggtgggaagccagtgcccctctctaaagtcttcagcctggagcaggacccagaggaggcgcaaagggtgaaggaccaaaaagccatcatcacagaggnnnggaagatctcaaactgttccagaccacaggtattccggtgcctcactgtaacttccgggctgttctcggctgcttttgtagcgcttctgttctcggtagctacgcagggccagcaccacgctggcgccgtacatgatcaccagaagacaagcaaaggtggctgctgctccgtcggtgcctgccagctggcagttcatccaggtgagacccctgcgggcatagagcctctctcttgttttgcaagtgtcggtgctattgatctgcagagccacgtggaggtaaacaccaatgcctgtgcagtagcccacggccgctaggaggctgaaggcggcctccgtgaggagccacttccctgacaacattgttagactcttggctccttggagtaagacgcccatggtgaggacccccaaccccagagaaaaagccacgccaccatatatcaggggcgaccggaggattgtgtactgctggtccagctgccgaacctgctaaaactcacgtgccctcgaac

SEQ ID NO: 37861 - DNA, 756 bp, Macaca Mulatta
  misc_feature (1)...(756): n = A,T,C or G
gggctttgcaagaacttgtggaactcatctatcaacaggccacgtctatcccaaatttttcttatatgggagctcgcctgtgtaattacctgtcccatcatctgacaattagcccacagagtggcaacttccgccaattgctacttcaaagatgtcgcactgaatatgaagttaaagatcaagctgcaaaaggggatgaagttactcgaaaacgatttcatgcatttgtactctttctgggagaactttatcttaacctggagatcaagggaacaaatggacaggttacaagagcagatattcttcaggttggtcttcgagaattgctgaatgccctcttttctaatcctatggatgacaatttaatttgtgcagtaaaattattgaagttgacaggatcagttttggaagatgcttggaaggaaaaagganagatggatatggaagaaattattcagagaattgaaaatgttgtcctagatgcaaactgcagtagagatgtgaaacagatgctcttgaagcttgtagaactccggtcaagtaactggggtagagtccatgcaacttcaacatatagagaagcaacaccagaaaatgatccctaactacttttatgaaacgaaaccaacatttttataccatctgaatggtgttcccttttcacctgccagcctgaatcccagaatttacccagaagaaaaattatcaagaaatttacttttgaaaagaagaagggaccttttttttcacaagaaa

SEQ ID NO: 37862 - DNA, 936 bp, Macaca Mulatta
  misc_feature (1)...(936): n = A,T,C or G
aaatttacacagcacgtttattagctttatttacagagcaggnnnnnnnnnnnnnnnnnngtctccaatggtgcctagataacatcgatgaggcaagaatgccagtttaaaagaaatctatgcagaatcctaaaaataacagatgttggtgctcctcaagaagaggcaagcttgactatatcagcagctctctatgcctcagttactcagaagcaattctgttgcagtctctacatcccagtgattttgaagacaaggccactattactgcattcctatcaaagcccatagcacataggttttctatttttttggtgtattctggactagaaactggtgctccagcatacacatgtgcccaaagtcgagctgtctgtttgaacatttcgggattttgtttgtactgatttgctactacagcatcctgtggatcatctggttctgcagctgccaatagtgcttgcaatgacaataataccgtgcggagagtcattgcagctgcccattgatctttcaggatatccaaacaaatagcccctgtgacggaactaatattaggatgccatattttagtgataaaccggaccttagggggattaaatgggtatgtttctggtatttttatctctagttgatatcttcctccttcatatggtgtgtctggaggtcccgctatttctcctcttaattctgtaaaattctcatctacaagatctactttaatttgatttttgttcgtctcctcgctcttcagcacctccttgaactcccgcttgattcgctgcaccgcgatgttggccatgtctccgcccgcagctgattcgtacccgcctcctccgccaccgctacgaccaccgccaccgccgccacctcttcctccaccgcctcctccccggcgattcagacccgagcacacgaacactgccactaccaccc

SEQ ID NO: 37863 - DNA, 227 bp, Macaca Mulatta
gatgtatgacaatcctgcccacaattctgttcttaattgcaagaatattgaaagacacagcaataaagtctgcagataatcaggttcctccaccagtcagtgcagctcttcaagggattaaaagtattgtgacactttcaatggccaaaactgaggctggcgttcaaaaacaatggacagctctgattcgtagcacgcttgcatgcatcctggaatattctcaacca

SEQ ID NO: 37864 - DNA, 879 bp, Macaca Mulatta
  misc_feature (1)...(879): n = A,T,C or G
gggaactgataagcactttttgtgtcaatataaaatatactacaactgatgaaatgctaagacatgtcttgtgaaggaaggtttcttggagaccacttttatttacacgtgacaagtagatgctcctagtatcagaagaagctgatacgtagtgtcatgtgctcagtggttgccaaagtctaccaactttggggagctgcagggttctttttgggaggtgggaggaagggagatgagttttgttattttggggttttcntncnttggaancntagggctgataataaacaggctttagtttttaaagtaaaattcattttatttgcagaacacacttgcatggtagactgttaaagacaattttatgactggtatgaatatttatgcacattataatggttacatctgctgggtggccttcaaataaacgcacgaatcgaacaccagcccaactttgaaatacgtggccgacataccggcaccgaaacggggctttcccaaaaaatgccaacaaaatatgctccctaaacatgttaattttcgcttgccccatctttttgaatgggcctcataaccccccccgaatcccgaagaaacttgggccgggtctttaatagctcaaacgccagtttcaaaagtgcgccctggctcgtatacctcccgtcacccctaaacgcctgtgatacgctgtggcagccgcacaccctccctgcgggtacgcccccatcccaaacttacacgtggcgggcgtgctcgtcttaaaccccttcaacccgcggcccctcataaactccccggccacccttgcagtgcccgctgcggccgggcgccgcccaaagcccgggcgcgcgcctgaccgccacacccatgggctcgact

SEQ ID NO: 37865 - DNA, 1343 bp, Macaca Mulatta
  misc_feature (1)...(1343): n = A,T,C or G
ggctgattttgacagggctacagaagatgtgaggaagctgaaagcaagaccagatgatggagaactgaaagaactctatgggctttacaaacaagcgataattggagacattaatattgngtgtccaggaatgctagatttaaaaggcaaagccaaatgggaagcatggaacctcaaaaaaggnagggttgtcgacggaagatgcgatgagtgcctatatttctaaagcaaaggacctgttagaaaaatatggaatttagaatacagcatatgaggactttttgcttttgaagccttcctaatgctatcatgacttaacatttagagggagaggcacactgttaacttgatgtatcatgtagatttttgctattagcatgaattgtaatacttaggaatatactgaaactacatagatagttcaattatacttacttaaacccaggtgtctttaaaagttctttttaagaaaatgtggcacatatacaccatggaatactatgcagccataaaaaaggatgagttcctgtcctttgcagggacatggatgaagctggaaaccatcattctcagcaaactatcacaatattagaaaaccaagcatgttctcactcataagtgggagttgaacagtgagaacacatggacagagggaggggaacatcacacaccggggcctgtcggggcatgggaggctaggggagggataacattaggagaaatacctaatgtaggtgaccggttgatgggtacagcaaaccaccagggcacgtatatacctctgtaacaaaactgcacattctgcacatgtaacccagaacttaannnnnnnnnnnnnnnnnnnnnnnnnnnnnnnnnnnnnnnnnnnnnnnnnnnnnnnnnnnnnnnnnnnnnnnnnnnnnnnnnnnnnnnnnnnnnnnnnnnttttatttttatagagttagagaggacagctgcagtttttgttcgtttgcttgtttgtttttccttgaggagtctcgttctctcacccaggctggagtacagtggtgcgatctcggctcactgcaacctctgcctcctgggttcaagcgattctcttgcctcagcctcccgcgtagctgggattacaggtgcttgccaccctggctggctaatttttgtatttttagtacagatggggttttgccatgttggccaggctggtctcgaactcctgacctcaggtgatctgcccaccttggcgtcccacaatgctggggttacaggtatgagccaccacacctggtcacaagtgcagttctgttacatggatatattgtgtagtggggaaatctgggcttttagtgtaaccatcacccaaa

SEQ ID NO: 37866 - DNA, 159 bp, Macaca Mulatta
agtgataaagaattactttcaacaccgtgaattttcattcacattgaaagatgatatttatattcgctaccaatccttcaacaaccagagtgatctggaaaaggagatgcagaaaatgaatccatacaagattgatataggcgcagtatattcccacag

SEQ ID NO: 37867 - DNA, 789 bp, Macaca Mulatta
  misc_feature (1)...(789): n = A,T,C or G
aggagagaaaatagctcgacacctcctgcagcccatggagtcctcttgttgggacaaggtcccccccaggagagaggaacccccagcagggtcaacactggaggtcctgggagtgggtggtgctggggaggccatgcggggagggctgttccctgttcccttcccctcaggagacagcttgcccaaggtgacacagcaccggatgggatttcagggtcagggaccacggagcccggggctgtggaccacaccagcgcaaagccactgcatgccccagactggggctgtggaccacaccagcccacggccactgcatgccccagaccaacacaagaagagtgcagtccaacaacatcttcgtctagnnnnnnnnnnnnnnnnnnnnnnagcctgccctgtcaccccccggctccacggcatgccgcacatcagagacacgattctctccgaaaccctcagtggttccctagtatccgacagnagaagaataaaaactgtggcaggcctgcgatggctgtggttgaggaaagaggccacagccacagccagcagaaccatgctcagcagcagcctagccccgcgtggaagaggcgtgaacaccctcgggagaagtggatgtgcactaacggttcccagctctgacctctttgattaactgaatgcagtgattggttttatctgaacgtcagacaaaagggtgtctacgtccaggaaagactctaaacactctggacgctgctggggcagatggtgaccttgacccagtgataccactctccagtgggcagc

SEQ ID NO: 37868 - DNA, 188 bp, Macaca Mulatta
  misc_feature (1)...(188): n = A,T,C or G
tcagaatctttctcatataccactggcacaacaacaattaatgaagtttgagaatattcatactaataatnaaacccggcttacttggagagccctccggctgtggtatttcagactgcactagggatagggtcagtgcttccattgaaaaaggagttgggacatcatcatggagaagcacataaaag

SEQ ID NO: 37869 - DNA, 789 bp, Macaca Mulatta
ggtaaatggttcctctgtgtttttgtaaataaagttttattgcaacacagctatactctttcatttagttattgtttgcagctgctttctcagtatagcagcagcaagcagaggagttgtattgaatggccacaaagcctaaagtatttcctgtttcatctatagggaaagtttatcctaggtcctacagctattccttttgttaagcgttgccttaacctgtatagaactcagaagcccttgggttctcttttggtaatagaacataatctttaatgatttccaatattataattacttctaattaattaatttggaagttaaacttgaaagcccaacaaaaagttctttagcctgattgtccctgaagttatgctttgatgttagaagacatatggttactacctctggaatagtttttctgacagcctgaaaaatagttggaaagagttgatgggaaggttgtataaatgaattttggtgaattctcaacattatttattattactatattttttgagacagagtcccactgtcacccaggctagagtgcagtggcgtgatcttggctcagcacaacctccgcctccaggcctgaagcgattcttctgcttcagcctccagtgttacctgggaattacaggtcacacaccaacctgacccacttaatttttggtattgtttcagcccaggagtgagcattacaccaaaaggggagaacaccaatcacccggttgtaggggccaataaatcaccaaactgcttcgcaaagacttgatccgccataat

SEQ ID NO: 37870 - DNA, 738 bp, Macaca Mulatta
  misc_feature (1)...(738): n = A,T,C or G
agggttctctggatttgtccttccctgttnnnnnnnnnnnnnnnnnnnnnncctattttcctttatattgtgttttaccaattatttggtttgttttcatttttgtgtatatatgatatatgtatttatacatagggtatatatatctacttatagacaataattgttcagatttaaaaaatctgatttgtaaacattcccaaatggtttnnnnnnnnnnnnnnnnnnncctatttcttgttctacctgattttcccctgttcattcaccacactcttttctttctcttttttactctctcttaatttgtcattcaatttttataacatgtaacaaatctaactgtagcttctgagtttttaagaatattgctagtaatacttnnnnnnnnnnnnnnnnnnnnnnnnnnnnnaaggcaggcagagcacttgaggctaggagtttaagaccagccaggccaatatggcgaaaccctgtctgcnnnnnnnnnnnnnnnnnnnnnnnnnngtggtgtcannnnnnnnnnnnnnnnnnnnnnnnnnnnnnnnnnnncaagaattgcttgagcctgggaggtnnnnnnnnnnnnnnnnnnnnnnnacaccagtgcacatgcacttcagtgacacgacaagactctctcttaannnnnnnnnnnnnnnnnnnnnnnnnnnnnnnnnnnntttgtatattggtagtaatagtaatacttaaaaaaaggtaaaggggcccggcccc

SEQ ID NO: 37871 - DNA, 745 bp, Macaca Mulatta
  misc_feature (1)...(745): n = A,T,C or G
ggactcttactccttagaatccatcctgtgtatagcagataatcttttaaaatcatgataccatgccactcactagcttagaacttgtcaattgcttcccaatgcaattagaatataatctgtattccttgtcctggctttggaacctcctgctcagctctctgtcctcatcttgtaccacggtcctctcatctctgtgctctagccatgtggctctttctcagacatgccatgtgcactcccactgctctcactgtagggctgttcaccctgccttgaatgctcttcccctgggattcttataaggtcattccttcttgtcatgtaagtcccatctgacatgtcatcccttcgaggagggcttccctgacttcccagatgaagtaaacacctcatcatagtagcctgtcgcccgatattggtaatcttcatagtgctgacaacattatagttcatttcgctttgtttgtttatgcagtttatttatctatttgttcactggttgttttgttttctttgcttactgtcacctcccactagaatgtaaacccaanggaaatcaagaacttagttctaaaagagtcctacaagagtaactggtatataatagtactgtagagacatttgttgaatagaagtatgaatgactggggctgggatgtgggtggcctcatgggcctgtaatccccaacacctttggggaggccctaaggtgggaagggatccactttgaagggccaaggac

SEQ ID NO: 37872 - DNA, 845 bp, Macaca Mulatta
  misc_feature (1)...(845): n = A,T,C or G
gggcttttttgtccgacatcttagcaaggctgcggtgtctgctgctgctccccgagcttcgcaatgccgcccaaggacgacaagaagaagaaggacgccggaaagtcggccaagaaagacaaagacccagtgaacaaatctgggggcaaggccaaaaagaagaagtggtccaaaggcaaagttcgggacaagcttcaataacttagtctagtttgacaaagctacctacgacaaactctgtaaggaagttcccaactataaacttataaccccagctgtagtctctgagagactgaagattcgaggctccctggccagggcagcccttcaggagctccttagtaaaggacttatcaaactggtttcaaagcacagagctcaagaaatttacaccagaaataccaagggcggaaatgctccagctgctggtgaagatgcatgaataggtccaaccaattgtacctttggaaaaaataaactttattaggtcctgatcgaaagcccactaaaatcaacaaaaaaataattgtttatcggtgatctacaaatatatactgaatttatactaattaataataaataataaaacaaatgttcatccccaaaaccgtattaaagtaggtgcggggaacatacaaaatttattgaaagaacagctcaaatcctgtgtagtttaggctccgataaaaacatatttataaaaaaatcaaattttgaggtaaaggagaaggatgtgcttataaatacacactttacatattgaagagacggataggtttcagtacaaaaagatcagattagactaacaccgnatgtgaaaatctaatattaactccggaaaaaaa

SEQ ID NO: 37873 - DNA, 767 bp, Macaca Mulatta
ggggccaatcagcgcgcttcatgcctgctgacatcacgaaccagccagttccctccagctgcagagagcttcagtttgccttttttttttaaactaaaatggaggctggtttcttgccttaaggagcccattgcctttcccgctgaagtctagatgttgacatgtaataaagcgggcagcaggatggtggtggatgcggccaactccaatggggctttccagcccgtggcccttctccatattcgagatgttcctcctgctgatcaagagaagctttttatccagaagttacgtcagtgttgcgtcctctttgactttgtttctgatccactaagtgacctaaagtggaaggaggtaaaacgagctgctttaagtgaaatggtggaatatatcacccataatcggaatgtgatcacagagcctatttacccagaagtagtccatatgtttgcagttaacatgtttcgaacattaccaccttcctccaatcctacgggagcagaatttgacccagaggaagacgaaccaacgttagaagcagcctggcctcatctacagcttgtttatgaatttttcttaagatttttagagtctccagatttccaacctaatatagcgaagaaatatattggattcaaaagattttgtaattgccagcctttttagagctctttgacagtgaagatcctcgggagagagattttcttaaaaccacccttcacagaatctatgggaaattcctatgcttgagagcttacatcagaaaa

SEQ ID NO: 37874 - DNA, 798 bp, Macaca Mulatta
agttaaatgagcagtattttcaggtaatgaagaataagttaaaatcttgggcctcaacaatgaaacattttttatctctgatattttgtaatgtaactatcattccagtattgatgaaaatattattgaatggttttaacctgcagacttctgttgactcatactctcaagagtggtaggggtgtgtagatggagaaaatgtacctcaaacagtgcaaacactcagactgtgagtagagcaataattttatgtcagcactaacctcactttaaatgtgtgagaaaaaagtttgtttacaggagcagaaacagttctgtttctaaagaaatgtgacgtaactgatgtaaccattgacaatccatgtgtgcctttatacatttcatctctgttttaaaatatttttatgacaatcatgtttaaaattatttttagattataagtaagctgcatgttaaaaattgaactgtgtaaggtagaggaaaaatactgaaaactttggggttttaatctgtgtgtgcgcatttgtgtgagagagcgagcgagcgggaaatgtagtgtttcattttgtatgcattaaactgtcttgccaaaactcagatttaagattgttaaatagatatttgggaatttgttttaaatcactttaaatgaaaaatgtcagctttactgggcattctggaagcaaaatgtattatgctgatgataaagtgagaaccttaagagtatactcatatgatggtggaaaatgtgatggaccaaaatacataagctatatactttctgtgagtagtaatttt

SEQ ID NO: 37875 - DNA, 1293 bp, Macaca Mulatta
  misc_feature (1)...(1293): n = A,T,C or G
gggattctaaagatcccagtttgttattccactaacctagttatcttaaccatatcatttggttttgtgggccattatttaccttcccttatgtcttatagaataatggctactatttttaggtcaaaattacttttggaaagtaactttcccacaattaactgtttttgcgtgcctgacacttaaaatttagtgtttaccttttgtgccatccttcattagaaaagcaattggatgtttgccagttatctcacttcccttttgaaatcaatgttgttttaatgcactaatctgaattctgtaaagaggattatcttagtttatactttgtattttataatgtcttgtatagcagttcagtactgaaggcaatgcttaacttagcaagctctgagacttcaaatgggaacaaatagtaagtagctaagtaaaccatatctttgcaaccaaaataaagatgagttaaaaggtatctggttaggcctatttcatgagaattatgctctggtgggaccacaggtcacctgatacttagtgctgcgctgcctgaaacctcagcatggagacgtcaccacatgcactgtggccattcagcatctttctggagcaccagttcactccaggtttttattttagggtgtcaccgattttacctactttgtcagactgatagaagtttctttgcttgtcagaaaactccattttttttccacaaaagggattacagaaaaactctttttgtggagtaaagtgaattggaacccagagactcctgttgccagaatcagaatgccctagaacagaatggacaatgcagggaggagaattcacacaaacagcacctgttctgaggcccggccagcccaccaggcctgctcgaatgtggtcttcaagtgcacagaggcacatgaggtttctggtgataaaccagcatcttactgctgttttaaagtcccggccccatggctttcaccatcagttcagttttttcgctgtacttgataaaatgtttattttcatacaggtcaagtacatttacttctattcatttcacagtggagtaccccagtaacaacaaaaagcactttaaaattggggggggggggccatgattttaggtacccttttatttgaaagtggaaatcctttttaaaattatttatttaatttttaacctgggggccaagtgaatccaattgggttttaaaacaaggggaaaccttttaaggggggttttccaaaatttnnnnnnnnnnnnnnnnnnnnnnaattttaatattttttttggagggt

SEQ ID NO: 37876 - DNA, 386 bp, Macaca Mulatta
tctttcccagaacaatttcggacctcctggggtctatgctaggtataaggtgtatctttgtcctccatcaagtagcaaagatagacatgtaaacaaatttcgacactgtgatgactgcaacaaaaagcagcattatgaggttgaatgtaaaaggataacattagcggtggcgggggccggaggatgaaggaaggcttcctgaggtaggcgctggcgaaagtgaagttggagagagcaagtggcatttgctgaagtgcatttccggtagaaagaactccagtggtccctcacctgactgagtggcgcagtcagagataaacgaaacgggtacactgaccagaaagggcaagacgggctaaacttggccattgggccactgggctccc

SEQ ID NO: 37877 - DNA, 100 bp, Macaca Mulatta
tatctaaaacagaattacggacaactaacatatcttatgtgacagcctttatgtctagcacatttgatgaaaaaacttctgaatctgaatagaacgttct

SEQ ID NO: 37878 - DNA, 485 bp, Macaca Mulatta
tcaatccgacataaagtaatgaggagcccaggtttctgtctacacaagggggacaactggatagtgatggctgcgtttcaggatgagcccagacatggcaaacatcgagttttgcagtcgtgagtcttctgaacctgtggaggcagtgtctgtgtgtttgtgttcatggtagatgacattcagtgtgaatttctgaatatgacatattgcggtgtaggattgcgcgtgaggttattgcaggggacggggttgactattttctcttggggtgtgtttcattcatcagttgttggtgagcaccagaagttgaaatcttgcgaacgtgggacttctgtggatcttctccctaccttgagtagtggaaactgggacgcatttgaagagaggaaaggtgttcttcttttgaacctgcctcgcagtttttacattgcttgttgaatggacctcaggcgccctaggacttgtgcccttggtggaacccacag

SEQ ID NO: 37879 - DNA, 640 bp, Macaca Mulatta
  misc_feature (1)...(640): n = A,T,C or G
gggcacagtggatcttacctgtaataccaggactttgggagactgaggtgggtgaatcatttgagcnnnnnnnnnnnnnnnnnnnnnnnnntnnnnnnnnnnnnnnnnnnnnnnnnnnnnnnnnnnnnnnnnnnaaggcatggtggcttgcacatgtagtccaagctactttggaggctgaagtgggaggatcacaggagcctnnnnnnnnnnnnnnnnnnnnnnnnnnnnntaagccactgcattccagcctggatgacagagggagaacctgtctcgaacaaatcgaaatcctttacgggagaaaagaagtttaaaacaagacacaaggagtaaaaagaaatggattgacaaatttatctacaataaaattaagaatgtgagtttataccatatttgcaacacataccattgacaaaggagtagtatccaaaataaaagaactctataatcagtaagaaaaagtcaaacatcatttaaatgaacaaaagtcaaggacaggcatttcacagaagaggaaacaaatactgcaattataaacatgaaaatatgctctagcgcatctgaaccagggaaatacaattaaaaccataatttggtatcttttgtatcnaaatattttcagatggagcacgggaat

SEQ ID NO: 37880 - DNA, 731 bp, Macaca Mulatta
  misc_feature (1)...(731): n = A,T,C or G
tgaatgacgctgtacagagtaccacggatttctgcacactctggagtctgtgctggtggaacattgccagtcagtgttaatgaggcacctgtgtgtaaatacatgcttggttttctccgcagagaactgaggctaaactctgtccccacttctggttttgccctgtcatgttgtaacgaggcaggccttttgaggccatttcagtttgagctcaagccaaccacctctgttggttagatgatgaataaaaaggttctgcnnnnnnnnnnnnnnnnnnnnnnnnnnnnnnnnnnnnnnnnnnnnnnnnnnnnnnnnnnnnnnnnnnnnnnnnnnnnnnnnnnnnnnnnnnnnnnnnnnnnnnnnnnnnnnnnnnnnnnnnnnnnnnnnnnnnnnnnnnnnnnnnnnnnnnnnnnnnnnnnnnnnnnnnnnnnnnnnnnnnnnnnnnnnnnnnnnnnnnnnnnnnnnnnnnnnnnnnnnnnnnnnnnnnnnnnnnnnnnnnnnnnnnnnnnnnnnnnnnnnnnnnnnnnnnnnnnnnnnnnnnnnnnnnnnnnnnnnnnnnnnnnnnnnnnnnnnnnnnnnnnnnnnnnnnnnnnnnnnnnnnnnnnnnnnnnnnnnnnnnnnnnnnnnnnnnnnnnnnnnnnnnnnnnnnnnnnnnnnnnnnnnnnnnnnnnnnnnnnnnnnnnnnnnnnnnnnnnnnnnnnnnnnnnnnnnnnnnnnnnnnnnnnnnnnnn

SEQ ID NO: 37881 - DNA, 774 bp, Macaca Mulatta
ggggagacttgatcaggatactgtcttgtctccatttctcgtgtctcttgttccccaaattcccacccccctcttccagggcctgctttgacgatcccgtgggccgggactcgtggcgcccaaacgtgaggcctggaaacgagggactccgtgaggaagaggacgcgaaagaccggtcgatcgttaacaaagacgaaagaagttaaactcctccgatcaccgcgggaacctgccgcgtcagaatcgaaggtaagtgacgcgtccgaaatgggacaagaattaagtcaacatcaaatctatgtaggacaattaaaagaggctttaaagatacgaggagtaaaggttaaaagtaatgatttgtttaaattttttgattttgtaaaagatacttgcccttggtttccacaggaaggaactattgatattaaaagatggcgtagagtaggggattgttttcaagattattataatacttttggcccagaataaattcctgtgaccgccttctcttattggaatctcattaaagagttaatagataagaagaaggccaatccgcaagtcatggctgcggtcgctcagacagagcatattttaaagggtagctcccgctctaacctcacaaagcctccgcaagatacggaggaagatctcatttccctcgaaagtgatcatgaagaaatcaagtctcctttcttgtacgataaagaaataccatcacgaaaataaaccaaaaaaatacccaattttacagatgttttcaaaaaggaggag

SEQ ID NO: 37882 - DNA, 663 bp, Macaca Mulatta
ccactcttattgcaatactccccttcttcgaaagttttctagactaatgtccagattaagcttcttttctttgacaataatgatgccacgacttgggcaaaatgcccattgcccctggctcctgctttcttcacccagtgctgccttattggactccttgtgcctctccgtgactggggaaatcaggatccacagtgagcttcaactgagaatctagaagagagtagacagaaaaatacttttcccttccctccaaatgcaaggataatcttacgtgagtccaggaggaaggctcatttcacactaagtgttctgaatcaaaaagatgaacaaaatacagtgccattcttcaaggacttcacagtctacaggaaagggatatagttaaacaaataactgcagaattggaaattggagctgatgtgcttagaagggttttgaacaaggggcatgactgtgacttcctctgcttttgcaaacttcaggaaaacctttacgcacagttgaaaatacagaatctcagagtgaagccctaacttcccacagcagatggggtctatgaggaggaagaagtggatgcatggaccagtcctgttttgaagacaagtctcatggtgctactgtgcctccatgagctcctgatgcccagaagctggtatcctg

SEQ ID NO: 37883 - DNA, 592 bp, Macaca Mulatta
atggcggttgccgcccagcagcctcttcagcctggcggcgggaagcgcagaggcaaggctcaatatgtgctggccaagtgggctgcgcgctgcgactctggcggacccagtcagctatagcgcaggttatggggcatcctcatcacctgcaacatgaaccagcccaagtgtgtagaggaggcctacaccctactcaacgaatatggcgacaacacgtataggctggaaaagtttacagacaaggatcagaagccccctggaagtgagggagaagatgatgatgtggaggctgccttgaagaaagaagttggtgacatgaaggcatctacagagataagcctaagaagattccagttagtggaaagtggagcaaataacattgtcttcatcaggacactcgggatagaacctgataaattggtgcatcatattctcacaggatgtgtacaaaaccaagacgactcaagttattctacgaatgttacccatctcaggcacatgcaaggcttttttagaggatatgaaaaaatatgcagaaacatttttggaacgcgtagtttaaagctccaagcaaagagacgtttcagattgt

SEQ ID NO: 37884 - DNA, 564 bp, Macaca Mulatta
  misc_feature (1)...(564): n = A,T,C or G
gtctctgttcttgctctccccattggggccttttttaaaattgaaaaaccaagtcccattnncttctggtttgcttggcccctctnnggattcnnccttttggactcttccctgcatcccagataatggagaatgtatcagccagccttcctcaccaaggctaaaaagacctggcctttcacttttagttggcgtttgttatcctcttgtatacttgtattcccttaactctaaccctgtggaagcatggctgtctgcacagagggtcctattgtgcagaaaagctcagaataggtgggtaggagtccttctctttgacttaggtttttaggagtctgagcatccatcagtacctgtactatggtggacttctgttctctgctgagggcaaataccctactgtggggagacgaatggcaaaccaggaatgcttttgtgagaaagggatggtggagtgagagcctttgcccttaggggtgtgtattcacatagtcctcggggcgcagtcttttgaggtaagtggaattagagggccttgcttctcttctttccanttcttcttgc

SEQ ID NO: 37885 - DNA, 299 bp, Macaca Mulatta
  misc_feature (1)...(299): n = A,T,C or G
agaggttccggttctgtggtgatctggactgtcccgactgggtcctggcagagatcagcagctggctaagatggtcctctgtgaagttgtggctgctctgcagccaggtactaaannnnnnnnnnnnnnnnnnnnnnnnnnnnnnnnnnnnnnnnnnnnnnnnnnnnnnnnnnnnnnnnnnnnnnnnnnnnnnnnnnnnnnnnnnnnnnnnnnnnnnnnnnnnnnnnnnnnnnnnnnnnnnnnnnnnnnnnnnnnnnnnnnnnnnnnccagtgaactgcagcagctggggctgcccaaa

SEQ ID NO: 37886 - DNA, 638 bp, Macaca Mulatta
  misc_feature (1)...(638): n = A,T,C or G
acagagcctggtcaacaggtctgcaccaaagaaagataacatttgacatgaccaccaaggcccctttcatgtgctgaagtcagtcagtatgcacatgtttgtgcactgagtgcataatgaaatagcagcaggcaacagtattttcctgcagggtttcgggattctccaagcaagcacagtgttatgacacttactggaagcagaaaaaagaacattctgcccaatacactcctcttctgtgttctgtgctcttgccagaacaaagctggctctctaactagagtagtgcacttccatctcttcaaggcagttctgactctattttttgtatacttttcagctatttggtgacccagtggcaatgggaaaagcttttctgctcttagacatatctgaagcccccaagatccaggatgagcagaaaaacgggccttctcagcaaagaaggattcaaggaatcctcccacctcaggctccctagtagctgggatcacaggtgtgcgcgatcacacttgactaatttatttgacttttagtggagatgacgtcttgcaatgttgcccaggctagtcttcaactcttgggctcaagacattcttccacctcagactaccaagttnnnnnnnnnnnnnnnnnnn

SEQ ID NO: 37887 - DNA, 847 bp, Macaca Mulatta
  misc_feature (1)...(847): n = A,T,C or G
ggnnnnnnnnnnnnnnnnnnnnnnnnnnnnnnnnnnnnnnnnnnnnnnnnnnnnnnnnnnnnnnnnnnnnnnnnnnnnnnnnnnnnnnnnnnnnnnnnnnnnnnnnnnnnnnnnnnnnnnnnnnnnnnnnnnnnnnnnnnnnnnnnnnnnnnnnnnnnnnnnnnnnnnnnnnnnnnnnnnnnnnnnnnnnnnnnnnnnnnnnnnnnnnnnnnnnnnnnnnnnnnnnnnnnnnnnnnnnnnnnnnnnnnnnnnnnnnnnnnnnnnnnnnnnnnnnnnnnnnnnnnnnnnnnnnnnnnnnnnnnnnnnnnnnnnnnnnnnnnnnnnnnnnnnnnnnnnnnnnnnnnnnnnnnnnnnnnnnnnnnnnnnnnnnnnnnnnnnnnnnnnnnnnnnnnnnnnnnnnnnnnnnnnnnnnnnnnnnnnnnnnnnnnnnnnnnnnnnnnnnnnnnnnnnnnnnnnnnnnnnnnnnnnnnnnnnnnnnnnnnnnnnnnnnnnnnnnnnnnnnnnnnnnnnnnnnnnnnnnnnnnnnnnnnnnnnnnnnnnncatttaaatgggtcccccagcaaataattttgaagcccccaaggcctttatcctccccatttaaacggtaaggggggtctaaaccagccaataatcctgtggcaaaaattatcccctataaaaattcggtaacttaaccgaataacattatctccccttggttcccccaacttttcaatataaggtgtcccagtccattaaggaaatcttgtatttcccccattttataaagggggagcctttcaaaaccaatggaattctcccttttaaatatctccagagctataaccaactttaaatccccaa

SEQ ID NO: 37888 - DNA, 835 bp, Macaca Mulatta
gggaggcacttgagttgcttgctggggcctgttaacgctctgtgaattgtcttcagtaaatctgcccatcgtgtggcattttgttcaattccttgtccaatactccaagaatctggacaactcacgattaggaccttctatctgataacgtattttggcgaaccagtcaggagatccttgaggaatcgccacactgtcttgaacaatggttgaacgagtttacagtcccaccaacagtgaaaaagtgttcctatttctcgacatcctctccagcacctattgtttcctgactagctgtattaaaaagtgaaaaaacagaggactccagatggagtgaactcaggagaggcggtgcttcgacggctgatgatcttgcggggaggaggagagaggagcattagctatggttttaagtcctggctgaactggcgggggttacatgacctcagacgcagggataagcaagcaagcctttgctccggggaagggctacgatgcctttcaacacccatacgtctctgttgagctcatcaacaccctttgtgcagaaaagaagggatttcatcatgttgcgccaacctggtctcgaaactcctgggtttcaaccaccatgcccaaaatgccaaggattaccgggcgaggaaccaccatgccctggccccctaaaatatggggggcttcctggtaaccagaacaggaaaaaaggctccccggggaattataaggaaattttaatcccatttggaaacaattccgggccggtttttaaaacccttcctggcccctggagaaaactggtcttttcccccaagctccgggggttaaaaaaaaaagg

SEQ ID NO: 37889 - DNA, 613 bp, Macaca Mulatta
  misc_feature (1)...(613): n = A,T,C or G
gggtgagcaatacctttgactgtatctttcgaaccccagtttagaccagcagcagctctcctaatggggaattaagaagtagaaagaggccctaagagtatataagacacaaattacctttgcctgtgatatttgccatccatatgcctatggttacatacagagaatcccaacaggagcatcatacacacagtaaataacactaatgtgttttaattatatgtacccaagtaaaaggggcataccaaaataaaattttaaaatgaagtggggtgaaacatattgggggaccgaaaggaaagatttccaggagggaagaaaatattggaagtggaaaaaataaaaattacccttgttacttggtacgaaaattcttggataagtttaaacctggaaatttagggcccagtaaaatttttgggcctcccctggccctttcccctaaacccccccttaagnnnnnnnnnnnnnnnnnnnttttgttggacccccggaataccctttaagttccccaaagagggggnnnnnnnnnnnnnnnnnnnnnccgataaaacccttttcgccaaactcttcgagggaaaaaaaagttcccccaggtgttttctcccccccn

SEQ ID NO: 37890 - DNA, 559 bp, Macaca Mulatta
agaatctttcttcattgagagttatgaaacagcaagttttctttgctgtggcctggcactctaagtctccctcgtgcgcacacaccctggtgctgtggccagggagctgcaggaaggatacctgcaccggggagcgggactggatgagctgtcgggtctcctcggactttactgctctctgagctgctgatactcaagaaaccaacacaggatggaccgaggggctgagccaagcaaggctgacaagaaaaggaggcagctgagcttaaagatgctgtctccagtcagagagaagggggccatggccaaggaacccatgtgggcctgcattagttcctcagggaagggaaacatggctgatgaaatttccacaaaggcagaggtttgtgacaacactaaaaattatgactcctcagtcatctgcaggaaagaaacagactttccataaaagggtatttaaatgtcatgcaaccatttttcataacaagttactgagtctgtaagtatgtctagtggaataaccaagagtacaaacttcacactaacctcgataagccca

SEQ ID NO: 37891 - DNA, 759 bp, Macaca Mulatta
  misc_feature (1)...(759): n = A,T,C or G
ttccttccacccagatgacagggctgtcttgtttgctgctctgtccccaaacaactagaatagtgctggcatacagttagcaatcagtaaatatttgccaacataatgttgtgaaatagctaatcaagaacttaaggagcagaattgctttaatttctgtttatcagaaggaagcatttataatttagtgaaagaaattacaggtacagtagttggaggcatggatttgatgtgcagtttacccagattataatttctatacnnnnnnnnnnnnnnnnnnnnngtggggaggtgggggagggacagagtctggnnnnnnnnnnnnnnnnnnnnnacagtggcatgatctccannnnnnnnnnnnnnnnnnnnnnnnnnnnnnncgatcctgnnnnnnnnnnnnnnnnnnnnnnnnnaactgcaggtgcatgccaccacacctggctaatttttatgnnnnnnnnnnnnnnnnnnnnnnnnnnntacannnnnnnnnnnnnnnnnnnnnnnnnnnnnacagtggcggnnnnnnnnnnnnnnnnnnnnnnnatnnnnnnnnnnnnnntgattttcatgcctcagctnnnnnnnnnnnnnnnnnnnnnnnnnnatnnnnnnnnnnnnnnnnnnnnnnnnnnnnnnnnagtagggacggggtttcgnnnnnnnnnnnnnannnnnnnnnnnnnnnnnncttcaagtgatccgcnnnnnnnnnnnnnnnnnnnnnnnnnnnnnnnnnnnnnnnnnnnnnacgcc

SEQ ID NO: 37892 - DNA, 846 bp, Macaca Mulatta
gggctctaccggcgggatttgatggcgtgatgtctcacagaaagttctcggctcccagacatgggtcgctcggcttcctgcctcggaagcgcagcagcaggcatcgcgggaaggttaagagcttccctaaagatgatccgtctaagccggtccacctcacagccttcctgggatacaaggctggcatgacccacatcgtgcgggaagtcgacaggccaggatctaaggtgaacaagaaggaggtggtggaggctgtaaccattgtggagacgccacccatggtggttgtgggcattgtgggctacgtggaaacccctcgaggcctccggaccttcaaaactgtcttcgctgagcacatcagtgatgaatgcaagaagcgtttctataagaactggcataaatctaagaagaaggcctttaccaagtactgcaagaaatgggaagaatgaagatgggaagaaagcagctgggagaaagacttcagccaaccttaagaaatacctgcccaaagtcatcccgtgtcaatttcccaccacccagaatgtcgcctggcttccctctgccgccaaaaagaaaggcccccccctgatgggaaaatcccgggtgaaaccggaggccacccctgggcccaaaaaatccttggacctggggcccccccaaaaagggctctaagcagacaagggaacctcgtttaaacccaagatgttttgggggccaggagagtaaaataaacccaaagttaatccaaggggtctatccaaagggggaaaaaagccgtccaaaaagggggcccccccacaccccttgtgggcccaaccccacggagagccttcaccccccccaagg

SEQ ID NO: 37893 - DNA, 664 bp, Macaca Mulatta
  misc_feature (1)...(664): n = A,T,C or G
tcacaatgcagcctgcttctgcaaagtggtgcgatcgaagggactatgtcttcattgaattttgtgttgaagatataaggatgttaatgtaaattttgaaaaatccaaccttacattcagttgtcttggagaaagtgataattttaagcacttaaatgaaattgatcttttttactgtattgatccaaatgattccaagcataaaagaatggacagatcaattttgtattgtttacaaacaggagaatctggccagtcatggccaaagttaacaaaagaaagggcaaagctgaattgtcttagtgtggacttgaataattggaaagactgggaagatggttcagatgaagacaggtctaattttgatagtttctccgagatgatgaacaacatgggtggtgatgaggatgtagatttaccagaagtagatgaagcaaatgatgattcacaagacagtgatgatgaaaaatgccagatctggagtaagaaatattgtcatcacctggattttgagaaaganaataacttctctccaagatttcataattgagagaattcctgagttgataaccctaaaggcagatgctgtatttgcctactttaacccatttttcaacctgtttattttttaanaggcttcactaagggttgatatgtaccattt

SEQ ID NO: 37894 - DNA, 159 bp, Macaca Mulatta
gcctggaaaacttgtgtattctcatctcatctaaacctaatgaaattccttttatatttaaaaatagtacattctgtctcatgtcacatatcagtagatcaattggtatttccttgtgaacagtgttatttatgaagagctcattatcaataatcatga

SEQ ID NO: 37895 - DNA, 261 bp, Macaca Mulatta
  misc_feature (1)...(261): n = A,T,C or G
ggaggttggaagagcacgtctatgcattccacctgaacctgcaagctagtcgcttgctgcccaggtgccgattcgcggctgcatgcgccccactgcagtaaagagcaaccgcagcctctgcctcggccaccaccactgctgggaaagagtcctggggctgctgacgcggttgggaggagcctcgcctttaatgcaccagccgcctccagcctccnnnnnnnnnnnnnnnnnnnnnnnnnnnnnnnnntgcgagtgcgcgcg

SEQ ID NO: 37896 - DNA, 651 bp, Macaca Mulatta
  misc_feature (1)...(651): n = A,T,C or G
gggggcccttcagccatgtgagggcacagtgataagataccttctttgaatcaagatggccataaccagacaccaaccatgctagcaccttaaatggatttcccagcctccagaactatttgcacaggatgaagaaagagactcatcaagagagcctggagacatcaaagctttccagggccaatgatgcctgagctctatttggggagaacaataggaactccgagggagagagatgcattccgattaagaggaaactgcatgcgccaaagcacagtcagaaacttgttggaactcccggtttcaactacaacatgcaaacagcttggaagccatcacccctatccttataagaaaaaagctagtcaagctgaaaatcagtgacttttatctttccgagaactgaagtcacgaccgtgaaatctggagagacgggtgtatccagagacagaggtctgtttacttggagcctactggagccatanactggtcggaaaactaacaggtaattttgatgaattgctggaagttgatatggactaactgagaatgtggaactctcggtcatagtcatacgggtccgcatacgctactgcatagctcaggagtcagcaatcacagtgagatcgaaattccctaggctgtgcaaaa

SEQ ID NO: 37897 - DNA, 799 bp, Macaca Mulatta
  misc_feature (1)...(799): n = A,T,C or G
tgcttaagagaacgttttaaccagaaaaaaaggaggtccagttcannnnnnnnnnnnnnnnnnnnnnnnnnnnnnnnnnnnnnnaacattcctgattaaggtgttttgttggntttttaaatgaaacggtagattgagaggaggatggtgatttggctccccaccagtgccaaagaaagaccaaatccttaaaacataatcagaacgtttacaaaaattggctttcttttcttgcaataataataaatctgttgttatttttacagttttcagtttgctgatttaaaaaaattaaatgagaactatttctgaatcgggtnttagttaacaaagattcattacaggggcacaatagagaaagccctttcctttgtacgttagctgggttgaagggggaagggaggagttatacaacaattgattcctgtcttttagttatgagagggagaggtgtgtgcaaaggcgactccttgaattggaatgagcaaatgaataaacccttaaaatatttaaaatctttatcttttcagattttaagtatgttgcgaatttatgtttttcccatccatctccagtttcagagactaggttaaagattatgcagaggtgaagtgagggggaggtgaagtgaggtagcccctcgtgtaaaaatactgttttagaggctnnnnnnnnnnnnnnnnnnnnnntnnnnnnnnnnnnnnnnnnnnnnnnntgggcgaatcatgaagtcgagagttcaagaccagtctggtgaacatggaaaacccgnnnnnnnnnnnnnnnnnnnnnnnnnnnn

SEQ ID NO: 37898 - DNA, 211 bp, Macaca Mulatta
  misc_feature (1)...(211): n = A,T,C or G
cacttgcttggcttttctcctaaaggttcaaatccagagattgaacgtacagaaaaagaaactaattattgacgtgtatcgcacgaaacgctctctcatatactttgaagnagaagagtcgaaggatctggctgcccgcctgcaacgttcatcgcagcgtacggaagagttagagcgggctctgtctgctgtcaccgccacacagaagaag

SEQ ID NO: 37899 - DNA, 881 bp, Macaca Mulatta
ggggggagccagtgatgagcaggttcacgtccatcaaatgcggctgcaatccctgtaataacaggaggtcaccattaaaccgaagggcacttcacttagaataaaagcactctgcataaaagaactaaagattggccggagaccgcttagaaaccatcacaatcattcttgctagtgacagtgaagcttcaagagtggtcacttttcctgtagaaacgccacagaggtgattcctggaactcagttagaatatttctttcccggaaaccacataaccaagagtttaataatgccatctcttgagcagaaagattaagatttctgatgaaacaaaaccctggcaagcctcctgattctaaaaaatgctatacagaaaagctaactccaaagggttgcatttcttttgtcatccatgacccacatggaaaaaaatttttaatatacaaaaaatgtttggatttgtacagtgagtacccaagtatccaccccctgggatcaccgattagaattttttaaatggtaaagattcaaagggtttccctacctaaagaaatgttggcatgttaaacccttttccttggtttataacccagggggaatgggaaaaggaactttttcccggggcctttttcatattcaaactggggaagggggttatccaaaaaacattgagcccaccccaatccccaagaacacaccccacaaatggcgttgcctgataatttcctggtcaaaactattctacataaagtgtagaacgccaggtactcaccacaatcatgagtttgtttacaaaacttgatcgctactctgggcgcctccgttgttaactattaagactaatcatatatcccaatgatacttcttataataggaccaaa

SEQ ID NO: 37900 - DNA, 785 bp, Macaca Mulatta
  misc_feature (1)...(785): n = A,T,C or G
ggagagatgtccctttttctttcataacattatacttttttcctttttttcttgatcagtttcaccatggttgattagtttattagtcctttcaaagaaccattgtttagatttgttaggtctctgaattatatgcttattttccatttgattaattctcattgcttagtattttatttcttctacctctctagttttattttgctatttttctgattctcaaaattaataacaccaggtgaatacttactaagttattaatggtctgtcttttacaaaatatgcaccctaggccgtaaattttcctttatgcactcttttgactggagtcatttattatattcataaatataaatatttccaacggagaaacagccttaaattctagactcactttctggatcactgacctttgagtttgcttccataattctttaccatcttgttatttcacagattccttaaaacataagtatagaaattctttgcccagaatttttacttaccttcagtggatattttggtccnagctacctagtttattataaccaggagtagaattgcactttatattttttttatatttggaagaaacttaccttaatggtggttaaataacgttgccaaggctaaatggtcaaaaactgggaatgtggaaaactaatattttttattggatgggctttttaattaaannnnnnnnnnnnnnnnnnnncactttaccaaaaggcataaattaggaattaatggggttggaaaagcccccgagtcctgtgtagccccca

SEQ ID NO: 37901 - DNA, 611 bp, Macaca Mulatta
  misc_feature (1)...(611): n = A,T,C or G
aacaggatataaatggagagatcctttgtgttgtagtagaggcattttcctaaggagtatagatttatattttgcattttcattcatcctcccccagaatcatggtcaaggtgtaggtcactccacacagctgatgctcaggttattcccttgtgagaattatgagaataaagctcccaaggtatgtgaaagtgcttaacacagtacctggcacacagcactcagtaaaagtttggctctattatgggatggttcaattctggtttaaggaagtaagaaaggttatatatatatttatatttaccactaagcaaannnnnnnnnnnnnnnnnntgggttttttcccctaatattagggtgtcccctgtgcttctttaggatgtagttataactaaacctgttatacttgaacatcactaagagaagtaaattattatgaagctagcaaaaatctgaggccaaagttgtttcctaacagctttaataatgcttgtagattttgaataatcctttaaaaagtggaccatttgcttattttaatattatcacgtcagtaaaatgttagtattaaaaagatcagctttttatggcattgaagaatgtatctgcta

SEQ ID NO: 37902 - DNA, 636 bp, Macaca Mulatta
gcagaataatctctttgttgctatttgtttcttcttctacatttaaaatttaaaagattggcttgaggatgtgatgaaattgagacttattgtggtttctctcaataataagtgaaccaatttcaaatatgatcacaaagtttgaaagctcttattcacagaggtttggtagtgttgggaggggtgtttaattactcagattggcctgttattttatttcctcctttgggaaaagaattatgtagataccacatggagacagggaaacaattgtggtaaaactgtggatcctgttgctatttgcccattgagaaaacagattctggtatttgatttgggttttctctttgttttctttttgtttccagaatggatgaaagtccatgaaccccctaagttataatttaaatttggttgaggcaaggtgcttttatagttgagacagagccctaggtccttcctgccccatcactcacttacgacatcacttccattgtgtgcatgtttgttatagaggaggttttaggctacaatatttgtttaacctccctaagaactttcaaggcatctgtcctgaaagctgttaatttatggtctagcagatttatattatatgcagataataattaactgggg

SEQ ID NO: 37903 - DNA, 580 bp, Macaca Mulatta
tctctcaggaaactttttcttattaaaagaaaactgggaaaattatttcatcaaagcacagaaagtgcaacgcctcattgctaatgactttgcaaatgcttttaactctggagtagacgttttgctaactcccaccatcttaagtgaggcagtaccatacttggaggtcatcaaaggagacaacgcaacacgaagttcctagaatgatatttttacacaagctgcaaatatggaaggattgccagcagagagtatccctgctgcacgcccaaaccaagggttgccagtaggactgcagttgactggacatgcattttgtgaccagcagcttcttacagcatgcaagtgggttgaaaaacaagcacagtttcctgttagtcagctacaagaactcatggatgatttttcatcaatgatcactcagtaaggcgcatcactcagtaaggcaggaagaactttctggagtcttctcattcaacctgagacgagaggaaggtctctagaagctgagctcaagttccccctctgcttaaccatagctcaccatttgctttgatccaacatgactgttccatatgac

SEQ ID NO: 37904 - DNA, 199 bp, Macaca Mulatta
gttgccttcttctacttctctctagttttctagaaatctataatgaacgggtgcgggatctgttgaagcaatctggtcaaaaaaagccctataccctgcgggtcagggagcatccagagatggggccctatgtacaaggtgagctactgtggtcctggagatccgaaaccaaactgaagcctgggaagctctcctaata

SEQ ID NO: 37905 - DNA, 223 bp, Macaca Mulatta
acgaccacctcctcagaaatggttagggtaatcaggacctggccttaccctctggatgcaaacctctgagttctgcacccctttgccaccctggatccagagcagtcagagctgagtttcggaagctcctagtgccttggcgtgtacaggtgctctgctggctgtgacattgccagggctagaagggctctttgaactaaggaccattctcctgcactgtact

SEQ ID NO: 37906 - DNA, 209 bp, Macaca Mulatta
tcctgcagacattcgcattgtctgggagaagaatgggcgagctctggagacctgtgtccctgtgcagacccatgcactgcccgatggcagtgcccacgcgctcagctggctgcaggacgctatcagggaaagcaccgagtatcgctgctctgtcatctcctcagcagggaacaagacttcgaaggtgcaggttgctgtgatgagacctg

SEQ ID NO: 37907 - DNA, 767 bp, Macaca Mulatta
  misc_feature (1)...(767): n = A,T,C or G
gggcagctggatatgagaacacggaattcagaggagaggattgggctggagatttttataataattgggaatgatcagcctctgggtagaactaaaaaatgtcatccaaaagaccaccagtatggctaaaagataaaaaggacagctttactgggaatatcagttcacaaactgaaaagatatagtctctggtgttaaccaaaggtgttctttctttgaagaagagaagaaccagttgggttttatgcctcacagggtctgcattacaaaatagagtcctacaaattcagcagatttggagaagctatacatatttatgagggacggtgagttatgtacaatggataaacatgtaacatacatctcatggcaatttgggggtaggtacttagcattaaaatgaagtggaattggactccttatgtcaaaaggtaaattataggacacaaaacgatttgtgtgcaacctctaaaagctggctgaaatcagcttaaggtctgcagttgcttattagaaaagaatctaaggtcagtcttctgtccagcagagttgtagtggtctgggttgtgaatcagagttaggaagggtctgataattttcctgatagctcctattgttagggagtttangcagagtgcagtttttcttgtagctgtaggaatttggaaattttgccagccagaaccctaacccctcaacccataggtacctttttgtttcctttaaccttagggttcttcttagtttgataaaggggcatcctcctt

SEQ ID NO: 37908 - DNA, 93 bp, Macaca Mulatta
gctcttttaacgctaatatttcttgcaaatccatgcttgggtttttgtcactaacctgttaacgcttgcaatcccaataaagcattgaaagcc

SEQ ID NO: 37909 - DNA, 218 bp, Macaca Mulatta
  misc_feature (1)...(218): n = A,T,C or G
agagcgcctcaactcggtaccgcgacggggaggagcaggaacaaggagcggcgtctggggaccccaggcagaagactggcccgggcttcgaccgcgggagtgtgtgacgcgtttggaaaggcaggagcccagnttgnggnttccnngggctttgctcttggnnnctaacgaggggagtccgaggcggcggcgaggggcgaacgacccgacgcaagatg

SEQ ID NO: 37910 - DNA, 156 bp, Macaca Mulatta
gactctaattccaaggctcggaggggcattttaagaagagctgtcttttctgaggaccagagaaaggctctggagaaaatgtttcagaaacagaaatatatcagcaaaacagacagaaagaaaaaaccatcaacttgggactgaaggaatcacagg

SEQ ID NO: 37911 - DNA, 6995 bp, Macaca Mulatta
  misc_feature (1)...(6995): n = A,T,C or G
agaatgacaaataatgaagacagtctgagtcctaccagcagcactctgtcaaacctggaactagatgcagccgagaaggatcgcaagcttcaggagaaagagaagcaaatcgaagaactgaagaggaaactggaacaagagcagaagcttgtggaagtgctgaaaatgcaacttgaggttgaaaaacgagggcagcaacagcggcccctggaaccccagcccagtgccccaggtcattctgtcaacaagtcagatcagaagcacagcagccttggctcctccatcaaagacgaggcctcactccccgactgctccagctccacgcagcccatcccagtagccagccacactgtaggccagcccgtctctacaggtggccagacccttgttgccaaaaaggctgtagttatcaagcaagaggtccctgtggcccaggcagagcagcagagtgtcgtctcgcagttttatgtgagttcccagggacagccaccgcctgctgttgttgctcagccccaggctttactgaccacgcagactgctcagctcctgctcccagtgtccatccagggctcgagtgtcacctcagtgcaactccctgtaggcagcctcaaactccannnnnnnnnnnnnnnnnnnnnnnnnnnnnnnnnnnnnnnnnnnnnnnnnnnnnnnnnnnnnnnnnnnnnnnnnnnnnnnnnnnnnnnnnnnnnnnnnnnnnnnnnnnnnnnnnnnnnnnnnnnnnnnnnnnnnnnnnnnnnnnnnnnnnnnnnnnnnnnnnnnnnnnnnnnnnnnnnnnnnnnnnnnnnnnnnnnnnnnnnnnnnnnnnnnnnnnnnnnnnnnnnnnnnnnnnnnnnnnnnnnnnnnnnnnnnnnnnnnnnnnnnnnnnnnnnnnnnnnnnnnnnnnnnnnnnnnnnnnnnnnnnnnnnnnnnnnnagcctagttcacccccgccaccccagcaatttgtcgtccagcactctctatttgggagcccagtcgccaagacaaaagatcccccccgctatgaggaggccatcaagcaaacacgcagcacacaggcccccctgccagannnnnnnnnnnnnnnnnnnnnnnnnnnnnnnnnnnnnnnnnnnnnnnnnnnnnnnnnnnagagatctccctccccataaaagaagaaccttctcctatttccaaaatgagaccagtgacagccagcatcaccacaatgccagtgaatacagtggtgtcccggccaccaccccaagtccaaatggcaccacctgtatctttagaacctatgggcagtttatctgccagcttagagaaccaactagaagctttcttggatgaaacgttaccctcagccaatnnnnnnnnnnnnnnnnnnnnnnnnnnnnnnnnnnnnnnnnnnnnnnnnnnnnnnnnnnnnnnnnnnnnnnnnnnnnnnnnnnnnnnnnnnnnnnnnnnnnnnnnnnnnnnnnnnnnnnnnnnnnnnnnnnnnnnnnnnnnnnnnnnnnnnnnnnnnnnnnnnnnnnnnnnnnnnnnnnnnnnnnnnnnnnnnnnnnnnnnnnnnnnnnnnnnnnnnnnnnnnnnnnnnnnnnnnnnnnnnnnnnnnnnnnnnnnnnnnnnnnnnnnnnnnnnnnnnnnnnnnnnnnnnnnnnnnnnnnnnnnnnnnnnnnnnnnnnnnnnnnnnnnnnnnnnnnnnnnnnnnnnnnnnnnnnnnnnnnnnnnnnnnnnnnnnnnnnnnnnnnnnnnnnnnnnnnnnnnnnnnnnnnnnnnnnnnnnnnnnnnnnnnnnnnnnnnnnnnnnnnnnnnnnnnnnnnnnnnnnnnnnnnnnnnnnnnnnnnnnnnnnnnnnnnnnnnnnnnnnnnnnnnnnnnnnnnnnnnnnnnnnnnnnnnnnnnnnnnnnnnnnnnnnnnnnnnnnnnnnnnnnnnnnnnnnnnnnnnnnnnnnnnnnnnnnnnnnnnnnnnnnnnnnnnnnnnnnnnnnnnnnnnnnnnnnnnnnnnnnnnnnnnnnnnnnnnnnnnnnnnnnnnnnnnnnnnnnnnnnnnnnnnnnnnnnnnnnnnnnnnnnnnnnnnnnnnnnnnnnnnnnnnnnnnnnnnnnnnnnnnnnnnnnnnnnnnnnnnnnnnnnnnnnnnnnnnnnnnnnnnnnnnnnnnnnnnnnnnnnnnnnnnnnnnnnnnnnnnnnnnnnnnnnnnnnnnnnnnnnnnnnnnnnnnnnnnnnnnnnnnnnnnnnnnnnnnnnnnnnnnnnnnnnnnnnnnnnnnnnnnnnnnnnnnnnnnnnnnnnnnnnnnnnnnnnnnnnnnnnnnnnnnnnnnnnnnnnnnnnnnnnnnnnnnnnnnnnnnnnnnnnnnnnnnnnnnnnnnnnnnnnnnnnnnnnnnnnnnnnnnnnnnnnnnnnnnnnnnnnnnnnnnnnnnnnnnnnnnnnnnnnnnnnnnnnnnnnnnnnnnnnnnnnnnnnnnnnnnnnnnnnnnnnnnnnnnnnnnnnnnnnnnnnnnnnnnnnnnnnnnnnnnnnnnnnnnnnnnnnnnnnnnnnnnnnnnnnnnnnnnnnnnnnnnnnnnnnnnnnnnnnnnnnnnnnnnnnnnnnnnnnnnnnnnnnnnnnnnnnnnnnnnnnnnnnnnnnnnnnnnnnnnnnnnnnnnnnnnnnnnnnnnnnnnnnnnnnnnnnnnnnnnnnnnnnnnnnnnnnnnnnnnnnnnnnnnnnnnnnnnnnnnnnnnnnnnnnnnnnnnnnnnnnnnnnnnnnnnnnnnnnnnnnnnnnnnnnnnnnnnnnnnnnnnnnnnnnnnnnnnnnnnnnnnnnnnnnnnnnnnnnnnnnnnnnnnnnnnnnnnnnnnnnnnnnnnnnnnnnnnnnnnnnnnnnnnnnnnnnnnnnnnnnnnnnnnnnnnnnnnnnnnnnnnnnnnnnnnnnnnnnnnnnnnnnnnnnnnnnnnnnnnnnnnnnnnnnnnnnnnnnnnnnnnnnnnnnnnnnnnnnnnnnnnnnnnnnnnnnnnnnnnnnnnnnnnnnnnnnnnnnnnnnnnnnnnnnnnnnnnnnnnnnnnnnnnnnnnnnnnnnnnnnnnnnnnnnnnnnnnnnnnnnnnnnnnnnnnnnnnnnnnnnnnnnnnnnnnnnnnnnnnnnnnnnnnnnnnnnnnnnnnnnnnnnnnnnnnnnnnnnnnnnnnnnnnnnnnnnnnnnnnnnnnnnnnnnnnnnnnnnnnnnnnnnnnnnnnnnnnnnnnnnnnnnnnnnnnnnnnnnnnnnnnnnnnnnnnnnnnnnnnnnnnnnnnnnnnnnnnnnnnnnnnnnnnnnnnnnnnnnnnnnnnnnnnnnnnnnnnnnnnnnnnnnnnnnnnnnnnnnnnnnnnnnnnnnnnnnnnnnnnnnnnnnnnnnnnnnnnnnnnnnnnnnnnnnnnnnnnnnnnnnnnnnnnnnnnnnnnnnnnnnnnnnnnnnnnnnnnnnnnnnnnnnnnnnnnnnnnnnnnnnnnnnnnnnnnnnnnnnnnnnnnnnnnnnnnnnnnnnnnnnnnnnnnnnnnnnnnnnnnnnnnnnnnnnnnnnnnnnnnnnnnnnnnnnnnnnnnnnnnnnnnnnnnnnnnnnnnnnnnnnnnnnnnnnnnnnnnnnnnnnnnnnnnnnnnnnnnnnnnnnnnnnnnnnnnnnnnnnnnnnnnnnnnnnnnnnnnnnnnnnnnnnnnnnnnnnnnnnnnnnnnnnnnnnnnnnnnnnnnnnnnnnnnnnnnnnnnnnnnnnnnnnnnnnnnnnnnnnnnnnnnnnnnnnnnnnnnnnnnnnnnnnnnnnnnnnnnnnnnnnnnnnnnnnnnnnnnnnnnnnnnnnnnnnnnnnnnnnnnnnnnnnnnnnnnnnnnnnnnnnnnnnnnnnnnnnnnnnnnnnnnnnnnnnnnnnnnnnnnnnnnnnnnnnnnnnnnnnnnnnnnnnnnnnnnnnnnnnnnnnnnnnnnnnnnnnnnnnnnnnnnnnnnnnnnnnnnnnnnnnnnnnnnnnnnnnnnnnnnnnnnnnnnnnnnnnnnnnnnnnnnnnnnnnnnnnnnnnnnnnnnnnnnnnnnnnnnnnnnnnnnnnnnnnnnnnnnnnnnnnnnnnnnnnnnnnnnnnnnnnnnnnnnnnnnnnnnnnnnnnnnnnnnnnnnnnnnnnnnnnnnnnnnnnnnnnnnnnnnnnnnnnnnnnnnnnnnnnnnnnnnnnnnnnnnnnnnnnnnnnnnnnnnnnnnnnnnnnnnnnnnnnnnnnnnnnnnnnnnnnnnnnnnnnnnnnnnnnnnnnnnnnnnnnnnnnnnnnnnnnnnnnnnnnnnnnnnnnnnnnnnnnnnnnnnnnnnnnnnnnnnnnnnnnnnnnnnnnnnnnnnnnnnnnnnnnnnnnnnnnnnnnnnnnnnnnnnnnnnnnnnnnnnnnnnnnnnnnnnnnnnnnnnnnnnnnnnnnnnnnnnnnnnnnnnnnnnnnnnnnnnnnnnnnnnnnnnnnnnnnnnnnnnnnnnnnnnnnnnnnnnnnnnnnnnnnnnnnnnnnnnnnnnnnnnnnnnnnnnnnnnnnnnnnnnnnnnnnnnnnnnnnnnnnnnnnnnnnnnnnnnnnnnnnnnnnnnnnnnnnnnnnnnnnnnnnnnnnnnnnnnnnnnnnnnnnnnnnnnnnnnnnnnnnnnnnnnnnnnnnnnnnnnnnnnnnnnnnnnnnnnnnnnnnnnnnnnnnnnnnnnnnnnnnnnnnnnnnnnnnnnnnnnnnnnnnnnnnnnnnnnnnnnnnnnnnnnnnnnnnnnnnnnnnnnnnnnnnnnnnnnnnnnnnnnnnnnnnnnnnnnnnnnnnnnnnnnnnnnnnnnnnnnnnnnnnnnnnnnnnnnnnnnnnnnnnnnnnnnnnnnnnnnnnnnnnnnnnnnnnnnnnnnnnnnnnnnnnnnnnnnnnnnnnnnnnnnnnnnnnnnnnnnnnnnnnnnnnnnnnnnnnnnnnnnnnnnnnnnnnnnnnnnnnnnnnnnnnnnnnnnnnnnnnnnnnnnnnnnnnnnnnnnnnnnnnnnnnnnnnnnnnnnnnnnnnnnnnnnnnnnnnnnnnnnnnnnnnnnnnnnnnnnnnnnnnnnnnnnnnnnnnnnnnnnnnnnnnnnnnnnnnnnnnnnnnnnnnnnnnnnnnnnnnnnnnnnnnnnnnnnnnnnnnnnnnnnnnnnnnnnnnnnnnnnnnnnnnnnnnnnnnnnnnnnnnnnnnnnnnnnnnnnnnnnnnnnnnnnnnnnnnnnnnnnnnnnnnnnnnnnnnnnnnnnnnnnnnnnnnnnnnnnnnnnnnnnnnnnnnnnnnnnnnnnnnnnnnnnnnnnnnnnnnnnnnnnnnnnnnnnnnnnnnnnnnnnnnnnnnnnnnnnnnnnnnnnnnnnnnnnnnnnnnnnnnnnnnnnnnnnnnnnnnnnnnnnnnnnnnnnnnnnnnnnnnnnnnnnnnnnnnnnnnnnnnnnnnnnnnnnnnnnnnnnnnnnnnnnnnnnnnnnnnnnnnnnnnnnnnnnnnnnnnnnnnnnnnnnnnnnnnnnnnnnnnnnnnnnnnnnnnnnnnnnnnnnnnnnnnnnnnnnnnnnnnnnnnnnnnnnnnnnnnnnnnnnnnnnnnnnnnnnnnnnnnnnnnnnnnnnnnnnnnnnnnnnnnnnnnnnnnnnnnnnnnnnnnnnnnnnnnnnnnnnnnnnnnnnnnnnnnnnnnnnnnnnnnnnnnnnnnnnnnnnnnnnnnnnnnnnnnnnnnnnnnnnnnnnnnnnnnnnnnnnnnnnnnnnnnnnnnnnnnnnnnnnnnnnnnnnnnnnnnnnnnnnnnnnnnnnnnnnnnnnnnnnnnnnnnnnnnnnnnnnnnnnnnnnnnnnnnnnnnnnnnnnnnnnnnnnnnnnnnnnnnnnnnnnnnnnnnnnnnnnnnnnnnnnnnnnnnnnnnnnnnnnnnnnnnnnnnnnnnnnnnnnnnnnnnnnnnnnnnnnnnnnnnnnnnnnnnnnnnnnnnnnnnnnnnnnnnnnnnnnnnnnnnnnnnnnnnnnnnnnnnnnnnnnnnnnnnnnnnnnnnnnnnnnnnnnnnnnnnnnnnnnnnnnnnnnnnnnnnnnnnnnnnnnnnnnnnnnnnnnnnnnnnnnnnnnnnnnnnnnnnnnnnnnnnnnnnnnnnnnnnnnnnnnnnnnnnnnnnnnnnnnnnnnnnnnnnnnnnnnnnnnnnnnnnnnnnnnnnnnnnnnnnnnnnnnnnnnnnnnnnnnnnnnnnnnnnnnnnnnnnnnnnnnnnnnnnnnnnnnnnnnnnnnnnnnnnnnnnnnnnnnnnnnnnnnnnnnnnnnnnnnnnnnnnnnnnnnnnnnnnnnnnnnnnnnnnnnnnnnnnnnnnnnnnnnnnnnnnnnnnnnnnnnnnnnnnnnnnnnnnnnnnnnnnnnnnnnnnnnnnnnnnnnnnnnnnnnnnnnnnnnnnnnnnnnnnnnnnnnnnnnnnnnnnnnnnnnnnnnnnnnnnnnnnnnnnnnnnnnnnnnnnnnnnnnnnnnnnnnnnnnnnnnnnnnnnnnnnnnnnnnnnnnnnnnnnnnnnnnnnnnnnnnnnnnnnnnnnnnnnnnnnnnnnnnnnnnnnnnnnnnnnnnnnnnnnnnnnnnnnnnnnnnnnnnnnnnnnnnnnnnnnnnnnnnnnnnnnnnnnnnnnnnnnnnnnnnnnnnnnnnnnnnnnnnnnnnnnnnnnnnnnnnnnnnnnnnnnnnnnnnnnnnnnnnnnnnnnnnnnnnnnnnnnnnnnnnnnnnnnnnnnnnnnnnnnnnnnnnnnnnnnnnnnnnnnnnnnnnnnnnnnnnnnnnnnnnnnnnnnnnnnnnnnnnnnnnnnnnnnnnnnnnnnnnnnnnnnnnnnnnnnnnnnnnnnnnnnnnnnnnnnnnnnnnnnnnnnnnnnnnnnnnnnnnnnnnnnnnnnnnnnnnnnntgccatacattttgcacatgtactgtacataggtaatgcttactgtatttttatatgtgtgcacatttatcatcagatcttttgtacatagtggcagtattgtagctgatcgggaaatgtttgatatctcagcaattttgcatttttgtgtctcaaataaaagacattttgatgt

SEQ ID NO: 37912 - DNA, 661 bp, Macaca Mulatta
  misc_feature (1)...(661): n = A,T,C or G
gggctctcggccttagcgccatttttctggaaacctctgcgccatgagagccaaggtgagcggttcctggtagtaagcttgggaggcaggagttggcgagtagtagggggagactaaggcaagtccgccatacctcctgaactactgggtttcaagggtaccaagagctggtgggagaggaaaagtagtttgtaagagagctagcggttaagtgctatgggtagagagggtgggaattagaaaagggtggaattctgattttatgttgcgagggtgtccaagttactgatgtagttgctacgaccaatctcatacttggttaagaatctgcccggttctaaagagtgcatttcatatccctcctaagcctactaataagccttaaannnnnnnnnnnnnnnnnnnnnnntctgctgcttggggaacgggttgctaatggaagaaagaacccaaatgccccaggctggaaaccgcaaaagaaagaaaggatgagggccaaaaggtccaaagttaaacccccctaaccttggttggcattccggggaaaggccccccggggaccccaaaacccttgggaaatgcccccaggccccctggggggaatcccctgggnnnnnnnnnnnnnnnnnnnnnnggccaaggccccacgggggttctaaac

SEQ ID NO: 37913 - DNA, 800 bp, Macaca Mulatta
  misc_feature (1)...(800): n = A,T,C or G
ggggcggccgccatgttctctgtgtgtctttgtctttgtgtgtgttctttcattctccaccacccccggtgcggcccccaacaagtggcgcagcgagcagggtcagcacgggtgagtaggggagaacaagaaggggaaccccctaggagcgggtaaggctcagatattgttaaggggaaccttcttaagctttcattatgggaattccatctctctggcctcagaatatttatggctgtttcaaggactgttgctgtctatgggagtagaagtgaaagaaaaagactttgaagcgattgtttgcccatgttgaataacattgttactggtttcagtatcagactaaagtgcagctgaatcggaaaaaatggttacaggtagtaaaagctttgcttagagctctccagttaggggatattatgcctctaaaattgtggaccttgtgtaactctatcactcagacattagagttacttgagactgattcggagtgtggtaatgtacccacaggaggaaaggtatctgaagattttggaaaattaaataaaataaaataaatctgaaaatggagcccattttgtgccgagggttagcaaaaagnnnnnnnnnnnnnnnnnccagcctcctttccttcttctaaggggaaaattctgaacatgcaattgttatttatgggaaaatgcttccaccaaataatttaccgaaatcatttctttcaaatttcacccttttcccaaacctttccccgggatttccctttttccccctttccgtggnnnnnnnnnnnnnnnnnnnnnagg

SEQ ID NO: 37914 - DNA, 191 bp, Macaca Mulatta
  misc_feature (1)...(191): n = A,T,C or G
tctataaagttcctcctaaaagtgacncctttcggcactgtgtccttttagacactttgtacaagttacttatacttttaacagtgatttgcttacatgtttgtcttccccacatctagcccagagactgtttcaaaaaaggcactaaaaaatggataaaagtaaatatattactcttaatgagtagtgta

SEQ ID NO: 37915 - DNA, 380 bp, Macaca Mulatta
gactactgagaataaaccctgcggtctaggaaatttccgtgcttctcacatttgagttatgcatctttactgtttttcacgtttgttgcagaagctagaacttaataagggatcgcaaagtatgttgattaacgtacggagaaatatgttgcaaacaatttaatgtttaaagcgctagaaactagatatgttatggtaacataacctctgggaagttcttatatttctcaaggtgcagtattcctgagacttcccttgcttgataatcattcgacctattacggattttcagacatacggaagtggatttgtgggagacaggaggggacacccaaacaatagaatctggtgccacaacaatgaaataaagtcacaagtgt

SEQ ID NO: 37916 - DNA, 793 bp, Macaca Mulatta
  misc_feature (1)...(793): n = A,T,C or G
ggatagaaaattttatctgtataagcagttgagttgaagcttagttattacaatttgataattatgttcagcttttgaaaatggacgtttctgatgtacagatgtaaaattgcagcttatagctgttgtcactttttaatgttataattgaccttgcatggtgtgaaataaaagtttaaacactggtgtatttcaggtgtacttgtgtttatgtactcctgacatatttgtattaaagtggaataatactaatcttgttaaaagcaatagaccttctcaaactattgaaggaatatgatatatgcaatttaattttaattccttttaagatatttggacttcctgcatggatatacttaccatttgaataaagggaccacaacttggataattttactttagatttgaaatatatttggtaatcttaactattggtgtactcatttatgcatagagactcatttatgaatgggtagagccacagaacgtacagagttaaccaaagtgctcttctctagaaactttacacctcctgtggggttacaagttaacttttgaagtaatgtacccttccttcttaaaataatcaagcttccggtgctccttcctagggaatccattaatttttacatttttaaacaaggtggacaatttccctttagggggtttttgtttttaaacttttccgggcatccggtcctctacaacctccaaaacaggcagccttgggtttnnnnnnnnnnnnnnnnnnntttttcccttgaaagttaccgggggataaaggtaggaatat

SEQ ID NO: 37917 - DNA, 177 bp, Macaca Mulatta
gtgtgctaacagaagacatttaattatgccatcacatatgaattttctgtcctccaaattgacccaacacctcgtacatctcttagggcagcattcctttcctggaggaggtgctttgaggggaactctggaggaagaataaggtttagatagtgagttccttggaggtcagaactg

SEQ ID NO: 37918 - DNA, 353 bp, Macaca Mulatta
cagatttttgcaaaaaccctatgggtaagaccgccaccctcaagattgaacccttggatgcaacagaaaatgaaaaggaagatccaggataaggaagaagtctgtacggatcagcaaagactgatgtttgatggcaagcaactggaagatgaaagtactttaactacaacattcaaaagtagtctactcttgtgttgagactttgtggtggcattaaagaagaagtcttatacgactcccaagaaggataagcacaagagaaagaaggttaagttggttgtccttaaacaccgtaaggtggatgagaatggtaaaattagtcgccttagtcgggagtgcccttcagatgaatg

SEQ ID NO: 37919 - DNA, 413 bp, Macaca Mulatta
cctgagggagcagagcaacccaagcccctcacaggacacagatggcacaaaggccaccaagatggcccattccatgaggagcatacagaacggacagccccccaccagcaccccagcttcctcagggtccaaagccttccaccgactctccaggagaaggtccaaagacgtggagttccaggacgggtggccccggtcccccggcagggccttcctccctcttcggcaccgcagcagcagcgagataaccctcagcgagtgtgacgcggaggacgcgggggagccgagcggggtccggcacacgggggcgctgcccctcttccgcgagtatgggagcacctcgtccatcgatgtggaggaaaagccggagcagagcttcttcgacatcctcaacgagttccgcagcgagcagc

SEQ ID NO: 37920 - DNA, 940 bp, Macaca Mulatta
  misc_feature (1)...(940): n = A,T,C or G
ggggctttttcgtctgggctgccgacatgccatccagactgaggaagacccggaaacttcggggccacgtgagccacggccacggccgcataggcnnnnaccggnnnnnnnnnnnnnnnnnnnnnnnnnnnnnnnnnnnnnnnnnnnnnnnnnnnnnnnnnnnnnnnnnnnnnnnnnnnnnnnnnnnnnnnnnnnnnnnnnngcattaccacttaaagaggaaccagagcttctgtccaactgtcaaccttgacaaattgtggactttggtcagtgagcagacacgggtgaatgctgctaaaaacaagactggggctgctcccatcattgatgtggtgcgatcgggctactacaaagttctgggaaagggaaagctcccaaagcagcctgtcatcgtgaaggccaaattcttcagcagaagagctgaggagaagattaagggtgttgggggggcctgtgtcctggtggcttgaagccacgtggagggagattcattaaatgctgactactttccaagtgaacagttcaagttatcaaaaattacccttgtcgggccgccctgggcccttcaagaaagctttctaagaccattttatttgggcgcgcgcggggccccagttgggttaagtgaaacatggttccataggcttgttttccctagggaaaatccctgggttcactggaactatgggctttggaaattcccccccccaaataaaaaaaacctncggggggggtaacccgagnnnnnnnnnnnnnnnnnnnntcccagaatgggggatttcttaaagggccatattaactggggaattcatccccaaattggaaatcctataatcaaagataacgaataggttattgtgtccgttggacaatcctttcagactggtccactcagggcaaccgcatcggaggcctatgactccatagttgggccggg

SEQ ID NO: 37921 - DNA, 333 bp, Macaca Mulatta
gatacacagggtttgttacgaggcactcagtctactccatatccagagtggacagttactcaccaatcccacatgtgtggtcagtcacctacacagctgctcatctagtattaatggtcattacccagtcctcatttggatcagtattccctcacatagctgtacatctagagtccatggtcactcacctggcttcaaatataatgtcagtggttattcacccagcctcacatctagggcttatagtcactcacctgggcccacatttaatggaatgacctcacatgtggtgtcagcagtcattcattaaagggtacagtcacaggtcaccca

SEQ ID NO: 37922 - DNA, 278 bp, Macaca Mulatta
aaatagtcatcaagcaacatcggcctctgagtccacaacccttgacggatcatttagaaacctgataattaaagaccatggggtaggcagcactttattttgccaggatggtagattgctgcattcaaggtgttcacagtctcctggaaatacgacagcttttaatgaagcaggcttacttacaacatataattcaaggaaagttcaaaagctaaggaatcttgagtctggagaagtcctgcctcaaactctgccacaccatataataagaacagaag

SEQ ID NO: 37923 - DNA, 1227 bp, Macaca Mulatta
  misc_feature (1)...(1227): n = A,T,C or G
gggtttatgattttatgtgtttatggatttctgtgagtttaccctatttggaattcactcatcttcttaaatctgatttctgtcttttgctaaatgtgaagcgttttcagtcatgatttcttcaagtatttcttctgccctgtcctctttctccttgccttctgggataccaattaaatgaagattagatattttgttatagatccgtgggtctctaaggctctgnnnnnnnnnnnnnnnnnnnnnnnattcacattgggtactttccatttttctgtctttgaggacactgaatcttttcctcctccattctgctgttgaaccttctgttgagggttttgagttttcattttttgatttggctttttgttccagatttattgaaacgttttccaaacctaaaaattttcccctgttgaaatccaaaaggatttcattttcggattcctttttgcttttccgctctgcgtacaaaaaaattttccttggttttttctctcttcgcatttattggatcgacgtcaacacgcccgcttggtttattcaagaaaaatatggggaaactctcacatcacgtgcgactattagacaacattgggtttgtgctgctctacananataatgttatcaccctcacatctaaaccaaaanctccacacgacaaacaaaaaattggatgaacaatacttgttatccagccgcgtttcgcacccccccccaaaantgcggcgtaaatctatgtgttgagtgnctcttccctaccaccaacattcgaattttagtagagaccccgccccatgtccgataataattctttgatcaagagagaattcctccgcggggaggttccctctggtcgaaatatgtttttctcccacactattaacgcattgttagtagagggtgttcccattgtcttatggccgaagcataatacgtgtaatancaagacctcatatattatgtcattttttaagtgatcggtggagacacaaacctcccctctcggtggattaatnnnnnnnnnnnnnnnnnntaatgagaacaccactactctaataaaaaccctgtacgagaggagaaggagatcatcttttcgggggggatgtgtacttctatttagcagtaagacaaaaaaacaaatatatcaccttctttctctgtctcaagaacatcatcaatattggctccctttgttgtgcaccaccgggggcgtggggacacgcg

SEQ ID NO: 37924 - DNA, 799 bp, Macaca Mulatta
ggatgtaacaaaatgtcatctcggaagtgagacatctcatcacctttgccagtggtctccttgtttattgtagaggatctatagtatgttttaatgtctggtagggctagtatcctcttatggtttttctttttcattgtttccctcactgttgttgaatgtttgatgttccaaatgaaccttaggatggtattgacttgtctggcttggagtttcataaccttagcactgttgacatttggggctagatatttctcttttatgggaggctatcctgtgtattgtaggatgtttagtggtatccctgacctccatccactagatgtcagtagcaccctcacatttataacaaccaaaattatgtctccagatgttgcaaaatttcaattgggagataaaatcatcctgagttgaaaaccccctaatctacaagtaatttagttttctttccttggtattatatatggacatgtaactgatgccccagtgttgttcatatatatgaaaagcccgttgaattccgtgtcatttttatatcttgctacttactgaaccctgttattctcttatcccactgaatgtctttgacttctccaggtataagtatgaaaatcatcctgaaataaaaaatagtttaaaccccaataccccttttgaaagcccccatatgggttttacaaaaacaattgggctaataactccgggtacaatgttaaaaaaactagccaggaataattatggaatgccttgcccttgtttcctgaattttataaaaaaaatacttcctggtgtgaaatat

SEQ ID NO: 37925 - DNA, 797 bp, Macaca Mulatta
  misc_feature (1)...(797): n = A,T,C or G
ggatgccccagttagacacatcgacatgattcaccactattatggcgatgcttcctacactatatcttatcatacagctaaagctactaaacacgaaccactaccaaccaccccttacaaaaaaccccacccttcaactccacaacatccgctgacaaccaaaatggacgaaaacttgtttacccctttctcaaccccaacaattttaaatcaacccgctacgatccccattatcctattccctaccctactaatcttannnnnnnnnnnnnnnnnnnnnnnnnnnnnnnnnnnnnnnnnnnnnnnnnnnnnnnnnnnnnnnnnnnnnnnnnnnnnnnnnnnnnnnnnnnnnnnnnnnnnnnnnnnnnnnnnnnnnnnnnnnnnnnnnnnnnnnnnnnnnnnnnnnnnnnnnnnnnnnnnnnnnnnnnnnnnnnnnnnnnnnnnnnnnnnnnnnnnnnnnnnnnnnnnnnnnnnnnnnnnnnnnnnnnnnnnnnnnnnnnnnnnnnnnnnnnnnnnnnnnnnnnnnnnnnnnnnnnnnnnnnnnnnnnnnnnnnnnnnnnnnnnnnnnnnnnnnnnnnnnnnnnnnnnnnnnnnnnnnnnnnnnnnnnnnnnnnnnnnnnnnnnnnnnnnnnnnnnnnnnnnnnnnnnnnnnnnnnnnnnnnnnnnnnnnnnnnnnnnnnnnnnnnnnnnnnnnnnnnnnnnnnncctattcaccaccaaacctctggataaactcttgctaaacctccaacacttctgggaattactaactacttctaaaaaattgcagtaagcct

SEQ ID NO: 37926 - DNA, 134 bp, Macaca Mulatta
  misc_feature (1)...(134): n = A,T,C or G
actgccccgtggacctgttctttgtgctggacacctcggagagtgtggccctgaggctgaagccctacggggccctcgtggacaaggtcaagtccttcaccaagcgtttcatcgacaacctgagggacaggtan

SEQ ID NO: 37927 - DNA, 653 bp, Macaca Mulatta
  misc_feature (1)...(653): n = A,T,C or G
ctgtatgcttcaattgacctttgtttcccctcagataaacagttaaccactttatataatcagctgtttgcttgtggctccaactcccacctctttcaagctgctcctttaaggatagattctgtgtcttacctctttgtgcctagatcctagaactgtttgtattgcatctgggcttaagcattgtgaagaatgggtggaaaatggtaaatatttattactaaagatgtgggaccacatgtacatttatatatattttcaatacagacagggtctcactnnnnnnnnnnnnnannnnnnnnnnnnnnagggtcaggtgatcctcccannnnnnnnnnnnnnnnnnnnnannnnnnnnnnnnnnnnnnnnactcctggcccatttttctctttttgaaggatttttatttctactcttccagggcaattagaatcacaaggaaaagacccttggactggagtctggtagaaagaatgctcagtgagcagacctgggcctctgaactgtccccttgtatgttttccacggccttgcagctgactccttggagcagtggttctttgaggtgtaggtcagaaattcatggggtgcttaatcaaagtgtacatgtctgatgaatacctaacccctgctgatcctctctaggtatcag

SEQ ID NO: 37928 - DNA, 1514 bp, Macaca Mulatta
  misc_feature (1)...(1514): n = A,T,C or G
cctgtaagcatcacattgctggaggacaatttcatcccagagcttggaccatccctaactcaggggttaggggttgtctcttggtgacgtaaatgaaaaaccaggtccagatcagagttcctgacgttgaacactcatccattctttgaatcatgggaggggaggcctggtactaggtagacctaacctctttgaggaaccacagagcccaaggcaaaaaacctctagcatcctccacccccgatcctccctgggacccctgtggcctgtctcactgagcactcttccgtccgtagatgtctcggctgctctatgagggagttccttttcaggtgtggggctgggcatggccactcctgctggatgtccagatggtggaaaccaaggacctagggaaatactaggtacagcctttccacgctcatccagcgcaggacaaacaggccaggcggtgtcaggagcccaggtctcgggatggagggaacgtcaaccctgnnnnnnnnnnnnnnnnnnnnnnnnnnnnnnnnnnnnnnnnnnnnnnnnnnnnnnnnnnnnnnnnnnnnnnnnnnnnnnnnnnnnnnnnnnnnnnnnnnnnnnnnnnnnnnnnnnnnnnnnnnnnnnnnnnnnnnnnnnnnnnnnnnnnnnnnnnnnnnnnnnnnnnnnnnnnnnnnnnnnnnnnnnnnnnnnnnnnnnnnnnnnnnnnnnnnnnnnnnnnnnnnnnnnnnnnnnnnnnnnnnnnnnnnnnnnnnnnnnnnnnnnnnnnnnnnnnnnnnnnnnnnnnnnnnnnnnnnnnnnnnnnnnnnnnnnnnnnnnnnnnnnnnnnnnnnnnnnnnnnnnnnnnnnnnnnnnnnnnnnnnnnnnnnnnnnnnnnnnnnnnnnnnnnnnnnnnnnnnnnnnnnnnnnnnnnnnnnnnnnnnnnnnnnnnnnnnnnnnnnnnnnnnnnnnnnnnnnnnnnnnnnnnnnnnnnnnnnnnnnnnnnnnnnnnnnnnnnnnnnnnnnnnnnnnnnnnnnnnnnnnnnnnnnnnnnnnnnnnnnnnnnnnnnnnnnnnnnnnnnnnnnnnnnnnnnnnnnnnnnnnnnnnnnnnnnnnnnnnnnnnnnnnnnnnnnnnnnnnnnnnnnnnnnnnnnnnnnnnnnnnnnnnnnnnnnnnnnnnnnnnnnnnnnnnnnnnnnnnnnnnnnnnnnnnnnnnnnnnnnnnnnnnnnnnnnnnnnnnnnnnnnnnnnnnnnnnnnnnnnnnnnnnnnnnnnnnnnnnnnnnnnnnnnnnnnnnnnnnnnnnnnnnnnnnnnnnnnnnnnnnnnnnnnnnnnnnnnnnnnnnnnnnnnnnnnnnnnnnnnnnnnnnnnnnngatcatgaggatcagagagggaaagtcacttgcctaaagtcacacagctgaacagtggtggagttcaactttgaccatgggctgtctgatcccaaggtgtatacttgttcctctcccaagagactcctctcttatcaggctcaaatgaatgaaaggaggatgttaaag

SEQ ID NO: 37929 - DNA, 733 bp, Macaca Mulatta
  misc_feature (1)...(733): n = A,T,C or G
ggactttgcgtttgacgctgttggaggaggaaaccaaagtggccnnnnnnnnnnnnnnnnnnnnnnnnnnnnnnnnnnnnnnnnnnnnnnnnnnnnnnnnnnnnnnnnnnnnnnnnnnnnnnnnnnnnnnnnnnnnnnnnnnnnnnnnnnnnnnnnnnnnnnnnnnnnnnnnnnnnnnnnnnnnnnnnnnnnnnnnnnnnnnnnnnnnnnnnnnnnnnnnnnnnnnnnnnnnnnnnnnnnnnnnnnnnnnnnnnnnnnnnnnnnnnnnnnnnnnnnnnnnnnnnnnnnnnnnnnnnnnnnnnnnnnnnnnnnnnnnnnnnnnnnnnnnnnnnnnnnnnnnnnnnnnnnnnnnnnnnnnnnnnnnnnnnnnnnnnnnnnnnnnnnnnnnnnnnnnnnnnnnnnnnnnnnnnnnnnnnnnnnnnnnnnnnnnnnnnnnnnnnnnnnnnnnnnnnnnnnnnnnnnnnnnnnnnnnnnnnnnnnnnnnnnnnnnnnnnnnnnnnnnnnnnnnnnnnnnnnnnnnnnnnnnnnnnnnnnnnnnnnnnnnnnnnnnnnnnnnnnnnnnnnnnnnnnnnnnnnnnnnnnnnnnnnnnnnnnggtgtcgggggataccccgagcgcttactctgaagttatcccggatgcccttacaactacattggaaaataccccttgatcatccttataggggctgccgtgtcattcttcaccttagttaagccagttaatggttttn

SEQ ID NO: 37930 - DNA, 680 bp, Macaca Mulatta
  misc_feature (1)...(680): n = A,T,C or G
ntctgaatctccatgaatcaaattctcttcatngtcatatcncggcaagttcttcattagccagtcgataaactgtgcatgggcagggatgtcctgatgagctgcagcttgatattgctttgtccaggttgatacctgtctttgncagtacccagcacctacaccatatccttccagctgcaatgactgtatattcaaggaatgtaactgagccaatgtttctaccatggccacatatatggctgaacgttctgctgggctaactccaggaactgttaaatcacgaaagattcgaccctgcacatgttccattatgtaaaattctgttccaatgacagaagtatcactgcagtacagtataggcttgggaacagggaatccaactgaaaacaaggctttctggactttaaattctctatcaatcttatgtgctttaggaagaagtgaacctggtggttttttcctgagcacatatgtttgaaagcccttctggagataaaaggttggattggactgtcctgctctgtactgggcaatggtcagcgtagcctcacgttcggccccaaagccaggcaagtgctggtttaggtaagcctccagggacttgctgtcgaacttgtgctggggcagcatttcgtccacattgggctcgccagtagcacctagcttcatgatccccc

SEQ ID NO: 37931 - DNA, 689 bp, Macaca Mulatta
gggggttgttcaccgttcctttgagttccttgtagattctggagattagtcgtttgttggaggtatagattgtgaagatttttccaattcatcaccgttttttagagtttttctcactaagtattgactcgccctgcaacgtggatagagggacgggtcggaagtggctcgggcgggggatctgcaggagaagaactgaggctcctgagtgcagcatcttgtccaagaggtttcatcccaatgcatagggaacatccgcattgtgatgtttagctctcagcttctaacttgggcgttatagcgtctgtatttctcatttaatgttttatgggcacacatgcagaggagttttcgtcactcaaaagcccgacgacttcccctgccaacccgttggaatgaaaagaaacctcgataacctcttacacacatggaaatggaaccctgagcagagattgtggtgggtatctgtacagcctaaggacttttggtggacctgccagcaatgagactgctaatgacaatgcatcacgtgatgtcactagggcaagcatagatcagctgcggatcaacctccctgcctgtgtgcatgaaataattgtgttgccactatccatgatcattcttcttccggtcaaatttcagaaacccgaattggaagaccagaaattcctgtcagtaactttgtcaag

SEQ ID NO: 37932 - DNA, 302 bp, Macaca Mulatta
  misc_feature (1)...(302): n = A,T,C or G
gatggaaagaagaagtttgacaaagaaagtgaaaaatattattctatccttgaaaagcatttaaatttgtctgcaaagaaaaaggagtctcatttacaagaggnnnnnnnnnnnnnnnnnnnnnnnnnnnnnnnnnnnnnnnnnnnnnnnnnnnnnnnnnnnnnnnnnnnnnnnnnnnnnnnnnnnnnnnnnnnnnnnnnnnnnnnnnnnnngcttttgtcatttcttcagggcttatttactttttaccacgagggatatgaacttgcccaggaatttgcaccgtataagcaacagctgca

SEQ ID NO: 37933 - DNA, 194 bp, Macaca Mulatta
tcccagaactcctgcctcctgccgcacaggcggacccacatggggggaaactaccagtgctccgactgcgggaagaccttctcccagaaggcgaacctcatccgccatcaccggatccacacgagggagaagctgcacgggtgaagaggccgcggggtcatcacagagtcacagcacgaggtcgccgagcctct

SEQ ID NO: 37934 - DNA, 725 bp, Macaca Mulatta
gggactgcattttgctattcaggaagggtggctaatttcagcttaagatgttcaagtttcattaaaaaaaagaagctgataggtgatggagctcccccaggagaattcagagagagaacctgagagaagataggggaagagaaaatggtcacgactcagacagaggtcctactgtctctattatgtcagttgcctaatttgaggcatacttttgtggcccaggaggtgtccaggcaagcgagcaagggaaatgattgttgtaaatgaccgttatgccagtgcccggggcagtggctgaagtggaggaccagtaggtgccatattttagagtaaagtggcccaggcaggctgccactctctgcaccgcatgccactttatggttgaagctaaagatgacacctgctctttccctggggtatcttgtgagtcagagactgaagcctgcacagctgctcctctgcagggcattgtcattccctgctgcagccccgtatctgggagcagccctggtctcccccttctctctttccttcatcatttgtcaatagccaattgatttaatcttccaactctctcttgactatggtttgctttttctcctctcctttgcttgagaacaagctgtcatcttttttgcctaaatgatgggcaagaacctccctgaagagttaatcccaaatcaaaactttgaatggctttccaattttacttttttcagaaatga

SEQ ID NO: 37935 - DNA, 807 bp, Macaca Mulatta
  misc_feature (1)...(807): n = A,T,C or G
ggagaagcttcctcagggttccacagctaggaaatggagctcccgagtccaggcctgtgactcctggctctcggctctgtcggctccactgggccacgccatgtaaggtgtatcacagggctggaaatttcctgatgtgacaagtatctggaaacatggctttctaaagccagttggcttctcttgcttaatgttgttccctgggacttggtccgtctggctgtccctccagtccctgtgcgagggtcatcagtgagcattctgactgtgccttctctcagtggtctgttctcctaagagcacaaccttgtcctctccctcctggatgcttcatccatgagcgtacacccagctgttttcctgagaaagactcctcagctgcctgtaatttcacctggaaaacagggagaatgtacccacaggttcatgccaaggccccgtaagtcctctgtgtaccgtgtgacgggctttctctcgcccacactacagccccgttcccgagggagtgcaatatcctctagcctttgttttatcttggtatttctactcagaccagtgtaggttttgacccagcctaaatacctaaaactgactggngatggagatgatgtgatgggagggaaaaggaatagatgattttatcccctccaaaagtaatctggaaaaattccttgccgtgaaaaacagggaaactaaccttgaaaaaaaagggaaagaatttttggcggcccaggttcacgccttggtgcccggagactcctccacctcctggttcttggccttgaaaccgcccttgggtggccctgg

SEQ ID NO: 37936 - DNA, 627 bp, Macaca Mulatta
  misc_feature (1)...(627): n = A,T,C or G
cgcagtctgggagtgagtgcagggaaccggagtatttgctgggccgggtaccatggacgtgggcgaacttctgagctaccagcccaataggggcacaaaacgtccccgggatgatgaagaggaggagcagaagatgcgtcggaaacaaactggtactcgagaacgtggccgctatcgggaagaagaaatgactgtggtggaagaagcggatgatgacaaaaaaaggctgcttcagattattgacagagatggnnnnnnnnnnnnnnnnnnnnnnnnnccattggatgaaagctcagtgaagaaaatgatcctcacatttgaaaagagatcatataaaaaccaagaattgcggattaagtttccagacaatccagagaagttcatggaatccgagctggacctaaatgacatcattcaggagatgcacgtggtggccaccatgccagacctgtaccaccttctggtggagctgaatgctgtacagtcgcttctcggcttgcttggacatgataatacagatgtgtccatagccgtggtcgatttgcttcaggaattaacagatatagacacccctccatgagagtgaagagggagcagaagtgcttatcgatgctctggtggatgggc

SEQ ID NO: 37937 - DNA, 884 bp, Macaca Mulatta
aatttgtattgattggactttcaagttcttaggagatgcatctttttattttttggttcttctctatgttctacgtgggaattatcctggaaaatctcttcattgtgttcaaagtaattattgactctcatttaaattccccaggtactacctactggccaacaattctcttcttaatctgggtctttcttatactacagttctgaccttttcactaactgcagtatcatttcttttccaagatacatgacacagatatttttcatttgcatcatgggtaaaattgagatggtgctgctcataaccatggcatatagcaggtactctgcaatctgtaagcctccccattacctgaccacaatgaaccccaaaatgtatgtttcttttgttagaggcatcctggatagtcaggataatccatgctgtatctcagtttgtttttgccataaacgcctttttgtggccgtaatagagtagatggttttcactgtgattttccttgtatcataaaatttgcttgtgtagacatttacaaactagagtttgtagtcattgctaacagtgggcttatatccatggctgcctgtttcttattaattatatcctatattttcattttggtgaccatctggaatccttcttcaggagacttatccaaagcatttgtttcatgtcagatcacatcagagtagggaattttgtttttatgccttgtatatttctctttgtgtagccttttcctaaaacaacacatgattaatatttgttcattgttccttttgttctcacccctgtctagaatctacacattaagaaacaaagacatgagagtctcctggaaagactgggaaaatggattgcaggtctagcaggatctcataaaa

SEQ ID NO: 37938 - DNA, 718 bp, Macaca Mulatta
  misc_feature (1)...(718): n = A,T,C or G
gggggacacaatttagtccataacagaaggtaacagaaaatcattcttaaacttgcaagggttaaaacccatgtaccccttgttgaaacatcttcttgaaggtatacaccaactaagaagtgattcaaaattaaagccttaagaatggactatcgcagcccaaaagaacttttggtaaaaatggaaaccactgaaattagaatgaagtttccaaaaacctgctaaatatggttatgcaactaaatgctaacggcaaaagtcattctttgaaagtgaagacatatcatgtgaacattaataacctgtatcccaaacctaagattatgttaacaaaggccaaaaatgcaggagacactgctgaaggaatagtaaagatacgtgaagtttctcattgtctctcttcactttgatgataaaacatataaatcagaagataattttaataggtagacaatcactagtgaaactaaaaatagggcgcacgcctttcaaatctggaagaattcaaattatataaactctattaatgtagcacaggatagaaagcaaaaaataagccaacatttaaaaattttttgaatcaagtcgaatgatgttaagacnnnnnnnnnnnnnnnnnnnnnnnnnnnnnntatacatatatatacacacatatattacacatatataaaaagaaaaatagatgagtttaaagttcccctattaaaaagacccaatt

SEQ ID NO: 37939 - DNA, 770 bp, Macaca Mulatta
  misc_feature (1)...(770): n = A,T,C or G
gtcctttgggaaaaacagcttatggccccattgttccactttacctaaagggggcccgcgggcccaaaacgaaatgtcttagaaaagctttctcgagggcccgaggcgggccgacaagggnnnnnnnnnnnnnnnnnnnnnnnnnnnnnntnccattnttatttgcccatccacattgattgcaggttttagtggttcttgttatttttttggcattgcatcaaaatgcaagcttttttggtggtgaatgtaannnnnnnnnnnnnnnnnnnnnaagacgtgcttgtgaagtcaggcctttttaaatataataagataaagtagaaacagctctttggtatgtagtacttgcattttgtgagttctgttcacctagattactccagtcctccaatgagacttcttggaagaaggtactaagctacaagtaggtgagcattttatctgcaaaaaggatccggttttatttacctttatcccaccaaagcattgactcactcttctatttatctgaatatcttacaatcatttttatttagacttcaggtggctgatatgcattattcaataaacttattaagatattttaaccttctctaaatttgacaaaagcaaaacagctatgtttggaggagattaaagttagattatctttccacaattaaacagttctagtttctctaggaaaaacagaatgtatcttgctctccaagttttagactacttcacacagtgcaacagtgaatctattttcctctttcagcaagtcc

SEQ ID NO: 37940 - DNA, 1207 bp, Macaca Mulatta
gggggagaaaatgtttttttctaagactttccgcagatgctatagtactattgacaaactgggttagagaaggagtgtaccgctgtactgttggcacgaacaccttcagggactggagctgcttttatccttggaagagtattcccagttgaagctgaaaaatacagcacagtgcagctttggttcatattcagtcatctcaggagaacttcagaagagcttgagtaggccaaatgttgaagttaagttttcaaataatgtgacttcttaaaagttttattaaaggggaggggcaaatactggcaattagttggcagtggcctgttatggttgggattgggggggtgggtttaggtaattgtttagtttatgattgcagataaactcatgccagagaacttaaagtcttagaatggaaaaggtaaagaaatctcaacttccaagttggcaagtaactcccaatcctttagtttgtttcccccaatttttgaattgggaagctgggggaagttaaataggagccactgggtgtaccagtgcattaatttgggcaaggaaattatcataatttgatactgtatctgtttttccctcaaagttatagagctttggggaaaaggaaagtaattggaaatgggggggttgggtcttgaaagcactgggggctgaacattagcctaccattttatgggggaaatgccttaaaaggttggtttttggcatatggtagtgtgtggttctcttttggaatttttttcaagtggtgtaataataacttaaaactactatagaaacttcctagcaaaggaaggggcttaatgatcctgaaaggatttcctctgaatggtaacttttggtttttccagttaaattccaattttccgttgggtggaaaaccaagtttttttttaccggaggagaaaatattttttccgtgtgttcagcttgccaaaaccaaaattgttaaggtatcgttttcccaaaattcctggaaaagtgggggacttttaaaatttttaccgtgcttgggaaatccccaatttaacaaatgggggaaaaacttctcacctttgaatggccccccttcagggggggggtcttttttgttgatcacggggaaggggaacaacctttttttttcccgccccgcaccttcttttccccagagaaccctttttctggtgtcggcctaaccgcggccttggcg

SEQ ID NO: 37941 - DNA, 295 bp, Macaca Mulatta
caaagcaactccatttattcattcacgcgttcatttcatatctattccctaagcagttaagtgctgctgggccctaccctcagggcattcccggactgacggcgactttaggcaaatgatctcccaaataagcctaataattacactgcgggaacaggaggaagggagagggagttacccgagagcccagatctgcgggctgagtggatgctaaggcagtggaaggggacaggcaggcctggctgaggaacagcccagcgcctacgaggccgctcaggtgggaggcggccagggg

SEQ ID NO: 37942 - DNA, 149 bp, Macaca Mulatta
gggttttccaggaaacacaaacgcagacagtgtggtgcactacagactccagcctccctttgaagccaggttcctgcgctttctccctttagcctggaaccccaggagtaggattgggatgcggatcgaagtgtatggatgtgcatata

SEQ ID NO: 37943 - DNA, 564 bp, Macaca Mulatta
gcgatactcggccatcatgcatggaacactgtgtgctaggttggccatcacatcctgggtcagtggcttcatcaactctcttgtgcagactgctatcacctttcatctgcccatgtgcactaacaagtttattgatcatatatcctgtgaactcctagctgtgatcaggctggcttgtgtggacacttcttccaatgaggccgccatcatggtgtctagcattgtttttctgatgacacccttctgcctggttcttttgtcctacatctggatcatctccaccattgtaaagatccagtctacagagggaagaaagaaagccttccacacgtgtgcctctcacctcacggtggttgccctgtgctatggcctggccattttcacttacatccagccccactccagtctctctgtccttcaggagaagttgttctctctcttttatgccattttgacaccaatgctgaaccccatgatttacagcctaaggaataaagaggtgaagggggcctggcagaaactattatggaaattctctgggttagcatcaaagttggcaacttg

SEQ ID NO: 37944 - DNA, 227 bp, Macaca Mulatta
atgccaaatactcataaagagcaagatttcatgctccaaagctgccactgtgtatcaacaagcagtacacttcatgccaaaacaaagtttgtttgccaaagcacattggcaagggctagatttagagagcctgaaacagaagtgtgcatgccctccacttcaaccaaacacaaaatagcatttggccatgttattaaaactacactgttcaaaactgaggggatgtg

SEQ ID NO: 37945 - DNA, 587 bp, Macaca Mulatta
ggggtctctgtatttatattaccaagggccttcggtaaattatgaaaaataggatgccacctgcgacgacactgctcaggcagcaccggaagactttcataaatatactaggttgcttttctccaatcagcctaaccttgatttgaaattaatttttaaaagatagttttaacctcagcgatctctgatgtttgcgctaattccctttaaaaggctttcagaaattttaaagaattactatgaagggaaaagtagcattctagtttttctctgtaaaagagattcacaaacggcagatcgctgttatgaaaaggagaggtggaagtatttaaggaattgtggcaaacagacaacagaagaatggatgtaagcaaaagtaccacactgaaaaaatggggaaaggtggagtctagatcacaaactgattatttatttctgcttacaagtcttcaatttttggatatattcggcagcaatggcttattctgcgtgtaaaccctaccatcttgtctgggaacactaaatccctattctcttttttttcattctgctcccgttaccttgatacagtactcttcttctttatc

SEQ ID NO: 37946 - DNA, 865 bp, Macaca Mulatta
ggggggcacccaaagagggtagccattgccggctcgaatgcctgggtttatatcctgatcattgtccctcccgctgtgctctcaggcaatagatgattggctatttctttatctcctgtttttgcctaattagcattttagtgaactctctttcctacctgattggtcaggtgtgagctaagttgcaatccccatgtttaaaggtgaatgcggtcaccttcccagctaggcttagggattcttcgttggcctaggaaatccggctagtcctgtctctcagtaaccccctcaacaggaaaacccaagtgctattggggaggttgactgatgactgatccaactgcttcctgctgaattgggacatagtagaggttgtgcagttgagatttcctcgggaggggtgccttcgatgtccggagcatgggctagcaggccagtccagggtctgccgcacattttagtcctggactgcatccggggcctcctttcgagaaccttttgtagctttacaggcttccattctgggaggaagactaacttcaccacgtagggttcaacgaatccccgggaatgtacacgcttgacgtcgggcggacaaggggcctcttttctttgggccagtcttccgccaaacccctcgacttagttgccccgtacccctctgataaaggccaggatcacgtcccccccctttgtcaaaagcatgatcatgtcatcccttgcgcatcctatgggcccttccctctggatatccccccctccttcttgcggaaggccctatacctggtcggcgcgcttccccgtcccctgaaacccgctccacttcatcctttggccctgcatcgcgcgaacaagcctcgcctac

SEQ ID NO: 37947 - DNA, 830 bp, Macaca Mulatta
  misc_feature (1)...(830): n = A,T,C or G
ggccctgtgggattggaaccgccacgttttggcaaaaattaatgtttggaggtgaggattgggaaattttagcccccagaaatgtggtaatacaggttccatttactgggccccttatgttttggtccacagctgggcaattttttttttaatagaaaaggctttttattgatgaagggaagccaaataaaatggccttaaaattttgggggttccctttttatttccatggcaacactggcaaattttcaagccccgctgacttttgatttccaacacttttgagggcattgtgctaaaatagattggatttgatggtgtggttctcaaattcaagatggtaaaaatgatcaagtcagtagtggtttctgctttttatgtttcatgtcatgtatagtctacttcattggcagtaaaaaaatttaagatagtggtggtcatcctacaaactgtgaatatattaaagagaaaagtagctattctattataagcatcggggagggacaaggttagtatgttaacataccaacnnnnnnnnnnnnnnnnnnnnnnnnnnnnnnnctctccnnnnnnnnnnnnnnnnnngagtggtacaatctcgactcactccaacctctgccttccannnnnnnnnnnnnnnnnngtcttagccttccgagtagatgggattacaggcacacaccaccatgcccaccannnnnnnnnnnnnnnnnnnnnnnnnnnnnnnnnnnnnnnnnntcaggctggttnnnnnnnnnnnnnnnnnntggatctgcctgcctcggtnnnnnnnnnnnnnnnnnnnnnnnnnatgagccacccaccactcc

SEQ ID NO: 37948 - DNA, 171 bp, Macaca Mulatta
atgccccaccagaccctcagtcagaccacgaagcacctgagtttgatatcctgcttcgtatttactggagctgggaatactggagcagcatggtatgccttgtgtctggcgttttcagtctagatgttagttgggccagaaagaataacccagaaccccggaacaaactga

SEQ ID NO: 37949 - DNA, 645 bp, Macaca Mulatta
  misc_feature (1)...(645): n = A,T,C or G
gggcaatagaatactatgcagaaactgaaagtttgactttttttagtttnnnnnnnnnnnnnnnnnnnntgtctcactctgttgcccagacgggagtgcagtggagcnnnnnnnnnnnnnnnnnnnnnngnccggccnngtgcgtgcgattctgctgccttcgcctcctgacttgctgagattgcaggcatgtgccactacaaccagctagtttttttgtacttttaatacagatgggatctccccgcgctgaccatactcgtcctcatactccagttccttctcttattttgcccggcctaaacctccacatttgtattcttttaccagtcatacttctatgtcatccatgatacatcttttatcctcctgctgcaacctatctctcgtttctccgttgcttggcctccacctctataatcctatcccttatttctacacccctgccctgctttctctctccctttcctgaccttaacattgtacattcctccccactatattctcttcatctctcacctatccacactactacttctcttcttataactcgcttgctcttcatcttcttttctcatctcagaacgtcattttctgattcatccttcacttcattttcaaggacacctcctctcgaatattcta

SEQ ID NO: 37950 - DNA, 963 bp, Macaca Mulatta
  misc_feature (1)...(963): n = A,T,C or G
nnnnnnnnnnnnnnnnnnnnnnnnnnnnnnnnnnnnnnnnnnnnagccgnnnnnnnnnnnnnnnnnnnnnnnnntgatcctcccannnnnnnnnnnnnnnnnntnnnnnnnnnnnnnnnnnnnnnnngtgcctggcctgacatttttttattgatctaacgtgctccactctgctgttcctgcctaagatctggttgcatgacaccgaatgcgatgagtgggaatttaaccactatctgcaccttgtgtctgtgtgatttcctccttccagaaagaattttttacaggtggagccctgtcccctacctcttaaaacaagatagcccccccacatgctctctcacctgtgtcccatttctgttgccaaccttttgcctccttttacctgaacacacacagccaccttttttctaaaactgagggcaaaccttgctcctccccttttcaccatttttcctctaaaggccgcggacgccggttcacccaattgcacaaccttttgtgctcctgccttccgggagtcctcgtatactccaaaccttccgccacgataattggcactcgctcatccgttcaacccgcctactttttattttaaatttgcccgttctttaaccatcctttgaaatggcttttcgggcggatctcttagccagtattttggaacccaccattctttggccgcccccctttcttttttcgcggcttatttcccccctgttccacctttcacctcgcgctttttttcacccgctgtttgtcgttccttctacctacccttcgtattcgactataaaacgccgaggcccataaccttgatcacacaccgtccagccctcttatcggtaaactccggcacggcgctacatagtgagtgactataaataactcttcgcctaatatccgcccgtatcttagtacacgctctgtcaccccgcgctttctcaatatcgcacatctatn

SEQ ID NO: 37951 - DNA, 427 bp, Macaca Mulatta
tgccccccggagagctcatcgtcaactggacgcccatgtcacgggagtaccagaacggagacggcttcggctacctgctgtccttccgcaggcagggcagcactcactggcagaccgcccgggtgcctggcgccgatgcccagtacttcgtctacagcaacgagagcgtccggccctacacaccctttgaggtcaagatccgcagctacaaccgccgcggggaggggccggagagcctcactgcacttgtgtactccgccgaggaagagcccagggtggcccctaccaaggtctgggccaaaggggtctcatcctcagagatgaacgtgacctgggaacccgtgcagcaggacatgaatggtatcctcctggggtatgagatccgctactggaaagctggggacaaagaagcagctgcggaccgaga

SEQ ID NO: 37952 - DNA, 582 bp, Macaca Mulatta
  misc_feature (1)...(582): n = A,T,C or G
aatgacttttttggactaaattatatgtcagttttgatcatttgtattattaatgtttcattatgtgcgttcaataaaattgtcttactattcattctcccttcaactctaggtatggaacacgatgtttcttactaatctaatacaggccataaagttggttctttaaattaaaaaattgataaaagtctttaagttcatataaataatgcttgaacataatttgctattaaattacttttaatctttggcttttagttaatctttatcagggtttaatttagagctcaatacaaaatttgaattgttctaataagaaccattttagactttttgaattttatatgtgtgttcttaattgtgttggtgggaaatctagactgagacctcatcaaattcttaatgcaaatctaatttgaaacaaggaataaactttttatacagctgaaatgtgttcttaattctgatcattttgactatnnnnnnnnnnnnnnnnnngtttattgattgccttattttgtacctatgttattataactttaaaaaaatgttctcatgttatcttttcattttccactactg

SEQ ID NO: 37953 - DNA, 619 bp, Macaca Mulatta
atgatatggaatacccaacaatgtacggaatgcaatagataacatgctatacaagggaagttttgatttatcaactatactttgaaatgttgaaagttataacattctggagtaactctattatctcttttccctagtaatgtcgtattttactcccagtgataagaatgcaatatattttaatgagcaagaattcaaagtctattatgttgagtaacatgataaatgaagttcattataatgcatgtttctcctatttttaggatatttgcttaagagcaggctatgcattaacactttttgccttcaataatcgctttcaacaatacttaatattggaaagtggaataatgaccatatctatttttgaaccttttcttgaatcaatagttgaaactgagaaggcaatggcagcatttcaggtataaaattgagattaattaacacctcaaattaataaatgtcattttgtgaaaacttgaaaattacaatgatttggagacccagaaaaatgtttacttatttgtaaaaatttagtattttgcacataagccccttctacctcataaaaactccattatcttgaggatttcttcattaatatagaattttacaagtt

SEQ ID NO: 37954 - DNA, 873 bp, Macaca Mulatta
  misc_feature (1)...(873): n = A,T,C or G
ggatttctagaggctgaggcggccgacnnnnnnnnnnnnnnnnnnnnnnnnnnnnnnaagtttcactcttgttgcgnnnnnnnnnnnnnnnnnnnacnnnnnnnnnnnnnnacaacctctgcnnnnnnnnnnnnnnnnnnnnncagtagctgagattataggcacccgccaccatgcccggctaattttttttgtaatttcagtagagatcgggtttctnnnnnnnnnnnnnannnnnnnnnnnnnnncaacctcacgtgatctacccgcctcgannnnnnnnnnnnnnnnnnnnnnnnnnnnnnnnncccgcagttggccaagttctttatgtaatactacaatgtgttgtcacagaatttgttactcagatatcaatcatttttattggtatatttctgggtaaaacttattaatggtgtgaggagtgcagaatatggaagcttatttgaatagttctctttaaattctttttttgcccgccaacatttttaaagaaaaaatgatgccttcctctctcaatgcttgccaatttctttaactttttacatgtcctcagtttttttcccctaatgannnnnnnnnnnnnnnnnngttttccaccccccctggattaatagtggtatcccgtgaggagaaaaagcacttttccttttgaatccaacccctattgggatttaaaaattttagcggattatttttttcccgggccccattatgtgggtttgggggtgggggagaaccaatatttggcaaattgttgtttttccttggggtannnnnnnnnnnnnnnnnnnnnnnnntttttctccccttttcgtcccctggagagtatttttaaatcccctttttgtggcctaaccagataaaaaa

SEQ ID NO: 37955 - DNA, 289 bp, Macaca Mulatta
ggcagggcgccactgaccgctggggccagagccctgccgggaaaggagggcttccgccttgcaacgcagctcgaatcagcagccgcccagcaggcctcccgcccgtatttccccgcgtccatccctctgtcccacggtcggtgggtcagcggagcctgatggaggtcttgggctctgggcactatgttggaggcggcatcaggtccatggcggcggcggccctgtctggcctggcggtgcggctgtcgcgctcgcaggggacccgggaatcgtacggcgccttctgcaa

SEQ ID NO: 37956 - DNA, 155 bp, Macaca Mulatta
  misc_feature (1)...(155): n = A,T,C or G
cagctccgatatccacccttgtccccaggtggacacagcaccgctcagcatntggtgcaaactccgcccttctgcggaacgccccccttccccggaaggcatggcttgcagtaacatccctctgtacctttcctggcttccccgccacaataaaa

SEQ ID NO: 37957 - DNA, 627 bp, Macaca Mulatta
ccgggactgtgccgctgtttgcctatccctcatccctcggcaccaaggctactcgagccccagggtgttttttccttgttcccgccacctcctggtccctggcccaacatgatactgaccaaagctcagtacgaggagatagcccagtgcctagtgtctgtgccgcccaccaggcagagcctgaggaagctgaagcagaggtttcccagtcaatcgcaggccactctgctgagcatcttctcccaggagtaccagaaacacattaaaagaacacatgccaagcatcatacttcggaagcaattgaaagttattaccagaggtacctgaatggagtggtgaaaaatggagctgccccagtgctcctggacctggccaatgaggtggactatgcaccctcattaatggctcggcttatactggagaggtttctacaggaacatgaggaaactgcaccctccaagtctgttataaatagtatgctacgggacccttcccagattccagatggagttctagcaaatcaggtctatcagtgcattgtgaacgactgctgttatggaccactggtggactgcatcaagcatgccattggtcatgagcatgaagtcctgctgagagacttactt

SEQ ID NO: 37958 - DNA, 649 bp, Macaca Mulatta
  misc_feature (1)...(649): n = A,T,C or G
agagcatggctcgcgacgtgttatcgtagagcaaaagagagcaggtcagacctgtgggatgggtttgtgagctggggcatttatggataaattaaactttagccctgagtaagcaaagtcctaagccagttattactgctctggcccttctaatgggccctatgcaacccttataaattattcagctgctttattaataaaagaccaagcaacttgcctagtgctggtgatacgtaagtgtatagcttagagagaacaggttagagaaatagaatatttgccatccaccaaggaaccctcttttctaatatggaggtgaaagggttaaactgactaccttgaagagcagagttttgagatagagcacatgaaactggcattgaaatgttaacagtgtctactaacaaagggctttcctctgaggaagtggctgttgagatttcctggactattgcctctgatacacctttcgcagaatagcatgactatggtgagtaagtgtcccaggagatccaacatttaagcctcaagnnnnnnnnnnnnnnnnnnnntaatccttatgcctctttattttgatataattttatacttacagaaaagttacaagaatacaattacaaagatcttccatttaccctttattacattg

SEQ ID NO: 37959 - DNA, 207 bp, Macaca Mulatta
actgactcctgcaccgctacctcctcacgctgccagcccctagggaaacagagcatgctctgagctgacactcgagtggccgaggccagcccccgaagcagcaacccccaggtcagccccacggccccttgaggacccagcctgctgccattcaccctgcagccagtggggggaggtcctttcctggagtctgatccggctgggctc

SEQ ID NO: 37960 - DNA, 211 bp, Macaca Mulatta
atgcacgcgcggcaggggcctgctctcagaggccgctggcccagaggccgacgtggggccgcctccgccgctgccccgggggctctcgtcgccctgcgggctgaccatggcgcttgccgtcagctgcggcatcttccgcaccgagtcaggggctgtcgccggctccttcttgtcccagggcggccgcggagcggtgggtgcaggttggccg

SEQ ID NO: 37961 - DNA, 167 bp, Macaca Mulatta
cagtggtctccaggctcagagaaggctggttgcctcaagttcttgcctgcctcataaatggatccagagaaaactggctgccttcggctcttccctgcctcacattcctcataaacggattcatagccttttagccccctgcaccctcctgcaggggactgcacttt

SEQ ID NO: 37962 - DNA, 631 bp, Macaca Mulatta
gggagaggggcccaggtcacaagctggagcgtattgtttctgcctcaaagccttgacgttgggcctgagcgctgcacttcaataatcacaaagctgggcccttcttggaccacagtcccccaactgacattcagtagcccacctttgctgcactcagcggtccacttgtctgtggcttttcacagaggcccgggtcctgtggcgatgtatttcctatagccagaattagctcagctctaggtgacaggtgaatgggttaaggaagcaggtgttggtcagctttgtggttcagtcatcccagaatatgtcaagagcaaggggccctatctgggaattgccggcagtttcttggcggctctaagcattgccaagaaatgccagggatgatgggtttaccactttcccagggagagctgcccttgggacatggtaaactgacctttgagggctatgctctgagatgggaagaagattgtgtaggtgaaggctgcttctgaatatgcctctaaatatgcagcagcatcagggtctggtggagccctctcttttggcacactgaaggcctgccttatttcagtttggccgcgaggttgggagacgtcatgtccgcagctctatctcaccgggactg

SEQ ID NO: 37963 - DNA, 152 bp, Macaca Mulatta
gcaatcagcagttggacacggagaagaatggcattgaagcagatttccagcaacaagtgctttgggggattgcagaaagtttttgaacatgacagtgttgaactgaactgccaaatgaaatttgctgtctacttaccaccaaaggcagaaac

SEQ ID NO: 37964 - DNA, 265 bp, Macaca Mulatta
atacgctatcgtcctgcccgttagagcagccagcgggtatagaatggattttggaggagggagtcaccactgggcctcccaaggaagccacgtgcagacatctacaaccttcgatctcctgacgagtttattgttggccaaaaccaggctttgactgaaccaggatgaatgcgggtgttgggaatagaatatatatatacatataaaaccgaaactggcgaaggaatatgagaggagtcctctggcaaagaaaagaacagaccct

SEQ ID NO: 37965 - DNA, 301 bp, Macaca Mulatta
tctgccaaagatgttcatcatggcagtgttgctggtgacagcaaaaatgacccaccaatggaagcatctgagttcattgctcaggtgattatcctgaaccatctaggccaaatcagtgctggctatgccctgtactagattgtcacacatctcacattccttgcaagtgttctgagctgaaagaaaagatgaccattctggtaaaaagctagaatatggccctaaattcttgaaatctgatgatgctgccatgattgtagttcctagcaagaccatgtgtgttaagagcttctctgaatat

SEQ ID NO: 37966 - DNA, 785 bp, Macaca Mulatta
  misc_feature (1)...(785): n = A,T,C or G
ggatgcaatttaagattcacacaagtttcagggtcaaatggcggtcttatagtttcaattctgaagatagcaaacttaataaacagccactttaaacttgttctggcaaaccagaccctgctgtagatatagtctaaggtagttaaccatataagccttttcaactcttaatgccctccacatgagtcagcagttaagaaggttctagaacccatgaaagcttttgtatgtattactaggttttgtttttcttatgttgctgattttacagttctgactaaagctgacctaaatggatcagtttatgtgtaatattctagtgctttaatgnnnnnnnnnnnnnnnnnnnnngggatgggtaatattatttggacagatgcagaaggaactgttagtgagtcaagacaaacacatttgaaataaaggaactgtgtattaacatgttaacaattcataactgcactttttatgacattttgaaaatctatttataggtacagaacaatgggttttgttaaactgtatcacatttatacttgcagaaatttatttcattgttattagtaggaattttattggttcaataaaattggcaaaactgaacacccnnnnnnnnannannnnnnnnanannnnnnccatgttcggccggccctcnnnnnnnnnnnnnnnnnnnnnnnnnnnnatttcttttggggcgcggccgggccccagttaaggtaaagtggaaacaatggggccaataaacttggttttcctcaaggaaaaaatcccggggttcatggc

SEQ ID NO: 37967 - DNA, 595 bp, Macaca Mulatta
atgcccaaatccaagcgtgacaagaaagtctccttaaccgaaactgccaagaaaggcttgaaattgaaacaaaacctgacagaagagctttggaaatgtgtggacacctacgagtaccttttcatcttctctgtggccattgtgaggaacagcaagctgaaggacatccggaacgcctggaagcacagcccgatgttctttggcaaaaacaaggtgacgatggtggccttgggtcagagatgagaacaaagacaacctgcaccacgtcagcaaaaggttgaggggtgaagtgggtctcctgttcaccaaccgcacagaggaggtgaatgaatggtttacgaaatacacagaaatggactacgcccgagctggtaacaaagcagctttcgctgtgagcctggactcagggcccctggagcagttccccaatccatggagccacggctcatgcagctggccctgcccactgccctcaagagaggtgtggtgaccctgctgtccgactgtgaggtgtgctgactacggagcaggcttgcgtcctgaagagttttggggatgagatggctgaattcaaggtgaccatcaaatacatgtg

SEQ ID NO: 37968 - DNA, 90 bp, Macaca Mulatta
actggaattcacaataaatcccagtattgtggttacagatgtaaaaatgctatcaggatttactccagccatgtcatccattgaagaggt

SEQ ID NO: 37969 - DNA, 745 bp, Macaca Mulatta
  misc_feature (1)...(745): n = A,T,C or G
acgctttgtctgtcaggccagccgacagccggctgctggtctccctaacgcggcctcctccgcgcctcgcgccatggcgtcggaggggccgcgggagcccgaaagcgagggcatcaagttatcagcagatgtcaaaccatttgtccccagatttgccgggctcaatgtggcatggttagagtcctcagaagcatgtgtcttccccagctctgcagccacatactatccgtttgttcaggaaccaccagtgaccgagcagaaaatatatactgaagacatggcctttggagcttcaacttttccacctcagtatttatcttctgagataactcttcatccatatgcctattctccttatacccttgactccacacagaatgtttactcagtgcctggctcccagtatcattataaccatcccagttgttaccgaagttttcaaacagtgaagcatcaaaatgagaacgtgtgccctctcccacaagaaatgaaagctctgtttaagaaaaaaacctatgatgagaaaaaaacgtatgatcagcaaaagtttgacagtgaaagaactgatggaactatgtcatccgagataaaatcagctagaggttcacatcatttgtccatttatgctgagaatagtttgaaatcagatggttaccataagcgaacagacaggaaatccaggatcattgncaaaaatgtatctancctccaacctgagtttgatttaccacactggactttctga

SEQ ID NO: 37970 - DNA, 1245 bp, Macaca Mulatta
  misc_feature (1)...(1245): n = A,T,C or G
gttcacctctacaagtgtggagccatgcgcgagagctgcgggctatgcctcaaggctgacccagacttcgcatgtggctggtgccagagtccgggccagtgtaccctgcgccagcactgccctgcccaggagagccggtggctggagctgtctggtgccaacagcaagtgcacgaacccccgcatcacagagnnnnnnnnnnnnnnnnnnnnnnnnnnnnnnnnnnnnnnnnnnnnnnnnnnnnnnnnnnnnnnnnnnnnnnnnnnnnnnnnnnnnnnnnnnnnnnnnnnnnnnnnnnnnnnnnnnnnnnnnnnnnnnnnnnnnnnnnnnnnnnnnnnnnnnnnnnnnnnnnnnnnnnnnnnnnnnnnnnnnnnnnnnnnnnnnnnnnnnnnnnnnnnnnnnnnnnnnnnnnnnnnnnnnnnnnnnnnnnnnnnnnnnnnnnnnnnnnnnnnnnnnnnnnnnnnnnnnnnnnnnnnnnnnnnnnnnnnnnnnnnnnnnnnnnnnnnnnnnnnnnnnnnnnnnnnnnnnnnnnnnnnnnnnnnnnnnnnnnnnnnnnnnnnnnnnnnnnnnnnnnnnnnnnnnnnnnnnnnnnnnnnnnnnnnnnnnnnnnnnnnnnnnnnnnnnnnnnnnnnnnnnnnnnnnnnnnnnnnnnnnnnnnnnnnnnnnnnnnnnnnnnnnnnnnnnnnnnnnnnnnnnnnnnnnnnnnnnnnnnnnnnnnnnnnnnnnnnnnnnnnnnnnnnnnnnnnnnnnnnnnnnnnnnnnnnnnnnnnnnnnnnnnnnnnnnnnnnggggacccacctggacctcacactgaacccccagatccgtgccaagcatggagggaaggagcnnnnnnnnnnnnnnnnnnnnnnnnnnnnnnnnnnnnnnnnnnnnnnnnnnnnnnnnnnnnnnnnnnnnnnnnnnnnnnnnnnnnnnnnnnnnnnnnnnnnnnnnnnnnnnnnnnnnnnnnnnnnnnnnnnnnnnnnnnnnnnnnnnnnnnnnnnnnnnnnnnnnnnnnnnnnnnnnnnnnnnnnnnnnnnnnnnnnnnnnnnnnnnnnnnnnnnnnnnnnnnnnnnnnnnnnnnnnnnnnnnnnnnagggcaagaacctgatcccgcctgtggctgggggcaatgtgaagctgaactacactgtgctggttggggagaagccatgcaccgtgaccgtatcagatgtccagctgctctgcgagtcccccaacctcatcggcaggcacaaagtgatg

SEQ ID NO: 37971 - DNA, 751 bp, Macaca Mulatta
ggatacagacataaataagtcacggtccatgaccttgaagagtttatggccttatagagaggttcactgtaattgtcttcaccagggcatcatctcaaaaatgcccacttttgtctggcatattggggctcggtggtctggtggtcccttcggtcttggccctatcctttgtttttgtgatttgctaacaatcatcacgaaccatttttgtttttctcttaaatttgaacatcacatcctgtgttttaggtttttgctctatgcctttttctcattccttctcatagtcttctctgtacttctttttttgtgtgcgaaaaaatgaaaatcatatgtaatctgctttatttaaaattgctcactaagcactgcagactttgcagttaggggctcagcaacttggtccagtgaaaaggaggagtgaagcccgggaagttagtatccaagaggggcaagctgattgcatgtgcatttatacctatgcctttaaaaaattcccctaaaaagtattaataaagaaattttccattccacactaggactgaagaaaaagtggttgaattttgccctgagaaaattaaccaagggatagttttttcctcccttaaggttttatttcccataaaagaagtctgtgttattttttaactttcccccgggctaaccttaaggaaacccatctccaaaaattcctccccccaaacctggaaacccgtttgcctgaaactttcttgcaacaccttgaaattat

SEQ ID NO: 37972 - DNA, 347 bp, Macaca Mulatta
  misc_feature (1)...(347): n = A,T,C or G
atggagttggggctgagctgggttttccttgttgctattttannaggtgtccagtgtgaggtgcagctggttttttctgggggaggcttggtccagcctggggggtccctgatactctcctgtgcagcctccggattcaccttcagtggctacgaaatgcactgggtccgccaggctccagggaaggggctggagtccgtctcagttattggtggtgatagtagttacacacactacgcagactctgtgaagggccgattcaccatctccagagacaacgccaagaactcgctgtctctgcaaatgaacagcctgagagccgaggacacggccgtgtattactgtgc

SEQ ID NO: 37973 - DNA, 652 bp, Macaca Mulatta
  misc_feature (1)...(652): n = A,T,C or G
attactgggcgtggtggcacacannnnnnnnnnnnntgnnnnnnnnnnnnnnnacaggaggattgattgaggccaggagttcaaggtcacagtgagtcatgatcacatcactgcatnnnnnnnnnnnnnnnnnnncaaaaccctgtctcagnnnnnnnnnnnnnnnnnnnnnnnnnnngcccccccaaaataaatcaaaaccatacacacaaaatgtttggtgaatgagtgtatatatatacaccactgatgaaaggaaggtgaaatgtttgccatacatattttttatgatcgtttacctgaaattaaccctttaaattatgtaaccaattgttccaaatcacattagataaaaagggtttctactgcataatatacataatagagaaagagctcctacagatcaataagagaaaggtacccactacaaaaagcaaaaagtggcagaagattatacgtgggcatttcctaggaaaataagtactggtgaataaaaaagaaaagatgttcaaattcactctggttattagggaaatgttaaccatttttcaccagacaaattggcaagaacttaatataatatccacttttaacaaataggcattcacatacactgtctatgagagttcacatgtttaactctttgctgaag

SEQ ID NO: 37974 - DNA, 185 bp, Macaca Mulatta
  misc_feature (1)...(185): n = A,T,C or G
ttggcatcaagcatgctttttgatttnnnnnnnnnnnnnnnnnnnnnnnnnnnnnnctggaaactggctctgctgtacatggttggcatattggtgaggaattggtatgtgtgaggggacatggaactttgccaggagcccagggagacgtttccctcaggattttaggccaagaagggtctata

SEQ ID NO: 37975 - DNA, 813 bp, Macaca Mulatta
  misc_feature (1)...(813): n = A,T,C or G
ggacatacacaaagcaacagcatattatgccagtcagctgatactgaaatgtttagtggtgagatttagttggttttttttcctcctgagatggagtctagctgtgttnnnnnnnnnnnnnnnnnnnnnnnccnnnnnnnnnnnnnnnnnnnnnnnnnnnttgggttcaagccattctcctgctcagcctcctaaannnnnnnnnnnnnnnnnncctnnnnnnnnnnnnnnnnnnnnnnnnnnnnnnnnnnnnnngtggggttttactgnnnnnnnnnnnnnnnnnnnnnnnnnnnaatctcatgatctgcccgccttggccttnnnnnnnnnnnnnnnnnnnagtgtgagccacagcgcccggccgagatttagacttcttaaggagatgagaaactaggaggtgtgatcagtgaaaagtagtacttaggacagctttggagagcaccggaacggaattgggtaagtgaaaacagtgagattaagaaccattctaggtaaagagagacactgtaaattaagaaggttattaataccatctttgaataggaagctggcatctgattttttggtttgttggtgtgtttttctaagagacaggatcttgctctgttgcccaggctgaagtgcagtggtgtaaacagagttcattacatcctanaatgcctggggctgaaacagtcttcctgcctcagcctcttgnnnnnnnnnnnnnnnnnnagtgtgtggnaccatgcccagccctggtattatgtttttttaagaatgtggctctctggcctttagatgacttccaaagttattcactggagt

SEQ ID NO: 37976 - DNA, 395 bp, Macaca Mulatta
aaacatcactttacaaaggccagcaggacagaaaggatgcacaacgtgggctccacagtttcgtcctcactgaagacagggcaggtggcatttacccccactcctatcccacagttgagggccgccccacaggcttcctcctcactttcggggtgcatgcccacaagaccaagcagcccacagccttggaggaggcagagtgcgggcagcagcccctcacagaaccccagcaacaacacctgtcactgcccaccacagctgcactgtgggctgacggggggaccacgtatggggaattccagaacgtgaccctgtacctaaatccctgcagttctcaagtctcactcagttctttcccggacatctcttaagggggcctgactctgcctcagccc

SEQ ID NO: 37977 - DNA, 568 bp, Macaca Mulatta
  misc_feature (1)...(568): n = A,T,C or G
gaattgctcagtgntgcacccagatgattgggatttctgttgcaaaggtttggcattggatctagaagatgggaacttccttaaacttgcagagtaatggcactgttctcagggcaagccatggcaccaagatgatggctccagaggtactggcagaggcatatggcaagaaagaatggaagcacttcttgtcggacactggaatggcttgccgctcacgaaagtattatttttacgacaagtactttgacctgccaggagctcttctatgtgccacggtggtggactatttaacaaaacagaacaatggtcacaaaacatttgatttttggaaggatatagttgctgctatacaacacaattataaaatgtcagcttttaaggaaaactgtggaatatattttccagaaataaaaagagatccaggcagatatttacacagttgtcctgaatctgtgaaaaagtggcttcgacagctaaagaatgctgggaaaattcttctgttaattaccagttctcacagtgattactgtagacttctctgtgactatatccttgggaatgattt

SEQ ID NO: 37978 - DNA, 286 bp, Macaca Mulatta
accaattgttactttcatacgaatcaaacctaggataataatacctaagataataaggattcaaacctagtaaggaataaaacctaagacaataaaaaagtcctttcccatctcatgtcttgaaattttaaaaatctacaaccaaccccacctactaaatcatagtaactctttgcctaggaagaatatacttgcataacgactgcttctgcaggattatggttgcaggtcatacataatcaactcatttacaaaaagtatgcccaaatgaggtttaagacttaca

SEQ ID NO: 37979 - DNA, 1019 bp, Macaca Mulatta
  misc_feature (1)...(1019): n = A,T,C or G
ggcatgggnnnnnnnnnnnnnnnnnnnnntnnnnnnnnnnnnnnnnnnaggannnnnnnnnnnnnnnccnnnnnnnnnnnnnnnnnnaccaacatggannnnnnnnnnnnnnnnnnnnnnnnnnncattagccgggtgtggtagcgcatgcctgtaatcccatctactctggaggctggggctggagaatggnnnnnnnnnnnnnnnnnnnnnnnnntnnnnnnnnnnnnngtgnnnnnnnnnnnnnnnnnnnnnnntaagagcgaannnnnnnnnnnnnnnnnnnnnnnacgttttctgatttaacatgtaattttataggtgtagaaagggaaactctggaagtggcgtcagacttttgcatttgacatttagctagcagatttaccattggatgattgacatattggattttaatttatttctaattactctgagacagaatcttggctctggttgcccccggcttggagtggcactggactatctttctagggttgccctttgcaatccctctaaaccgtcctaggagattcggtgcagagaatcaccgtggtatttataacaatagaaagagagatcatagaggacataataagggcggcggggacgagagacacctgcggggggactaaaacaatttgaactaaccatgtgcagaaaaaaagatcgaacgatcatcaacccaaggggcgagtcaaagacgaagttaaatgacgaaacataaaagacccccgacaagcagaatggacggatgactaaacgcacacgacaccgtcagagtagctgtatattgtatggaactagtatctggacacacaatatgaagatatacatgctcatataaccacgataaatccgtcgagatcaataagacccacatacctcaacaccacatagtcacgctcgcgccgcgactccttctggctttacaccactcgctattttgaggaagaggtggcttcggatcaatagatggcgatatagagacgcgttcaaagcgacgccacgatacaaan

SEQ ID NO: 37980 - DNA, 114 bp, Macaca Mulatta
gagcctgtttaataagttagtaaaactcactgaggaagccaggaaagcatataaagatatggttgcagcaatggaacaggagcaggctgaggaagccttgaagaatgtgaagaa

SEQ ID NO: 37981 - DNA, 1045 bp, Macaca Mulatta
  misc_feature (1)...(1045): n = A,T,C or G
tttaaaatattcttcatccagagatagaggtagttcttcctcttatggactgcaaccttcaaattcagctgttgtgtctcggcaaaggcacgatgataccagagtccacgctgacatacagaatgacgaaaagggtnggtggctacagtgtcaatggaggatctggggaaaatacttatggtcggaagtcgttggggcaagagctgagggttaacaatgtgaccagccctgagttcaccagtgttcagcatggcagtcgtgctttagccaccaaagacatgaggaaatcacaggnnnnnnnnnnnnnnnnnnnnnnnnnnnnnnnnnnnnnnnnnnnnnnnnnnnnnnnnnnnnnnnnnnnnnnnnnnnnnnnnnnnnnnnnnnnnnnnnnnnnnnnnnnnnnnnnnnnnnnnnnnnnnnnnnnnnnnnnnnnnnnnnnnnnnnnnnnnnnnnnnnnnnnnnnnnnnnnnnnnnnnnnnnnnnnnnnnnnnnnnnnnnnnnnnnnnnnnnnnnnnnnnnnnnnnnnnnnnnnnnnnnnnnnnnnnnnnnnnnnnnnnnnnnnnnnnnnnnnnnnnnnnnnnnnnnnnnnnnnnnnnnnnnnnnnnnnnnnnnnnnnnnnnnnnnnnnnnnnnnnnnnnnnnnagcttgtaatgaccagcctgcagtctattcttgaaaatgtggatacaccagaattgctttgcaaatgtgttaagtgcattcttttggtggctcgatgttaccctcatattttcagcactaattttagggnnnnnnnnnnnnnnnnnnnnnnnnnnnnnnnnnnnnnnnnnnnnnnnnnnnnnnnnnnnnnnnnnnnnnnnnnnnnnnnnnnnnnnnnnnnnnnnnaggaccttagccatgtggcctctggggaatcaggggatgaaaatgttcctcctccatcagtgtcattaccaaagctggccgcacttctccgggtgtttagtactggggtgaggagcattggggaacgcttcagcccaattcggggtcctccaattactgaggcatatgtaacaaatgt

SEQ ID NO: 37982 - DNA, 650 bp, Macaca Mulatta
gcggcgaggaggaggccgcggcgcgggacagatcgagctgcggctcgggcggcgcctccctgcggcgggcccggcccggctccggcccccgccggggcgatgctccccggagccgcgggatgagccagtgactcggccggtccgggcatggcggacccggtggcgggcatcgcgggctcggcggccaagagcgtgcggccatttcgctccagtgaggcctacgtggaggccatgaaggaggacctggccgagtggctcaatgccttgtacggcctgggtctcccgggtggtggtgatggcttcctgacggggctggccacgggcacgaccctgtgccaacatgccaacgccgtgaccgaggctgcccgtgcattggcagctgcccgaccggcccgaggtgtggccttccaggcacacagtgtagtgcctggctccttcatggcccgcgacaacgtggccaccttcatcggctggtgccgcacggagctgggtgtgccggaggtgctcatgtttgagactgaggacctggtgcttcgcaagaacgagaagagcgtggtgctatgcctgctggaggtggcacggcgtggggcccgcctgggcctgctcgccccacgcctcgtgcagttcgagcaggagattgagcgggaact

SEQ ID NO: 37983 - DNA, 85 bp, Macaca Mulatta
gcgggtgcctcccaggtcaaatggaataaaaaaaatgctatctgactggccaccagccatgacggtgatgtgcggatatgggata

SEQ ID NO: 37984 - DNA, 1189 bp, Macaca Mulatta
  misc_feature (1)...(1189): n = A,T,C or G
naggcatggcccaaatcaaacactgattctctctttgtgtctctctaggaatgttcttaatgagtcgccagttcaattaccgcctctgccaccaaggaattggccttctctagaagactnnnnnnnnnnnnnnnnnnnnnnnnnnnnnnnnnnnnnnnnnnnnnnnnnnnnnnnnnnnnnnnnnnnnnnnnnnnnnnnnnnnnnnnnnnnnnnnnnnnnnnnnnnnnnnnnnnnnnnnnnnnnnnnnnnnnnnnnnnnnnnnnnnnnnnnnnnnnnnnnnnnnnnnnnnnnnnnnnnnnnnnnnnnnnnnnnnnnnnnnnnnnnnnnnnnnnnnnnnnnnnnnnnnnnnnnnnnnnnnnnnnnnnnnnnnnnnnnnnnnnnnnnnnnnnnnnnnnnnnnnnnnnnnnnnnnnnnnnnnnnnnnnacccaggctggagtgcagtgnnnnnnnnnnnnnnnnnnnnnnnnnnnnnnnnnnnnnnnnnnnnnnnnnnnnntggtctcgatctcctgacctcgtggtccacccacctcggcctcccaaagtgctgggattacaggcgtgagccacggcgcctggcccctatcaaggtgtcttagatagctcaggctgctgtaacaaaaataccatagactggggtgcttacccaatagaaagttgtattctcgttgttctgagactggaagcccgagatgagggtgctggccaatttgtgagaggtttctggtgaggnnnnnnnnnnnnnnnnnnnnnnnnnnnnnnnnnnnnnnnnnnnnnnnnnnnnnnnnnnnnnnnnnnnnnnnnnnnnnnnnnnnnnnnnnnnnnnnnnnnnnnnnnnnnnnnnnnnnnnnnnnnnnnnnnnnnnnnnnnnnnnnnnnnnnnnnnnnnnnnnnnnnnnnnnnnnnnnnnnnnnnnnnnnnnnnnnnnnnnnnnnnnnnnnnnnnnnnnnnnnnnnnnnnnnnnnnnnnnnnnnnnnnnnnnnnnnnnnnnnnnnnnnnnnnnnnnnnnnnnnnnnnnnnnnnnnnnnnnnnnnnnnnnnnnnnnnnnnnnnnnnnnnnnnnnnnnnnnnnnnnnnnnnnnnnnnnnnnnnnnnnnnnnnnnnnnnnnnnnnnnnnnnnnnnnnnnnnnnnnnnnnnnnnnnnnnnnnnnnnnnnnnnnnnnngtatttttagtagagacggggtttca

SEQ ID NO: 37985 - DNA, 747 bp, Macaca Mulatta
ggggcccattctaggcggacacagggaccccaggacctcttgaggttccatgaaaactagaaatgtgggtgatgtcatcctcacacagggggctacacatcccaatcgattattttaactaaaatacaaaagcaaaatagtgtgttaaaataatcctctactcagtgcattagcacatataccaaattatactatctgcatgacagtctctaggtaccaagactgtatttttgcaagtgctattctctacttcattaaacagagtacccagccagcaaccacaaaaaaggaacgcatgctgtacagcaagagaaggggagggagacgattttcagggtgataacttacatggcaaccaaaaggaaaataagtaagacaaacctcacaagatagatataaaactaatttgcagtgacatttgatatgtagttttatcagaagtaatacatttaggttacagttatgtgaaaaagagaaactatatgaaattataggctttctcctagaatatccaaaatgcttatcaacagttaattagtacaagaaagatgaccaccaggtgactgaatagacagaatgacatgtagtattttaaaaacacagattctgggactagaagctaccaccaaaatatccagaaatctgagttaacaggtcctttactttgcacacttgctgctgatatatagaaccacgaagtgttagcacagaccacaaatgcaaccgctagcctagaggccctcaccc

SEQ ID NO: 37986 - DNA, 758 bp, Macaca Mulatta
  misc_feature (1)...(758): n = A,T,C or G
ggggcaggtggcctaaggctgctataaagttgaggggagaggaaatcttaagattacaagataaaaaatgaatcccctaaacgaaaagaacaatggaactggtcttccattttgccacctttcctgttcatgacagctactaacctggagacagtaacatttcattaaccaaagaaagtgggtcacctgacctctgaagagctgagtactcaggccactccaatcaccctacaagatgccaaggaggtcccaggaagtccagctccttaaactgatgctagtcaataaacctgggcaagtgaggcaagagaaatgagaaagaatccatctgtgaggtgacaggcagggatgaaagagaaagaaggagaagagtatcaaaagcagagaggagatcatttagttgggtctgaaaggaaaagtctttgctatctgacatgtattgctaatacctgtaagcattttaggtcccatnnnnnnnnnnnnnnnnnngctattggtagtcctttgcctggagtcagtttttttaaaaagttaactcttagtttttacttgtttaattctaaaagagaagggagctgaggccattccctgtaggagtaaagataaaaggataggaaaagattcaaagctctaacagagtcacagctttcccaggtataaaacctaaaattaagaaatacgacaagcaaaggtgggaaaatgatctagttcctgatagctacccatagagcaagtgaatttataaatttgaaatccaa

SEQ ID NO: 37987 - DNA, 773 bp, Macaca Mulatta
ggggcacaatatttcccagtttatttttgagtcattcaggcaatatatccaacatcatctattctagggaacacacgttaaaacacaaattacatgttttccatacttcattctttgctctttgttatctgagcagtacgcagaagaagaggtgatggagtatttatagtgttgtacaatgaactagtcacgaaagtgattcatttgttctatagagttactctttagtatgcggacgacttatagggcagtagtgaatgggccctcccaacctttatctttgccttgttcaaaccaagatggaacaattgattctgtttagcacaacctctactagctgaggcaaatgtagaaagcctaggtcaggctcaggagctgactgcaggagtgtgaaatattgcttcaccacttactagccatgtaactcacatcagttgcctcaacttcctcaactgtttactaggctatgcaattaggataatattagttgctacctgataatatcattgtgaatattaaattaggtaatatgtgtaaaacttatcaagatgtgacacacagtaaaaacatactaaatataagattatataaagtgaggaaattaaaagatgactaggaaatcatgggtataatgtacaccatatgagtgatagttacgtgaaaatcccagacttcaccactgtgcaaggtctctccatgtgacaaaactgcacttatatcccttaaatctatacagatttttaaattatacttgaatagccctccctgcctga

SEQ ID NO: 37988 - DNA, 1300 bp, Macaca Mulatta
gaattcctggagaggccgagagaccagcccccgaagcccccccccctcccctcttccccctcccccctcaccgtgctcccaccccctaccccctcccgggcttctccggccccacccatacccaggccacagagccctgggccctgtggttcccggcttccgagggcgggctacccaggggtcctaccgcattcctgaaggggtggagcttgggggcctttataagggccgtcggctgggccgcctcctggctagacctgcgcgccgtgcacaggccgactgaggggcacgggagcccgccgcctctctctgcccgtgtctgtccgcgaagttctggccaggtctccctgcgatggctctcccgacacctgccgacggcgccctccctgagggagcccgaggactaggacggcgaaggagactcgtttggaccccgagccagagggaggccctgcgagcctgctttgagcggaacccgtacccgggcatcgccaccagggaagagctggcccaggccatcggcattccggagcccagggtccagatttggtttcagaacgagagatcgcgccagctgaggcagcaccggcgggaatctcggccctggggcgggaaacgcggcccgcaagaaggcaggcgaaagcggaccgccgtcacccggtcccagaccgccctgctcctgcgagccttccagcaggatcgctttccaggcatcgccaccagggaagaactggccagagagacgggcctcccggagtcccggattcagatttggtttcagaaccggagggccaggcacccaggccagggtggcagggcatcggcgcacgcaggcggcctgtgcaacgcggcccccggggtgtcccccagttccctagtcggtggccttcacccacaccggggcgtggggaacggggcttcgcgcaccccacatgccctgcgcgcccggggctctaccacagggggctttcttgagccagggagcaggggccgtcccgctccagcccagccaggctgcgcaggcagcaggatcgcccaaccctggcccagcccacagatcctggagtggaggtaagcacaccctggcccggcggctcagctcgagcgtgccctaggctgtcccaccgagaaaggccggcaggctgtggcgctgcgggccctggtccccgggctttggctcgggtgtggaggccacccccgggggagtctgagggtgggagagcgttccttccggaggagccagccagcgcggcgtaggcaaaatcccaatccgacgtgccggggcaggttggggggatcc

SEQ ID NO: 37989 - DNA, 81 bp, Macaca Mulatta
agatatggatgctaacaggcgataaactcgagacagctacttgcattgccaaaagttcacatctggtgtctagaacacaag

SEQ ID NO: 37990 - DNA, 753 bp, Macaca Mulatta
  misc_feature (1)...(753): n = A,T,C or G
nnnnnnnnnnnntnnnnnnnnnnnnngccatttacggccgggcagatgacagtgcttattatagattagctacttcctgtgtaataaatcaattattcctctcaacagggacaatcttgaattaaaatcacatttttttccttagagaattctctgtcaaagtctataaaaggccatggnnnnnnnnnnnnnnnnnnnnnnnnnnnnnnnnnnnnnngtccagagacaccttattaaatgacttgattttatccttatttcaaattctaattcatgaatatcagggtataaaatattaaatatcctggttcagctaccagtttttcaagcatcattggggaccatcctgttataataggaaaacagttggtatggctattgggatgtagatcatttttataattattatagggagtaaaaaaatgcagaataaagaataatttaaatataattgaaagtgagagtaggtcagtatgaccaagaatataaatcataaatctctctatttttgtattcctttactccatgccaaaaaataccaaaacctttgttttctaaaaagggcaccaaggtcttttcaaaaagcctgtgggttctcaaaccagccaatttttaagttacaggtttttggttttccaaggtttttctgggggaattcccgggggccctcccaccaataagccacattttggttgccccctaaaaacnaacaagaagtagggtattcgaaaagaagaatttttggggggatca

SEQ ID NO: 37991 - DNA, 90 bp, Macaca Mulatta
gctgaaaataaaatcaggcccgtgcgctgggcctggcctgtagtaagtacttcccaaccccttttctttacccacgaatgtgcatggagc

SEQ ID NO: 37992 - DNA, 1443 bp, Macaca Mulatta
  misc_feature (1)...(1443): n = A,T,C or G
aggccacccgtgtgatgtggacaccacctctccgtgaaagtttttcctatccattccttgtacttcagatgtatattttaactttgattctcagnnnnnnnnnnnnnnnnnnnnnnnnnnnnnnnnnnnnnnnnnnnnnnnnnnnnnnnnnnnnnnnnnnnnnnnnnnnnnnnnnnnnnnnnnnnnnnnnnnnnnnnnnnnnnnnnnnnnnnnnnnnnnnnnnnnnnnnnnnnnnnnnnnnnnnnnnnnnnnnnnnnnnnnnnnnnnnnnnnnnnnnnnnnnnnnnnnnnnnnnnnnnnnnnnnnnnnnnnnnnnnnnnnnnnnnnnnnnnnnnnnnnnnnnnnnnnnnnnnnnnnnnnnnnnnnnnnnnnnnnnnnnnnnnnnnnnnnnnnnnnnnnnnnnnnnnnnnnnnnnnnnnnnnnnnnnnnnnnnnnnnnnnnnnnnnnnnnnnnnnnnnnnnnnnnnnnnnnnnnnnnnnnnnnnnnnnnnnnnnnnnnnnttcgcctgagtgatcttatagcagccagaatcttaaggtatacagattttgatactttaatatacacctgtgctcccgaatttgacttcatggaaaaagcgnnnnnnnnnnnnnnnnnnnnnnnnnnnnnnnnnnnnnnnnnnnnnnnnnnnnnnnnnnnnnnnnnnnnnnnnnnnnnnnnnnnnnnnnnnnnnnnnnnnnnnnnnnnnnnnnnnnnnnnnnnnnnnnnnnnnnnnnnnnnnnnnnnnnnnnnnnnnnnnnnnnnnnnnnnnnnnnnnnnnnnnnnnnnnnnnnnnnnnnnnnnnnnnnnnnnnnnnnnnnnnnnnnnnnnnnnnnnnnnnnnnnnnnnnnnnnnnnnnnnncagatgccgtcttcgcaggtgccatgcctacaatggcaagtgtcaagttgtctacacttcatcccattgtgaatcatccacattacgaagatgcagacttgagnnnnnnnnnnnnnnnnnnnnnnnnnnnnnnnnnnnnnnnnnnnnnnnnnnnnnnnnnnnnnnnnnnnnnnnnnnnnnnnnnnnnnnnnnnnnnnnnnnnnnnnnnnnnnnnnnnnnnnnnnnnnngcctggttgcagtatgcttgaaatctgggatgtggaagacccttccaatgcagcgaaccctcccttatgtagcgtcctgctcaaagatgcgaggccttacttcaccacagtatttcagaatagtgtgtacagagtattgaaggttaactgagaaggaaactacccattacactatggtacaatgccatgtgtcaaaaacaatcaccctttggcttgtttacattaataaaaatcacaagctttaataacagacacttaaaaataagataaaaatggattgaaagtttttctgattactaaaaggtaaattacttttctattcattgaatgtcagccttattaagctcgtcatat

SEQ ID NO: 37993 - DNA, 785 bp, Macaca Mulatta
  misc_feature (1)...(785): n = A,T,C or G
gggccaaaaaaaaccccctgaactttcccatgtttctttggcccatgcctaggcggtagttgtccctgtgcgggtatgttttccccctgtngtagagggcaaaaaccatatttggggcatatgttcctttacccacccagcagtgcgattgggtactctggagtgaaactcctccntgaaatatatcatgatcagggagcatgggcaccaggacccctaactccncctgacacagaacaatagcatcaattacaccaccccatnggaaggactccctttatgtatcaccacggatatgtcactcaactgcagctgtcttgcagtccaatcttaggcatggttaaatcaccacggaaaaattatgtattcattaggcctcagctccattaatgttactggtgtgttcaccaatcacttctggccccatcactcaaattgtattgattatacgtaatgggctccctttgatatttctcacccccctccttggacccagtgtcttggccccttggccagacaactctgtgtgaatgggaaacattgactggggttcccttggccatttagatgggaaagatgaaaatcagatctcttggcacaaacttcactggcactggtggtggaccttcaacacctcttcgccacatcacactgggattcaatcccccagttgactgcacaacttgcttggcacaggacaggctttagcccagccttaccttagtggcgtcatctaggaaaaagaggcccaattcaggaatcaatatggaaggcaacactccccc

SEQ ID NO: 37994 - DNA, 541 bp, Macaca Mulatta
ccaatattggtttcactagctaataaacaacagaaaaatcacttggcataaaatgaaaaactaaattccctacgtcctctttttattaagagtctaattattctgaatcactcttagctaattacaattacatacagcatcacattcattttcctatccctttagaactttcagaattttaagacacataaaataataccaggggatatttgtctacattccagttttattttattcatcagtttattgtcttcttacctgaattatgaattttgagaagttaaacaaagttctttttgaaagtcagttggaagacttatctatttgcacctgaatgttggtcattcatgacatcatagtttattacatcaatttctctcaaatttgaaaattttgacctgttctgtgatctttcctaagtttcacaggtactatagtcacctaacatgctgcctaagacctaactggaatggattaatgaatgaatgctcacaataaatgttccttgaattcaattatcacaacaagaaaataacacact

SEQ ID NO: 37995 - DNA, 672 bp, Macaca Mulatta
cacagcggggaccgctccaccgatgcctgcagcaggggccacgacagttccagcaacagttacggccggagcgaccactacggaggaggaggcagctacgaggagtaccgaggccactcgcccgacacctacagcaggggccgcgacagttccagcaacagtcatggccggagccaccgctacggaggaggaggccgctacgaggagtacggaggccgctcacctgacgcctacggtgggggccacgacagttccatcaacagccacggcctgagtgaccgctacgcaggaggaggccgctataaggagtacctgggcagctcgcccgacgcctacggtgggggccgcaacagttccagcaacagttacggccggagcgatagctactcgagaggtcgagatcgggtaggcagaccggatcttgggctccctctgcccatggaaaggagcagccctcccctgcatgattcttacagccggtcgagctgcagggtgcccagggatggaggccgtcaaggaggccgcttggagagaggggaaggctggagcagatactaactaagcaggaacagacttgggaccaaaaattccttttcaaagaaacaaaaagaacaacctgttctatattaaactacccaaggactagtataagaaagagttgtttttaccttt

SEQ ID NO: 37996 - DNA, 377 bp, Macaca Mulatta
agcaattgttaaaaacctagatgaaccccttacagtgagttcacatattcacaagccgcaaggttctcaattctaatataaaaatgtaacctttttataactgtttcatctattttgtgccacattcaatccctgcaaaggcatttcaaagacagaggctggatagtgtatactgaggtactagccacacacatttaggtgtctaattgaagtgtaacagtgattttttttagggaacatgtaggaaatgtatttctacactaggctaagaatccttgctatctgaggcaggccctaaaaggcatcagaattcacaacagaggggaggagaaagttataaacatcatctgtgaccttgtgaccagttgtagaaacca

SEQ ID NO: 37997 - DNA, 150 bp, Macaca Mulatta
tgagcagtttctcaccattttacccgagaagattcaggcttgggcacagaagcagtgtccgcaaagtggagaggaagcggtggccctggtagtgcatttggaaaaagagactggaagactaaggcagcaggtgagagaggattttccaaa

SEQ ID NO: 37998 - DNA, 657 bp, Macaca Mulatta
aatgctaagcagtacttttttggtaatacagtattttgttaggcgtttctgataacactaggaaggacaagttgtgtcttgtgacaaattgattaatgtttacagcatgactgataattatagctgaatagtccttaaatgatgaacaggttatttagtttttaaatgcagtgtgaaaagtgtgctgtggaaattttatggctaactaattaagtttatggagaaaataccttcagttgatcaagaataataaagtggtatacaaagttaggaagaaagtcaacatgctgcaggaaatagaaacaaatacaaatgatatttaacaaagatagaagagtttatagtttgtgaactttaagccaaattcatttgacatcaaacactataacaggcacaggttcaacaaagcttgtgggtgttgacttccccaaaagttgtcagctgaagtaatacagcccgcttatgtaaatactatggtgataagctgtgtgaacttagcctttaaatagtgtgaccatgtgaagattttaattacttttgtttattggaataaaatgagatttttttggggacattatattaaagtgcttatagggaaagaagcctgcatgtaattttttaccttgtggcataatcagtaattgatcttgttaccag

SEQ ID NO: 37999 - DNA, 800 bp, Macaca Mulatta
  misc_feature (1)...(800): n = A,T,C or G
gggattttgtttatggccagttttgggggcctgtttatgtccagatttgggggcctgttcccaacaccttggcctccgnnnnnnnnnnnnnnnnnnnnnagagccatcacatctggccttctaatgtatgtcttagtctgtcccaggtggttgtatgctttttgtgtattttgcaacattttaaagtagttcctgcccagtttgactctgattggattgcattgtagatgaaatagaaaagagagtcttgtttcagacctttggatagtccccagactgaataaaaaatagaaaggcaataatttggaaataaaatatgatctgtactctctgtggtgattagagttctaccatgggaactctgactgctatcttcaagactggcaatgaggtgggcagagatggggccaaaggaaaaaacaatacaaagctttcctatcattttttactttcccgtttatgtatctttttctcactgtcaataggatgggatgtggaaaattatagttttaaatcctctgtttttgtatagctgtctactttcttgatgagaagggtttttttaaaaagtatttttagacatttatgacttctataaaaaatggtttatgtaatgttattattaaatgtctgctgtttatggaatataatcgatattcatgaaagctgacactgaactctgtctaagaacatttgcagccctgtcccctttctttcttttctcctttgacttaccccataaaaagttaaaatttttctggtttagtttggaaaaatctcttttaatagccttttggtaa

SEQ ID NO: 38000 - DNA, 633 bp, Macaca Mulatta
ccctatggtgatcgaagtctatgacccagcagatggcccgtctttatctccagagtccctcaggaggtgtaaccatctctaacgcagcaggaggtccagctcagattccagagccccctgtggaggcagaaccttctctgacccagcaggaggccacagttcaggctccagagccccctaaggaggtagaaccttcaagacagcaaatggtcccagtgcagcttccagagccgtctaaggaggttgcagctcaacctctagctcatgatgaggtgacaggcccaacaccaggtcaggatcaagctcagcattcaacattgcccagtgtcacagttcagtctttggacctgggacttaccattgttccagaacccactatggaggttgaatattctacacccctgaagaagactatagttcctgcaaagcaccttaaggtgacacttccacatccagaccaggttcagactcagcattcacacctgactcaagccacagttcaacctttggacctagggtttaccatcactccagaatccacgacagaggttgaactttctccaaccgtgcaggagaccccaactcagcctcctaagaaagttgaccccaacttctagtatatcaagaggttac

SEQ ID NO: 38001 - DNA, 810 bp, Macaca Mulatta
  misc_feature (1)...(810): n = A,T,C or G
ggattttgaacatctttagatccaaagcattaaatgcaccagaccctcagttccctgaatgccaccacccacatagtcacaaacaaaccttaccatactctttaacccttttctctggttaaccctatatggattctggacctcttctcctagtacacactcctctggtctccctagccttcatctttccctgcactgcagctctcatcattctctgatcttacctgtctttctgcctgtcccactagactgtgaacaggagtcatacatgatttatctgttgtgtctgcagcttccagcataaggcctgccccagaggaggacctcagagagcttctgcgtggtacagcctttataccgtcttgctaaagaaggctttgggtgtgaaacactcattctccaacaactcctggtgggctttctgtagggctcgggtttctggcctctctctaatgctcccacttgcaatgggactccttttttccaaagggccctttgaaaattttttcccgcgggggggagannnnnnnnnnnnnnnnnnnnnnnnnnnnnnnnnnnnnnnnnnnnnnnnnnnnnaaggtttttgttgtttttctaggtcctccccccccaaagcggaagaagaacagcccaccgcccgccctacttcttccctctttntcactcacnnncacataccgctcacaaagacgcagagncacgcctatatncccctntannnaaagggatgggtggtgtagtaattaatacgcaancnncccgaatagnnnnnnnnnggtagantgtatatggcggcggnatgcagggcgg

SEQ ID NO: 38002 - DNA, 612 bp, Macaca Mulatta
  misc_feature (1)...(612): n = A,T,C or G
attgtgaagcattgaatatcatattttggaacatgttatagggtgagtccctggatctttgctcaccagatccaagcactgcttcttggtgtcattgcagtgtgctgcttgtcacccggaatactactatcatgtgaattctttttgttgtccgtgtnnnnnnnnnnnnnnnnnnnnnnnnnnnnnnnnnnnnnnnnnnnnnnnnnnnnnnnnagaagaagtaattttgcatttataaagcagtatgaattagatgtattttcaaaacaggtccctaagacaattcttcagatcattttttaaatgactaagtcattttagtgtgtcaaccaagataaaagttacatcacacgctctattttgcccgtagtgccattagtagaatagagatgaaaaccagctttaactttgcaaagtgaacgtgtacatggtctgttctcatttattaattcttctctcaaaagtcaaatgaattccgaaggagtttggtcaaactgcttttgtttcaactgcaggcaggggagcaaaaggacgccatgtgagcattaggnnnnnnnnnnnnnnnnntactaacaatttttatatagagaatgagttgtttgggaaatgatt

SEQ ID NO: 38003 - DNA, 672 bp, Macaca Mulatta
  misc_feature (1)...(672): n = A,T,C or G
cgatgattcaaaaggaagcaaaggaaaataatttttactgagacaaaacagtatttaccatcccattaatttaatagctttggatttgaatttgcaatgctgataactacactcattgaacattctctaaatccaagatacaacatttaaacaattctcatatttcacaagttttgttttcattcagtttttacaagaatcctataaatcctcattaatcccattttacagatgagacaaaaagaaagcaagctctgaaagtttcagcaaattggccgagctgtcatatctaaaaggtaggattttacctaggacagagtgactctaaatcttcaccacatcatattgaacagccagcaggatttggccctatcatttttatctctaagaaactactggtttctgctctgaaacagttcctccatgtgaaataagcagctaggttttctttttatcagcttcagctcatttggtgcaggtgtgagggtattaagggatataaggctaaatataattttttgttttcttcctgaacagaaaatggacaaaaataaagatggggttgttaccatagatgagttcattgaaagctgccaaaaagtaagtaatgaaagtataagaactatcacttcagctatcataacagctaaanctgagtattagcagctagct

SEQ ID NO: 38004 - DNA, 2726 bp, Macaca Mulatta
  misc_feature (1)...(2726): n = A,T,C or G
gatcccaaggaagaaaaagaggaagaagacgattctgccctccctcaggaagtttccattgctgcatctagacctagccggggctggcgtagtagtaggacatctgtttctcgccatcgtgatacagagaacacccgaagctctcggtccaagactggttcattgcaactcatttgcaagtcagaaccaaatacagaccaacttgattatgnnnttagtagtgaagaggaagaggaggaggaagaagagatgttaatcagtgaagaggagataccattcaaagatgacccaagagatgagacctacaaaccccacttagaaaggcatgtctcagattttactccagacatnnnnnnnnnnnnnnnnnnnnnnnnnnnnnnnnnnnnnnnnnnnnnnnnnnnnnnnnnnnnnnnnnnnnnnnnnnnnnnnnnnnnnnnnnnnnnnnnnnnnnnnnnnnnnnnnnnnnnnnnnnnnnnnnnnnnnngagaggaagaagacgaaaagatgacaaaagtccacgtttacccaaaaggannnnnnnnnnnnnnnnnnnnnnnnnnnnnnnnnnnnnnnnnnnnnnnnnnnnnnnnnnnnnnnnnnnnnnnnnnnnnnnnnnnnnnnnnnnnnnnnnnnnnnnnnnnnnnnnnnnnnnnnnnnnnnnnnnnnnnnnnnnnnnnnnnnnnnnnnnnnnnnnnnnnnnnnnnnnnnnnnnnnnnnnnnnnnnnnnnnnnnnnnnnnnnnnnnnnnnnnnnnnnnnnnnnnnnnnnnnnnnnnnnnnnnnnnnnnnnnnnnnnnnnnnnnnnnnnnnnnnnnnnnnnnnnnnnnnnnatgtgagatctgtggatttacttgtcgacaaaaggcatctcttaattggcacatgaagaaacatgatgcagactccttctaccagttttcttgcaatatctgtggcaaaaaatttgagaagaaggacagcgtggtggcacacaaggcaaaaagccaccctgaggtgctgattgcagaagctctggctgccaatgcaggcgccctcatcaccagcacagatatcttgggcactaacccagagtccctgacgcagccttcagatggtcagggtcttcctcttcttcctgagcccttgggaaactcaacctctggagagtgcctactgctagaagctgaaggaatgtcaaagtcatactgcagtgggacagaacgnnnnnnnnnnnnnnnnnnnnnnnnnnnnnnnnnnnnnnnnnnnnnnnnnnnnnnnnnnnnnnnnnnnnnnnnnnnnnnnnnnnnnnnnnnnnnnnnnnnnnnnnnnnntcagggnctgaacgagaacatcaacctggattctgtgtatggggtgccagtggcaagnnnnnnnnnnnnnnnnnnnnnnnnnnnnnnnnnnnnnnnnnnnnnnnnnnnnnnnnnnnnnnnnnnnnnnnnnnnnnnnnnnnnnnnnnnnnnnnnnnnnnnnnnnnnncattttaccccaaccaaaggtgacttccatcaagctatacatacccttcttctccaagttgctgcctttgcataccagatagaggagttaatgatactcctggaatacaagattccccgcaatgaggctgatgggatgccttttagttttggagatggtggtctctttgagaagaagctgtggggcctaaaggtgctgcaggagctttcacagtggacagtgaggtccatccatgaccttcgtgtcatttcttcacatcagactgggatcccagcacgtgggagccattatattgctaacaacaagaatgtgtagcagccccttctgccttgctttctcttctaatggaatatagatagttacctggggcctcgctttcgcatcgtaaatttcnnnnnnnnnnnnnnnnnnnnnnnnnnnnnnnnnnnnnnnnnnnnnnnnnnnnnnnnnnnnnnnnnnnnnnnnnnnnnnnnnnnnnnnnnnnnnnnnnnnnnnnnnnnnnnnnnnnnnnnnnnnnnnnngggggtgtgattgtgtgcacgcgtgcacgtgctacaggtgtaagagtggtagcagggacaacgtccttccacttcagggttctaatctttctaaccctctaagtaacctctacaggcatttaacagccttacagacagaatatacatatgttaattctagttctggatgactcggtctgagaagattcaatttaaaatcagactctttagtcgatttaaactcttaagagaataaaaataataatggctaacttattatctactatattgaggcaatatgccaagggtctttatgtatattatgtacagcttttacaaccttgtgaacaaggtggtggtgctcccattcagtagatgagaaaacaggctcacagagatttggttaagctcacacaactaacaagtggcacacagagtttgaacacagatcattcttgtaaagcctatgtgccttgcactttagaggcttggtgatgaatcactgcacctctttgtcacagggtgttggaagatgcatccatgtaatctgttcccgtcgctggaaaacagctgccattagatgtcctcagaagtcagttgcgaattttagcgttaaagtcaggatttgtttttcatacttggcagtgaagagggcagctggagatcttaagattccattttggaaaatgattaggcccaccacacttctgaactttggaagctggggatgtttagtaatacagcctgatttt

SEQ ID NO: 38005 - DNA, 638 bp, Macaca Mulatta
  misc_feature (1)...(638): n = A,T,C or G
ggggcctcaccgatctaacgttcctagaggaaggtcatataccggttaaacttcaccgttttgcctcatagtgcacaggcttgagctcacttacctaactcctgagatcttactgagaagctactggtcaccagtttcaggctggcaacggaacaactaagataagttgcttaattaagggaggcaacattatcacggccaagatgacaatggattcttgtctatttacctgtcccaggagaacaaaattctgataagtgagaagaatccagtgcaactgttacggggtggagagaaggcaggaggctacaaacttccagtcccacattgcatcacccacgagttatagttattcctcttgtcagcaccattgtgggtctcggaattaggaaacatatgatgaaaattattaatttaaaagatgcagatgagaacctgaagagctgactaaaaagtaatgactaataagctgagatactgagcagagcttccaaatgtctcatggggctatagagaaaaaccttgtgttcatggcccactgtgaaataagaatgctaggaatccccccaggctttagttaggactcctgagacatgatagtgagggatgtgaatatnaacataggagaaaaccaaaan

SEQ ID NO: 38006 - DNA, 405 bp, Macaca Mulatta
tgccgcagacagcagacaagctgccccggacagcctgctcaccttgcctgccacagtgcaggccccgcagggagaagccttccttctcacacaaggggtccagccattttcacctcccctggtccatgctcaggaagtctggttgccctggcaaactgcagctgacattgaagtcccttttcaccaaagatgcacaaggtgtccaaaaagaaccgacatcattcaggctaagggcagaggaggtaatgaggggtgagggaggatgtggagagagagcagagagctcctcctattctcctgcggctgcctctgcccccacagcacccacagatccctggcccttccaggagtaagtcctgggcaggcagagctggggttggcctgatcccacctgctttgctcttg

SEQ ID NO: 38007 - DNA, 648 bp, Macaca Mulatta
  misc_feature (1)...(648): n = A,T,C or G
ttctagctactaattttatcaagctgtacttgtccagttagctgtgcagagaaaatatttgccttgatgcagatagtcggaatcttacacactgtgtgtgggaacagcgtgtaattttatttgcctcaagatactgccttagtgaaagacattgatatgtaggtttggtaaaatttatatacgctttgtctccttattcatgataatcatgtttgtattgtatagtttgtgtgttgaaggctgtgttgtggaaccagaccttctgtagagtggcagaatgacttcacctgagtcatgaaggaagcttgctttagtaaagttcatttgaagagnnnnnnnnnnnnnnnnnnnnnnnnnnnnnnnnnnnnnnnnnnnnnnnnnnnnnnnnnnnnnnnnnnnnnnnnnnnnnnnnnnnnnnnnnnnnnnnnnnnnnnnnnnnnnnnnnnnnnnnnnnnnnnnnnnnnnnnnnnnnnnnnnnnnnnnnnnnnnnnnnnnnnnnnnnnnnnnnnnnnnnnnnnnnnnnnnnnnnnnnnnnnnnnnnnnnnnnnnnnnnnnnnnnnnnnnnnnnnnnnnnnnnnnnnnnnnnnnnnnnnnnnnnnnnnnnnnnnnnnnnnnnnnnnnnnnnnnnnnnnnnnnnnnnnnnnnnnn

SEQ ID NO: 38008 - DNA, 714 bp, Macaca Mulatta
  misc_feature (1)...(714): n = A,T,C or G
ggtactctatgccatgtgctcttctaagtactttatgtgtgttaactcctttaatcctcacaacaaccctttcaggcagggaccaatattactcctgttataaatgaagaaaaaaagcacagagcagttaaattatttgctcaaagtccccaaggtaagaaggggcagagctaagctgttaccctttatgaacccagaagtctagctttagagtccatactcttaatcatcacactcctctgcctctcccaagattgacaaagaatatcaaatgatgggccggggcctcagtcacaattggcaatacgcaaagatcacttttgagatcctctcacctctcttgggtttcccccagctcctggccccttccttaatgtctattacttccaacaccttctttatcctacacacattcccagtgagctttgctctaattgaagtggaacactgttatagctcctgaggtaataactaataaggattctggtttcaattcactcgggtttgtttgtttannnnnnnnnnnnnnnnnnnncatggatgactcaactcctaacaaagaaaagtgatgtaatcctttaagaaccaggggggctaattaccctaatggtgggaacaacaaaatccaaccaccccttcaaattcgcctttcactttaattttcaacatttctggccttaagcttttccccccaacttttttcttgaaaatgct

SEQ ID NO: 38009 - DNA, 277 bp, Macaca Mulatta
cctcagatcttttagctttagtgacactcctttcatgaaacctactccaattattgggccacacctcctttgtccttctgtgttcctgttgtaatgatagtctattacacacaatctagcgctgtattacaatgtacttacactcttttgttcttttgattttttttgtgagttaaacaacataacagttatcaatggcccctgtattgtatttggaatcaggaaataccttgtgaatggtgtatgtctctttctgccaacaagactataaacccca

SEQ ID NO: 38010 - DNA, 264 bp, Macaca Mulatta
atgggaaacactcaggcaccaacaggctaacccttgaaatgcatcctaagccattgggaccaatttgacccacaaatcctgaaaaagaggcggctcattttttctgcactacggcttgaccccaatattttctctctctgatggggaaaaatggctacttgagagaagtataaattacaatactatcctgcagcttgaccttttctgtaagaaggaaggcaagtggcgtaaaataccttatgtccaagctttcttttcattgaa

SEQ ID NO: 38011 - DNA, 761 bp, Macaca Mulatta
  misc_feature (1)...(761): n = A,T,C or G
ggggccttcgcagcctccgtgatagcgatggcccgctagagtaccacctttctctctcacctctgtctttttctcaatcctttgactccgccggacttcgtcacccccacgacctggtgttagtctgatcaccccaacattcctggctacccaatgtggggtgacaaaaaccccagtgaaggaacgctagagcgggtgaaagcgaaggatgcattgtataaaaacacccgagaacgtcttttcaggcgccccttttagatgtctttttagaagttcggcaggaaagctgagtgctcagaaccagggtgaaaaacgggacaaagtgaaagcagacgttctgcttatttaaatttttgaaggcatttattacgaagtggggggtgaaagtgagtactcagaacttatcactctttagtgtagtaaagcagttttgcctatggttcccggaaccaagggactgtggagttggatgtaatgggagagaattggcagaggtttttttaaaagcaaaaattccagtctcggtttggtcaatgtaggcactaataaaagcaaattttgagccatttcataacagatgatgcagattcggatgaggaagaggaggatgaatgtaaaaaaacttcagattctgaatgtgaggaacgggaactnnnnnnnnnnnnnnnnnnnnttgaaaaatattttactagcctgtcagctccacctgctgaaatcagtgaaaagcccgccaccctctcttactgcccctggtatttgcc

SEQ ID NO: 38012 - DNA, 995 bp, Macaca Mulatta
gaatccacagtatgtagccattttcaaactcacttctttcccatagcaatatgccatttaaggtttctccatgcctgtgtgtgacttgatagctgaataatattccattgtatttgtgtaccacactatgttgcttttatgggaactatttatttctttggtgaactcaagatgtcctggtctcctgtaatttcccgtggtggtcttagctcagaaacactgcaccagtctaggcaggcatcgctacagttacaggttgaggcataccctagcagtggtctctgggagttaggattttgcttgggagccagggcccacctcttgggtgggagaacatgcagtcgcccagggccctgcacctagaagggcccacgttttgtttaatactctgtactcactatcttaaaatgttccatgatttttaaacaagaggccccattcttttcattctgcattgggcctcaccacttatatagcagcctgtttgagagtttccagctgtgtgctttggtagatctgttgctcagagctggttccaagctggtgttcccctcatatgtctgaaggcagaatgacattatgggcagaaatcacggcaatcttagggcccatgagaagactaagacaagacataggagggcagagaggagcttgggtgcccctaaggagccaaaggctgacctgcctcttttcagggagccccaagattagctctgttctagccctgaagagtctacgccagctgactcagtcacctaatgttagctaatatttattgaatactgccaagtgctgagcactttgtagaacttgagagacacagagaatttttttaaagattttcccagccttttagtacctcctggccaagcaggggacattaaggcagaaaggagtaatgttgtgcaatgtaattatgctgaggttgaagtatttttacacagaggtctgggagcacaccagcgggccaggttgtctggatgcaggatggggtc

SEQ ID NO: 38013 - DNA, 791 bp, Macaca Mulatta
  misc_feature (1)...(791): n = A,T,C or G
ggcagaaaatgtgttttactcctacaaggaagtgaaaagtaggattcaaactttgatctgttggctccaaagcccactcacttcactaactaccactcttgtcttcccctgatacttatatcacagtagtctgatactacagatttgcagttgctaagaaagtgaaccagatctctgatttttatgattttgtgagttgaaggttgtttaaattccagattttattcccaaaatattattttcaaaatgttgacaattttaaagccaaacagcttttcagttccactgatgttgcagcctggagccacagaatcaacctctaatgattgagtgagaacagaagatttgacaaggcagtgaaggttaaggctcccctccccaccagtgcagcacctgctcctacggcaggaaaagtaaacaccatgtttaacaattacaggtctgggtaatgtggtttggtcttcataccttcactcaagtggagcccgagaagttgaagacactaacagaaggtttggaagcctacacccgtgtccggaaaaggaacagaaagtaagcnnnnnnnnnnnnnnnnnnacttttgttttccaggatataaattactgtttatccctcaaaggggacaacgaaatctcactgaattctgtccatgttgttggccctgcctaagtaaagtttgtttaccccccaaagaaggaccatttattgaaccaggccaaatttagtgtattacagaaaaatatccttcctaaacaaatttaatgttttacactcccggtggtaataatttt

SEQ ID NO: 38014 - DNA, 302 bp, Macaca Mulatta
gcaaccctacacctgtgcagacacacccctacacccatgcacagacgtaaaccaacacctgtgcacagacacaccctcatgcccctgcacacccctaaccccactctcctgcacactcatacccctacaccatgcatcacacctgaaccccatgaccaacactcaccacgggcagcagtgtggtgggtcaggccccactgggccacggtgtgggctctcctgcccttttcacctctgccccctgcgtgagcagacgctcacaaggaaggcccagcagcagccaggttaatatgcatttttct

SEQ ID NO: 38015 - DNA, 6350 bp, Macaca Mulatta
  misc_feature (1)...(6350): n = A,T,C or G
cgcgctcgcggggggcggtggcgccgggcacggaggggttaagggggcggtgccgacgtctccccgcccatcccgcccctcgagggcagcggcgctccgccctatttatagcagcggtgccgggcgcgtcgcgtttctccgcaggccccggccgcggcgtcaccgacaacctagcgaaggcgctatggagcggccggctccgctagccgtgctgcccttctcggaccccgcgcacgccctgagcctgctgcgcggcctgagccagctccgcgccgagcgcaagttcctggacgtgaccctggaggcggcgggcgggcgcgacttcccggcgcaccgcgcggtgctggccgccgccagcccctacttccgcgccatgttcgccgggcagctgcgcgagagccgcgccgagcgggtgcgcctgcacggagtgcctcccgacatgctgcagctgctgctggacttcagctacacgggccgcgtggcggtaagcggcgacaacgccgagccgctgctgcgcgccgctgacctgctgcagttcccggccgtgaaggaggcatgcggcgccttcctgcagcagcagctcgacctggccaactgcctggacatgcaggacttcgccgaggccttcagctgctcggggttggcgagcgcggcgcagcgcttcatcctgcgccacgtgggcgagctgggcgccgagcagctggagcggctgccactggcgcgcctgctgcgctannnnnnnnnnnnnnnnnnnnnnnnnnnnnnnnnnnnnnnnnnnnnnnnnnnnnnnnnnnnnnnnnnnnnnnnnnnnnnnnnnnnnnnnnnnnnnnnnnnnnnnnnnnnnnnnnnnnnnnnnnnnnnnnnnnnnnnnnnnnnnnnnnnnnnnnnnnnnnnnnnnnnnnnnnnnnnnnnnnnnnnnnnnnnnnnnnnnnnnnnnnnnnnnnnnnnnnnnnnnnnnnnnnnnnnnnnnnnnnnnnnnnnnnnnnnnnnnnnnnnnnnnnnnnnnnnnnnnnnnnnnnnnnnnnnnnnnnnnnnnnnnnnnnnnnnnnnnnnnnnnnnnnnnnnnnnnnnnnnnnnnnnnnnnnnnnnnnnnnnnnnnnnnnnnnnnnnnnnnnnnnnnnnnnnnnnnnnnnnnnnnnnnnnnnnnnnnnnnnnnnnnnnnnnnnnnnnnnnnnnnnnnnnnnnnnnnnnnnnnnnnnnnnnnnnnnnnnnnnnnnnnnnnnnnnnnnnnnnnnnnnnnnnnnnnnnnnnnnnnnnnnnnnnnnnnnnnnnnnnnnnnnnnnnnnnnnnnnnnnnnnnnnnnnnnnnnnnnnnnnnnnnnnnnnnnnnnnnnnnnnnnnnnnnnnnnnnnnnnnnnnnnnnnnnnnnnnnnnnnnnnnnnnnnnnnnnnnnnnnnnnnnnnnnnnnnnnnnnnnnnnnnnnnnnnnnnnnnnnnnnnnnnnnnnnnnnnnnnnnnnnnnnnnnnnnnnnnnnnnnnnnnnnnnnnnnnnnnnnnnnnnnnnnnnnnnnnnnnnnnnnnnnnnnnnnnnnnnnnnnnnnnnnnnnnnnnnnnnnnnnnnnnnnnnnnnnnnnnnnnnnnnnnnnnnnnnnnnnnnnnnnnnnnnnnnnnnnnnnnnnnnnnnnnnnnnnnnnnnnnnnnnnnnnnnnnnnnnnnnnnnnnnnnnnnnnnnnnnnnnnnnnnnnnnnnnnnnnnnnnnnnnnnnnnnnnnnnnnnnnnnnnnnnnnnnnnnnnnnnnnnnnnnnnnnnnnnnnnnnnnnnnnnnnnnnnnnnnnnnnnnnnnnnnnnnnnnnnnnnnnnnnnnnnnnnnnnnnnnnnnnnnnnnnnnnnnnnnnnnnnnnnnnnnnnnnnnnnnnnnnnnnnnnnnnnnnnnnnnnnnnnnnnnnnnnnnnnnnnnnnnnnnnnnnnnnnnnnnnnnnnnnnnnnnnnnnnnnnnnnnnnnnnnnnnnnnnnnnnnnnnnnnnnnnnnnnnnnnnnnnnnnnnnnnnnnnnnnnnnnnnnnnnnnnnnnnnnnnnnnnnnnnnnnnnnnnnnnnnnnnnnnnnnnnnnnnnnnnnnnnnnnnnnnnnnnnnnnnnnnnnnnnnnnnnnnnnnnnnnnnnnnnnnnnnnnnnnnnnnnnnnnnnnnnnnnnnnnnnnnnnnnnnnnnnnnnnnnnnnnnnnnnnnnnnnnnnnnnnnnnnnnnnnnnnnnnnnnnnnnnnnnnnnnnnnnnnnnnnnnnnnnnnnnnnnnnnnnnnnnnnnnnnnnnnnnnnnnnnnnnnnnnnnnnnnnnnnnnnnnnnnnnnnnnnnnnnnnnnnnnnnnnnnnnnnnnnnnnnnnnnnnnnnnnnnnnnnnnnnnnnnnnnnnnnnnnnnnnnnnnnnnnnnnnnnnnnnnnnnnnnnnnnnnnnnnnnnnnnnnnnnnnnnnnnnnnnnnnnnnnnnnnnnnnnnnnnnnnnnnnnnnnnnnnnnnnnnnnnnnnnnnnnnnnnnnnnnnnnnnnnnnnnnnnnnnnnnnnnnnnnnnnnnnnnnnnnnnnnnnnnnnnnnnnnnnnnnnnnnnnnnnnnnnnnnnnnnnnnnnnnnnnnnnnnnnnnnnnnnnnnnnnnnnnnnnnnnnnnnnnnnnnnnnnnnnnnnnnnnnnnnnnnnnnnnnnnnnnnnnnnnnnnnnnnnnnnnnnnnnnnnnnnnnnnnnnnnnnnnnnnnnnnnnnnnnnnnnnnnnnnnnnnnnnnnnnnnnnnnnnnnnnnnnnnnnnnnnnnnnnnnnnnnnnnnnnnnnnnnnnnnnnnnnnnnnnnnnnnnnnnnnnnnnnnnnnnnnnnnnnnnnnnnnnnnnnnnnnnnnnnnctgggcttgtgagaagaggggtgccccgcctgacagtgtgatgggacggggaggcctcaatgccatttggccatgtgagcattcttagtccaaggtacacattatatactgccttctttcctctctgtcttttaacatttccaaacctacactctgtgatatctagcctcacagcttacatcacagcttaatgtccttgcagttaagatacccagctttctgttttccccacagtaagctgcacatagtcatagcgaatttgggaaagatggaaggaatcatccagcctcgtggttcagagcccagctctgccagagtcagccgtgcaagcctgttttcccatctgtaacatggggagaagagcactacccagcccagagggccactgcagagattctgagagaacctaggaagcgctgctcggcaccacctgcacacggggaggcctggcgctgcagcgggcaccctcatcaccatagggaaggcccagctgcccccggggaggcctgttctcctaggcagggtgtgggaaaggagttggcctctgctgctttctgggagagccaaggccaccccatggggtgctgactgggaagccttgtctccagtggttccccaggtggggccttgccctaccccctcctctgacctccactcactcatccctttgacccacaggtgcacgttgggggcagcctggccgtccttgggggaaagctgtacgtctctgggggatacgacaatacgtttgaactctcggacgtagtagaggcctatgacccagagactcgcgcatggagcgtggagggcggctcccagaacccaccttctggcatggcnnnnnnnnnnnnnnnnnnnnnnnnnnnnnnnnnnnnnnnnnnnnnnnnnnnnnnnnnnnnnnnnnnnnnnnnnnnnnnnnnnnnnnnnnnnnnnnnnnnnnnnnnnnnnnnnnnnnnnnnnnnnnnnnnnnnnnnnnnnnnnnnnnnnnnnnnnnnnnnnnnnnnnnnnnnnnnnnnnnnnnnnnnnnnnnnnnnnnnnnnnnnnnnnnnnnnnnnnnnnnnnnnnnnnnnnnnnnnnnnnnnnnnnnnnnnnnnnnnnnnnnnnnnnnnnnnnnnnnnnnnnnnnnnnnnnnnnnnnnnnnnnnnnnnnnnnnnnnnnnnnnnnnnnnnnnnnnnnnnnnnnnnnnnnnnnnnnnnnnnnnnnnnnnnnnnnnnnnnnnnnnnnnnnnnnnnnnnnnnnnnnnnnnnnnnnnnnnnnnnnnnnnnnnnnnnnnnnnnnnnnnnnnnnnnnnnnnnnnnnnnnnnnnnnnnnnnnnnnnnnnnnnnnnnnnnnnnnnnnnnnnnnnnnnnnnnnnnnnnnnnnnnnnnnnnnnnnnnnnnnnnnnnnnnnnnnnnnnnnnnnnnnnnnnnnnnnnnnnnnnnnnnnnnnnnnnnnnnnnnnnnnnnnnnnnnnnnnnnnnnnnnnnnnnnnnnnnnnnnnnnnnnnnnnnnnnnnnnnnnnnnnnnnnnnnnnnnnnnnnnnnnnnnnnnnnnnnnnnnnnnnnnnnnnnnnnnnnnnnnnnnnnnnnnnnnnnnnnnnnnnnnnnnnnnnnnnnnnnnnnnnnnnnnnnnnnnnnnnnnnnnnnnnnnnnnnnnnnnnnnnnnnnnnnnnnnnnnnnnnnnnnnnnnnnnnnnnnnnnnnnnnnnnnnnnnnnnnnnnnnnnnnnnnnnnnnnnnnnnnnnnnnnnnnnnnnnnnnnnnnnnnnnnnnnnnnnnnnnnnnnnnnnnnnnnnnnnnnnnnnnnnnnnnnnnnnnnnnnnnnnnnnnnnnnnnnnnnnnnnnnnnnnnnnnnnnnnnnnnnnnnnnnnnnnnnnnnnnnnnnnnnnnnnnnnnnnnnnnnnnnnnnnnnnnnnnnnnnnnnnnnnnnnnnnnnnnnnnnnnnnnnnnnnnnnnnnnnnnnnnnnnnnnnnnnnnnnnnnnnnnnnnnnnnnnnnnnnnnnnnnnnnnnnnnnnnnnnnnnnnnnnnnnnnnnnnnnnnnnnnnnnnnnnnnnnnnnnnnnnnnnnnnnnnnnnnnnnnnnnnnnnnnnnnnnnnnnnnnnnnnnnnnnnnnnnnnnnnnnnnnnnnnnnnnnnnnnnnnnnnnnnnnnnnnnnnnnnnnnnnnnnnnnnnnnnnnnnnnnnnnnnnnnnnnnnnnnnnnnnnnnnnnnnnnnnnnnnnnnnnnnnnnnnnnnnnnnnnnnnnnnnnnnnnnnnnnnnnnnnnnnnnnnnnnnnnnnnnnnnnnnnnnnnnnnnnnnnnnnnnnnnnnnnnnnnnnnnnnnnnnnnnnnnnnnnnnnnnnnnnnnnnnnnnnnnnnnnnnnnnnnnnnnnnnnnnnnnnnnnnnnnnnnnnnnnnnnnnnnnnnnnnnnnnnnnnnnnnnnnnnnnnnnnnnnnnnnnnnnnnnnnnnnnnnnnnnnnnnnnnnnnnnnnnnnnnnnnnnnnnnnnnnnnnnnnnnnnnnnnnnnnnnnnnnnnnnnnnnnnnnnnnnnnnnnnnnnnnnnnnnnnnnnnnnnnnnnnnnnnnnnnnnnnnnnnnnnnnnnnnnnnnnnnnnnnnnnnnnnnnnnnnnnnnnnnnnnnnnnnnnnnnnnnnnnnnnnnnnnnnnnnnnnnnnnnnnnnnnnnnnnnnnnnnnnnnnnnnnnnnnnnnnnnnnnnnnnnnnnnnnnnnnnnnnnnnnnnnnnnnnnnnnnnnnnnnnnnnnnnnnnnnnnnnnnnnnnnnnnnnnnnnnnnnnnnnnnnnnnnnnnnnnnnnnnnnnnnnnnnnnnnnnnnnnnnnnnnnnnnnnnnnnnnnnnnnnnnnnnnnnnnnnnnnnnnnnnnnnnnnnnnnnnnnnnnnnnnnnnnnnnnnnnnnnnnnnnnnnnnnnnnnnnnnnnnnnnnnnnnnnnnnnnnnnnnnnnnnnnnnnnnnnnnnnnnnnnnnnnnnnnnnnnnnnnnnnnnnnnnnnnnnnnnnnnnnnnnnnnnnnnnnnnnnnnnnnnnnnnnnnnnnnnnnnnnnnnnnnnnnnnnnnnnnnnnnnnnnnnnnnnnnnnnnnnnnnnnnnnnnnnnnnnnnnnnnncctgcccaggtctcctccatcaggaccccgtctttgggtttggaagaccaagtatggggaagagcagacaccagcctctgcagcaatgggtccctctagcctgtggacaccagctgggnnnnnnnnnnnnnnnnnnnnnntctccccagctcccctctgctgtgggttctgggctgtgatgtccccaccacttaaggatgtcttcacactgacttcaggacagatgctgggaagcctgggcatggccacgtgttacgtgtacagaattttgtctacagcacaaattaagttatgtaaacacagtgactggtatttaatgctgatctactataaggtattctatatttatacgacttcagagacgcgtatgtaataaaggacgccctccctccagtgtccacatccagttcaccccagaggattgggcaagttgacatatttatttttgtctattctgt

SEQ ID NO: 38016 - DNA, 632 bp, Macaca Mulatta
gggacacaccctcattttccagcagtgaaggtagactattaaggctctcatgtaatcaaggatggaggcaatgggataatggagattctagacatttgtttcgtcaccagcgaaaattaaatgaagactcaggaatcactacagctacagggatgagaaggacatttcagcagctacagtgtggtggcattatttactcaggagaaaaaagtataggaaactaaagaaaatactgaagataatttcaaatggtgacaatctttttcaatctcgtctgcacttcaattttggaatagtctataatatttgagaattaacagaaatattacaagatataagctagcaactgttatgtaaaagtatccattttccatggattccagctaaaagactaacagttactaaaacatccccacaagctaactgcttttaaaaagacctctaccacaacacaagatggtgccattagcatattatggtcaacactttgtgccattagactatttctaccaactgtcctcagccaattcattaacacatcaacgtacaggtgaaaaactaaatcaattcaataaccaacctgtagccaaagtgcaatcccatggcaatcccttgcagaacttcactgggtt

SEQ ID NO: 38017 - DNA, 3767 bp, Macaca Mulatta
  misc_feature (1)...(3767): n = A,T,C or G
nagcttctgtatacctttgagaaagacttgcaagttttcagttgctctgtcaacagtgaaagaactttgcttnnnnnnnnnnnnnnnnnnnnnnnnnnnnnnnnnnnnnnnnnnnnnnnnnnnnnnnnnnnnnnnnnnnnnnnnnnnnnnnnnnnnnnnnnnnnnnnnnnnnnnnnnnnnnnnnnnnnnnnnnnnnnnnnnnnnnnnnnnnnnnnnnnnnnnnnnnnnnnnnnnnnnnnnnnnnnnnnnnnnnnnnnnnnnnnnnnnnnnnnnnnnnnnnnnnnntattgagcaattacgtatccatgttgcccaagaagatggaaatagagtggtnnnnnnnnnnnnnnnnnnnnnnnnnnnnnnnnnnnnnnnnnnnnnnnnnnnnnnnnnnnnnnnnnnnnnnnnnnnnnnnnnnnnnnnnnnnnnnnnnnnnnnnnnnnnnnnnnnnnnnnnnnnnnnnnnnnnnnnnnnnnnnnnnnnnnnnnnnnnnnnnnnnnnnnnnnnnnnnnnnnnnnnnnnnnnnnnnnnnnnnnnnnnnnnnnnnnnnnnnnnnnnnnnnnnnnnnnnnnnnnnnnnnnnnnnnnnnnnnnnnnnnnnnnnnnnnnnnnnnnnnnnnnnnnnnnnaggaagtttgtgtgtatgttacagcccgaagtgtgcctcttgggaacaaatcacatattcagtgttttacattcataaagnnnnnnnnnnnnnnnnnnnnnnnnnnnnnnnnnnnnnnnnnnnnnnnnnnnnnnnnnnnnnnnnnnnnnnnnnnnnnnnnnnnnnnnnnnnnnnnnnnnnnnnnnnnnnnnnnnnnnnnnnnnnnnnnnnnnnnnnnnnnnnnnnnnnnnnnnnnnnnnnnnnnnnnnnnnnnnnnnnnnnnnnnnnnnnnnnnnnnnnnnnnnnnnnnnnnnnnnnnnnnnnnnnnnnnnnnnnnnnnnnnnnnnnnnnnnnnnnnnnnnnnnnnnnnnnnnnnnnnnnnnnnnnnnnnnnnnnnnnnnnnnnnnnnnnnnnnnnnnnnnnnnnnnnnnnnnnnnnnnnnnnnnnnnnnnnnnnnnnnnnnnnnnnnnnnnnnnnnnnnnnnnnnnnnnnnnnnnnnnnnnnnnnnnnnnnnnnnnnnnnnnnnnnnnnnnnnnnnnnnnnnnnnnnnnnnnnnnnnnnnnnnnnnnnnnnnnnnnnnnnnnnnnnnnnnnnnnnnnnnnnnnnnnnnnnnnnnnnnnnnnnnnnnnnnnnnnnnnnnnnnnnnnnnnnnnnnnnnnnnnnnnnnnnnnnnnnnnnnnnnnnnnnnnnnnnnnnnnnnnnnnnnnnnnnnnnnnnnnnnnnnnnnnnnnnnnnnnnnnnnnnnnnnnnnnnnnnnnnnnnnnnnnnnnnnnnnnnnnnnnnnnnnnnnnnnnnnnnnnnnnnnnnnnnnnnnnnnnnnnnnnnnnnnnnnnnnnnnnnnnnnnnnnnnnnnnnnnnnnnnnnnnnnnnnnnnnnnnnnnnnnnnnnnnnnnnnnnnnnnnnnnnnnnnnnnnnnnnnnnnnnnnnnnnnnnnnnnnnnnnnnnnnnnnnnnnnnnnnnnnnnnnnnnnnnnnnnnnnnnnnnnnnnnnnnnnnnnnnnnnnnnnnnnnnnnnnnnnnnnnnnnnnnnnnnnnnnnnnnnnnnnnnnnnnnnnnnnnnnnnnnnnnnnnnnnnnnnnnnnnnnnnnnnnnnnnnnnnnnnnnnnnnnnnnnnnnnnnnnnnnnnnnnnnnnnnnnnnnnnnnnnnnnnnnnnnnnnnnnnnnnnnnnnnnnnnnnnnnnnnnnnnnnnnnnnnnnnnnnnnnnnnnnnnnnnnnnnnnnnnnnnnnnnnnnnnnnnnnnnnnnnnnnnnnnnnnnnnnnnnnnnnnnnnnnnnnnnnnnnnnnnnnnnnnnnnnnnnnnnnnnnnnnnnnnnnnnnnnnnnnnnnnnnnnnnnnnnnnnnnnnnnnnnnnnnnnnnnnnnnnnnnnnnnnnnnnnnnnnnnnnnnnnnnnnnnnnnnnnnnnnnnnnnnnnnnnnnnnnnnnnnnnnnnnnnnnnnnnnnnnnnnnnnnnnnnnnnnnnnnnnnnnnnnnnnnnnnnnnnnnnnnnnnnnnnnnnnnnnnnnnnnnnnnnnnnnnnnnnnnnnnnnnnnnnnnnnnnnnnnnnnnnnnnnnnnnnnnnnnnnnnnnnnnnnnnnnnnnnnnnnnnnnnnnnnnnnnnnnnnnnnnnnnnnnnnnnnnnnnnnnnnnnnnnnnnnnnnnnnnnnnnnnnnnnnnnnnnnnnnnnnnnnnnnnnnnnnnnnnnnnnnnnnnnnnnnnnnnnnnnnnnnnnnnnnnnnnnnnnnnnnnnnnnnnnnnnnnnnnnnnnnnnnnnnnnnnnnnnnnnnnnnnnnnnnnnnnnnnnnnnnnnnnnnnnnnnnnnnnnnnnnnnnnnnnnnnnnnnnnnnnnnnnnnnnnnnnnnnnnnnnnnnnnnnnnnnnnnnnnnnnnnnnnnnnnnnnnnnnnnnnnnnnnnnnnnnnnnnnnnnnnnnnnnnnnnnnnnnnnnnnnnnnnnnnnnnnnnnnnnnnnnnnnnnnnnnnnnnnnnnnnnnnnnnnnnnnnnnnnnnnnnnnnnnnnnnagtcgtggcagtgctgctgaatttgcagtttttcacatcatgaccaggattctcgaagctacaaagagtttgtttttacctctgcctcctggnnnnnnnnnnnnnnnnnnnnnnnnnnnnnnnnnnnnnnnnnnnnnnnnnnnnnnnnnnnnnnnnnnnnnnnnnnnnnnnnnnnnnnnnnnnnnnnnnnnnnnnnnnnnnnnnnnnngatctggacaatacagagaaaaatgaaaaactgaaattcagtatcattttgcggcttcctccgnnnnnnnnnnnnnnnnnnnnnnnnnnnnnnnnnnnnnnnnnnnnnnnnnnnnnnnnnnnnnnnnnnnnnnnnnnnnnnnnnnnnnnnnnnnnnnnnnnnnnnnnnnnnnnnnnnnnnnnnnnnnnnnnnnnnnnnnnnnnnnnnnnnnnnnnnnnnnnnnnnnnnnnnnnnnnnnnnnnnnnnnnnnnnnnnnnnnnnnnnnnnnnnnnnnnnnnnnnnnnnnnnnnnnnnnnnnnnnnnnnnnnnnnnnnnnnnnnnnnnnnnnnnnnnnnnnnnnnnnnnnnnnnnnnnnnnnnnnnnnnnnnnnnnnnnnnnnnnnnnnnnnnnnnnnnnnnnnnnnnnnnnnnnnnnnnnnnnnnnnnnnnnnnnnnnnnnnnnnnnnnnnnnnnnnnnnnnnnnnnnnnnnnattgttcagccatttgagtttcaggttggtacacgttcagacagaactataactgctgtatcacattccaattttgaatagtcattgagcaaccaagtgtagagaaatgataaatggtctaagaaggcatacagtggcataaactatgctcttcctagtagcttaataggccacaagctagttgcactctgaaataaaatatgctttaaaaatgtagggaacagtgcttagaaaagcaaaaacgaggtgtgtcattgaaataagaagaagaaaattaaatgttatgtaagaacactatttggaaagagattccttttaaaaactgagtttgtactaaatcagatttgccatgtccagcacagaataatttgtacttagtatttacagcagggtttgtctttgtgaattcagatgaaatgtatttaatttttttatatttataaaacgttgatttaggaatattttgtcattaaaaaacctgaaaaca

SEQ ID NO: 38018 - DNA, 654 bp, Macaca Mulatta
  misc_feature (1)...(654): n = A,T,C or G
gcctgggagaccaggaggtcctcccacttcagggtcaccttttgggcctggtaaccctgggttacccttatgaccatcgagacccggttctcctgggtaccctggttttccatctgacccaggggaacccctttcacccttagccccagggtatcctgcagggccagctggccctgtctcacctttagggcctgggagaccatggttgcccgggatgccttttggtccttggggtcccatattcccagggggtccagtcagacctggcttcccaggaagacctgctggcccttgttcccctttggcacctggacccccaggaaggccagcaggtcctctttgtcccttcagacctggcaagcctggtttcccaaagccaggaggccctgggggcccagctattcctggagccccagggagaccttttgttcctggaatccctggctgacccggggctccagcagctcctgtcttcccaatacattctggccctcgttccccaggagggccttggggacctggtgggccagttggngggactcctggtgcacccttttctccaggaaagcccctgggtcccggggaccctgtgggtccctgttgtccaggttttcctgacacagaaattccagctggtccagggattccaggtgg

SEQ ID NO: 38019 - DNA, 737 bp, Macaca Mulatta
ggtataagcttatgtcctagttatttgtgctgtttcctaaacctaatttttcttaatatcgaaatgtggcctaggttatatcttatttacagtcacagatacatagaactggaaagtaccttgcagatgggttaatccaatactctaatattggtggggattctgtggcacaagaggttaaatgaattggccaaatccacataaccaagttatagccaagactagatttcagtgtgtcttttttcctttcacagagctgaatttcaccctgctacccatgtgtagaataaaaaaagatacctgggttgttatcaaatacttgtctgttacaaatgccgtagcatttgaattaaacattctatatatgaagaatccccaacacttttggtgcctacgtacatgatggtacttttgttttctggcctgaaattcagcagttctttgtgatttaacttttaaaaaactgaataaagtatttttcattttggtgatgggtatttaacattttctttcttgacacagatcacatgttattaagtcttatctcctttaagaagttcttttttgggttttgtgtgtgtgtggtgtgtttgtggtgcgtggttttttttggtggttgctggtttgtttttggaaaaggagtccttgctttgttcacccaagcctggaatgtaaaggggcaacattcttcggctcaactggaaacctccacccttcccaaggtttcaagccgaaat

SEQ ID NO: 38020 - DNA, 4248 bp, Macaca Mulatta
  misc_feature (1)...(4248): n = A,T,C or G
gtatgcactctcactagagaagacaatcgagaatttggaggaaaacctgaggatgagcagcttcacgttctgcctttatacaaagtctctgatgtggatgagtttgggagtgtggaagctcaggaggagaaaaagcggagtggtgccattcaggtattgagttcctttcggcgaaaagtcaggatgttagcagagccggtcaagacttgccgacaaaggaaactagaagccaagaaagctgcagctgaaaagctttcctccctggagaacagctcaaataaaaatgaaaaggaaaagtcagccccatcacgtgcaaaacaaactgaaaatgcaagccaggctaaacagttggcagnnnnnnnnnnnnnnnnnnnnnnnnnnnnnnnnnnnnnnnnnnnnnnnnnnnnnnnnnnnnnnnnnnnnnnnnnnnnnnnnnnnnnnnnnnnnnnnnnnnnnnnnnnnnnnatcaccctcagacagagtctgtcaactgttattctgcttctggatccaccaatccatacatgagacggcccaatccagttagtccttatccaagctcttcacacacttcagatatctatggaagcaccagccctatgaacttctattccaccttgtctcaagctgcaggttcatatttgaattcttctaatcccatgaacccttaccctgggcttttgaatcagaataaccaatatccatcatatcaatgcaatggaaacctatcagtggacaactgctccccatatctgggttcctattctccccagtctcagcccatggatctttataggtatccaagcgaagaccctctgtctaagctaaatctaccacccatccatacactttaccagccaaggtttggaaatagccagagttttacatctaaatacttaggttatggaaaccaaaatatgcagggagatggtttcaacagttgtaccattagaccaaatgtacatcatgtagggaaattgcctccttatcccactcatgagatggatggccccttcattggagccacctctagattaccacccaatttgagcaatccaaacatggactataaaaatggtgaacatcattcaccttctcacataatccataactacagtgcagctccgggcgtgttcaacagctctcttcatgccctgcatctccaaaacaaggagaatgacatgctttcccatacagctaatgggttatcaaacatgcttccagctcttaaccatgatagaactgcttgtgtccaaggaggcttacacaaattaagtgatgctaatggtcaggaaaagcagccattggcaccagtccagggtgtggcttctggtgcagaggatgatgaggtctggtcagacagtgagcagagctttctggatcctgacattgggggagtggccgtggctccaactcatgggtcaattctcattgagtgtgcaaagcgtgagctgcatgctacaacccctttaaagaatcccaataggaatcaccccaccaggatctccctcgtcttttaccagcataagagcatgaatgagccaaaacatggcttggctctttgggaagccaaannnnnnnnnnnnnnnnnnnnnnnnnnnnnnnnnnnnnnnnnnnnnnnnnnnnnnnnnnnnnnnnnnnnnnnnnnnnnnnnnnnnnnnnnnnnnnnnnnnnnnnnnnnnnnnnnnnnnnnnnnnnnnnnnnnnnnnnnnnnnnnnnnnnnnnnnnnnnnnnnnnnnnnnnnnnnnnnnnnnnnnnnnnnnnnnnnnnnnnnnnnnnnnnnnnnnnnnnnnnnnnnnnnnnnnnnnnnnnnnnnnnnnnnnnnnnnnnnnnnnnnnnnnnnnnnnnnnnnnnnnnnnnnnnnnnnnnnnnnnnnnnnnnnnnnnnnnnnnnnnnnnnnnnnnnnnnnnnnnnnnnnnnnnnnnnnnnnnnnnnnnnnnnnnngtaggacaataaaagtatatatgtacatatatacacaaacatgtatatgtgtacgcacatgtatatgtataaatatttgaaatggtgtgttagaagcactttgtctacctaagctttgacaacttgaacaatgctaaggtactgagacgtttaaaaaacaagtctattttcattttagaatgcaaagttgatttttttaaggaaacaaggaaagcttttaaaatatttttgcttttagccatgcatctgctgatgagcaattgtgtccatttttaacacagccagttaaatccaccatggggcttactggattcaagggaatacgttagtccacaaaacatgttttctggtgctcatctcacatgctatactgtaaaacagttttatacaaaattgtatgacaagttcattactcaaaaatgtacagttttaagaattttctattaactgcaggtaataattagccgcatgctacagactcaacaaagctagttcactgaagcctatgctattttatggatcatatgctcttcagagaactgaatggcagtctgcctttgtgtcgatgattatgtacattgtgatgttgtcatttcttagcttaagtgtcctctttaacaagaggattgagcagactgatgcctgcataagataaataaacagggttagttccatgtgaatctgtcagttaaaaagaaacaaaaacaggcagctggtttgctgtggtggttttaaatcgttaatttgtataaagaagtgaaagagttgtatagtaaattaaattgtaaacaaaacttttttaacgcaatgctttagtattttagtactgnnnnnnnnnnnnnnnnnnnnnnnnnnnnnnnnnnnnnnnnnnnnnnnnnnnagtttgaagcaaaattcacatcatgatggtgctactcagcctgctacaaatatatcataatgtgagctannnnnnnnnnnnnnnnnnnnnnnnnnnnnnnnnnnnnnnnnnnnnnnnnnnnnnnnnnnnnnnnnnnnnnnnnnnnnnnnnnnnnnnnnnnnnnnnnnnnnnnnnnnnnnnnnnnnnnnnnnnnnnnnnnnnnnnnnnnnnnnnnnnnnnnnnnnnnnnnnnnnnnnnnnnnnnnnnnnnnnnnnnnnnnnnnnnnnnnnnnnnnnnnnnnnnnnnnnnnnnnnnnnnnnnnnnnnnnnnnnnnnnnnnnnnnnnnnnnnnnnnnnnnnnnnnnnnnnnnnnnnnnnnnnnnnnnnnnnnnnnnnnnnnnnnnnnnnnnnnnnnnnnnnnnnnnnnnnnnnnnnnnnnnnnnnnnnnnnnnnnnnnnnnnnnnnnnnnnnnnnnnnnnnnnnnnnnnnnnnnnnnnnnnnnnnnnnnnnnnnnnnnnnnnnnnnnnnnnnnnnnnnnnnnnnnnnnnnnnnnnnnnnnnnnnnnnnnnnnnnnnnnnnnnnnnnnnnnnnnnnnnnnnnnnnnnnnnnnnnnnnnnnnnnnnnnnnnnnnnnnnnnnnnnnnnnnnnnnnnnnnnnnnnnnnnnnngatcctgtaatcactgaaggtacatactccatgaggacttcccttaaacaggcnnnnnnnacaggcatgctgtgcaatagattgtacaattacattttggcctaaatacatttttgcttactagtatttaaaataaattattaatcagaggaggcatttgggttttattggtcaaatctttgtaagctggcttttgtctttttaaaaaatatattgaatttgtggttgtgtccaatttgcaaacatttccaaaaatgtttgctttgcttacaaaccacgattttaatgtttttcgtataccataatacctaaccccaaacatttggttactacatgtgcatttggtgattttgatcagccattcttaatatttgatttctgtatcacctactgtcatttgttaaactgctggccaacatgaacaggaagtatagtttggggggttggggagaggttacataaggaagagaagaaactgagtggcatattgtaaatatcagatctataattgtaaatataaaacctgcctcagttagaatgaatggaaagcagatctacaatttgctaatataggaatatcaggttgactatatagccatacttgaaaatgcttctgagtggtgtcaactttacttgaatgaatttttcatcttgattgacgcacagtgatgtacagttcacttctaaagctagtggttaacttgtgtaggaaactttcgcagtttgacactaagataatgaacttctgtgtgcatttttctatgctattgttaaaacta

SEQ ID NO: 38021 - DNA, 167 bp, Macaca Mulatta
gctataaatcatgttttctccaatttttcattaattagtttaagacctagccatatctgtatatatgtatagtgtattttgtttatatattcaaatttattagcatgttttccatgctatttcttgctattgttatgtgctgtactccatttttctttaaaatttta

SEQ ID NO: 38022 - DNA, 145 bp, Macaca Mulatta
  misc_feature (1)...(145): n = A,T,C or G
tatgtctgcatctatggctatgactacctttatgtctacgtctatnnnnntgtctagggctatgtctacgtctatgttgctgttgatgtctcctttgctgactatgtctatgtgcacatttacatctgtagttgtggctatggtt

SEQ ID NO: 38023 - DNA, 270 bp, Macaca Mulatta
aaacttggacttcatcttgagggtcttgggggagccatggatgggactaaaggaaaggactgcaggatcggattttaccgcgtgccataatgatgcctctggtcgctgtcctgcacaaggtggatcagagcaacccagggaggcagctggattcggggcagggacagggaactggggtggaaggaggaagcatgaggtggaacaaagataagaggtcaagtggacaggcagatggggactgcccgttgagcagggaggattctggtctca

SEQ ID NO: 38024 - DNA, 535 bp, Macaca Mulatta
  misc_feature (1)...(535): n = A,T,C or G
tcccactccatgaagtatttccacaccgccgtgtcacggcccggccgcggggagccccgcttcatctccgtgcgttacgtgtatgacacgcaattcgtgcggctcgacagcgacgccgcgagtccgaggatggatccgcgggcgccgtggatatagcatgagggaccggagtattgggaccgggagacacagaannnnnnnnnnnnnnnnnnnnnnnnnnnnnnnnnnnnnnnnnnnnnnnnnnnnnnnnnnnnnnnnnnngggtctcacaccctccagaagatgtgtggctgcgacctggggccggacgggcgcctcctccgcgggtattaccagtccgcctacgacggcagggattacatcgccctgaacgaggacctgcgctcctggaccgctgcgggtgaggcggctcagaacacccagcgcaagtgggaggcggccggtgaggcagagcagcggagagcctacctggagggccggtgcgtggagtggctccgcagatacctggagaaggggaaggagacgctgcagcgcg

SEQ ID NO: 38025 - DNA, 775 bp, Macaca Mulatta
  misc_feature (1)...(775): n = A,T,C or G
gggtccatcaaagagaaccaatcttacctcaaagtgcagaagtaaaacaactggcaagaaaatttctgtaaccctcatctaccacttatacacaggaagaggaggaatttttctaattagtaatctttacatttattctggctagccctgagcttcaatcttctgtgtcagtggcacagaacaaccccccacagcatatcagaaacatgtgatagctctaaaagtatactgatgcccaggtcataccacagaccaattaatgcagaatcacagaggtgggccaagacagtgatatttttatgattttctccaggtgcaaagtcagtattgtgaatcatggctgtatgaactaatgtgactataaatagtcacacttctgctctctctgtccaggtacagggaaggttaaggagaaattatcctcaattgggaggaggaagaaaagaatcactctgttatgaattgaatgtttgggtcccccaaagatctgtatgttgaaatgctaacctcctaggtgatagtgttaggaggtgggagactttgggagataatcangttgtgagggtggagccctcatgaatagaattagtgcctgtacaagaagaagtgggagagagcttctttatcctgtctctctggctgtccaccatgtgaggatacaatgagaagatggctatcttgaaaacagggaagtatgcccctcaccagacactaagatctgcctgcacccttgatcttgggatctttccagctttccaaaactggcaaanaaata

SEQ ID NO: 38026 - DNA, 1274 bp, Macaca Mulatta
  misc_feature (1)...(1274): n = A,T,C or G
cagtgcctgccaggtgattgctgaagctgtaagaaccaccctgggtccccgtggcatggacaagcttactgtagattgcagaggcaaagcaacaatttctaatgatggggccacaattctgaaacttcttgatgttgtccatcctgcagcaaagactttggtagacattgccaaatccnnnnnnnnnnnnnnnnnnnnnnnnnnnnnnnnnnnnnnnnnnnnnnnnnnnnnnnnnnnnnnnnnnnnnnnnnnnnnnnnnnnnnnnnnnnnnnnnnnnnnnnnnnnattcaagctttccgcacagccacccagctggcagttaacaagatcaaagagattgctgtgactgtgaagaangctgataaagtggagcagaggaagctgctggaaaagtgtgccatgactgctctgagctccaagctgatctcnnnnnnnnnnnnnnnnnnnnnnnnnnnnnnnnnnnnnnnnnnnnnnnnnnnnnnnnnnnnnnnnnnnnnnnnnnnnnnnnnnnnnnnnnnnnnnnnnnnnnnnnnnnnnnnnnnnnnnnnnnnnnnnnnnnnnnnnnnnnnnnnnnnnnnnnnnnnnnnnnnnnnnnnnnnnnnnnnnnnnattgcccttttgaatgttgagctggagttgaaagctgagaaagataatgctgagataaaagtccacacagttgaggattatcaggtgattgttgatgctgagtagaacattctttatgacaagttagagaggatccatcattctggagccaaagttgtcttgtccaacctccccactggggacgtggccacccagtactttgctgacagggacatgttctgtgctggccgagtacctgaggataatctgaagaggatggtgatggcctgtgaagtctcaatccagatcagtccgaatgctctctcagcagatgtgctgcatcgatgccaggtgtttgaagagacccagattaaaggtgagaggtacagcttctttactggctgcctcaaagccacaacatccaccttcatcctccgtggcggtagtgagcagtttatggaggagacagagtggtccctgcgtgatgtcatcatgatcatcaggagggccatcaggaatgagtcagtggtggctggtggcagggctattgagagggcgctctccaagtaccttcaggattcctcaaggactattccacgaaagcaacagctgttgattggggcatatgccaaggccatggagactgtctcattccagctgtacagcaatgctggccttggggccac

SEQ ID NO: 38027 - DNA, 806 bp, Macaca Mulatta
  misc_feature (1)...(806): n = A,T,C or G
gggtatggaaaggcagagaagagtcactttacggtggagaatctgacaaacactgcctccaccagaaggtcaagatcaaccccaatggtgacgagtgagggcgacagtacgtacccttggtaggatgtgatgagaggagcagtttgcctcgtgatcttcctcccaatgtaatcatcatagtaacatcaggcaaatcccaaccgagggacattttacaaaacacctgaccagtactcctcaaaactgtcatggtggccaaaaacgaagtcagagaaactgccccagccaggaggagcctcaggagacatgacaattaaatgtaatgtgggatcctggaatagaaaaaggacattgggtaaagtttatgaacacctgaataaagtctggactttagttaataatagcatatcaatattggttaattatgacaaatataccttattaatgtaagatgttaagaactcaagaaactgagcgtggactatatagaaattctctactgtttttgcaatttttctgtaactctataactactcaaatattattannnnnnnnnnnnnnnnnnnnnnnnctgttatttgagacaaggtctcactctgtcacccaggcccaaaatgcggctggcaccaatcatagcctcactggcagccttaaaagtccgggggcctccacgagtgccttcccggccttcagccctttttggacttaccctggggaatttacggaacgaaaccccccgcccccccctttggccctcagcgtttttaaatttttgctttctgaggctgaacgaatggcgggcaccg

SEQ ID NO: 38028 - DNA, 744 bp, Macaca Mulatta
ggaatttaaagactattttgtctgatatttgtaaagccatccctaatctcctttggttacaatttatgtggaatatttttttcaaaatttttacttgcaatctttttgtgtctttagatctagagtctcttatagatagcatataggtggattctgtgttttttaaatccattctgccaatttctgtcttttgattggagagtttaatccatttacatttaaagtagttattgataaggagggacttatgttattttactattttatgttctatatgcattatagtttttttaattccttatttcctgcattactgttttcttttgtgtttagttgattttttttttgtagtgaaaaattttaatataatatataacatgtcctgtaactgttttctctgtggttaccatggagattatatttaatatcctaaaattataatagtctagtttgaatttatgccagcttaacttcaataacatacaaaaactctacccttttaacagctctgccccagctccttctagttattgatgtcacaaaagtatatctttgtacattatatgtttaaaaacaggatctaaaaattgggttttaaaatgcattagtctcttaaattatatggaaaaacaaatgtggaattgcaaaccaaagttacagtaatattagcttttagtccaattgtttttgtaatgtaattagccctcttaaaatcttgtagaaaaaccgaaaaaaagaaaattt

SEQ ID NO: 38029 - DNA, 545 bp, Macaca Mulatta
caagactggcagaggctgggcagcctggggctgatgaagcagagatgttccctggaccccaggccctggcacccctcaggaaatacaagaaaaagaagattcacatctgtttaatgtgtataaagccaaggaaaggacagttccgaactcaatagaaatattctgtacaattcatatggtggggttgagggggaggggacgaggctgtagaacccacacccgaacatgtacaaaaataacttacacagcaacccccacctgcaaggatgatgcagctctgcccagccaccggggctggggggcacactgcagacatggcaccgcaggagccaaccagtatgggccccagatgctggtgggagtgaggagggcaccagtccggaggggagggcagctattaggaggccttgaggcggttgctggccgagcgtgagctcagcagcttgtccaccatagtgcgggcatagcggagccggctggccagctccttgcagcagccgtactcctccaggagactcaggcggtacgtgcggaagtcccgcttc

SEQ ID NO: 38030 - DNA, 303 bp, Macaca Mulatta
ttgttaaaaattttccatcttacttcatttccataacagttgatatctggctctcctttttataatgcagagtgagaactttccctactatgtttgataaatgttgtccaggttgcattgccaagaatgtgttgtccaaaatgcctgtttagtttttaaagatggaactccactctttgcttggttttaagtatgtatggaatgttatgacgtattagtagcagtggtcagacatggaaatggtggggagacagaaatatacaagtgaaataaaactcactattttaataaaggagaaaaaag

SEQ ID NO: 38031 - DNA, 187 bp, Macaca Mulatta
cccttccaccctgcgtaaaaggggacggcccagtgtgcacgccgtccggccatacccataaccacagccacagctgaggagtggctgggcaggcagcaggctccccagccagggcttgacacgctcacaggctaaggcctccacacacctggcctggctctggaagccacttcttagcttctgaacc

SEQ ID NO: 38032 - DNA, 168 bp, Macaca Mulatta
gccacagagaataaggggcctgcaggtggctggggcaccccagaacaaatgcatttgcctcaggcctttgccccattactctagttctgagaacctgctctacataaaggaggtgattctgaactgggagacaggctctttgtgctccaggatattcactgcagtgtt

SEQ ID NO: 38033 - DNA, 749 bp, Macaca Mulatta
  misc_feature (1)...(749): n = A,T,C or G
ggagtataattctaaacaattttcaccaacagattaaaaataacggacaaaagagaagaggaaaactggtgaaagcaggcatggtttaccataacaagcaataatgagcaacttgatatcaaaaaagaaaaacttaaaaaagactttaatctggtatcatttagaggtagggacacacaggctctgaggactaaccgtgaatggtaattgtggttttaaaaaaggaccttagatcatcaacgaaatcgaccctatattctgtatgatttggttaagaaggcagagaaattagtattgctctgtttgagaagccttcagaatgggttggcacttagaggcaaaagtttgatttatttgaaacattcaattttagcaaaaacattcagtaagtgttactgttttaagacaagatattttcagcaagaaaacagttctaaacatgctttttagccaaaccaattggccatgttgtctaaagaactgatgacccgtggtcctctgcagctagaactactatgcagtgtgcatttatactcatcacgacaaataagttagcagatatttttcgttggtagaaaagtaatttcaggcnnnnnnnnnnnnnnnnnnnnnncaatcccagcacgttggggagccaaagcaggtgggtcagttcagaccaagaagttgaaagaccaactttggcccaaagatggccaaaaacccgcatcctgcttacgaannnnataaanaaaaaaattatggtaaat

SEQ ID NO: 38034 - DNA, 222 bp, Macaca Mulatta
ggccaaatgagaaaagcgaattcaaatccagagctgattaaaattaactttagacattcaaaaagaaataatttgagaaaaagaccttaaaggtgaaggaattggaactctaaaaagaattttcccttcactgcattaaatgaagtgattcggggaattaagaggctctagcattttctttgccttttccacacccacaaccctgtcttgcatccttacgta

SEQ ID NO: 38035 - DNA, 400 bp, Macaca Mulatta
gtaaaacggacctgtctttggtcttacgcttttcaggagatagagcagcagtctacaaaggaccaggcaagtgggtaccaattaatcttccctgtttctcttcccacctggaagcctcctggaaagaatccagacacagtcgctgtgatcccagtggtttggaattcaaacccatttccagtttgctaaagctggttgccatttgtatcattcagagacgtgcctgaaaacagagtccaccccaggtggctcagatgaaaagaccttaaagggaccacttagctaggtgtgatcagggttatgagaacaaagagtgacaaggacaaaagcaagagccagaacagcgggacagggaaacatacaggaggtatttgcactgagatctctacagccagagatg

SEQ ID NO: 38036 - DNA, 620 bp, Macaca Mulatta
tggctttgtaaatttagattgccgtgatcttcatggttatgaagttatttaatagctttgtttttgtattcccttagttttattttgcactatgaactgcttcatcttttcagtatttttcaactcaaatttaggagaaagagaatatgattacgttagcctggcccttcctgctaggccacaccatggttgttggtcagctactaaggctaaactgcctgctagttcagtcagctgtggcatcttgcttgtgggcctttgcatctaaaagggtggggaggcaaaacagactctataatgtgaccatgctaagtccctgacaaatggaaattcctttggcagggagttagagataaatcttaaaatgaggatgttttgtatattgatatgaatacattttaagtagtatgtagattgtcagttaatagttatcaataattgatattggaccgagaagcaattatttgcaaagtctaggaaggtgtctagggcatgcattagcaaccctcaggtgcttgcacattatgggatgtttcttgctttcacttttatctggaatgctgttttcttctttgctcctttgaacttggataactcttaatcttttgagactcaaaatt

SEQ ID NO: 38037 - DNA, 371 bp, Macaca Mulatta
tgtatgcgcaagagcacagactctggggtcttatggacaagccccactctgcctcttgcttaatctctctgaaccttagtttcctcatctgtaaaaagggcagaaatgccatccgtgtgcagcagagtactgatgaaaggatggatgcaatgctcttacagcagtgcccgacccaaggcacaaggaaaaaccacgaaagcaattccagtttacaccacgccccaaattggattttccattcgactataattcctcccaataagggctcaaaacgttgtctcagggaagtcgattggtggttggttgcccacggctggaggagttgggggaaaatggggagcgactgctaatagagacagggtttccttttg

SEQ ID NO: 38038 - DNA, 713 bp, Macaca Mulatta
gccgcgcctgcgagctgggcttgtgagtggggctgccagcgggcaggcgtggggcgaggccaaaggactgaacccgcaggagcgtcacaggcgccggggcggctgccgacggcgggcctgggtcagtgagaaggccgtggacccccgccctgcctgctactcccatcctcgcctgctgcgcgctccatggggaacgacctccgattgggtccgatgcctaccctcggggtggagccggcaggttttctatcagatgttctacgtaataatgctggagttaagaagtttccattattttgctccaaaccagaagactctgttccctgtatatagaataggagtaatgtttgaaaacaactggctggtgtttaagactgaagattgtcgtgattgtttatcctaatcccaatgctgaagtaagattgtcttggaaatactaagttgggataatccatatctacttctggaaccatgaaaattttgctagtttttgactttgacaatacgatcatagatgacaatagtgacacttggattgtacaatgtgctcccaacaaaaaacttcctattgaactacgtgattcttatcaaaaaggatcttggacagaatttatgggcagagtctttaagtatttgggagatacaggtgtcagagaacctgaactgaaaagagcagtgacatcattgcctttcactccacggatggtggaact

SEQ ID NO: 38039 - DNA, 713 bp, Macaca Mulatta
  misc_feature (1)...(713): n = A,T,C or G
gggcccagggagaatttggagaaaccccaacaaaggcggaaggtttgcagttaagtggaagatcattcccattttcattccaacccttgggcaacaggagtgagattccatctcaaaacaaaccaaaccaaaacatcaccaccaacaaaaaatcactaccagttgccagttgtgataagagttaaaacaacggggcactgtagtctcaaattataaatttctattgcctcatctttaggaaagnnnnnnnnnnnnnnnnnnnnnnnnnnnnccaatggggtcataagtgtattttacaaaagttccagtcaccttaagtgattgaaggttttgacattctatccagccaggtggtagtaataagcctcagatccacagggtacacaacattttcaaggtatttttttttttatcatccttaattcatgaataacccccatagtgtaggttagttagcactatcaaagtgactagtaaggacgcaggaaaataaagagaggattcaattgggatggtactgcaaagaatccattctgttcggcacatgaatttctgttctgatcttaagtttagatatatcaaagaaacaaaaagcataaaggcagctgggggtggtggcannnnnnnnnnnnnnnnnnnnnnnnnnnnnnnnnnnnnnnnnnnnnnnnnnnnnnngnnnnnnnnnnnnnnnnnnnaccaacatggagaaaccc

SEQ ID NO: 38040 - DNA, 675 bp, Macaca Mulatta
accaccacagcatcccagtttggtttagccccctctgccctcctctccactgtactttatcattaaaaatcaacttccagccctaaaagtacatatatttatttattaagacagctgatcaattactttaccaaacaacatagatttaatgaaggaattcatatgagaggacaggactaaaaaaacaagtcaccttaaaaacaggaaaacatttttcttttcacagtaaaggaattataccaattactttttaaaaatgaaattctcctttgtaaatgtatatacttagtttatgtactaagaatattctttgtaactctgatttcaattacagtgccagtaaagaacatttttctctaagttaacttgcattaatattgacagaagatcaattaactaaattttacaaattatttcacaaagattacaaaagactcactcattacaaaacattcactacctgaaatgtcagaacagtgttcaacaggtcaaagacatcaactgaatgtttccatagttctgatccttaaaattcctttcttgatgtagtaggaactaaatttgcacagaagcagaactttggaatacatgagaaaatgttcagtgactgtaagcagaaacacgtactggaataaaaacggcttcagttcaagttaccattgatcatgattacct

SEQ ID NO: 38041 - DNA, 776 bp, Macaca Mulatta
ggggtacccaattttaaatgcaagtcaggataagcatcattgagaaggtgacatttgaagaaagacttgaagcagaaagctaataaactacttcaattttgggggaaggagcattccagccagagggtacatccgttgcaaaggctgtaaaacaggtgcatgtctggactgttcaaggtttagcaagaaggtttaagtagaaggaaatgtggaagtatggggaatgaggttagaatagtaatggagaacagatcttgaggccttggattatgaattttctctgaatgaaatagggagccattgggtaggagggctataacagaggaatgacgtgccctgactttcagtttaaattggatagctatggcaactacgttgagaataaacttaatgtggggagtaaggatggaaagatgagacgattgtagaaacttacatgacagaagatgacagtttgagcaaggatggtgagataccactgttggtcagaagtgtttagctcctgtatatattgggaagcctgaggccatgagattttctgtggatgtggagtatgatagaacggaatccaaaaatggcttttaaggtttttagccctgagccattgaaaggaaattaaaattgggtttttaaagtgggggtcggaaaaagaaccacccccttaaggggccccccttcttgattgtagggtaagtattccaagccccctttcccgtggtttgggatgtttcttcccaaaaacacccaaaacaaaaattttcaaatccagaaaaaaa

SEQ ID NO: 38042 - DNA, 295 bp, Macaca Mulatta
cattttcttcttagtttttcatttcttaaagaaaagatgctccatatttacaatgataatatcaaataaagggattattttttacaacccccttaacactttttggagatgatgtttctgatgttcagaaattaacataaaatcaagaagcaagattccataagctgagaactctggacagctgaccaggtttacctatggtgttttgcctttaactagagtgtgtgatggtagattatttcagatatgtatgtaagaccgcttcctgaacaataagatgtatgaaaggagcaga

SEQ ID NO: 38043 - DNA, 834 bp, Macaca Mulatta
  misc_feature (1)...(834): n = A,T,C or G
ggggtttaccttgtgggtattaaaaatgctagaagcttagaaagctgtttccaaagggagattccttgttaccaaccatgatagcattgctatggtgtatgtggtctcccagagtggctgctttgggatgggaggtcacttagctattagaagttaggtctctttgtattataccttataaacaaggctcatttggacttagggcttcccttaggggtgacacttaaccttgccaaggagatcatttgtaccagtgggatccatccagcagatcagttcttaagttcagcttcatcatgtgtactgctacacagtgcaggctgacttcgcattccacatttcagatgccctctcccaagttttatggtccctggcagccaatgaaaaagggacctccaaagtttctccgggaaagatggatctttcccctgaagctatttggttggaaggaaccccagaaaccttcctggggtttttagggggccaatttgaaaaaccccttggctgggaaagggggttttgggaaaaccttaaaagttaccccccttcccctggggaaatttttgggggggaaccccttggcccccaccaaaaatcaattggagaaccnnnnnnnnnnnnnnnnnnnnnnngccacaaaaagggnnnnnnnnnnnnnnnnnnnnnnnataaaaaaagggttgtttaaaaaacccccccccacaataaaggggggnnnnnnnnnnnnnnnnnnntgggccccaaattttgtgttttttgtaaaattgggggagagggggttccgctcaaaaataatctctgtcgggcgggagaataaacttctgccgtggacag

SEQ ID NO: 38044 - DNA, 752 bp, Macaca Mulatta
  misc_feature (1)...(752): n = A,T,C or G
ggggtttctctgctgtgtaggaccagagtgacagccaatcctggacccaggccccatgcagcttaggttgtggcagtcagccacccatatgggcttggtggaatgaagatagagccccagtggtgtagaggtagtgtcactgactttcagagcagggtgcactcctgatgttactctggtcttaagatggctctgtgctgtagaagcttggcatacaaggctaagtgggggtggggagtgcacgcattgtactcctcatctaggacaatgcagctgtgagggttcctggaagctcccaaactgggctcactacttacgaggactatgagattctcctgtggaaaggatggtaagtgtttgttatggcagtaggggctggtagcattcttctgcttactttttccctgtaacaggaagtttctgctgatttggggcagatctcatccaatcagagaagatggagctacagaggctaggtgtgtccaaactgcccacctggacttctaatcaccacaggtgcatctccacttccctgctgtactccagtgctctccattcaacactccagtcaaatctcatctgtatattcattgccttgtgtctttattgtatggggtgactggcatcaggcatctgtaatcaattgtcgtgctgatgtcacttttgcattgttaattttntgtgtgtggtgtgttgggatattttcctgaatctgcagaatggattgaaatcctgggggggtaccgaaaacc

SEQ ID NO: 38045 - DNA, 239 bp, Macaca Mulatta
aggctgctgagacttccctctagaatcctccaacatggagcctcttgcagcttacccgctaaaatgttccgggcccagagcaaaggtatttgcagttttgctgtctatggttctatgcacagtaacgctatttcttctacaactaaaattcctcaaacctaaaatcaacagcttttatgcctttgaagtgaaggatgcaaaaggaagaactgtttctctggaaaagtataaaggcaaag

SEQ ID NO: 38046 - DNA, 203 bp, Macaca Mulatta
tctcattcaccatgctgcccaggggccaaggaagaagtacctcggaggcacaaactgaaaaccaggaaattgggtgggactcagagcccttggtcgacccagaacgcagtgaccgtaggatgaaccacttcagggtctacaatgacatcactctgtacaaagctaaaatgtggagcttgggagaagatgatcgccacaagtag

SEQ ID NO: 38047 - DNA, 298 bp, Macaca Mulatta
gggggttggcatggcctcgggactgctggtgaggggttggggtgatgctggggacaagacccagtggggtagggagatctggagtcaggtcagtggggaaatcagaatttgggaaccaggagccctgagaattccaggcagaaactaaggttgagcgagggagggccagggccaggtagggggattgacaggaggagcttgagaacctgtagagtaaggggctccttcagcctcacactcccctcctccttaggccttgggtcccccacttcagactcaccttacccaaaggccttcc

SEQ ID NO: 38048 - DNA, 207 bp, Macaca Mulatta
cacacagagttggatcctgactaggctctaaatagcagggctaagaaaaaagttttagggagagaggataaatggacgtggaggattgggcttctgcaggcatttcttttggtgcttataagcatgtcaaagccaaataactatgatttggaagttaaatgtctttttgtatgttatctgtgttagagagagctcttgtcttctgtg

SEQ ID NO: 38049 - DNA, 839 bp, Macaca Mulatta
  misc_feature (1)...(839): n = A,T,C or G
caaaaccatcctgggcggcctgggactggggctgggcagcggcgactactgagtgaaatttgccaccaaggccaacccttgggagggaaaatcactaaagcctgacaatgtccggtcccagctggagacgtcattgaagaggctgcagtgtccccaagtggacctcttctacctacatgcacctgaccacagcaccccagtggaagagacactgtgtgcctgccaccagttgcaccaggaagacaagttcatggaacttggcctctccaactatgccggctgagaagtggcggggatctgtatgctctgcaagagcaaaggctnnnnnnnnnnnnnnnnnnnnnnnnnnnnnnnnnnnnnnnnnnnnnnnnnnnnnnnnnnnnnnnnnnnnnnnnnnnnnnnnnnnnnnnnnnnnnnnnnnnnnnnnnnnnnnnnnnnnnnnnnnnnnnnnnnnnnnnnnnnnnnnnnnnnnnnnnnnnnnnnnnnnnnnnnnnnnnnnnnnnnnnnnnnnnnnnnnnnnnnnnnnnnnnnnnnnnnnnnnnnnnnnnnnnnnnnnnnnnnnnnnnnnnnnnnnnnnnnnnnnnnnnnnnnnnnnnnnnnnnnnnnnnnnnnnnnnnnnnnnnnnnnnnnnnnnnnnnnnnnnnnnnnnnnnnnnnnnnnnnnnnnnnnnngctgcagggtgcccatggagacgcggtcatcctgggcatgtccagcctggagaagctggagcagaacttggcagcgatggagaaagggcccatggaaccgactgccatggacacttttaatcaaacctggcatttggttgcccacgaatgtcccaactacttctgcta

SEQ ID NO: 38050 - DNA, 819 bp, Macaca Mulatta
ggggacgtacacaagggactggagcgttctgtggaggaagtgcgaggtcaggccatgaacttgggagatggtttaaagcttgaaactgaattactggatggaaaaaccaagctaatattgtctccatatgaacgtaaatcaaaaatttctgtgaagatgggaaataagaccaagattgcaaaatgtcctttaagaacaaaaactgggcacattctaaaatcaacacaagatacttgtataggaagtgaaaagcttttgcaaaagaagacagttggttcagaaacatcacaggcaaaaggtgaaaaaaatggaatgactttttcatccatgaaggatttatgtaaacaatgtgtagataaagactgtcttcatatccagaaagagattccacctgcaacccctaatatacagaagactagaaacaccgtaaatacatctctagtagctaaacagaagcctcactaaaaacacatcacagctgaaaacatgaagagcagtttggtgtgtctaacacaagaccaactacaacagattttgatgactgtaaaccaaggaaatagatctctttcccttactgagaatggaaaggaggcaaaaagtcaatatagtctacattttaaacagtatctctaatcagcccaaagatgagaatattatggggattattcaaaaaactgaaatggtttcatctgtcccagctgaaagtaaatctgtcttaaatgaacatcaggatacatctaagcagtgtgagccaaaaattggcatagagaattgatggaaaccagctgaaatattccgtactcctgggggaaaaggaaa

SEQ ID NO: 38051 - DNA, 157 bp, Macaca Mulatta
accacagtcggctgaaaccgacaactcaagacaagtggaccagccagcaggacccagatcatccaacccagctgatcctgagatgagaccgaactgctgctaaagatgatcgccctgctctggtcactctcgagtctgaccagcctacacacggctg

SEQ ID NO: 38052 - DNA, 688 bp, Macaca Mulatta
ggagctgccggacagcccgagcctcctggtcagccccgcggtcctccatggcgctgctgcacgcgcttgtctgctgcctgctgactgcttggcactgcctctccggcctcgggctgcccgtggcgcctgcaggcagcaggaatcctcctccggctgtaggacagttttggcatgtgactgacttacacttagaccctacttaccacatcacagatgaccacacaaaagtgtgtgcttcatctaaaggtgcaaatgcctccaaccctggcccttttggagatgtgctatgtgattctccatatcaacttattttgtcagcatttgattttattaaaaattctggacaagaagcgtctttcatgatatggacaggggatagcccacctcatgttcctgtacctgaactctcaacagacactgttataaatgtgatcgctaatatgacaatcaccatccagagtctttttccaaatctccaggttttccctgcactgggtaatcatgactattggccacaggatcaactgcctgtagtcaccagtaaagtgtacaacgcagtagcaaacctctggaaaccatggctagatgaagaagctattagtactttaaggaaaggcggtttttattcacagaaagttacaactaatccaaaccttaggatcatcagtctaaacacaaacttgtacta

SEQ ID NO: 38053 - DNA, 563 bp, Macaca Mulatta
atcacaggatggtatcctatcattttaccagaagatgggggcctacctcatggcttggagctcatgcagaagatcgtgggtggtctggagctttcagtttccttcacgcatcgtggagatagagagcgggtcttggaagctgctgagctattgggctggagctttgagaacagcctgaaagattttgtcagaatggatgaaggggagccagccactgtcaccatctccaccccaaggctgtggctgcccatccattgcgtgctgcttgctggccacaaccatattcataagaatacatattgctaccttcgctacaagttctatgatcatgaagccttttggacccctctcaagaaacccaaggaatctgtaaacaaaaagcagattatcgtcactttcaaggcatccaaaagagcagaagtcaccaggggaccatcactgctttggtacttcagggaggagaggctagagatccaagtgtggcaagcttatggcaatgatagtgtggagagaccccatcagacagacagctggatggctcagcctagtggaccggccagact

SEQ ID NO: 38054 - DNA, 70 bp, Macaca Mulatta
cttgatctgctggctcagggccaaatgtttaatttgcttctcccaaagtcattcatcttcaaaagtgtga

SEQ ID NO: 38055 - DNA, 618 bp, Macaca Mulatta
tgacaaagcttacataacgaattaatgacactttacatttttacattccattctgctgttcttattaacgttgcacagtaacttcattatttctttgactctttcaccacaatgttttggttatttataatttatcagccatataaccaaatagatcccatgtatttgtttccgtgatttggccatattaataaattcataaatttcaatcaaatatcttatatatatacacatatggtttaagctacagccctgtgtatgccttttaactttatttgacgttgcccatttacttctttgctgtccacttggataaccgtaataaaaatcctatgggcctaaatggcatttcttttgggatattttttcctgcattttattccctttttatgtaagtaggaattaattatttatttaatgtcttaatctatttgataaagaagactacattatgataatctcaaagatcatattaccaaaggttgcacacttaagcatgtcttcattttgacacagaaacaaactttagtacaatctttcctagttcccatgtcttaattttcatcattatatgcacagcacacctttacctatggtgataccagaacacatcattgc

SEQ ID NO: 38056 - DNA, 1055 bp, Macaca Mulatta
  misc_feature (1)...(1055): n = A,T,C or G
agtttttgcagaaggagcaggatctgaaagctgaaattgagaagctttgtgagaagggcagaagnnnnnnnnnnnnnnnnnnnnnnnnnnnnnnnnnnnnnnnnnnnnnnnnnnnnnnnnnnnnnnnnnnnnnnnnnnnnnnnnnnnnnnnnnnnnnnnnnnnnnnnnnnnnnnnnnnnnnnnnnnnnnnnnnnnnnnnnnnnnnnnnnnnnnnnnnnnnnnnnnnnnnnnnnnnnnnnnnnnnnnnnnnnnnnnnnnnnnnnnnnnnnnnnnnnnnnnnnnnnnnnnnnnnnnnnnnnnnnnnnnnnnnnnnnnnnnnnnnnnnnnnnnnnnnnnnnnnnnnnnnnnnnnnnnnnnnnnnnnnnnnnnnnnnnnnnnnnnnnnnnnnnnnnnnnnnnnnnnnnnnnnnnnnnnnnnnnnnnnnnnnnnnnnnnnnnnnnnnnnnnnnnnnnnnnnnnnnnnnnnnnnnnnnnnnnnnnnnnnnnnnnnnnnnnnnnnnnnnnnnnnnnnnnnnnnnnnnnnnnnnnnnnnnnnnnnnnnnnnnnnnnnnnnnnnnnnnnnnnnnnnnnnnnnnnnnnnnnnnnnnnnnnnnnnnnnnnnnnnnnnnnnnnnnnnnnnnnnnnnnnnnnnnnnnnnnnnnnnnnnnnnnnnnnnnnnnnnnnnnnnnnnnnnnnnnnnnnnnnnnnnnnnnnnnnnnnnnnnnnnnnnnnnnnnnnnnnnnnnnnnnnnnnnnnnnnnnnnnnnnnnnnnnnnnnnnnnnnnnnnnnnnnnnnnnnnnnnnnnnnnnnnnnnnnnnnnnnnnnnnnnnnnnnnnnnnnnnnnnnnnnnnnnnnnnnnnnnnnnnnnnnnnnnnnnnnnnnnnnnnnnnnnnnnnnnnnnnnnnnnnnnnnnnnnnnnnnnnnnnnnnnnnnnnnnnnnnnnnnnnnnnnnnnnnnnnnnnnnnnnnncagccacttggtcgcatccgggccttgttccctgctccactggctcaaatcagtactccaatgttcttgccttctgcccaagtttcatatcctggaaggtcttcacat

SEQ ID NO: 38057 - DNA, 624 bp, Macaca Mulatta
  misc_feature (1)...(624): n = A,T,C or G
ggaattagcaaggataaagcaggaaacaagagaaaaagaaaatttggttaaagaaaagatcaagtttttggaaaatgagattgggaataacacagaatatgagaaaagaatttctgtggctgatcgtaaacttttaaaaagtagaacggcatatcaagaccatgaaactagtagaattcagctgaagggtgannnnnnnnnnnnnnnnnnnnnnnnnnnnnnnnnnnnnnnnnnnnnnnnnnnnnnnnnnnnnnnnnnnnnnnnnnnnnnnnnnnnnnnnnnnnnnnnnnnnnnnnnnnnnnnnnnnnnnnnnnnnnnnnnnnnnnnnnnnnnnnnnnnnnnnnnnnnnnnnnnnnnnnnnnnnnnnnnnnnnnnnnnnnnnnnnnnnnnnnnnnnnnnnnnnnnnnnnnnnnnnnnnnnnnnnnnnnnnnnnnnnnnnnnnnnnnnnnnnnnnnnnnnnnnnnnnnnnnnnnnnnnnnnnnnngttacagactgagacaatgaaagaaaaagcggttttatcagaaattgaaggaactcgttcctctctgaaacatctcaaccatcagttacaaaaactggattttgaaaccttgaagcagcaagaaattatgtacagtcagg

SEQ ID NO: 38058 - DNA, 379 bp, Macaca Mulatta
ttccaaaaggagaagagtttttgcattcttgagttcagagaatagactctgaaggctggtattcagaactgctgtgcactcaaaagtctcaagacacaagcaaagctccagcaaagctcaaatccaaaagcgcttggcgggacatttcttaaccatagggttgtgaagggaggagatgagaggctgggaaagccaggtctctggggatgtgcttcctataggttttagctggctcaagctcctcccaaatcgctctgctagtggtaggtgaaagggggtgaggtgggttgcaggagaggaatgacagtttcctgaaaggtttagcccaagttccaagtgagaagcaggtattgtccctgacattctgtctgtatccaaa

SEQ ID NO: 38059 - DNA, 185 bp, Macaca Mulatta
  misc_feature (1)...(185): n = A,T,C or G
aaacttctagttttcaactggatagagaagaggcagttgtctagttgtacgatatcacaaagggaataaaacagcacccttttctttatttctaggagatttaaattgatataatgttattatttaataangggtcatgttcaaacttcaccagttaccctcatacttttccttacagcaaagtt

SEQ ID NO: 38060 - DNA, 412 bp, Macaca Mulatta
caagcatggtggtgagtagagtcctcaggcaggtgggcaggcaggggcaggagaggctcacactgcgctcagatccccgcctccctctccccaaagatctttgtgaggtgagcctcaccgacagcgtggagcacccaggcttgggcatcaacccctgtgtgccattcttttgccgggcttggttgccgagaagaaggagataaacatcaccatcatcaaagagctggtcaagaaattttacaaaaggaaacaagttatggggttaatctcctacccaattcatttacttcatttgaatgttagagacactcatgattatttgtgtttctaatttacaatttaagtttatttgtaaaaagttaaaggagagtgggtctctgaggctttcactgatgttcactctggcatcctg

SEQ ID NO: 38061 - DNA, 204 bp, Macaca Mulatta
  misc_feature (1)...(204): n = A,T,C or G
gcttatcgataccgcacaaatatttacaaccgcagaacaaaagttactattttacaaaacctaccatcgattttagctaaccttaatagtgaaatttcaaagcaagtaagtactaattcagaaaaattaggcgtaaaaatcgttacgaatgcaacaactangagatttgaaacgaatgaagttggttacacagttggtaagaca

SEQ ID NO: 38062 - DNA, 1076 bp, Macaca Mulatta
  misc_feature (1)...(1076): n = A,T,C or G
gggccctggtgtgattccgtcctgcgctgctgttctctggagcagcgttggtttatctccgtccgccttctctcccacctaagtgcgtgccgccacctgatggaagattcgatggacatggacatgagccccctgaggccccagaactatcttttcggttgtgaactaaaggccgacaaagaatatcacttttaaggttgataaatgatgaaaatgagccccatttatcttttaagaacggtcaatttaagggcttggtgccaaaggaaaaatttcccctttttttgaaaaccaaagccattgatttttcaaaggcggccccaatttaaaataaaccctgggcnnnnnnnnnnnnnnnnnnnnnnntcccacccacagggttttcccttnnnnnnnnnnnnnnnnnnnnnnnnnnnnnnaccccccgggggtttttaaaagtgtaaaaaagtgggggttttcagggggccccgcttccttttttttttaggggaaaaccannnnnnnnnnnnnnnnnnnntgggnnnnnnnnnnnnnnnnnnnccctccctccaaaatatacaaaannnnnnnnnnnnnnnnnnnnnnnnattccctctnnnnnnnnnnnnnnnnnnnnnnnnngaaggaggctccccctccccccctcgggcggtgggtggtanaaacatttttcnnnnnnnnnnnnnnnnnnnnnnnnnnnnnntcctcctcttatataaaagatagaatgtagatttttacaattaataaatagattagagtattcgattaaacaattactccgccactctttttttttctttcgttgagaaacagaccgaccaacaccaaaataattcagtctctccgttttataatatttttaaatcaagcgaccacacccgcgtcatatggttccacaacatctccgctataatagacataagaaaataatagagaacacatacacacgcctctacaaatgctatcattgtgtgtaagaactaacaagaagacacgagacaaaacactcctacattanataagcgcgggcgcncgggtgttttnnncccggggtagctanannannaaag

SEQ ID NO: 38063 - DNA, 586 bp, Macaca Mulatta
ggagctgaagctccagaggcaggatgggtctggggagatccagttagactctcctgctcagaccctctgctccaaactaagactgatgttggccttccagtgtgattctgaaagacatttaatgtttttttgtcggggagggaaggaatgcaaaggtgcagaatccatgaataccacaaatgtactatttgtttctatttctatagatttgcctattctggtggtaaagtaaatgaaatcataaatatgtgctcttcaatgtcataattcatttgtcataatgttttcaaggtttgtccatgtagtagcatgcatgagtacttcattcctttttatggcctaataatattccattgtatggatataccacattttgttcatctgtttatcagttggtagatgtttgggtttttcctactttttggttatgaatatttgtgtacatgattttgtgtgaacatgttttcaattctctcaggtatatactcagtgatggaattgttgggtcatgtggtcactctatatttaacattttgagaaaccgccaaactgttttctaaagtgagagcattgtgtggggatttat

SEQ ID NO: 38064 - DNA, 112 bp, Macaca Mulatta
agggtatcagcatggaagccatgaatgagaataaagtggtgccctctgagtttagcacaggacctgtggaaaaagctgccaaacctttgccatttaaggatcccaactttgt

SEQ ID NO: 38065 - DNA, 792 bp, Macaca Mulatta
gggactggggttttatgtcagtgggttagctgtgtgtgacatgttgggcaattactcagcttttttaacagcttccagatatgcaatatggtccctgtactactcaaaggttgattttggtttaattcatctttgaggtacctcccagctctaaaactatgattctaggccatgtaatggggttgctcctacttcattctctttccctttttaagggttcggtttagcatccatttcttgggtcacctacaatctttgttctcctaaggattaaaatagaaaattcatacgtaacaagcaaatgaggacattttcctaaatgcttcttattggttaaccactgaatatatgaacacatatgaatattgtcattcgtgtacttatattcatttagcaaaccatttgaacacttatatgtgcagtgtgtggtgatcatgacatgaggaactagtaataagtaaaatcttccccccaaaattcattgtggcttaaatagatatgaacataatcattactacttaataaactgactgagagggaatcttaatattaacttggaactggggaggagtatttttatgcattgggtaaaggggtaggctagatgacatctaaggggtctgagtgaatcatatcataattttttatacacatttcacatactaaacatcagttggcccctataccctgattaaagttacaaaattttagggagactttaccattaagggactttacaggggttggagaacagcccccaaagtttccacgggcaatttattttttaaccct

SEQ ID NO: 38066 - DNA, 486 bp, Macaca Mulatta
tttaccaaggacccgtcaacatgggccgctttcgcaccaaaaccgtgaagaaggcggcccgggtcatcatagagaagaagtactacacgcacctgggcaacgacttccacacgaacaagcacgtgtgcgaagagatcgccattatccccagcaagaagctccgcaacaagatagcaggctatgtcacccatctgatgaagcggattcagagaggccctgtaagaggtatctccatcaagctgcaggaggaggagagagaaaggagagacaattatgttcccgaggtctcagccctggatcaggagataattgaagtagatcctgacactaaggaaatgctgaagcttttggacttcagcagtctgtccaacctgcaggtcactcagcctacagttgggatgaatttcaaaatgcctcggggacctgtttgaattttttctgcagtgctatattattttcaataaatttgggaaaacagcaacaaaa

SEQ ID NO: 38067 - DNA, 1959 bp, Macaca Mulatta
gggggaaactaacctctctttctctgtcaagaagtgcttgcggagatcggatctcttctccagcaatcggggaaaagaagactttttctctgaaatcgcttagtgtaaccagcggcgtaaattttttggacgccttttcgaaaacctagttaaaattcatttgtttaaatctcattttatttttaagctcaaactgcttaagaatatcttcattccttaggaagagtgaaataatttactgcaaaggaatttcctcgatttggtgcattattttttttattcttccacggtcttttctaactctcaaaccaacttcgtcccatcatggtgatgttcaagaagatcaagtcttttgaggtggtctttaacgaccctgaaaaggtgtacggcagtggtgagaaggtggctggccgggtgatagtggaggtgtgtgaagttactcgtgtcaaagccgttaggatccttgcttgcggagtggctaaagtgctctggatgcagggatcccagcagtgcaaacagacttcggagtacctgcgctatgaagacacgcttcttccggaagaccagccaacaggtggagaatgagatggtgatcatgagacctggaaacaaatatgagtacaagttcggctttgagcttccccagggggcctcttgggaacatccttcaaaggaaaatatgggtgtgtagaactactgggtggaaggctttttcttggaccgccccagccagccaactcaggagacaaagaaaaactttgaagtagtggatctggtggatgtcaatacccctgatttaatggcacctgtgtctgctaaaaaggaaaagaaagtttcctgcatgttcattcctgatgggcgggtgtctgtctctgctcgaattgacagaaaaggattctgtgaaggtgatgagatttccatccatgctgactttgagaatacgtgttcccgaattgtggtccccaaagctgccattgtggcccgccacacttaccttgccaatggccagaccaaggtgctgactcagaagttgtcatcagtcagaggcaatcatattatctcagggacatgtgcatcatggcgtggaaagagccttcgggttcagaagatcaggccttctatcctgggctgcaacattcttcgagttgaatattctttactgatctatgttagcgttcctgggtccaagaaggtcatccttgacctgcccctggtaattggcagcagatcaggtctaagcagcagaacatccagcatggccagccgaaccagctctgagatgagttgggtagatctgaatatccctgataccccagaagctcctccctgctatatggatatcattcccgaagatcaccgattggagagccccaccactcctctgctagatgacatggatggcgctcaagacagccctatctttatgtatgcccctgagttcaagttcatgccaccacctacttatactgaggtggatccgtgcatcctcaacaacaacgtgcagtgaacatgtggaagaaaagaagcagctttacctacttctttctttttgtctctcttcctggactctcactttttcagagactcagtagtctctgcaatggagtgtggatccaccttagcctctgacttcccaatgcaggaggtggtcagcaggcaatctcctgggccttaaaggatgcggactcatcctcagccagcgccgatgttgtgatacaggggtgtttgttggatgggtttaaaaacagctagaaaaactcaggcccatccattttctcagatctccttgaaaattgaggccttttcggtagtttcggggtcaggtaaaaatggcctcctggcatgagcttttcaaggtttcttggaggttgtgcatggtaccttgactcattgtctctggaaagcatacactgataagattgatgaggacctgtaaacgtgattaatgttctttttatg

SEQ ID NO: 38068 - DNA, 635 bp, Macaca Mulatta
ggggggccctgccctaggatcccgaatagagaacgcgagcaccgccacgcccgcctgtgagctcccgggcgcccccggcctctccagctcggcggagcgaggataaccggagagctggacccagtgatattcttggtaataaggcctctgtaaccatggctagttctgacgtaaaaccaaaatcaataagtcgtgccaaaaaatggtcagaagagatagaaaatctgtacagatttcaacaagcgggatatcgggatgaaaccgaatataaacaagtgaaacaagtttctgtggtagatcgttggccagagacaggatatgtgaagaagcttcatagaagggacaatacgttctattactacaacaaacagagggaatgtgatgacaaggaagtccacacagtgaaaatctatgctcactcacccgtcttctttgtattactcgacaattatactttaagaatacatcatttcctactacatcctcgaaatgtttgttactttactaattattcacaatggccactcaattctcttattttgtgagatactttcccctgatactcactttcctttacacctctctcctccaaaacccgcctcttgttctcatctaactacatatcccctcctcca

SEQ ID NO: 38069 - DNA, 672 bp, Macaca Mulatta
  misc_feature (1)...(672): n = A,T,C or G
acggttaaatgcggtctttgcggctttagctcagctgtccaactgcagccttcctaaggtaccccttgagatcaagacacagggagaaggaacaacacgcacactccctgctggatttggagagaactgagaggaggctgcggtttaactagaccttccnnnnnnnnnnnnnnnnnnnnnnnnnnnaaccagcatggnnnnnnnnnnnnnnnnnnnnnnnnnnnnngtnnnnnnnnnnnnnnnnnnnnnnnnnnnnnnnnnnnnnnnnnnnnnnnggccagagctcctccgtattcctactaagaatgttaaaaggctgaactgcattggcacnnnnnnnnnnnnnnnnnnnnnnnnnnnnttgggttcaagcgatgctcctgcttcagcatcnnnnnnnnnnnnnnnnnnnnnctcccgcactccagagatgactaagcagctgattcattgtgacacactcagaaaaacaactcagccttgagaaaggagacacacaagagcagagagcatgcataataagaagagaagagaaaaaggaaagagagagagagatggggacacattaagaaggagagaagaatgacaggttctatgggggtgttgaaccttctgggctttgtcccaattgttagggcggttgacaattcgtgtcgaatattccatgttctc

SEQ ID NO: 38070 - DNA, 387 bp, Macaca Mulatta
  misc_feature (1)...(387): n = A,T,C or G
gggagctactgaaataccaaaaatagatattattttcctaaggaaacccttgtctggggagatgagcacttagctaatttactatcactgcttgtgctatttgagtcatagacagtgtttgaatcttccagtatttcgctactgtgtgcaatctgtattcagacaggcctataaatcaccccactgtaattcagtctaatcctctgtggccttacttgtacaacagacagatgtgaggcttttggttccaatggaagatgggcgctctttattttctttttgttcttgaactagcatttctataaagaactattttttcaaatgcttaatattaaatcctaagagtgtggcnnnnnnnnnnnnnnnnnnnnnnnnnnnnnnnnnnnn

SEQ ID NO: 38071 - DNA, 2222 bp, Macaca Mulatta
acacagtcagactaacctctgccacctgcgcttcctgccgctgcccagtggttgggggagggggactagcagggaggaaacatttttgtatcatggtgtaacattgtggggactggggggagcacaatgattcaggtagaggaggtgcttttacaaaaaaccctgctgccaaaaacatccccacccagcccagggaatgcagctaccaggtgggaagaggtctctggggctgttcccagctgttgtcttgcagggtcctccaacccagcgagcacctgtccatcttcctgtccacactcagcttcctagaaataagaaggccaagacagcgaagtgggattatcactcagcacttttaataaaacttgttcttgacaaagtacttgcacatgcattatttattaagactgatgaaaacctgagggaaagatattgtcccatttttccgatgaggaaactgagatcagagaggttacaggtcatataactaggaagaggcaaggtccagcctgcaacatcgcccagcttcagcctttccagtaccaccaatgccccttcagatttcgaatccactgtgttgtccccaagccaagtggattctcctctgcaaattggtggtgacctcatgcaagatccacgttaccgtgtccagctaattcgagacaggaagagacaggctcaggaaagagagggagggtgtgctctctacccgtgctaagggaggtggggaaggagaaggaattctgggcagccccttcccactgtgctcctacaatgagcagttctttgggccagggacacggctcaccgtgctaggtaagaagggggctccaggtgggagagagggagggctgcccagcctggacgaccccagaaccctgttcttaggggagtggacactgggcaatccagggccctcctcggggaaagcggggtttgcgccagggtccccagggctgtgctaacaccgcgcagctgttctttggagaaggctctaggctgaccgtgctgggtaaggaggcggttggggctccggagcgctccgagagggcgggatgggcagagttgagcagctgccccactccgagaggggctgtgctgagtggcgctgctgggcgtctgggccgaggactcctggttctgggtgctgggagggcgatggggctctcagcggtgggaaggacccgagctgagtctgggatagcagggcgggcagcaccggtttttgtcctgggcctccaggctgtgagcacagatccgcagtattttggcccaggcacccggctgacagtgctcggtaagcgggggctggaccagcccgggaaggcaggccgggggcatagcagggccagtttttgtgctgcgtctcggggctgtgagccaaaacactcagtacttcggcgccgggacccggctctcagtgctgggtaagctgggggcgccgggggacctggggagagacggcgtcgggtttttgtgtggggctcgggggccgtgaccaagagacccagtacttcggaccaggcacgcggctcctggtgctcggtgagcgcgggccgcaggggcgcggcgcggggcggcttgggtccggtttttgtggggagtcccctggctgtgctctggggccagcgtcctgactttcggggccggcagccggctgaccgtgctgggtgagttgccgcgggaacatccggacggcggggtccgggtggaaggtggctgcttcgcggcacctggtcccgccctgtgctaggagacctgggctgggtccccaaggtgggcaggagctcagggagccttagtggtttgcgtgccggggtgcacctccgtgctcctacgagcagtacttcgggccgggcaccaggctcacagtcataggtgagattcgggcgtctctccacctcccagcccctggtccccggggtcggagggcagaccggagctggaggagctgggtgtccggagcgggaggagctgcgtgtccggggtcagctctgcagcgtcacctccccgctcctgggaagacactgggaaagagggagggggtgggcaggcgctcagagtccgggaagctgagcagagggcgaggccgcttttaatcttttctctggggtgtttagaaagaaggcgaacgatagagaagagagaatttgttaggattctgggagaggcgaaactggagaggacgaagggaaatcctggtttggggaatgggtaggagt

SEQ ID NO: 38072 - DNA, 669 bp, Macaca Mulatta
aaacatttaaaataagtgcttttctaagaggtgacagttatgttttatctggctgaccttatgtcctcatgaataatgacttctgaaaatatcagtcgctgctaattgattacatccatcaagggagtaatcgtgttctcatctaaagctgttgttgagatgaggaaactcacttggcgtaagacagaatgatggctactgaggagcttgctttgtttgctgtgctatgtttgtacttaggttgtctctttagtctccatggaagggaggtgttcttaccctttataggtgagaaactgagactcagggttagttctgtgacctgtgcaatactggaacaaggatttaaggtggtgcctggctgtctgtgaaccaggcctcaccactctgttatactgcttgtcttgcaattccaagcatgccaggaaactcaatcccattgaacaccaggagaatatggcattcagtcctgaagagctatatgctaacaaagttatttgtcaccacttgtgagtttcgttgtttaagaagagggaaggagtagattcacctactgcctgcatgaggagcatggttgtacgttgtgaaatgggtcactgtcggttatagctgatgagatcgttgtgactttcagacatgtccaggataagaacatcatagaactggttc

SEQ ID NO: 38073 - DNA, 700 bp, Macaca Mulatta
  misc_feature (1)...(700): n = A,T,C or G
catcatcttcccccggtgtcgagacactggttgtccggtactcagtgacagcgtgccagacgcacactctatgtgaggtgctttcaggtccctgtcctcaggaagcgcagagtccggtggaagagatgagtgctgaataaatcactaaatacacaaaacaacaatgtaagcagcactnnnnnnnnnnnnnnnnnnnnnnnnnnnnnnnnnnnnnnnnnnnnnnnnnnnnnnnnnnnnnnnnnnnnnnnnnnnnnnnnnnnnnnnnnnnnnnnnnnnnnnnnnnnnnnnnnnnnnnnnnnnnnnnnnnnnnnnnnnnnnnnnnnnnnnnnnnnnnnnnnnnnnnnnnnnnnnnnnnnnnnnnnnnnnnnnnnnnnnnnnnnnnnnnnnnnnnnnnnnnnnnnnnnnnnnnnnnnnnnnnnnnnnnnnnnnnnnnnnnnnnnnnnnnnnnnnnnnnnnnnnnnnnnnnnnnnnnnnnnnnnnnnnnnnnnnnnnnnnnnnnnnnnnnnnnnnnnnnnnnnnnnnnnnnnnnnnnnnnnnnnnnnnnnnnnnnnnnnnnnnnnnnnnnnnnnnnnnnnnnnnnnnnnnnnnnnnnnnnnnnnnnnnnnnnnnnnnnnnnnnnnnnnnnnnnnnnnnnnnnnnnnnnnnnnnnnnnnnnnnnnnnnnnnnnnnnnnnnnnnnnnnnnnnnnnnnnnnnnnnnnn

SEQ ID NO: 38074 - DNA, 882 bp, Macaca Mulatta
  misc_feature (1)...(882): n = A,T,C or G
gcacgaggtttgaaagtgttaagtgattccttcgttattatttatgcatgttcatgaacttctgctgtacattggaataggagttaacacattcacatttactgtctattttcttgtgtgccttatgagatggcttttctgactgtatctcaatagtctttctttctatgcaggtttataatccataacaattacggttttctaaaataatattactcaaggctcggagtttgtatttaaattacactgaccaagtaacaatgtattccatttcaggaaccgaatatttgactgttaacctttttcccatacgcccagtgtggcatggagcatatggacttgacagacatctctcacccagacgctcatgtgtgaacacacccacatccacatctctgggtggaaaccagcctagagcggggacaatgctaatggtgttgctttagaaccgtcttttcttacccttttagactcgtgttttgtatgagacaccattgcaagaaaattttatccctccagaagtattttattacnnnnnnnnnnnnnnnnnnnnngcttagagtaaattgcactggttaaagtacagtttccaacagctgtacttctttagtactctaatcgccactccactgcgagtgaaagtcaccattgtgtgtacacaggtggtcccaatccaaactccatcttttgaggcccattatgtccatgtgctgtacactaatcaggggttggtctccagaacactcctgttttccctttctttatttgaggacactctatccttactaatttctttaactcgtcgccgaaacttgtgttggacggagccgctgggttcaacagttactgccattccgtcacctctgagaccttgggaaggct

SEQ ID NO: 38075 - DNA, 783 bp, Macaca Mulatta
  misc_feature (1)...(783): n = A,T,C or G
ggnnnnnnnnnnnnnnnnnnnnnnnnnnnnnnnnnnnnnnnnnnnnnnnnnnnnnnnnnnnnnnnnnnnnnnnnnnnnnnnnnnnnnnnnnnnnnnnnnnnnnnnnnnnnnnnnnnnnnnnnnnnnnnnnnnnnnnnnnnnnnnnnnnnnnnnnnnnnnnnnnnnnnnnnnnnnnnnnnnnnnnnnnnnnnnnnnnnnnnnnnnnnnnnnnnnnnnnnnnnnnnnnnnnnnnnnnnnnnnnnnnnnnnnnnnnnnnnnnnnnnnnnnnnnnnnnnnnnnnnnnnnnnnnnnnnnnnnnnnnnnnnnnnnnnnnnnnnnnnnnnnnnnnnnnnnnnnnnnnnnnnnnnnnnnnnnnnnnnnnnnnnnnnnnnnnnnnnnnnnnnnnnnnnnnnnnnnnnnnnnnnnnnnnnnnnnnnnnnnnnnnnnnnnnnnnnnnnnnnnnnnnnnnnnnnnnnnnnnnnnnnnnnnnnnnnnnnnnnnnnnnnnnnnnnnnnnnnnnnnnnnnnnnnnnnnnnnnnnnnnnnnnnnnnnnnnnnnnnnnnnnnnnnnnnnnnnnnnnnnnnnnnnnnnnnnnnnnnnnnnnnnnnnnnnnnnnnnnnnnnnnnnnnnnnnnnnnnnnnnnnnnnnnnnnnnnnnnnnnnnnnnnnnnnnctttgtcctgccttcaatccgccaacctactacaaccactttcacatccgaaaccatcactttccgctttcaaaagccgcccgcttgaatatttgacactttcgtgggatggttatctggactacctccttt

SEQ ID NO: 38076 - DNA, 361 bp, Macaca Mulatta
gacaaaattgtattctgtaggttccaagttcaacatttggaaaagtagacatttggaatgctctagttccactagacctttggttttcgcttaagggggactcaaggaccattgtgttagaattcagtgaagtcaggatgtagggaggctcagcacagatgactgaggatgtgttggaaaatagggatgggttacagaagatggcactatattacaagacttaggaatattttggatgtgacggtgctcaggtggtggtcatgggatagaatatgctaaaccacctattagcagggttatagtgtcttttagagaaagccaaatatattacctgtgaaagtggtaagaaacaagggtaacc

SEQ ID NO: 38077 - DNA, 876 bp, Macaca Mulatta
  misc_feature (1)...(876): n = A,T,C or G
gggctctgtctcggctgaggcagccatcttgctgttgccgcgtgctgttgttggaggaccctccctgcttcagatttaccaacagcatgaatcaagaaaagttagccaaacttcaggctcaggtccggatagggggcaagggtacagctcgcagaaagaagaaggtggtacacagaacagccacagctgatgacaaaaagcttcagagttctctaaaaaaactggctgtgaataatatagctggtattgaagaggtgaacatgattaaagatgatgggacagttattcatttcaacaatcccaaagtccaagcttccctttctgctaacacctttgcaattactggtcatgcagaagccaaaccaatcacagaaatgcttcctggaatattaagtcagcttggtgctgacagtttaacaagccttaggaagttagctgaacagttcccacggcaagtcttggacagtaaagcaccaaaaccagaagacattgatgaggaggatgatgatgttccagatcttgtagaaaattttgatgaggcatcaaagaatgaagctaactaaaagtttggtttttggaagctggcatggactagatttaacaaatcagctatgtggttccaaagttttacagacacagagaacatcacctgtactagtcagtatataatatttgtatatatatgctgttgtcacattttcgcatgattgcattcctctcagattntgcatgaatggctgaggttgttatcgttngttgtgatngnggtatgtgtgaannnncnnaagcaatggantttgtatnnnnnnnnnnnnnnnnnnnnnnnnnnnnnnnnnnnnnnnnnnnnnnnnnnnnnaatatattttttaagtgggt

SEQ ID NO: 38078 - DNA, 1888 bp, Macaca Mulatta
  misc_feature (1)...(1888): n = A,T,C or G
tacaaaaagactgtgtttgtagaattcacggatcaccttttcaacatcgctaagccaaggccaccttggatgggnnnnnnnnnnnnnnnnnnnnnnnnnnnnnnnnnnnnnnnnnnnnnnnnnnnnnnnnnnnnnnnnnnnnnnnnnnnnnnnnnnnnnnnnnnnnnnnnnnnnnnnnnnnnnnnnnnnnnnnnnnnnnnnnnnnnnnnnnnnnnnnnnnnnnnnnnnnnnnnnnnnnnnnnnnnnnnnnnnnnnnnnnnnnnnnnnnnnnnnnnnnnnnnnnnnnnnnnnnnnnnnnnnnnnnnnnnnnnnnnnnnnnnnnnnnnnnnnnnnnnnnnnnnnnnnnnnnnnnnnnnnnnnnnnnnnnnnnnnnnnnnnnnnnnnnnnnnnnnnnnnnnnnnnnnnnnnnnnnnnnnnnnnnnnnnnnnnnnnnnnnnnnnnnnnnnnnnnnnnnnnnnnnnnnnnnnnnnnnnnnnnnnnnnnnnnnnnnnnnnnnnnnnnnnnnnnnnnnnnnnnnnnnnnnnnnnnnnnnnnnnnnnnnnnnnnnnnnnnnnnnnnnnnnnnnnnnnnnnnnnnnnnnnnnnnnnnnnnnnnnnnnnnnnnnnnnnnnnnnnnnnnnnnnnnnnnnnnnnnnnnnnnnnnnnnnnnnnnnnnnnnnnnnnnnnnnnnnnnnnnnnnnnnnnnnnnnnnnnnnnnnnnnnnnnnnnnnnnnnnnnnnnnnnnnnnnnnnnnnnnnnnnnnnnnnngtttgatgatgacaactctccttcctttatccaaattcgctcagttgccaaaaagcatcctaaaacttgggtacattacattgctgctgaacaggacgactggcactatgctccctcagacctcgcccctgatgacagnnnnnnnnnnnnnnnnnnnnnnnnnnnnnnnctcttatacagaagttataaaagtcaatatttgaacaatggctctcagcggattggtaggaagtacaaaaaagtccgatttatggcatacacagatgaaacctttaagactcgtgaagctattcagtatgaatcaggaatcttgggacctttactttatggggaagttggagacannnnnnnnnnnnnnnnnnnnnnnnnnnnnnnnnnnnnnnnnnnnnnnnnnnnnnnnnnnnnnnnnnnnnnnnnnnnnnnnnnnnnnnnnnnnnnnnnnnnnnnnnnnnnnnnnnnnnnnnnnnnnnnnnnnnnnnnnnnnnnnnnnnnnnnnnnnnnnnnnnnnnnnnnnnnnnnnnnnnnnnnnnnnnnnnnnnnnnnnnnnnnnnnnnnnnnnnnnnnnnnnnnnnnnnnnnnnnnnnnnnnnnnnnnnnnnnnnnnnnnnnnnnnnnnnnnnnnnnnnnnnnnnnnnnnnnnnnnnnnnnnnnnnnnnnnnnnnnnnnnnnnnnnnnnnnnnnnnnnnnnnnnnnnnnnnnnnnnnnnnnnnnnnnnnnnnnnnnnnnnnnnnnnnnnnnnnnnnnnnnnnnnnnnnnnnnnnnnnnnnnnnnnnnnnnnnnnnnnnnnnnnnnnnnnnnnnnnnnnnnnnnnnnnnnnnnnnnnnnnnnnnnnnnnnnnnnnnnnnnnnnnnnnnnnnnnnnnnnnnnnnnnnnnnnnnnnnnnnnnnnnnnnnnnnnnnnnnnnnnnnnnnnnnnnnnnnnnnnnnnnnnnnnnnnnnnnnnnnnnnnnnnnnnnnnnnnnnnnnnnnnnnnnnnnnnnnnnnnnnnnnnnnnnnnnnnnnnnnnnnnnnnnnnnnnnncagatcaagaggaaattgactatgatgataccatctcagttgaaatgaagaaggaagattttgacatttatggtgaggatgaaaatcagagcccccgcagctttcaaaagaaaacaagacacta

SEQ ID NO: 38079 - DNA, 805 bp, Macaca Mulatta
  misc_feature (1)...(805): n = A,T,C or G
gggattttaggtggggtctccttctgtctcaatgcttcaccacccttaatgagttgtgaggtctggatttcagtcagtggagagtaaagagcaagggagtccacttctggactgttagaagcatgatccaattttcacccattacttctgtgcacatgctgttgcccaaaaattatagttaaatggatttacctaagtggaagaaaggttaggatgtgtctttctgagcttccatggagttcttgtactgggagggagtggtagaacgaagattgaaggacagccaatggacctttccaaaaccgaggttttgaataacatggtgcaaaaggagaggaagctgggcatccagatggtcatctaaggcacagctgtgctgccagcttggatcactcacccccagtctatgatataaaagaaatatttgggaggccaagctaggcannnnnnnnnnnnnnnnnnaattcaagacccgccctggtcaacatgggcaaccccctgtctccactaaaaaatataaactttgcccggttgtgatggtggggtgccctgtaatccccagctttctctggaggctgaaggcaagaaaaattggcttgaacccgggaaattggaagtttgtggaaaaacttaaaattggccctgtttgcccctccccgccctggggagaacaaagaatggaaaactcttgtccctcccgnnnnnnnnnnnnnnnnnnnnactccaaacctttaaacccaaccaaaccaaaaaaacggggaaattacccttttcccatttatttttaaaccccagttatttttcc

SEQ ID NO: 38080 - DNA, 1691 bp, Macaca Mulatta
  misc_feature (1)...(1691): n = A,T,C or G
gggcatactttaaaatcacctaacttggactgcttgaattatattgacttttagaaccgaaattgtaactatgtattatattatattatattgcatgggaggtatatttcataagctttttggctttcttttttcccacagcaacttctaatgactgttaggaaggatgaatccccttttaaaaaagtttttgttgttatttggttttggggtaggagggaggatctactgtggtaatagagaagtccgtttaaaaattatttttagaagctaaggaaagcaattatgtttcctgtgaattgtcttttactggcatcgttttttcctctttgatgttagtaaatttggtgtaatacattggggcttccatatttcaaagtggaagctttcttctctgaagtcaatgtatggttttgagttactagagctttggtcaatatttccttccctgtatgtcacagagggcaccattgagaactgtgtgcataggacctcaaaatacaaaattagcaggaccttacagtcagcttcctagtggctagtttttcccccttatattacaatttttgttttataaatcatttttttcctgacatttccaccacttttcagtcatctgcaaaatttttctttcctcaagagttccttttgccttattccttatgcctttcccactggtattgagggttttgataataaattggtaggaaaaaaaagttcctcctagaaggaagccttccccgccatttccaggtgccaactgctaagcagatatactccaaaaatggtaactgtaatatgcacactgtttggttatttttaataaagcctcttcctactagaacattttattttccttgttcaccatacaatcatgtactctttaacagaaattgcttttaaaaaatacctggaaactatcttttaaaaaaactttaattaataatcaatgtaattttttacctgaatcacattttttgaaaatgcccaatgaaagactttattgttctaattatccagatgtacctttgtaaaatagctcttttatgaattagctgataaggctgtatgtttctggaacaaaatattggtcatctaaaaactctgttttctggggtctgggaaaatagaaaataagagttcaaatattaaataagcttaaaggaacnnnnnnnnnnnnnnnnnnnnnnnnnnnnnnnnnnnnnnnnnnnnnnnnnnnnnnnnnnnnnnnnnnnnnnnnnnntgttcggccgcctccggccctcagaaaaccttttcctaaacacattcttttgtggcgccccgggccccagttaggggaaaggtgaaacatgggcccaaaacctggtttttgccaaggaaatattcccgggcccaatgaaacaaaggggcttggggatttgcccccnnnnnnnnnnnnnnnnnnnnggggcggccaaacccgaagcgttttctgaaaaaaaaattcccaaaatgggaatttcctgaaagggccatttacttggaattcgatccaacacggggattccccaggccgaagcccccaaatatcaggaattaacgccccccgccccttggccaatttaattgcaaaagaaaagggtttggaaaattccacttaaaagcacattctcgggcccaaacattggagaaacccacctcacaaaaccggcgatattaagaaaacaccc

SEQ ID NO: 38081 - DNA, 409 bp, Macaca Mulatta
  misc_feature (1)...(409): n = A,T,C or G
aaaataatctagttaagtatcccttttactgcttactacttactatgagtgtatatccagaagtttgatttacttcttggatgtgcgtaaaatacacattactacatattggtgtatatgacacttgattaattatctttctgtaattatattattttagtagataacttaattttcctcacaggagtaaatagctatacacttgagcattcaaaacaaacttactcagattatataaaagtagtcattttcatttggatatctgttgtaagagcagcattacatagtgaacatgactttatataatttaatatatttttccaagatggagcctcannnnnnnnnnnnnnnnnnnttgcagtggtgccaatctcgnnnnnnnnnnnnnnnnnnactttcgggtccaagt

SEQ ID NO: 38082 - DNA, 807 bp, Macaca Mulatta
ggtaattccacccaatcagattgagaaataatggtgaatatggaaagagtccaaaagaggtcagaatttggagaggtactggccttctggacaacatttagatcctctagaattattttcattaagctgattcctacatcctgaatattcatgttttctcatctacagataatttgtcttcctccaaaccaaaagaaaaaactaccctttactctcttttctactcagtttatcttttgtgctatgttagaaacttgaaatctattggtgatgtggggttttatccctgactgccactgcacaggacaagagagcacagtgtttccgttggaattcaggactcctggttttgaggtagaggatgatcactgcagtacttggtttggtattgccacaggggtagctaaaccaaaggagggttatatctgcaagggaggtgtaagaaggcaaaataaggaaaaggaggaatgggttttctctttgttcagtttcatcaactaatttatacacctaatacaacgtcagtgtcaattgctattaagaatttttagttgggctgagctgggttctcttgtgaaattgtgctggttatcttttaagcttatccgtctatttggcccaattaaacactttttcacccgtaatttagtcccaagttggtacaaacgatgtatttggattttggcatggttcatctacagactccaacataatccttttaaagtccctgggagtgggtaaagtaacttccataataactttaggatcctgagaaggtttttaacacaaaaaaggtggatcttcctg

SEQ ID NO: 38083 - DNA, 296 bp, Macaca Mulatta
  misc_feature (1)...(296): n = A,T,C or G
tttattgccagtgtgcggtctttgttctcctccgtgaaaaactgtgtccaagaacactcgggagaacaaagagacagtgcacatttgtttaatgtgacatcaaagcaagtattgtagcactcggtgaagcagtaagaagcttccttgtcaannnnnnnnnnnnnnnnnnnnnnnnnnnnnncacaaaacatgacaaaaacaaaacggactcacaaaaatatctaaactcgacgagatggagggtcgctcccgtgggatggaagtgcagaggtctcagcagactggatttctgtccg

SEQ ID NO: 38084 - DNA, 797 bp, Macaca Mulatta
  misc_feature (1)...(797): n = A,T,C or G
ggggtacagaattttatttaaaatacatctgagagaaggattcagatttcacctacttgggcagtgttaaaggatgaaggatatatctgggggtannnnnnnnnnnnnnnnnnnnnnnnnnnnnnnnnnnnnnnggaatctcannnnnnnnnnnnnnnnnnnnnnnnnnnnnncannnnnnnnnnnnnnnnnnnnnnacctcccgggttcaagcgattctcatgcctcagtctccccnnnnnnnnnnnnnnnnnnnnnncgccaccacacccnnnnnnnnnnnnnnnnnnnnnnnaagacacggttttnnnnnnnnnnnnnnnnnnnnnnntnnnnnnnnnnnnnnnnnnnnnngnnnnnnnnnnnnnnnnnnnnnnnnnnnnnnnnnnnnnnnnnntaccgcacccagccaatctgggagtatttctaaagaaaaaaattgtttcgatttgtggaggactaaatcataacacatttctatgcaacaatagcttctgagaggaaatttaggaatttttgtgtttaccacagacaaaaacatttggatctgttaatcatcagtacatggggcatctctctttttaacccttgaaccatggggtggaaatcagagaccaactttcaaatttaatggnnnnnnnnnnnnnnnnnnnagcctggcttcaattgggaaaaaaaattcaacttttctaaccagccttaaaaaagatctccctttaaaaaatattcttttcccccctaggggttaccccgccttgggcccaaaaaaggtttttaatcccctcacctggcgggga

SEQ ID NO: 38085 - DNA, 967 bp, Macaca Mulatta
  misc_feature (1)...(967): n = A,T,C or G
gggcttcttttccgagagaacaccaatggcggatgacgccggtgcagcgggggggcccggaggccctggtggccctgggatggggaaccgcggtggcttccgcggaggtttcggcagtggcatcctgggccggggtcgcggccgtggacagggccggggccgaagacgctgatctcgcggaggcatggccgaagataaggagtggatgcacaactacaaactgggccacttggacaatgactagaagattaaatccccggatgagatcaaccgtttctcttctgccttattggaatcagagatcattgaactttttcatgtgggacttcaactaaagaaaaatgttttgaataaaagtgctcggcgcgtaaaacgaaactcgttgccaaaccattagctactaatttttgatgacattaggtagccactctatagtattaataatgtcacttggttagacatgaagatgtaaacacagctccattcggacagacggcaatcttgtctttccataggtatgacctgttaatttcaaattcgcattatcgaattctttattcatcacggtccttctcgtgaatgtcaacatgaggaggaataatagaagtagcgagagatggcgcaggcgcgtaggtacagtatcgacaaagttttaaattattactatagctatattataaagttaacttctaactctaaactcttctcgtataatgacacccaaggatgataaaccctaagtactactacctactcgaaaataaataccgaataccacaaaaccataatacagctgatacaggagaaaaatcatgcactgtaatatacaagtataaagtcgagcaatctatagagagatggtaaccgagcgagtggaaatgcngaatcgagcactaacactgagatggtaaaataaatttatgtggacatacatattatttatattctagtctgggaaatacaggaa

SEQ ID NO: 38086 - DNA, 108 bp, Macaca Mulatta
aaagtcactgcttaacatctcaagagatgcgagtttggagtcaggggaagttttcaggagcccgtcaagtcatcctttatgatgtcagacgagtcaggccacggaatt

SEQ ID NO: 38087 - DNA, 750 bp, Macaca Mulatta
  misc_feature (1)...(750): n = A,T,C or G
ggatagcagagaaactggattgtttttgtatataagactgcttccacctgaaatgctgtcataagtactggggggtgggggagtgcctatcttgtacatgatattcttagaggtaataaggtaataatgcatgaacttgttttataaactcttggactatgtatttgacatgtaaaatatgtacagtattaatgtcaaccatctctttaaagttagcctataaatattgttgtataattttctttggtcagaaacatttggactgaatagtgacactcgctaaggattttcagtgccatttagcaaaccaactgtctttagtctatgcaactagcaaaaatctgcataatgcaacaatacagttttcacacttcaaattttacatgaggggttcttcacgattctcctggaacccagtctagcaaaattagaggaaaggccctagggagatttatttctgttaaatagttaactctactgagtataacaaatagtgtctactatctcaaccctccaacatttgcagtgttgggactgtcatatgtgatttctttttggtggggtagttgaataaaattgggcagttaaatttcagttccatgtgcctcccanataaaaaacagaaaataagtagttttttgtgaattgacttgcagacaaagtaggaaccgtcctgcatgatgttgttattttgtaaatggatgacatttttcaaccaagcacatgccatccaatttttctgtcaatcac

SEQ ID NO: 38088 - DNA, 877 bp, Macaca Mulatta
  misc_feature (1)...(877): n = A,T,C or G
gggccctcgtataaattagtacactggccttgtaaaccagaaatgaacactcttcctaggggggtcagaaagaaagtacctaactccaccaccaacacccaaagctggcattctaatttaaactactttctgcattcttatattgcataagcttcataaataactctagcaccaatccacccataatactactatgtaattcgtgcattactgctagccaacatgtataatatatagtactatatatgcttaactgtacataacacatattattacataccaacttgacattccaaacagcatgcttacaagcaagtatcctaatacaaacctcaacagtaacacataacatggttccctcggacttaacttgtcccccctcatnnnnnnnnnnnnnnnnnnnnnnnnnnnnnnnnnngggtttgcnnnnnnnnnnnnnnnnnnnnnnnnnnnnnnnnnnnnnnnnnnnnnnnnnnnnnnnnnnnnnnnnnnnnnnnnnnnnnnnnnnnnnnnnnnnnnnnnnnnnnnnnnnnnnnnnnnnnnnnnnnnnnnnnnnnnnnnnnnnnnnnnnnnnnnnnnnnnnnnnnnnnnnnnnnnnnnnnnnnnnnnnnnnnnnnnnnnnnnnnnnnnnnnnnnnnnnnnnnnnnnnnnnnnnnnnnnnnnnnnnnnnnnnnnnnnnnnnnnnnnnacggtcatccctatacagcctatttagctgagttcacgggagaattcctagccatttggggaatccttttatccctcctgggtcctggcaccgcaacccccaatttgcaaaaaaggcttaactccacaccaaataccccggttcctggataatgccccctgtcctttgaatccccagagaaattggacg

SEQ ID NO: 38089 - DNA, 664 bp, Macaca Mulatta
  misc_feature (1)...(664): n = A,T,C or G
ggggggacatttctatcagagcaagacttggaggttggacaagcccgctgaaggttactcctttacaacctcatcatgaaggacgctcaataagtcacatatttacatttgatgaggaggcaacatgtgcagatgaaagtgaaccacttgttcaaacaaacaagaaatgcaatgcaaaggactcattttacaagtcctctacacaaaaagcttatgaagatgttccttgggataagatgctaccaccaaaacttgttccagaagaaacaacattggaaaaggccgctgaccccatctcacagtgttttactctgaaaagatacaaagggttgccagcaataactcagatggttggtgagctctgggacagatttcaaacaagatctttcttggcaccagtcaaaccagttaattttgtgagttcaagttctagaagtaaatatattcctctctacactggtcatgtgcagtctacaaatgctgatgatgttgacaaccctttgggagacatcgcatcgctagccaagccgcggtgctctaagcctctttatacaaacacaagtcgtgctgcaaatattccaggatatacggcaggttcatttccagcacccaccagcaattctattttcatcacacccctcccagatcagaatgccccgtctan

SEQ ID NO: 38090 - DNA, 793 bp, Macaca Mulatta
  misc_feature (1)...(793): n = A,T,C or G
gggggcgggagccgtgtctgtggttgagagaggggctaagggcgggtcccagcgctgccgcaccatggcggaccagctttatctggaaaatatagacgagttcgtcacggaccaaaacaagatcgtgacatacaaatggctgagctatacgctaggggttcatgttaaccaggccaaacagatgctgtatgattatgttgaaaggaaacgaaaagaaaattcaggagcccaactgcatgttacctatttggtgtctggcagtctcattcagaatggacattcctgccacaaggttgcagtagtgagagaagataaattggaagcagtgaagtccaagctagctgtgactgccagcatccatgtgtacagcatccagaaagccatgctaaaggacagtgggcctctgttcaatactgactatgacatccttaaaagcaacttgcagaactgcagcaaatttagtgctatacaatgtgcagctgcagtccctagatctcctgctgaatcttcttcatcttccaaaaagtttgagcagtcgcatcttcacatgtcaagtgagacacaagccaacaatgagctgaccaccaatggtcatggcccacctgcatccaagcaggttttcccagcagcccaaaaggaattatggggaatgttttgcctcccaaagctgcttgctaaaaacccaagaaaaccaacaaggaaaggctaaaaacaggaggcctaanggaaagtaaancaaattgccatcctttcagccaagccaaacaaaggggccccccaaggggaaaaaagg

SEQ ID NO: 38091 - DNA, 524 bp, Macaca Mulatta
atatgacaccaagcaaaccttgggaatcacatgccttccgttggtgtcttttataaatgaaaatttcaggacaaaaatatcatatattgaccatggcaggtgttgtgcttagggtgggggcatgggggctcacaatatgataaggaaggcaaacaagtgaatgttccatcagaatgtgatagggtcaggggctaaaagcatgtgcaggagaaatgtaaggttgccctccttatagaacttagcctttgtgtagccctgttcaacacaatcctacaccagctagcagaccccagataagagtaggtcttgatgctctagcagattacttcctccagccaatgtggtatagagagaaaaatacttgagtgcctcactaatacacaggaggagactaggacataactattggtctcaattcttccatacagttgaagctggttcccttctgttcttaaacaactctgtgggctctggaaggagaccagagcaaatataagaaccgttaccaaacaattgagacagga

SEQ ID NO: 38092 - DNA, 784 bp, Macaca Mulatta
gggaaaaagtaaaattgagagacttttattagaagagctgtttggaatgaaccaacatttcagattttccaaaacataagttaggaaaagtctccattgtctctgcattaacaaaatacactgttactatcttaatctcaaaagtgtcattacagtgagaatctcatgtaaaagcataccagtgaaattaatagcagtgcttatcaaagaacacaaatctgtgagaatctttctaggagcattgtttttttctttcagttccaagttccagggtatttttcattcctagtaggtttatatgactcacagaatgtggacttttttcctgtttgaagtatttttgtaatgtaatatcggatagctacaccacagcatgcataaattgcacattttgttttactttctttatagaatatttaatttcaaaaatataatttatgccaaaaaaaagcatacctttcaattttgctacttggttgatttagcacaaaatgcaaagtcttggggcagagacggggagtgaaaaaaaatttgtaggtaattgttacaaaaatgcctgtcagaaaccctaaagctgcattgtaaaacaaatggtgttaattagttttgaaaagtggtaaagaattgtgaaaaaagtgtcagacttaatgctctctaccacatgattttcttcctttttatttagtaatacgctgctacatatttggaggttctcggtgtttgtaggtcactgaaccagacattgaaatctgaatttatattggtataacctgtaaacatagat

SEQ ID NO: 38093 - DNA, 817 bp, Macaca Mulatta
  misc_feature (1)...(817): n = A,T,C or G
gggattacattaaaaataaaagcaggttaggccaggagcagtggttcatgcttgtaatcccagcacttgggagactgaggtgggaggattgcttgaacnnnnnnnnnnnnnnnannnnnnnnnnnnnnggcaaagccccacctttacaaaatacaaaaattagaatggtatggtggtgcgtgcctgtagtctcagctactgggaaggctgacgtgggaggatcaccgtatcctggggaggtcaaggctgcaatgagctgtgatcgcaccactgcaatctagcctgggtaatagagtgacacattgcaatgataataattaataaaaatagaaggctacagaaaaagatatgcattactgtcccatttacagtacaataactacatatcataggccatattctctatataccaatactatgcaggttttgaaacccggcttggtcctcccccctcccaacccgtgggcaacatcctgcgcaaaccagggccttttatttcccggctttgggcttcacaaccccacacaccctcgttctctaggaaatccactccatctccccactcctgcgaaactcccgtgtgtccggccgtccggcgaccttcccgcgctggttcctcccctgttatcccccggcggggctcccccgccttggggtgttcttcccccccgcggtttggagccgtcccgatacatgccgcccgggcccctgttgttcgcgccacttgattctgcctcctccctgctcgcttgtaccgtacaacgacgcgccaacgtactcccgccctaggtatgttctccccccgccgtcgatcggc

SEQ ID NO: 38094 - DNA, 795 bp, Macaca Mulatta
  misc_feature (1)...(795): n = A,T,C or G
ggnnnnnnnnnnnnnnnnnnnnnnnnnnnnnnnnnnnnnnnnnnnnnnnnnnnnnnnnnnnnnnnnnnnnnnnnnnnnnnnnnnnnnnnnnnnnnnnnnnnnnnnnnnnnnnnnnnnnnnnnnnnnnnnnnnnnnnnnnnnnnnnnnnnnnnnnnnnnnnnnnnnnnnnnnnnnnnnnnnnnnnnnnnnnnnnnnnnnnnnnnnnnnnnnnnnnnnnnnnnnnnnnnnnnnnnnnnnnnnnnnnnnnnnnnnnnnnnnnnnnnnnnnnnnnnnnnnnnnnnnnnnnnnnnnnnnnnnnnnnnnnnnnnnnnnnnnnnnnnnnnnnnnnnnnnnnnnnnnnnnnnnnnnnnnnnnnnnnnnnnnnnnnnnnnnnnnnnnnnnnnnnnnnnnnnnnnnnnnnnnnnnnnnnnnnnnnnnnnnnnnnnnnnnnnnnnnnnnnnnnnnnnnnnnnnnnnnnnnnnnnnnnnnnnnnnnnnnnnnnnnnnnnnnnnnnnnnnnnnnnnnnnnnnnnnnnnnnnnnnnnnnnnnnnnnnnnnnnnnnnnnnnnnnnnnnnnnnnnnnnnnnnnnnnnnnnnnnnnnnnnnnnnnnnnnnnnnnnnnnnnnnnnnnnnnnnnnnnnnnnnnnnnnnnnnnnnnnnnnnnnnnnnnnnnngtgcaatactaactttcctttaaccccgggttggagggagggaaacccttattcctagaaagaacaccctaatttctgaatcctttgtggcccatcccggaaagtcccacccatccgcttattgcccccgcccnggccttcga

SEQ ID NO: 38095 - DNA, 208 bp, Macaca Mulatta
acttctgttaatagggtacaaagttaaacaaagtttgttcttgattaaaaaaaaagaaggaatatctaatgtataaacaactccaacctaggtttccaaaaccttgcattcattcacatttgtgcttctttctacacaactgtcatttacattcctagtgcttgtatttcactatgtaaagtgggaatttaatctttataaatgaggc

SEQ ID NO: 38096 - DNA, 458 bp, Macaca Mulatta
tacctccctgtatcaagcatgacataagggctttcatggcaaattttattttaactgtttctatggttgctggaaatgttgggtttagtttctaaaaccatgttttaagtagctacaggaggtatagatttgaatctaatgttgcattagtcttatcagttatcttctacctcctgtattttctactgtaataatataatttaaggccttccacaatgaacagttcactttattccctgagttttctataaacagttttaaagatatgatttggttaaaaaatgatttattataaaacttctgtttgcaaattaaactgtgaaagtatccaaagtctcaaaaggcaatgatttgtgtgataatatgccttgcccagagccctactcatcaatgaaaaacccatatgtaataactgaacttatttaacatgaatcttgagtatgtggaccattgcttgc

SEQ ID NO: 38097 - DNA, 792 bp, Macaca Mulatta
  misc_feature (1)...(792): n = A,T,C or G
ggnggaaaagacatgtgttatattaaaatcaactttcccattttcccacttttttctgttacatactgatctacactttaaaataatatgtatactgaaatctgtattcagatctcactgcgagcaaatatagatgaataaagacccagtctctgatataccaagcctcaaccagccctaacaaatactgcttttcgatgggcaggtcacaagcttgcatccatggtctgatgtagaattcatctctagagaccaggtttctcattctgcttcccatttaccaataaaagggtagcaacactttcctaaagcaagttgctccctgccctgcttaaagcctggggtggcccagtcatggcaaggagtagcaggaaaagctttcttgaaaactgcttgtcttgcaacaagcagtttcacagttgatcccttcatagttttcttgctgattttatgaagtgtcaggcattgctgatggtgtcacactgctttttaaaattgaggttatttgtatgaacaatattttatagtttgatgggcagaagctgtacttctctccacccaccctcaaccccttccttgccagccagcttgtgtttggtggagacgtttcttttttggtcaggacagaagactatcaatcagaaagtgccctgcaagagaaataatggttgagtgattttttagagctttcctgtttcagcaacaagcattatagacataaacagcgaatccagcccaacgggctggtaaacccctgctctggggttctaaaaaaatcaagttttgtaatca

SEQ ID NO: 38098 - DNA, 1061 bp, Macaca Mulatta
  misc_feature (1)...(1061): n = A,T,C or G
gggcttttcctgtagcagcatccggggtgagaggaacgtggttttctcctctctccgccatggcgtgtgctcgcccactgatatcggtgtactccgaaaagggggagtcatctggcaaaaatgtcactttgcctgctgtattcaaggctcctnatntcgnancnncagaatnatttgttggaaaacctttttgttcacacccaacctgcgcaaaaacaaacaggaaaggcccctcccccgggttggggggggatattaaaaaaaagtggggggtgacaaaaaaataaaacgggggtggtgtgaattaattttttttttgtacccccaccccaanacacgcgccgcgccacaaacaacaggcaggaataatctcaaaaataaccatatccaggtatataacacaacacacagcaagcacgaattaattaatttactgatatctcaacacccccaaacnataaccatataaactactccacctcttaattattctcccaagtaagggcgtggatgaccggcattctgcttattcccaaccacctttccaaccaaatttccaatacttatacaccatcccatgatattataaatcttcctcataatcccataccaatgtgtatacccctctacgacccgctatagcgatgataagnncagaagagtgagagggtgccgctaccaaaaaacccccttaggntgcatattcaaatgctatttactcgcacctctggttagtactaaatggagctaaatttatgtcacctatctttaggaaccgtcacgatatgcggnncgctgcctaacgatatacgcctacacacacaatttcactactgcgccacgaggtacgcgttatgtcaattactcaacattcccttatccacttatatcctactcattgactatcctcactaagctcgcagacaactaccactatgtagctacnctactagtcaancncacgcgcaatgcgagacacaactgaggtgnnangagatacggatgtcccctagccatgcggtagagtctacgtggtagataaggagcgtcggtgccatcgt

SEQ ID NO: 38099 - DNA, 639 bp, Macaca Mulatta
ttataattatactcatatcatataatatgatggcattacttgacccagaaaggtgcgtgtatgttgttttgagatgggaatggtatatgtctgtcctttttagtggctctagttgttggctgtagggattgttctatttaacattgagttcatgccattcatttttttcctcttctttttagtagaacatactaccttggaaaatgtcagccttctaatttttcatcttagttgagggttatagatatttaaaatcatatatttgtaaaatataatagcactaagattattaataaagattattgatatagtaaatttaaagcatttagttttaaatgtcagtaacaaatagaactgaataaatcaaagttctacagaatttttatgaagtatcctctccccctcctttctaaataaagttgatgtcaaataaaactggatgactgtgtacatggagagtattcatccattctttcattcatcatgcatggataggagcagcttcctctgctgccccctccaactacacagtcccgccactctacccaacacagtgcaggaccaattggtcccccttttgaagcactccttcaatttacatttcatttgtttattatggcatagacccccatcaatatt

SEQ ID NO: 38100 - DNA, 114 bp, Macaca Mulatta
ccaagtctgtggcctgtccctcttgcctacatcaaggtcagctgaccaggagctgacaggctcccagccctgttctctgcccagagggcgttcccaaagtgggtagggaaacag

SEQ ID NO: 38101 - DNA, 434 bp, Macaca Mulatta
  misc_feature (1)...(434): n = A,T,C or G
atgggcctcaggaagactaaacagatggggagaggcactaaagctcctggtcaccaagnnnnnnnnnnnnnnnnnnnnnnnnnnnnnnnnnnnnnnnnnnnnnnnnnnnnnnnnnnnnnnnnnnnnnnnnnnnnnnnnnnnnnnnnnnnnnnnnnnnnnnnnnnnnnnnnnnnnnnnnnnnnnnnnnnnnnnnnnnnnnnnnnnnnnnnnnnnnnnnnnnnnnnnnnnnnnnnnnnnnnnnnnnnnnnnnnnnnnnnnnnncagagatcagcaaggacaactcctgcaaagaaaactgtacttgttcctcctgcttgctccgggcccccaccatcagtgacttgctcaatgatcaggacttactagatgtgatcagaagaaagctggatccgtgtcacccaacgggaaaaactaaggaatttgcaagcaaatgg

SEQ ID NO: 38102 - DNA, 662 bp, Macaca Mulatta
gatctctgcgggaggtagcacgtttgtgctttgcccgccgcaggcttaggggactttttggggccgcgtagtcggtgtttttgaactgagtccacagctcgtggtgggccgtgcggcgccctgacccggcctcaccatgttggtgctgtttgaaacgtctgtgggctacgccatctttaaggttctaaatgagaagaaacttcaagaggttgatagtttatggaaagaatttgaaactccagagaaagcaaacaaaatagtaaagctaaaacattttgagaaatttcaggatacagcagaagcattagcagggctgattttccccatgtgtgaggagaggtgagaagtggttaagttgatctccctgtggaaaccagcaacataatgctgaagcacaattcagtaaaaggtgttctacaagggaccaagcattcacagctctgatggagggcaaaatcaataagcagctgaagaaagttctgaagaaaatagtaaaagaagcccatgaaccgctggcagtagctgatgctaaactaggaggggtcataaaggaaaagctgaatctcagttgtatccatagtcctgttgttaatgaacttatgagaggaattcgttcacaaatggatggattaatccctggggtagaaccacgtgaaatggca

SEQ ID NO: 38103 - DNA, 824 bp, Macaca Mulatta
agaaacaatgacgttggattttgggggactggcccttgactccggggaatcagacacgaacggcggacccctgctctctaccatctgcctgccgctgctcccacccgccgactcctagagctcatttgtcgcttctgcagcctccaggaatgcaaataatttctcactgggttttggtgagggcggagctgcggagaagcgcgagcccaacagctttcgccgcagctgggttcccgggcgccggcggctggggccctcagatgggggcggaggctgcaatatgcacaggcggccacagtgtggcgcaagcgccctgccgtgggacacgctcggcgcgcgacgctccaacccatcatttacgggtcaaataatctagaatcaagttgctacgtgtgtcatactcctcctgttttttccctaaacttttagtagagtcatttacatagttcagtttttatctcagctatgttacagagtggcaggaaaatattttgtctccaaattacagcccaagtgtgagcagcgtatcctgaagctagttagtaatcaaccagaaaatcaggaaggtaaagcaaacctctggaggcaaggtctggactctgtgatatcgccgcttctacctacttgaagtttctccttgcagtgccgcacttggagatttggacttaattgttaaacaaaaagaacagttacattctgccttcctacaggacaagggcctaggactggcagcatttctgttgtctctagaaatacaggggttatgagaaagcctcaaaagagagggcaagaataatatatccatctgtcatcatgagttaccc

SEQ ID NO: 38104 - DNA, 863 bp, Macaca Mulatta
  misc_feature (1)...(863): n = A,T,C or G
ggggcaccaaaacactccccaaaccttgagacntnnntnancaaaaccgtgagccaccgcgcccggccaaacatacttttaaaaatcattttaggccgggcacggnnnnnnnnnnnnnnnnnnnnnnnnnnnnnnnnnnnnnnnacgggcgnnnnnnnnnnnnnnnnnnnnnnnnnnnnnnnnnntggcacgnnnnnnnnnnnnnnnnnnnnnnnnatacaggagaaactagccgggtgaggtgacgggcannnnnnnnnnnnnnnnnnnnnnnnnnnnncgcaggaggatggcggnnnnnnnnnnnnngnnnnnnnnnnnnnnnnnnnnnntggccactgcaccnnnnnnnnnnnnnnnnnnnnnnnnnnnnnnnnnnnnnnnnnnnnnnnnnnnnnnttttatctgtataaactttgtgaggtacaagtggtaaatttgtgacatgccatagattgccataaaaaggaagtcaaggccttttaggtatccatcactttgagtaaagtacatttgtatccatgggagtaattttctcatcggtccaatccctcctcccaacccgcttcaccctttctgaagtcctccatttgtcctactattcaaaaaaaagccctttctctaaccaacgcaattgttccggcctgaaatctctnnnnnnnnnnnnnnnnnntttccctcatggaacattggaccctaaattttcccttggggaaaaaaggccatttccattaattgtggaaaaaagggctcttttctgttttcaccccaaccaatggtggggtcccttctaaaaaccaggcaagccttttaaacaattcctccttgggggaaccttcccttttaaaaaaatagccagaacg

SEQ ID NO: 38105 - DNA, 705 bp, Macaca Mulatta
  misc_feature (1)...(705): n = A,T,C or G
ggtaaggtatattcatttcatttcctacatgcacattaagggtagttttgtatagactgctatgggataaagtcatgttgcattgcaattagttattctaaaacataattacagtttatcatagttgaataactggaagacttctcaagaaagatcactgctcttttttaacactgatatatagacactttctcattttcccttaaacttttttttacaacactcgtaaaaaggaactttctttctagcatgcaattgtgtnnnnnnnnnnnnnnnnnnnnnntttattaaactgtatatagaaaatgcatatatcataaacatacagctcaatgcattctcaaaaatgaacatactcaggtcaagaaacagaacatgaccacaccccagaagccttccccactttcccttccgggcaagcccccaagggtacacactaccttggcttctcacagcatagattcattttgcctgttttgtattttatataaattgagccaaacaattatatatcatataattgagcaatatactctttggcatctgtcttctgtcattcacgttatgtatgtgagagtcatccatatgttgcataaattgtagataattcattctcattgtcatgttgtatcccattctgtgaatatgctgcaatataatttaatcatttctaccggtttggaaaacattttgggtttgttttgc

SEQ ID NO: 38106 - DNA, 1015 bp, Macaca Mulatta
  misc_feature (1)...(1015): n = A,T,C or G
tgggggatcccaaggaggccggagcagagggtccgccggcgggggccgccgctcgaggagggctcagcctcctgtcccagggagaatccgaggaaccttctgcacaggnnnnnnnnnnnnnnnnnnnnnnnnnnnnnnnnnnnnnnnnnnnnnnnnnnnnnnnnnnnnnnnnnnnnnnnnnnnnnnnnnnnnnnnnnnnnnnnnnnnnnnnnnnnnnnnnnnnnnnnnnnnnnnnnnnnnnnnnnnnnnnnnnnnnnnnnnnnnnnnnnnnnnnnnnnnnnnnnnnnnnnnnnnnnnnnnnnnnnnnnnnnnnnagctttggcatggcatacgactttattgattcagtgggaaatgatgtggatgttgtctctgactctgannnnnnnnnnnnnnnnnnnnnnnnnnnnnnnnnnnnnnnnnnnnnnnnnnnnnnnnnnnnnnnnnnnnnnnnnnnnnnnnnnnnnnnnnnnnnnnnnnnnnnnnnnnnnnnnnnnnnnnnnnnnnnnnnnnnnnnnnnnnnnnnnnnnnnnnnnnnnnnnnnnnnnnnnnnnnnnnnnnnnnnnnnnnnnnnnnnnnnnnnnnnnnnnnnnnnnnnnnnnnnnnnnnnnnnnnnnnnnnnnnnnnnnnnnnnnnnnnnnnnnnnnnnnnnnnnnnnnnnnnnnnnnnnnnnnnnnnnnnnnnnnnnnnnnnnnnnnnnnnnnnnnnnnnnnnnnnnnnnnnnnnnnnnnnnnnnnnnnnnnnnnnnnnnnnnnnnnnnnnnnnnnnnnnnnnnnnnnnnnnnnnnnnnnnnnnnnnnnnnnnnnnnnnnnnnnnnnnnnnnnnnnnnnnnnnnnnnnnnnnnnnnnnnnnnnnnnnnnnnnnnnnnnnnnnnnnnnnnnnnnnnnnncagggtcttaaaaatgatttcgttcggaatattctttggacatttgaagatatccatatgttggttggctccaacatgcccatatttggaggaggcagatacccagcagtcagcttacgtctcagg

SEQ ID NO: 38107 - DNA, 862 bp, Macaca Mulatta
ggattacaacaaactagatccccattttctcatatttagacaatgttgttcctaatgatttcagttttttgagttcagtcaagatactgacagattttattacccccaaacatggctattttcttttttcctcagtagatatgataaaaacatgcagttatttcctactgtgtaggattaacaaactcttttcagtgacattgtcctcatggccacgtatttccaatgtaaaaaatatacctgaagagttttcatcactcatgctctgctccattgtttttgtatgttgtttaatgttttctccatagactgtatcactttgcatacagtctgctgattactttgtactttgtttacttaatcttcattatgtcagtgttccgcatgaggaaaccattgtatttgatacgggattaggatttttggatttaggatacaaaaatcttggattttccgaaaatgggccggaaacaattatttcccacttatttttaaaagggatgctttctaaatatttgcctgaaaaacaattcccggagaaaacaaaactggggccttgggatgggacgaaaaagccgggggcacttaaatggttggaaggcgtgctagccacgcgggacgacgcggccagggcaccctgtgcgttccggagcactcgcgtactgtgccccgttgcagggtcccccctttggccacgtcctcactaccgaccgagtcggctcgtcgcagcgcgtatagcgcagcgacgacgttgcgatcgcggccacctaacgacgccgtgccgccgagtttgctgctggtgggccgcggactgccgggcgcccggggccggggcgtatgtgctgccgttacgctaggaggg

SEQ ID NO: 38108 - DNA, 693 bp, Macaca Mulatta
ggtaggttgtgtaaaggaactaatgggacctctcagtgaatcagctgaccagatattaggaaatctttttaatttctatgatttcccttcttatattttgaaatggtcaaattgactggaaataatttttcttggtgccttattggtttatccttgcaaacctttgtcatattttctcatgaccattgccagtgaccaaggcccttgtatgtgttgtgtgtaattgtgtgcatgtacaagcttaaataacgtgccgacagcactgtttcaaagttggtattcattaggctgtttcctcctgggctggagctgcactaatcctgacaccggctgccaggagaaaacctcatggatcacacaccgaaccttaataacagcatccgtgacctgcactctccagtacagaatgggaaccccagagctaggaaatgtagttgtatattttaatgaactgctacccctgccaaagaagcttctttcacttttgtgctctacagaaagcccaaggggggtaggagggacaaagctttgaataactgctttctaacactaaatgtggccaacaggacagagcacatcacacatataggcaggtgtgagggacagtggctaagaattgcctgctccctctgcatgctctttcttgtttccaaagtccaatcaagtgatcctgggaaagaaatctgtctggat

SEQ ID NO: 38109 - DNA, 284 bp, Macaca Mulatta
gaggaccaacatgggcagtgttgtttatgagcatggcgggtgtcagaggtgatcggcaatcagagggcgatgaagttctagatccattgagacaagctctagacagtagcatgcagtcccacaacttgtaccagcatccccagcgcctggcattccatgtttctgctcctgtggcctccacgatgcaacaagctagcggtttacttggacttctgcctcatctttcttcttttgctcttcagcctgcgcattcgcttcttcctccacttggctctcatggcgca

SEQ ID NO: 38110 - DNA, 938 bp, Macaca Mulatta
  misc_feature (1)...(938): n = A,T,C or G
gacaaggnntttttattnntnnntnnnnntttttggcatacgcagataatgttctcatcagtagtaagaatctgagggttatgcttattccccagtggaggtatgacatataatcttttctgcctttacttatcattcaccaaggagctgttctctctgcatctaggccatcatactgccaggctggttatgactcagaagatgttatctgaaaaaagtctacagaaaaaaaaagtttcccctccctcatcaacaaaagcccaccctctaagagacattcaagctgaactatcacaattcttaattacgatttacaaacagataaatttaaaatcacaatttacagaatttttgaagcataccttaacatcttgttttgcagctgaacaacggaaaaatatttctcctacgctaaaaaaaacttgcttacacacaactgaaaatagaatcttacttgataatacaaaagctaccatcagaagaaatcccttcaggatcattaagccacttcctttgctctgaagtttctatagtagttttaagttattattaaaccacctgaaaaaaattccaaaagagaaccacacactaccatatccaaacaactttagcatttcccataattgtagctaatgtcagcccagtgcttcagaccaacccccattccaatactttccttccccaagctctatactttgagggaaaacagatacagtatcaaattatgataatttccttgcccaaattaatgcactggtacacccagtggctcctatttaacttcccccagcttcccaattcaaaaattgggggaaacaaactaaaggattgggagttacttgccaacttggaagttgagatttctttaccttttccattctaagactttaagttctctggcatgagtttatccccaatcataaactaaacaattaccc

SEQ ID NO: 38111 - DNA, 949 bp, Macaca Mulatta
  misc_feature (1)...(949): n = A,T,C or G
ggcagtgcttaatttggcattttcacgtgcagtattttaaatgggaaattagtaatattatatagtcagtctttcataataatataatcatcaaataatatttgctattcatattactaatatttagtaattttagcagatggtataataattagcacatggcataagtaattgtatgtaaatactgatttatttatcacttcgcatttgtttgatatcagtacattttggtgctttaagatatatccttaatagtggaaatgggatgaatttctcaaaatagcatgctaaactatattcttaataatttttgaaattctttaaaagaatatttttaaaaacttatttagaagtaaaataatccattcaattaagcttgtttcctttaaaaattgccttaacccgaatttagtatttttttcagcgaaaaactgccatatattaaatttttatttaaccccctaaaaacctaaaaatcatttaaaaagatttcggggaaaaaagcaagcactatacatttcaggcaacccaaaatacggggttgtgcataacattgtatttttagaaatagaataataattttcgcattattataaaatattttaccggaatataacttcctccaatattacgattataagtttcaaaaaaacactatggggacttatctctacaaatatatctcgacctatactcgattaattagcgagtttttaattttcttaggactagatatcgtcatccgggaagtaagtatccaattcctcccatttcattagtatatacaagtctccccagttaataatagttaatattgttacatttgtatattgatataaattatcatagtgaatgagcagaataatttccaccacgactgtccatcggcgcgtgttctgaaaggttcactacatacaaaaattcgcgcaaancatatgatagcgcaact

SEQ ID NO: 38112 - DNA, 120 bp, Macaca Mulatta
cttttatgtattactcacactactctcattttagttttagtgttattattggtgatagtaaggactactaatgatttgtacttcctctataccaagcattggcctatgtactttatgaag

SEQ ID NO: 38113 - DNA, 165 bp, Macaca Mulatta
actacaatgtgaaattggtctctggaggtcagctgatgacctgaggttcactgataaacttactaaccatacggcttacagtctatcacagcctctgctaaggtaagtgtgagtgatgcagctctattcctgtaggcctggcccatgggaagtagtgtacaggca

SEQ ID NO: 38114 - DNA, 643 bp, Macaca Mulatta
acttctggtaacagcaccagcctgaggatcatgttctcatcaaagggtgaaaaggaggaaaactggaactagcctgggaaggaccctactttgtgctgctaaccaccgagactgctattcatacagtggaaatgggatggactcatcacacccgagtcaggaaagcgccaccctccccagagtgttgggccatggtcccaggggaaaacccttccaaactgaggctaagaaaaatttaactgtctttcatgtattctattactcttccttctttcctcactctattgctgaccatctagttataaccaagtcaatttcccttcaaactgttgcatttgatgcttgccttgttatataccctgtgggggacttgccaagtcgacagctctctacttcagaaaagtacctctgtccctcctgactctccttagactgggccttagtaaactgggaccatttaatccggagaaattttgataaagaccccagtgtcaaccaggagtcttgccctgcaatgctggctgagcttttatgctatagttgatccaacattctgtagaccactaaagagcaaagatggactggcccaaaccgggttttggtatttcctaaaagcatacattcattttactagagcatcgta

SEQ ID NO: 38115 - DNA, 975 bp, Macaca Mulatta
  misc_feature (1)...(975): n = A,T,C or G
ggatagtagtaaactatccttatctttgattattcttttaatttttatttgagctgtttcaacagcataataaactaaaattttgaattggccaataatattctttataatcttccagcgaagagtctgatacaaattttctcttggctgtgttgtagttccactaacaaatagcacttcaggcctcatagaaccatatagatatggccaaggaatatcagggttcactattataatactaattgctaactcattaaactcattatttaattgaacattttcaaagctctggaaaggcatgcatttgtaggtgcacatgctttaagatttctatgcatctttcagagttgaatgtaataatgtttggcatttgattcttgataattcttaaccaacttttcctgttaaaagagagaaagaatgcaatgtcagctcgtcctgacctctcatgcaaagagagagnnnnnnnnnnnnnnnnnnnnnnnnnnnnnnnnnnnnnnnnnnnnnnnnnnnnnnnnnnnnnnnnnnnnnnnnnnnnnnnnnnnnnnnnnnnnnnnnnnnnnnnnnnnnnnnnnnnnnnnnnnnnnnnnnnnnnnnnnnnnnnnnnnnnnnnnnnnnnnnnnnnnnnnnnnnnnnnnnnnnnnnnnnnnnnnnnnnnnnnnnnnnnnnnnnnnnnnnnnnnnnnnnnnnnnnnnnnnnnnnnnnnnnnnnnnnnnnnnnnnnnnnnnnnnnnnnnnnnnnnnnnnnnnnnnnnnnnnnnnnnnnnnnnnnnnnnnnnnnnnnnnnnnnnnnnnnnnnnnnnnnnnnnnnnnnnnnnnnnnnnnnnnnnnnnnnnnnnnnnnnnnnnnnnnnnnnnnnnnnnnnnnnnnnnnnnnnnnnnnnnnnnnnnnnnnnnnnnnnnnnnnnnnnnnnnnnnnnnnnnnnnnnnnnnnnnnnnnnnnnnnnnnnnnnnnnnnnnnnnnnnnnnnnnnnnnn

SEQ ID NO: 38116 - DNA, 625 bp, Macaca Mulatta
ggaacacctagcacgtgctgtgtgggctgcctctgacccagaggcatggccgaatttggcgactcaaaaccaccttgcctcagctgatcagagtttctgtagaattctgattgttagatcaaattagctggtctctgaattaagtgggagaggaccttctctaagatgaaccgggttcgccccagtcctcctgcctggagacagttgatgtgtcttgcagagctctcgcttctccagcaacactcttcagtacataataagcttaactgataaacagagagaatatttaggaaggtgagtcttgggcttaccattgggtttaaatcatagggacctcgggaaagggttcgggcttctctggagcagatattatgaagttcatggccttaggtagcatgtgtatctggtcttaactctgattgtagcaaaagttctgagaggagctgagccttgttctggccccttaaagaacagggtcctcaggccctgcccgcttcctgtccactgccctcctgcccgtccccagcccagctgagggaatcccgtgggttgcttacctacctataaggtggtttataagctgctgtcctggccactgcattcaaattccaatgtgtacttcata

SEQ ID NO: 38117 - DNA, 316 bp, Macaca Mulatta
ggctggagggctgcagccagatcctcccgaactcaggccgggcagaggccgcggaggaggcagcccctcagggtcccagcagccccgagatgccgctgcagctgctacgcttctcagagctcatcagcgacgacatccagcggtactttggccgcaaggacaaggcgcaggacccagatgcctgcgacgtgtacgccgacagccgcccagctggcagcactgcccgggagctctaccacgcggacctggtgcgtctggcccgaggcgggtccctggaggacgagcacaccccggagaccggggtctcccaagggca

SEQ ID NO: 38118 - DNA, 416 bp, Macaca Mulatta
  misc_feature (1)...(416): n = A,T,C or G
ggagatttggaggggacaaatatttaaactatagcacaggccgaggtcaaataaacaaccacacccagttaccacttcaataccctatgatggctatattctaaaagagaataacaagggctggagagcaggactattaatgcgtacatgttttcttattcaggtgatgaaagtatattaaaattgactgtggtggtggttgtacaattctgtgaacatactaaaaatggatgaatgggtgagttgtgtggtatatgagttatattccaacaaagccatttttaaaaagaactatcactactctttctaaaactagtaatacttttaataaagtattaaaagnnnnnnnnnnnnnnnnnnnnnnnnnnnnnnnnnnnnnnnnnnnnnnnnnnnnnnnnnnnnnnnnnnnnnnnnnn

SEQ ID NO: 38119 - DNA, 812 bp, Macaca Mulatta
ggggcttctcgcctaacgccgccaacatggtgttcaggcgcttcgtggaggttggccgggtggcctacgtctcctttggacctcatgccggaaaattggtcgcgattgtagatgttattgatcagaacagggctttggtcgatggaccttgcactcaagtgaggagacaggccatgcctttcaagtgcatgcagctcactgatttcatcctcaagtttccacacagtgcccgccagaagtatgtccgacaagcgtggcagaaggcagacatcaatacaaaatgggcagccacacgatgggccaagaagattgaagccagagaaaggaaagccaagatgacagattttgatcgttttaaagttatgaaggcaaagaaaatgaggaacagaataatcaagaatgaagttaagaagcttcaaaaggcagctctcctgaaagcttctcccaaaaaagcacctggtactaagggtactgctgctgctgctaaaagttccagcaaaaaagatgaccaccgcgagtaaaaaggctccagcccagaaggttcctgcccagaaagccacaggccagaaggctgcgcctgctccaaaagctcagaagggtcaaaaagctccagcccagaaagcacctgctccaaagggcatctggcaagaaagcataagtggcaatccaaaaaaagtaataaaaggttctttttttgacatgtttggcaaaatgtattttacgccttttggaattaaagcttggtttgaaactgggaattaaggagggcagaattggatagttaggatttaccatttaaccttttaaataaa

SEQ ID NO: 38120 - DNA, 127 bp, Macaca Mulatta
  misc_feature (1)...(127): n = A,T,C or G
tggaccttatggacttcaagtgaattctgataaagggctaanagtaggggaagtgtttactgttgaccttggagaggccatcctatttgactgttctgctgattcttatccccccaacacctactcc

SEQ ID NO: 38121 - DNA, 732 bp, Macaca Mulatta
ggatggcttccaacagtcaaaatactgtctggccttttttaaaagagtttatcgatcccttttatgggggaaggttttgctcatacatggcatgttagtcaatttagttatttgcttctagctggcagagtgaggtcttgaatacttacatatttctattacccctgtattttccaaaatggcttctcctgattttactgttttactgttgctcaaattacacagatactaggaaacacgagtactttaaaagtacactttttttttctacttaaactctcaaactatagttagtatttaccatgatgttaagggactttgatggtctgtgaattatcagttgctttctgcactacctcctgtggatagacctgactgatagcacttagaaaaagactgatagacgccaaatcagtcatttattaaccctataatattgttgtccccatcatttggtaaactgtaagagagcttagttttacattcacaaagtatttatatttgataagtcttaaaaatgatttaagttgaaacctaacagaagtacttgttaattactcagttacccgcaaataatggaaataatggtgcagtcagttttattttgattgtgtaatgctttataactaggggtcccaaaactccctgggtgggcatttagatttctccacaaggaaccattggaacccccatttgtggaaactgcaccatggccaagatctaagtgttgga

SEQ ID NO: 38122 - DNA, 780 bp, Macaca Mulatta
  misc_feature (1)...(780): n = A,T,C or G
tcttaaggatgtagtcaagttaatnttagatgcagtatcttctgatatgtttaatgaaacagaatctgaagggggaggcattgaaacttatcgatacaggccaacatatggaaaacttcctggaggagctgaatcaaattcatttctagatgatgatacacatacagataaaaaaattattgatgagagatcaccacaaagagaagaaatgagaacacattctcttaaacaatgggctctagaaaaaaccttaaacaaaattgaagtaaaactcaaagaaccacatatatctccaattgctcccattataagaaatattttgaatgaaatttttcaaagtactttaatcaatcaattaaatgtcctttctctctcccactctaattttaatggcatgcctcacaatgttgatgagacaactccccaaacatctgttcaatttatggataaaatgatggatcctttactgtctgaagcagatataaccatagtaacagataatattgttaggacggtatttcacaaactttattcagctgccattacagaaagaaatataagggaaaataggtataaaactatcactttttcagcaaatgtttctcttcatgaacacacctatgaaggaaagtcctctgtcactgtgttggatgaaaatccatgtacttttcagtctagattcagtgttgctgacaaagaagcaaaggtaaatctagctgaagatattgtacaggcaatattaacaaatttagaaacttttgctacttccaanagtaaaat

SEQ ID NO: 38123 - DNA, 532 bp, Macaca Mulatta
ggctttgacaaggcctatgttgtccttggccagtttctggtgctaaagaaagatgaaggtctcttccgggaatggctgaaggacacgtgtggcgccaacgccaagcagtcccgagactgcttcggatgccttcaagagtggtgcgacgccttcctgtgatgctctctgggaagctctcaatccccagccctcatccagagtttgcagccgagtagggactcctcccctcccctctacgaaggaaaagattgctattgtcgtactcacctccgacgtactccagggtcgtttgggagttttctcccctaaccatttcaacttttttggattctcgctcttgcatgcctcccccgccctttttcccttgccagttccctggtgagagttaccagctttcctgaatggattcctggccccgtccctcaccccccaccctcactttcagtccgtttgataccatttggctcccttttgggcagaacagtcactgtccttgtaaagttttttagatcaataaagtcagtggctttca

SEQ ID NO: 38124 - DNA, 830 bp, Macaca Mulatta
  misc_feature (1)...(830): n = A,T,C or G
ggttatgtttgtatattgaaaaaatggtggccagtttttaagctccttaatagaagagaattatgtctcagcaggtataacagtaatgctaatttattgaaactactgctgttagagcacttcttattcattgtcttttagtaaaatatatgacataacattttgtcagagaggaggctatataatttggagtggaaattgtaagtaggcatttatttcatgattgatatgtcacagaaattatggtagtaaatcacattgctattttaataccctgtttatgtaagtttttaaaactcgtattctgaaaatatttcattctcttagtgttagtttgggagttagattgccatgattaaactgttatttatccttgtgtaatataatttttaaccttaacatctgtctctttttaatctataatctagttttatggaagatggaatttcttactatataaagaatacaaagactcattgtattagaagatcaagtcagccagctaaattatcctactgttatatccttaaacctgattttggaaaaagaaagttaatcanggtatttaccttacatggtggaaagaactatgttaggtctgattcatgtaaagaaagatgtttgcaaagaattattttcaccaaatctttaatggaaatgtggaagaaaaaggttttatccctcttcttggactttttccccccggaaaccccttatggtcctttaccaggggtgtccacgccaggaaggggtttcgcaaccgccctaaatttggttcggtccaattggcggttgaagggctttgcaacaaaagaaacctacacccattc

SEQ ID NO: 38125 - DNA, 687 bp, Macaca Mulatta
gcggccctggtgaacccctggggatggcctgaactgaaggcgctccctatttggtcccttgacacagggactattttcagcacgcccacagtgactgctgggacctcccagtcgtccgttctggtcctcgggcgggggtggcttggagagggccgcgcgccccgctagcgcagggaaatactcccagcccttccggaccgggtctgcgcgtctgggcataatccacccccactccagctccacctacacacgccgaactgctcgctctccgcccatcctccggaggggctgggagggggtgtcctgggctgagcccctttcccagggacccctggcgggcaacccgcccgcccttattccgcccggctgccgcgcagcggtgggaatgtctcagttggcagcagcgcagagctgacccctcgcagcgaggagaattgctgccccgccccggcccattcagcggaccgcgggcgcccggttcccaccggtacaaagcgcgcttggccccgccccgccggcgaggggcccccagcctcccctaacctgggaccctcttggcttccaaagacctcctctgcaagcagcgctgcccacccggccggcgcattccccgaggcctgcccttctcagaagccccgcccctaagatgcaccgcctcacccggacgccccgcccacgcggttccta

SEQ ID NO: 38126 - DNA, 292 bp, Macaca Mulatta
ccgcgcttacccgggagagcattgaggacagttccccggcccggcgtcttgtgtcctgagacgattttttgctttccctcggtccccgtggggcccatagttctcacttctgccaccccagagtcgtcgcgcttcactagatctactccctccgctgtcccgaagagccacagacattcccagttctgaggctcgctcccgtcccgtgtcgctgttaccgtcctccggccccggctcatacaagcaggagcacatcgctcttttatgaaagcccttcaacatttaacgttta

SEQ ID NO: 38127 - DNA, 737 bp, Macaca Mulatta
ggggcttcaatccaccttgttttgcctgctctaggctggcatagtttttaggaaggaaatcccgtataacatgattagtttcttgactaggaaactgacactcagtgtccccatggtttggagtggtgtcacaatctgctgcttgaattgctttccccaccttaacagtgtcctggcaggtcaagctaactcagagaagcaagtctgtgaaaatgagaaggaactgaatgttgctcgtcttcctcagctgacttttcttcctgctcagaggattttactcttaacagtggaggctctcagggggcattgaattggctctgttgcttatttcttgattatgccagtggctattttgtccgtaataagaaagtctcattgtgtcgggaagctcctgggtttgacccaactctccctggctcctaagaaagaaccagagggaggttttaatttatctgacattgtctccatccttggttcacccccatccttgccataatgctctgaaccagacatctcatttatctttttgtctccaatccctctctaccgtctcttggttttagtataaaagaagtttacatctctaccaaactaataataaagtcaatgaaaaaatcaagtaagatagtgccaaatatcaaaggattcttggatggacaaacctttcaaagcttatgaaataatcctaaggtccagcaaacatgtagccctatggggcccaaatcctagccctttcc

SEQ ID NO: 38128 - DNA, 3759 bp, Macaca Mulatta
  misc_feature (1)...(3759): n = A,T,C or G
tcccccttagcacctctggtactgtaccgtaccttgcctttctgtccaggtttggtggaattgacctatatataaatggcataaagaggnnnnnnnnnnnnnnnnnnnnnnnnnnnnnnnnnnnnnnnnnnnnnnnnnnnnnnnnnnnnnnnnnnnnnnnnnnnnnnnnnnnnnnnnnnnnnnnnnnnnnnnnnnnnnnnnnnnnnnnnnnnnnnnnnnnnnnnnnnnnnnnnnnnnnnnnnnnnnnnnnnnnnnnnnnnnnnnnnnnnnnnnnnnnnnnnnnnnnnnnnnnnnnnnnnnnnnnnnnnnnnnnnnnnnnnnnnnnnnnnnnnnnnnnnnnnnnnnnnnnnnnnnnnnnnnnnnnnnnnnnnnnnnnnnnnnnnnnnnnnnnnnnnnnnnnnnnnnnnnnnnnnnnnnnnnnnnnnnnnnnnnnnnnnnnnnnnnnnnnnnnnnnnnnnnnnnnnnnnnnnnnnnnnnnnnnnnnnnnnnnnnnnnnnnnnnnnnnnnnnnnnnnnnnnnnnnnnnacagctttcaaagtcctacgaaaagattgaaaaggccctcagtgcaggggannnnnnnnnnnnnnnnnnnnnnnnnnnnnnnnnnnnnnnnnnnnnnnnnnnnnnnnnnnnnnnnnnnnnnnnnnnnnnnnnnnnnnnnnnnnnnnnnnnnnnnnnnnnnnnnnnnnnnnnnnnnnnnnnnnnnnnnnnnnnnnnnnnnnnnnnnnnnnnnnnnnnnnnnnnnnnnnnnnnnnnnnnnnnnnnnnnnnnnnnnnnnnnnnnnnnnnnnnnnnnnnnnnnnnnnnnnnnnnnnnnnnnnnnnnnnnnnnnnnnnnnnnnnnnnnnnnnnnnnnnnnnnnnnnnnnnnnnnnnnnnnnnnnnnnnnnnnnnnnnnnnnnnnnnnnnnnnnnnnnnnnnnnnnnnnnnnnnnnnnnnnnnnnnnnnnnnnnnnnnnnnnnnnnnnnnnnnnnnnnnnnnnnnnnnnnnnnnnnnnnnnnnnnnnnnnnnnnnnnnnnnnnnnnnnnnnnnnnnnnnnnnnnnnnnnnnnnnnnnnnnnnnnnnatgagaaaagcatctccctgtacagatactaagacacctttccttctggcctgggattcagtngtggaagaaattgttcatgatacaattactaggaacctacatgctttttataatatgctacgggcatatgaccttggagacacagggctcattggccgaaataatttcaagaaaatcttgcacgtcttctgcccatttttaacgaatgcacatttcataaannnnnnnnnnnnnnnnnnnnnnnnnnnnnnnnnnnnnnnnnnnnnnnnnnnnnnnnnnnnnnnnnnnnnnnnnnnnnnnnnnnnnnnnnnnnnnnnnnnnnnnnnnnnnnnnnnnnnnnnnnnnnnnnnnnnnnnnnnnnnnnnnnnnnnnnnnnnnnnnnnnnnnnnnnnnnnnnnnnnnnnnnnnnnnnnaaaaccacccagatcaagaagatgaccacagaagaagtgattgaaaaattcaaaaactgtatacagcttcaggacccagaattcaaaaaacgatttcttgacttcagcaaggagcctaatggaaaaattaacatgcgtgactttaagaaggtannnnnnnnnnnnnnnnnnnnnnnnnnnnnnnnnnnnnnnnnnnnnnnnnnnnnnnnnnnnnnnnnnnnnnnnnnnnnnnnnnnnnnnnnnnnnnnnnnnnnnnnnnnnnnnnnnnnnnnnnnnnnnnnnnnnnnnnnnnnnnnnnnnnnnnnnnnnnnnnnnnnnnnnnnnnnnnnnnnnnnnnnnnnnnnnnnnnnnnnnnnnnnnnnnnnnnnnnnnnnnnnnnnnnnnnnnnnnnnnnnnnngacccctattctgccttctttaanatagacactgacagggatggcataatcaacatgcatgaccttcacaaattgctcgggcacctactgtttaatctcagagacgacgannnnnnnnnnnnnnnnnnnnnnnnnnnnnnnnnnnnnnnnnnnnnnnnnnnnnnnnnnnnnnnnnnnnnnnnnnnnnnnnnnnnnnnnnnnnnnnnnnnnnnnnnnnnnnnnnnnnnnnnngaccaaaacagaaggtcgcggattcagaactagcttgtgaacaggctcatcagtatcttgttaccaaagcaaaaaacagatggtcagacttgtctaagnnnnnnnnnnnnnnnnnnnnnnnnnnnnnnnnnnnnnnnnnnnnnnnnnnnnnnnnnnnnnnnnnnnnnnnnnnnnnnattcccctcacaccaagagagtttgaaaagctttgggcaannnnnnnnnnnnnnnnnnnnnnnnnnnnnnnnnnnnnnnnnnnnnnnnnnnnnnnnnnnnnnnnnnnnnnnnnnnnnnnnnnnnnnnnnnnnnnnnnnnnnnnnnnnnnnnnnnnnnnnnnnnnnnnnnnnnnnnnnnnnnnnnnnnnnnnnnnnnnnnnnnnnnnnnnnnnnnnnnnnnnnnnnnnnnnnnnnnnnnnnnnnnnnnnnnnnnnnnnnnnnnnnnnnnnnnnnnnnnnnnnnnnnnnnnnnnnnnnnnnnnnnnnnnnnnnnnnnnnnnnnnnnnnnnnnnnnnnnnnnnnnnnnnnnnnnnnnnnnnnnnnnnnnnnnnnnnnnnnnnnnnnnnnnnnnnnggggagtcagccggcatgataattccatcaattacctcgacttcctgagagcagtggagaacagcaagtcaacaggagctcagcccaaggaaaaggaagagagcatgccaatcaattttgcaacgctgaatccacaggaggttgtgaggaagatccaggaagtagttgagtcctcccagctggctttgtccacggnnnnnnnnnnnnnnnnnnnnnnnnnnnnnnnnnnnnnnnnnnnnnnnnnnnnnnnnnnnnnnnnnnnnnnnnnnnnnnnnnnnnnnnnnnnnnnnnnnnnnnnnnnnnnnnnnnnnnnnnnnnnnnnnnnnnnnnnnnnnnnnnnnnnnnnnnnnnnnnnnnnnnnnnnnnnnnnnnnnnnnnnnnnnnnnnnnnnnnnnnnnnnnnnnnnnnnnnnnnnnnnnnnnnnnnnnnnnnnnnnnnnnnnnnnnnnnnnnnnnnnnnnnnnnnnnnnnnnnnnnnnnnnnnnnnnnnnnnnnnnnnnnnnnnnnnnnnnnnnnnnnnnnnnnnnnnnnnnnnnnnnnnnnnnnnnnnnnnnnnnnnnnnnnnnnnnnnnnnnnnnnnnnnnnnnnnnnnnnnnnnnnnnnnnnnnnnnnnagtttgacaggctctggaacgagatgccagtcaatgccaaggggaggctgaaatacccggacttcttgagcaggttcagttccgagagagcagccacaccaatagccactggtgactcagccgcggcccagagagggagcagtgtccccgacgtctcggaaggcatcagatctgccctctcattgcccaatcaggagctgagaccagggtcaaagtcgcagagtcacccctgtnnnnnnnnnnnnnnnnnnnnnnnnnnnnnnnnnnnnnnnnnnnnnnnnnnnnnnnnnnnnnnnnnnnnnnnnnnnnnnnnnnnnnnnnnnnnnnnnnnnnnnnnnnnnnnnnnnnnnnnnnnnnnnnnnnnnnnnnnnnnnnnnnnnnnnnnnnnnnnnnnnnnnnnnctcttgtggagaattcaacctggacataagcaaagaggagtgtcagcagctcattataaaatacgact

SEQ ID NO: 38129 - DNA, 191 bp, Macaca Mulatta
gtgttctaattaccttaaaagaggaaagaaaggcttgaattgatcaatactagtttgaataagatacttacgtgaacaagcattctcaacattattattaaagtaaaactactcagtttacagaatgggatctgaaactacagctttttgctattaaaccaaatacttgtgatttacttcgtttgagcaaa

SEQ ID NO: 38130 - DNA, 179 bp, Macaca Mulatta
aaaaccaccctaatacccccctcacatccaggtctcagggggaaatcagaccatccccaaggctttagaagttagacacagaagctgaagtctctccatttttcttaaagacccacctcttggggatgaagttctaagaggctaagaggagttccgaggctgtagcccaggtgggatga

SEQ ID NO: 38131 - DNA, 592 bp, Macaca Mulatta
ctgatattttaatggaaatacggaccaagtttacaacatttcaaatgcaaatcacacggaaaggtgactaagtacagaataccaaatgtgatttaaaataaagataacctgctgctgcatataatacaggttgggtttagagcttggagctcagatgtcagacagcaggaggaataaaaatgctacttgtgaaaacccaggctataggtaaaactgtctctgttggttgcactggtgggttgggactttctcctgaactggccttgaaatcctatcctgacctgcaggcaggtgctcaggatgtaacactgtgcaggggcagcaacagccagggctgaccctgatcacaccccaccaatttcccctacggttccaggtcaacatgacctttcttgagggaacacaggggaataggtgaatcatttctgagaaaacctcaggatctttccccaaaatcagtacatatgaccactcccaagtcgacattgccccagttttgccctaaaatcttatcccacaaagctctttttggcaccctacactttggctcacagtctcctctccccagtacaaaagcagcctaaaatcaggc

SEQ ID NO: 38132 - DNA, 321 bp, Macaca Mulatta
acctttgcagacggcctagtcaatatgcctttccagaggctcagacttgctgactcaaaaatctgcctcggctcacaacccctggtttaccacactggatccgtgcgtcaccgagcatgcacaatgcccgtggtttaattcaccttcttagtcaacagcgccaccatgcgttcgcttgcagtttcaaaatcttggagaaggtgtttttgttttgctttatcgtttattcttatcaaccctggttgacgctactggaggagtttctcatgttatatgaattaaataaatgcaatctagggaaataaaatgcgctcttatcta

SEQ ID NO: 38133 - DNA, 824 bp, Macaca Mulatta
gggtggcactgggtcatggtgtcctcatggctgggagctgcttccctcctgggatgccagaactcctttagggcacatcggcaactcctgcgctcaccactgaggggaagtgggaagggcagctgtccctatgcatgttctccttcaccttgtcctaggcaggtcccaggcagcaccaccctcccaagtggctccccttggccgctgtctctagtgttcacagccagaccctagaagagggctggactccgcggctcacttctgatgaatagaaccaggcaaaagagatggtggtctctcctgagattggattgggaggagctgaggttctgtccactggaactctccccctggctcttggtaggtgctagttctggcaaagccagtcacccgcccagggcagagggcaacctgaagctgatgccacagagagactggggccttcagtccaacagcctgcaagcaacagaatcctggcagcaacacagaagtgagcatggaagcagctcctcccctgatgagcctgagccttcagaagacacagcaaccctaagcagacacctgctgcagcccctggagaccccctgggggcaaagggccccaatgaagcttgccctgaactcctggccccaaggaagtaatcatttcccggcggtataaattgtgtgcctgggtgtggggcccttttggagtaaacttgtccaaggggacattataggaaccaggcccccccccttcaggttcctacatggggtggaaaactgtaacggaaaagcaagggcaatgtaaaaatcctttcccccctggaattaaaaaaggttcac

SEQ ID NO: 38134 - DNA, 408 bp, Macaca Mulatta
gcagccatggtttcttggggacaagatcgcccttgtggatttcattgcttatgatgtccttgagagaaaccaagtatttgagcccaagtgcttggatgctttcccaaacctgaaggacttcatctcccgatttgagggcttggagatctctgcctacacgaaatccagccgcttcctcccaagacctgtgttcacaaagatggctgtctggggcaacaagtagtgccttgaaggccaggaggtggcagtgagctgcccatactcaacctgctgcccagactgtgtagagcagctggactccacgccccagcccctgccttcttgttcttttctcctgtttattcccttctttacaaccaagactttattggccctcttcacttcccctaaacccctgtcccatccaag

SEQ ID NO: 38135 - DNA, 549 bp, Macaca Mulatta
cgaatcgcatggacttatccgacctcctcagaccccgcttccgccctgccccgggcccccacacccccgtaccccgggcattcgtgttggaggacggattcccggggccggcaggcaggcctgggcgctgccctctacacacctctgtcttcgctttgcgggtaaagccccctgggggggttgcggacgcgtcgggtttctttctttctgtatttgtacgttttatttatgaacggattgcactcgggtcagggagggggcgctgaacccccatcttgcccgccgacgccgggggcttggaatgtccgggattactttccacgccccgaggcccgcccctagctgggagcctctagggagcctcaggccccgcctctccgaggcaggcccctcccctgagacccaggccccgcccccactcggttgccaactttcgcccgtctatgccaaagcctcggcggcgaccctgccccaagggcccgccccattggccgccgcctttgtgacgtcactgcatgcagccccaccccctcctcccgaccctacccg

SEQ ID NO: 38136 - DNA, 139 bp, Macaca Mulatta
gatggtcaaatccttgaagaaggccatggccccagtcctgagtgatgtgactgtggagtggatcttccctgagaccactgaggtcctggtctcacccatcaacgccagctccctcttccctggagaacggctggtgggg

SEQ ID NO: 38137 - DNA, 763 bp, Macaca Mulatta
  misc_feature (1)...(763): n = A,T,C or G
ggctttgttagaaatagtgccaagttttcactacatctactctagtttctgtatttctttttgtacttttaaattttatacatctttttataacaattttatacaatttcctttactacaacatccaagcaattcattagatgactatagcccagatgaaggttaaatgcctattacatctgcctcattaaagaacttcattgtaattcttgggcagtttccagaccctgttacagaaatagagggctgtttctttttgttgtctttgaagttttcaaattaattcaaaactagtatctaattgtcctttttgctgtggtatgtggtgtaatgttgattgggaataagaattatggtacaaatagcagatgtttcaaattctcccatattagtctcttagggacactagcgccagagtccagcccctggggcaatagactctgtcaaacttgtgagaattttgcaggtgttacaataaatattgctgttaaaaactacgactcanaaccaaaagttgtgattaataacaacaggattattagcaataatattttgattaatactatagaatagcaaagagtgaatatacctcaaattgaaaacttttaggttgtggtccttggctctctctcttataaccctgggatctaaggttggaaaagctgtggcacccctggtttggggtgtccccatctaaccctgtttttctaatttctgcaaaattggctttggntcaaaactttcattttttaaagccctggcc

SEQ ID NO: 38138 - DNA, 793 bp, Macaca Mulatta
  misc_feature (1)...(793): n = A,T,C or G
ggaatgagaatcatgctttcgttcttaaaacacagaatagtacagaatatagatatcaacagataatggcgggaaattgtggtaagaaatatgtcaaagtaagtactgaagaattagagacgaaaagatctgttagcctctgggtgagttagggaaggtttcatgttgaggtgagctgtgtttgtagtctgaagtgttttaccaggctgaggggaacagcatgtgcaaaagcatgaaagtgtgaataaggtttgtgtgggggtggagcaagttcagtatgacccaagcataggttgcaaaagaggcctttgattgtgtagtgtagcactcagtaaatattgttggcacctgaaatcaatgactgtacattccaaactaatctgaaagctatttccttttgatgtgggtttggttttcttgttaatttcgaaatatacttttgaacactgagatctctgaaactgctagatctctagaagtgtaatttggaaagaaacttgcttgtagctttaacaaaataaggaatttcccaaataaaacttgttttgaagtttgaaaataaatactgttggtgggatagatgaataaatgaatgaatactgtgtatacaccagatattcttacatatgacctagaggaatggaactctttgcaaaagtatatttcatatttcagcttcaaaattgatcttttgaacatggtccttgcttacatgggaaaagcatattgtgagtcaaatactagtttatctttngggatttttgtctccctggttagttacaccaatgaaaca

SEQ ID NO: 38139 - DNA, 469 bp, Macaca Mulatta
  misc_feature (1)...(469): n = A,T,C or G
gggacatcctgggcctgaatctttaattcatgtcccttctgcagtgcctttcctctgaggccctcaaagggaaactgaggcctttgaggacatttgaggacatgaagactcgcattaggccaacgaaccttggaactccagatcgaagaggagaagaaagacctgactctgtgtgtatgtgtgtgtgcnnnnnnnnnnnnnnnnnnnnnnnnnnnnnnnnnnngcagaggggggtgtggtcatggggtattgccatgaacacacaaggggcaagaagcgtctgaaatcagagctaacttgggaggcacagaacacagggtgcctggaagggaaacagatgtattgtggggcacagggcaggctgggaggggaacaaaggtccactccatgggtaaccagacccttccgccagggctggccacttctgcctttggaaaatgtttcacaacgccccatgttatatgtatgt

SEQ ID NO: 38140 - DNA, 590 bp, Macaca Mulatta
  misc_feature (1)...(590): n = A,T,C or G
gccctcctgatcctcctgtctttcctcacatcctgtcattgccagagattttacagatatagatctggatcatttcctgccatctcttttaacacacaggcctccccaatctttctaacctaggacctacttggaaaggcatgctgggtctcttccacagcctttaagctctccctacaccagaatttaggtgagtgctttgaggacatgaagctattcctcccaccaccagtagccttgggctggcccacgcttgccaactgtggagcgggagcgggagggaggagtacagacatggaattttaattctgtaatccagggcctcagttatgtacaacatccatgccgtttgatgattccacaactccttttccatcttccccggaagcctgctttttaatgcccactcagtattatcagagcccagcctggaatcaaactgcgtttttcaaaatctgcctctatatactggctttgtgacctcagtcaagttgcttgaccattctcagtctcagtttctgcaactgtcnaacaggatttatgttaactttcagggctgtcaggattaaatgagtatgaacacataaaat

SEQ ID NO: 38141 - DNA, 802 bp, Macaca Mulatta
gggaaactactttggttttcctccagttgaatgggagctctgttttcactctattaaatcttgcaactgcacactcttctggtccatgtttgttccggctcgagctcagcttttgcttgccgtccaccactggtaaatgctgccgtcgcagacccgccatagacttcacccctcaggatctggcagggtttctgctgtgtttctgactggtgaggtgcccattgccgctcccgtttgggctaaaggcttgccattgttccttcacggctaagtgcccaggttcatcctaatcgagctgaacactagtcgctggtttccatggttctcttccatgacccatggcttctaatagagctataacactcaccacatggcccaaggttccattccttggaatttgtgaagccaagaaccccaggtcagagaataaaaggcttgctgccatcttgggagcagccaccaccatcttgggagctctgagaacaaagacccacctataacatttggtggcaactgtatggggattctccaaagtgtttgtctcttccaaaattgaagctgttaaactacaaattattcttcaaatggagccccagatgcaatctatgactaagatcaatcacagacccctggactggcctgcttacccatgctccgatgttgatgacatcgaaagcaccccctccccaggaaatctcaactgcaagacccctactatgccccaattcagcaggaagcaatttaaaacggtcgtccgcccaactttccccaaacacacttggggttttcctggttaaaaggg

SEQ ID NO: 38142 - DNA, 744 bp, Macaca Mulatta
  misc_feature (1)...(744): n = A,T,C or G
tggagagcgatgtgtccggacgtccgctcctcagcggatgtggcggccccgagccatggctctcgccgtgcgagtcgtttattgtggcgcttgaggctacaagtccaagtatcttcagctcaagaagaagttagaagatgagttccccggccgcctggacatctgcggcgagggaactccccaggccaccgggttctttgaagtaatggtagccgggaagttgattcactctaagaagaaaggcgatggctacgtggacacagaaagcaagtttctgaagctggtggccgccatcaaagccgccttggcccagggctaatgcgccctgaaggcagagtccagcgaccttgacccagcccctctcagcagacgcttcatgataggaaggactgaaaagtcttgtggacgcctggtctttccctgatgttctcgtggctgctgttgggggcagagattgacgccgctggtctttgcctctgtgtgggagtctgtgtgtatgtgtcttccccggaatccacaccaccccaccctcctcctgtcccctggtttcatcgtctctctttgcataccccatgtcttccccagttgtcccctggagtttgggggacgtcccgcctcaggcatccttctcaaggggaagccaagagaggcatcaggatgggtgagtttctgattgcggcgacgtttgcaaccattcacgattcaataaatactggaggaattgaannnnnnnnnnnnnnnnnn

SEQ ID NO: 38143 - DNA, 748 bp, Macaca Mulatta
  misc_feature (1)...(748): n = A,T,C or G
ggnnnnnnnnnnnnnnnnnnnnnnnnnnnnnnnnnnnnnnnnnnnnnnnnnnnnnnnnnnnnnnnnnnnnnnnnnnnnnnnnnnnnnnnnnnnnnnnnnnnnnnnnnnnnnnnnnnnnnnnnnnnnnnnnnnnnnnnnnnnnnnnnnnnnnnnnnnnnnnnnnnnnnnnnnnnnnnnnnnnnnnnnnnnnnnnnnnnnnnnnnnnnnnnnnnnnnnnnnnnnnnnnnnnnnnnnnnnnnnnnnnnnnnnnnnnnnnnnnnnnnnnnnnnnnnnnnnnnnnnnnnnnnnnnnnnnnnnnnnnnnnnnnnnnnnnnnnnnnnnnnnnnnnnnnnnnnnnnnnnnnnnnnnnnnnnnnnnnnnnnnnnnnnnnnnnnnnnnnnnnnnnnnnnnnnnnnnnnnnnnnnnnnnnnnnnnnnnnnnnnnnnnnnnnnnnnnnnnnnnnnnnnnnnnnnnnnnnnnnnnnnnnnnnnnnnnnnnnnnnnnnnnnnnnnnnnnnnnnnnnnnnnnnnnnnnnnnnnnnnnnnnnnnnnnnnnnnnnnnnnnnnnnnnnnnnnnnnnnnnnnnnnnnnnnnnnnnnnnnnnnnnnnnnnnnnnnnnnnnnnnnnnnnnnnnnnnnnnnnnnnnnnnagcctactctggattattccgcaggccctacagctacattggaaagaaccccaattcatgcttgtaaggcgtccccttccatccttcacctagagtaaggaggggaaagtttttgaataat

SEQ ID NO: 38144 - DNA, 592 bp, Macaca Mulatta
taaaacacagcgcttatactgccatcctagatgctcaccttccaagattcaacttggctaaaacatcttctggtaaattgtgtgtccacgttcattttgtcaatagccaggaggaatgggaatggggatgggggaaatatgaattagtggggcatagacatccctggtccatcctttctgtctccagctgtttcttgcaacctgctctccggcttgctggtccctgacacagagaccattgcctcccccacagccttttgactgaagagcagctttggagacctagagtaaaatggctgatggaagttgtggggcatatttccatttcctttagtcattagaggtagcagggagggatctctaagtttggagattgagcagatgaggcttcggatgcccctgctttgactttagccatggatgaggagtgggatggcagtaaggtggctgctgcagtgggagttgtgccagaaacagtggccaattgtatcccctataagacagggtaaggtctgaagaagcttgagcctgttaattctgctgtaattaatgatagtgctccagaaatgccttgatttgctgtacagtgcca

SEQ ID NO: 38145 - DNA, 710 bp, Macaca Mulatta
  misc_feature (1)...(710): n = A,T,C or G
ggggtcttttcgaggtgggagccgactggtgtgaggtatggtgctgggtgtagatgcaatgtggctctcgatagcaccttatggacagttgtgtcccaaaggagggatgacaatagctactgaagtcctaaagagcaagcctaactcaagccattggcatacaggcattagacagaaaattagaagttgaaatggtggagtgcaacttgtctggaccagctttatttttctggtgccgatgtttggagaccttttaaaggtatggagagtcgacttgactacaccgtgtggagcaagttttaaagaagcaaaggactcagaattcatgcttgaagaaatgcaggcagacctgttatcctaaactagggtttttaatgaccacagcaagcaagcatgtagctttaccgcttgaaagcggtcttgcctcatccaagctggagtgcagtggccctttgaggcttactacagcctcagacttctgnnnnnnnnnnnnnnnnnnnnnnnnnntggtctttgtagacagcctgatggagtctcatggcacaagaagattaaaacagtgtctccaattttaataaatttttgcaatccgggaggaatgaaaggaacannnnnnnnncaaaatacctaaaataaataataaaaatttgttgggaacattctcgcgactatgaagaatcctctttcttacaccccccctccttttagat

SEQ ID NO: 38146 - DNA, 695 bp, Macaca Mulatta
  misc_feature (1)...(695): n = A,T,C or G
tcagaaggagaaccagctgatgattncagtgaattgtcacctaaacaatttattttcatattatccacataactttttctatgttatatttaaatatgaatggcaaattttggtttttagcttttaaaattttattatcctaataattttataaatgctaatatttcttttgttataagttatagcatctcataaagtttgttctatttgaactcttttagagtacttgagaaatgaatttagtctgcaggtagtaagtatgctactaaaatatgttagatctaaatccttttgtttgataataaaaatgcaatattgagaatcaaaacttgtttttaagagaactatagattctacacaacctgatttcaagtaattattcatagtatttaaagttgtcttggcaaagtgattgtaaaatcctataggacctattcacacttcttccttcttccatatacccctctggttttccccgtagttcccctacagtttcaagtttgttgaaacctgtttattttaatgggggattagaagaaaaacttggtgacttcttagcatgatggtgtatgtggtaatgcaaagtctgtaaaagtaaacatagtgtaacaaaaaagatgtcactgagtattttagatactagtgcaaataaagatagaaaatcttgatcataatgtcttgagtttggaaactgt

SEQ ID NO: 38147 - DNA, 780 bp, Macaca Mulatta
  misc_feature (1)...(780): n = A,T,C or G
nnnnnnnnnnnnnnnnnnnnnnnnnnnnnnnnnnnnnnnnnnnnnnnnnnnnnnnnnnnnnnnnnnnnnnnnnnnnnnnnnnnnnnnnnnnnnnnnnnnnnnnntgactgagangnnnggaaggggaaaagaaaccaattaaaattggcttattggctgtgggtatgttttacatgaagactgatgcaggcactcagcttngtaaccaggactgagtttgtagcatgtcttcagtgtgccttccatggtgtcagtttcaactcatagggtgctctaggctcttttcctatggtagccagatgaaagaagtgcttctagactttatatctttgtggcacacccttcagataattttttcagaaacctagaacttgctctcattaggtcaaattggatcatgttccatcccaacttgtggccagtggaatcagacatgttgattgcctagagtcagttatggctggccccttgtgtaggggatggggtcagctgcatatgatagctgcatggttgagaacaggacaaaatgactttcccaaaggaaaaattttgcttctgtttctgggaaaagaagacgtaggctgaagatgaccagcgaatgagcactagtcatgacaacattttgtaaaagaccgttgcagggttcacccacctctgggtagatgtcaatgtgtaatctttttatatgattattatctttctatgatcnnnnnnnnnnnnnnnnnnnnnnnnnnnnnnnnnnnnnnnnnnnnnnnnnnnnnnnnnnnnnnnnggtttccc

SEQ ID NO: 38148 - DNA, 686 bp, Macaca Mulatta
taagcccgggttaggtttctgtgtagctcctttgtttatgtaaagctagctcggcaggctctgggccttcttggctttgaggatgcactgacctgagagctatgggaaaaagtagccatgtctgtacaccagactataaagccaatatgtagcattgtctttgaaaatgaaaagcaataacgtgaaactatcattgatataagattttatttagtcttttctaagataccagggtatttttaaaacctgttttcttcccctcagcattaggatgttttcttatactgcttcaactgaagtaaattattcaaacagagctgttttgttttatttgtatttgtatttgcagctttatgcttaccaggggacttcataaacaagttggaagagaaaaaatagccaggacataaatatagaaataacccaatcacataagctttcatgagcatgggtgagggccttgtgggaaggatgaagaaaaatctttattagcaccagaatgatcgtgattaccttaggcataagtctgatttgagaagagacattgatatacaaagaaaggaaggattattcccctatgatttgtccacgtgtacaaggaaaaatagcttcagtatttactatttgacttcttgagtccagaaacctaatactgtcaactgcatcggcacagagcaagagaaagc

SEQ ID NO: 38149 - DNA, 835 bp, Macaca Mulatta
tctccttttccacaacacttctgtttcctttgaggaaaggacgagcattgttatacaggaatgctcattaatctccttgtgttttctttgttatgttttattaggaggtgaggacaagccagaggttcttggtgtgccctcagaagtctgcctgaagttctcaccaagctgctgggaaaatggggataaacacccgggagctgtttctcaacttcactattgtcttgattacggttattcttatgtggctccttgtgaggtcctatcagtactgagaggccatgccatggtcctgggattgactgagatgctctggagctgcctgctctatgccctgagaccccactgctgtcattgtcatgggatgccattctccacctgagggcacctgtgacctgcactcacaatgtctgctatggcgtagtgctaggattgattatatgttctctaaagatgctgctcccaagggctgccaagtgtttgccagtgaatgttagatttattccccagctcttaactgaaaatgtgttagacaagccataaagttaaaattaaactgtattcatgatgatgtaggattgttacaagcccctgatctgtctcaccacacatcccttcaaacggtctgcaaccaaactctaattcaacctgccagaaggaatgttagagcaagtctttgtcagcccttacagctatcatgtgaataaagttaagccaacttcaaaaacaacttctagaatttattttagcttccatgtgtgatagagcatttgacccttggctgggattggaatgacaagtgctaccgtatttctagcatttgaggtaagccaag

SEQ ID NO: 38150 - DNA, 790 bp, Macaca Mulatta
  misc_feature (1)...(790): n = A,T,C or G
gggtgttagttgcaccggggccatttgtagtttgggcaaccaaatgccttaattggaaaaaaggcattgtggtttcccctatgatctaaattgttacattttaccatttcatttagaaattggtttcactttataaaatgaagatttagttttcatattgcatacatagccgtatagatttcaaaattagcttgttaattcgtggcacttactattttggtgttggtaatgcttaaatgcttacttaaaaatgaagtactgttatctaagctactgtgtttagaaaatgttaagaaggagcatccagaaatttttatagaaaagtgtaaatggaagaagagataagatactgtgaataggctctcaaacttaaaaaagaaaaaactttgccagttttaaggacatattttgattctttcagtattcttaacacctttttaaacaaagttcttgaaagtacccactattattgggtttgttttatgccattattgattcttgatattcaagcatttacaatgtagcatatttgnnnnnnnnnnnnnnnnnnnnnnnnnnnnnngcatcattaacatttcatttgaaatgcatattgctcttgaagtactttgctttttagcataaatgttgtgccattttatcctaatgttttggatgaaaaccttttgtgattgatttaaccttttcctttcaatttggcctttgccaatatttaaataaaatggtacccctttaatttttcccaacccatggcccttaccactttttggaattttgcaaccaaccaaat

SEQ ID NO: 38151 - DNA, 853 bp, Macaca Mulatta
gtatgattacttttctctggatactgattcgttttgtacagtgttagaatactgtgaggggaatgatctgaacttctatctgaaacagcacaaattaatgtcacagaaagaggcccggtccattatcatgcagattgtgaatgctttaaagtacttaaataaaagaaaacctcccgtcgtacactataacctcaaaccagggaatattcttttagtaaatggtacagcgtgtggagagagaaaaattacagagcttggccttttgaagatcatggatgatagctacaattcagtgggtggcatggagctaacatcacaaggtgctggtacttattgctgtttaccaccagagtgttttgtggttgagaaagaaccaccaaagatctcaaaggtgatgtgtggtcggtgggtgtgatcttctatcagtgtttttctggagggaagccttttggccataaccagtctcagcaagacatcctgcaagagaatactatttgtaaagctgctgaagtgcagttcccaccaaaatgagtagtaacacttgaagcaaaggcgtttattccacgacgcttggcctaccgaaaagaggaccccattgatgcccagcaactggcgtgtgaccccctacttgctgcatcgtatctgaaaattggtctctgtgagtagccctgctggagctgctattgcatcaacctttggggcgtccaatagcagttcttcgaattgagaccgactccaaggtcacagactgttcaacacgcacaaagtggacaaatggcatttagcagcagatttggaacatagcaattttgaatggatctgaggaaacctgaaccaggtgcttattttcttg

SEQ ID NO: 38152 - DNA, 506 bp, Macaca Mulatta
ctttttgccgagtttctgtgagaagtttctggaaagacagagccaaagggacgctggggtgtggggagcgcaaggaagcaagcgtttgaaaaaaagcgaaaaaccccaagcacaccgccacacctccaaccttcgagccacggcccaaacagagcccaagtccactgagaccctcatgcctgggaaaaagcatagggaccgtggcagccgctcctccctctgccactgcttagtccccgagattcctcagcatggggagagggcagggggtagccatgagaagcgtagagcgcccactggacgtttgcgaggtggaaagaaagccgaaacccaccctttggagccgcctccgcgcacgggccccctcgagtgggctcagtacgttaggactcagcgtggcagccgaagcattgggttgggggcgtctttcactaattttttctaggttttccctcctctcgggctctgtggtctcttccccgcccttcttcactttggtggcctga

SEQ ID NO: 38153 - DNA, 831 bp, Macaca Mulatta
  misc_feature (1)...(831): n = A,T,C or G
ggatttatgagcagatagactgttcccaccaatctcttggaacttcctacctggtgataggattggggagtcagaggaaaatgaagaaagaagaaaatgtgtcacttgagagcctgatggtctggctggcaatctggcatttcttataaccctgagctctagttaggatgggagttcagtttgnnnnnnnnnnnnnnnnnnnnaatggttaaaaggatagattaggccaggcatagtggctcatgtttgtaatccctgcactttatgaggtttcatcccttcagttattaaatatatgggccaggccaggcgcagtgannnnnnnnnnnnnnnnnnnnnnnnnnnnnnnnnnnnnnnnacagatcacaaggtcagtaaatcgagaccatcctggccatggccaaactggtgaaacccgtctctgctgaaaacaaaaaaattaactgggtgtggcagtgcccacctgtatttccagcttacttggtaggctgaaggcaagaaatcacttgaaccccggtagcataagttgccattgagccaagattgcaccatttgcactccaaacctgactgaaaaagggaaaattcgggcctcaatcatttagatggggccaaaagggatcttttcaggaaatatacctccggaatggaactcattttttccacttttaaaccccttacggtgattctccagttgaatggaataaaaaatgtgcagtccatagtcattttaataacatttttaatgagacctggccccctcggactgttaataacttacaaaaatttggaggtggtctttgtgggtggggccttaattatccatctatat

SEQ ID NO: 38154 - DNA, 628 bp, Macaca Mulatta
  misc_feature (1)...(628): n = A,T,C or G
gggataaacatgttttagtttatttttcacttacggttatatgtatttcccattgacaagaaaatgtaaacatagatcaatttcagcaaatgtaatctatggtttctaaatataatttccattaagacttgatcttgtattactatacaataatagaaatactaatgggaagatttgacctactccatcataatttgtaaaacatgcaatttttatgaagaaaaaacttaagaaaaatatgcttcaaatgatttcagaggcttagtgtctatgcagcctcaaatcaaacagaatttgttaaattttcatcacagttcactaactgtgatgtgttgagctttacggtagcaaaaacatgtaatagctttaaatcattaagtaaaaattagctgcatgaagagttctgtctgcacattccagtaatttcagtgatttcaccctttctggagtaggggtaaatttgataataaccccccggtggagaaatatttataagctggaccttgggcctccgtaaccttggacttacccaaaccggggtttaatcaaaaattccctggggggcaaaaaattcnnnnnnnnnnnnnnnnnnnnncgaaaccccctggaaaattttccccccccctta

SEQ ID NO: 38155 - DNA, 415 bp, Macaca Mulatta
atgaactcttttccaggatgcagcttgattgcagtgttcttaatgtttgggggaatcaatggagattcagtggtccagacagaaggccaagtgctcctctctgaaggggattccctgattgtgaactgctcctatgaaagcacacagtacccttcccttttctggtatgtccaatatcctggagaaggtctacagctcctcctgaaagccatgaagttcaatgacaaggaaagcaacaaaggttttgaagccacataccataaagaaaccacttctttccacttggagaaggactcagttcaagagtcagactcagctgtgtacttctgtgctctagacgtgagaggaggaaactgagagctggttgtctttggagtttggagcgagactttttgtgattccagatatccagaac

SEQ ID NO: 38156 - DNA, 364 bp, Macaca Mulatta
ggggctggccatgcctgagaagaaaagtcaaatgagacaatggacatgtccatgacttggacttaagttacatccagaaaatgcagggtcatgtgaaatatgggcctcctggaatccctacagtggatggagactggctcataccttgccagatccctctctcagttccagccttctggacaaggcctgggctaagcagagctgatttgttatctcttcacccactgccctctcagtatcaccagtctcaaagacagggtacatccctgtaacccaacctctcggttgactgatagcagaacagctctttttggtctgagaaggcaggataagtgaccacgtatttatgccactacctccacct

SEQ ID NO: 38157 - DNA, 729 bp, Macaca Mulatta
gggcattatcctttattcattatcttggtttaaatgagtttcaggtaattttcttaaggtactaacctttggacaaaagaagagggggagaaacacaaggaattggatgtctaaatgtggctggagaggaaatgtacatagaaaggggaaagacgctctgctgacttcttagtttggctcagggctggtaggcagggtagcttctggcttaaaggaagtatcaagcctcgtgatttaggactttgtgactcataatgtagagggtgatattgcttataggttctgtgggacacactgcattttcagcaaaatcttgcctttcaagaaatctaattacatggccccaagtctgaattcagtggtgctggagagctgcatgtagaagcatttaaagacatagaatgctgtgtcacacagaagttgtgtttaaccgattagcagattagttaacaagggcacagacatggcttagacagttgatgaagtgactattttaagtccttaatccctaagtgttatatcttaattgctttgatgaggcctgggattttttggttttggtagctcgttttgttttcactcgttgtgttgggatggggagaaacatatgcacatgcacacatatacacactctccgcctcaattccccttcagagacaaatgctgccaaaaacaaatgccctgtcccatgaatacctaattgggggtggaagggggtttctccctttt

SEQ ID NO: 38158 - DNA, 1042 bp, Macaca Mulatta
  misc_feature (1)...(1042): n = A,T,C or G
tgtactgattggctctttcaaagtagacctnnnnnnnnnnnnnnnnnnnnnnnnnnnnnnnnnnnnnnnnnnnnnnnnnnnnnnnnnnnnnnnnnnnnnnnnnnnnnnnnnnnnnnnnnnnnnnnnnnnnnnnnnnnnnnnnnnnnnnnnnnnnnnnnnnnnnnnnnnnnnnnnnnnnnnnnnnnnnnnnnnnnnnnnnnnnnnnnnnnnnnnnnnnnnnnccccaatgggtttccatcagagagaccctgggccagattctatgtgagactctacaaagcagaagggttgcccaaaatgaattcaagcatcatggcgaacgtcaccaaggcatttgtgggtgacactaaggacctggtggatccctttgtggaggtctcttttgctgggcagatggnnnnnnnnnnagtgcaaaagaactgtgctgatcctgtgtggcatgaacaggtgatcttcaaggaaatgttccctcccttgtgtcggagggtgaaaatccaggtgtgggatgaaggcagcatgaatgatgtagcactggcaacccatttcattgacctgaagaaaatctccaatgaacaggatggagacaaagnnnnnnnnnnnnnnnnnnnnnnnnnnnnnnnnnnnnnnnnnnnnnnnnnnnnnnnnnnnnnnnnnnnnnnnnnnnnnnnnnnnnnnnnnnnnnnnnnnnnnnnnnnnnnnnnnnnnnnnnnnnnnnnnnnnnnnnnnnnnnnnnnnnnnnnnnnnnnnnnnnnnnnnnnnnnnnnnnnnnnnnnnnnnnnnnnnnnnnnnnnnnnnnnnnnnnnnnnnnnnnnnnnnnnnnnnnnnnnnnnnnnnnnnnnnnnnnnnnnnnnnnnnnnnnnnnnnnnnnnnnnnnnnnnnnnnnnnnnnnnnnnnnnnnnnnnnnnnnnnnnnnnnnnnnnnnnnnnnnnnnnnnnnnnnnnnnnnntgaggaatttttactctttggagcattttttgaagctaccatgattgaccggaagattggagataaacccatcagctttgaagtttctattggtaa

SEQ ID NO: 38159 - DNA, 211 bp, Macaca Mulatta
  misc_feature (1)...(211): n = A,T,C or G
acccactcaacccagactatgaggagtccggtgaaagcagcagtagtggaggctctgagctggagccttctggccatcagctcttctgcttagaatacgaggcagacagtggagaggtcacatcagttatcgtgtatcaggnagggcgatgacccaggaaaggtgagtgaggaggtgtcggcacacacgcctctgcatccacccatgcgag

SEQ ID NO: 38160 - DNA, 450 bp, Macaca Mulatta
tattcccttaagataaaataatacgtaaaaatcactcagtagcccctaagtagaaaagacattatgaggaaaaatgacctttagcctagaatctgcatatacataactaaatcaacattcagtggggattaagtgccaaacgattagaagaaaaagccagaacaacaaagatgcaaaccattgcacaaacagcaggaaaaaatacaaaagaggaaacaataaagcacaggaaacagaattataaaaatcacatggcaagaaaagtttgaaatgcatgtattatacgtgaatgagcaaatttcccttataaaaaggttttttaaaaaagccacatcctatatacagaataggccatccaaacaaaatattattgctaggttgggtactggtgggtaaatggaaggaaatatagtataccgtatgtctgaatatagtagtgcaagcacaaca

SEQ ID NO: 38161 - DNA, 635 bp, Macaca Mulatta
  misc_feature (1)...(635): n = A,T,C or G
gggattctagagcccgaggcggccgacnnnnnnnnnnnnnnnnnnnnnnnnnnnnnnnnnnnnnnnnnnnnnnnnnnnnnnnnnnnnnnnnnnnnnnnnnnnnnnnnnnngttccaaagattttttttgcctagttatcaagcataatttttttttccccaatgatacaccctttcccacaacttttaaatttgtgtgtcattttttcctctttctcctatgcgctctcggagactcacatgaagattttcctgtttgatttttcttttttttctctgccaccctccttatttttttcaccctcctgtccccttgtctagtaattttacctttgggcatctcttctgatctttttttcggcccgcactcttattcttatttgtttttattaccnnnnnnnnnnnnnnnnnnnnnntcgcattattcttgtcccccgtttttatatttaattttgtgtcttcatctatttcgtattatgtttcctcacctttgccctcttcccttattccttttttcatcttggtgctcttcatcattctgtgtattttcatgttctctctctctcttttttatattactatttctttttctctctgacatatttccactacnnnnnnnnnnnnnnnnnnnnctct

SEQ ID NO: 38162 - DNA, 99 bp, Macaca Mulatta
  misc_feature (1)...(99): n = A,T,C or G
tgtgcgagaggaattgtagtggtatttactgctacctcactaaatatccctgatgcntttgatttctggggccaagggctcagggtcaccgtttcttca

SEQ ID NO: 38163 - DNA, 132 bp, Macaca Mulatta
ctaatcttccaattgccccctattgactttaaaccaaagctttgattcatgaccactgggatccaggcagcggggatttcttttcctgacggactgtaccaaggatctcacatttgcttaaacagcccccac

SEQ ID NO: 38164 - DNA, 1156 bp, Macaca Mulatta
ggagcagtagaagatagcatttggtttgacatggccttagtgagtcctgcctttcctagcatgcacacaacatcctctctttgagtttgggttctccccagccccttggcctctgaggctgagggtggcttcctcctgtcctcccatctcagcagttctatgacgctcccttccgcaggtgcggtttctgcccctccattcctggggtgtggaaaggcagccagacctctttttcagaagttgttggttccctgatttttgtcttgagcaggcaccatccttgtccccttgcttgcaggtcgaattggcacagagtaaggttccataataaactgttaggtgctcttgaagaagatgtcatggcatcaccttagcaccccagcaagagcattgcatctttgctgaatccagatgagttagcagagggcaaagtggaggattcctttgaggaagtgttctcagttgagcagttcagtccctctccccaaagactagacctgacctggcagattagcaggatcctcttcttttggccttttttgtgatgatgggagtgaggggggtaaatctcaaaagctatcaacaaagctcctgttctgcaggcatcaggaaaattaagtgtaagatggaaaaagcaaacagcctatttacaagtggaaacacgttggttctgatcactcctaacttgctgggtgatcatacatacatcatcatgaaggtgtgacatcagaatcatgagcaccatggctgcagttgtctgatccaaggctagttggcttggtagctgttggcagcagtttccctgggtcagaggccttcttctatcgctgctctcttcttcttgtcatccttaaacattcagtcacgttcccaggtctgcggggagcaatggccagaccagtttcagtgtctctggcaacagaaacaaggattgaaatggtggtagttaagagtgcagacacatctggggtgcaatgtctccatcatcctggtggctagccagtgctgggaggccctgcccgggggtaccagttgtgacaataaagggatggccctcctggcttcagcgtcctgcaggtagagcagcctcgttccttcacaagatggaaggcaggtgaggattgtcaggatgagatgggaccaggtagccgaggac

SEQ ID NO: 38165 - DNA, 298 bp, Macaca Mulatta
tatctggtgttagatttgaagttggcttttattggactaaaggggaactcctttaagggtctgttagcccaagtttcttttgcttatatgttaatagttttaccctctgcattggagagaagagcgctttactcccagaagctttcctcatggttcctgttgtctccatcatgccagccttcccaacctttgcagaaattactagagaggacttaaatgtgggacacagaaatcccatttgcagttaggaaatttgtgtccacaaggacaagaacaaagtatgagctttgaaactccc

SEQ ID NO: 38166 - DNA, 1255 bp, Macaca Mulatta
  misc_feature (1)...(1255): n = A,T,C or G
tgtgggccggctgcccgcgctgtgtagcgggacggcaggtcatttattggggaggcagcgttccctaagcaccttaccagcagcttccattttggtgtggaagagtgctctgagcaatggctgtttgtcgacactgggaaccagagcctcccatccctacgccagcttgagccacgcgctgcagacacaatgctgnnnnnnnnnnnnnnnnnnnnnnnnnnnnnnnnnnnnnnnnnnnnnnnnnnnnnnnnnnnnnnnnnnnnnnnnnnnnnnnnnnnnnnnnnnnnnnnnnnnnnnnnnnnnnnnnnnnnnnnnnnnnnnnnnnnnnnnnnnnnnnnnnnnnnnnnnnnnnnnnnnnnnnnnnnnnnnnnnnnnnnnnnnnnnnnnnnnnnnnnnnnnnnnnnnnnnnnnnnnnnnnnnnnnnnnnnnnnnnnnnnnnnnnnnnnnnnnnnnnnnnnnnnnnnnnnnnnnnnnnnnnnnnnnnnnnnnnnnnnnnnnnnnnnnnnnnnnnnnnnnnnnnnnnnnnnnnnnnnnnnnnnnnnnnnnnnnnnnnnnnnnnnnnnnnnnnnnnnnnnnnnnnnnnnnnnnnnnnnnnnnnnnnnnnnnnnnnnnnnnnnnnnnnnnnnnnnnnnnnnnnnnnnnnnnnnnnnnnnnnnnnnnnnnnnnnnnnnnnnnnnnnnnnnnnnnnnnnnnnnnnnnnnnnnnnnnnnnnnnnnnnnnnnnnnnnnnnnnnnnnnnnnnnnnnnnnnnnnnnnnnnnnnnnnnnnnnnnnnnnnnnnnnnnnnnnnnnnnnnngttcactatctgcattatatagaacaatatgaagaccctacaatattccatgatatttcattaagatgtaaaaggacacgtatcaagatgaagaaacaacccaaaggttatggcctctactgccacagggccatcattaccatctgcaggctcactggcatcaacgacatgtatgccaaggtctctgggtctgtcagtaggctcagccttacctggggcctcttccgtgggctctccagacagaaaacccatcaacagctggctgttaagaagggcctccatgttgtggaaatccaggaatgtggccctctgcccatcctggttgccttctcccaggggaccttgagtaaggatccggagacaaatgataaggttccagacatcaaactggactgggaagacatgaagactgcgcagggagagaagcgctctgtgcggcctggtttaaagagagccgcca

SEQ ID NO: 38167 - DNA, 112 bp, Macaca Mulatta
ctgtgtgtgcagtagtgttctaatacttatatgaacagtggctcaagcaaatttcaaaagaaatgtcttaatctcaatgtctactttcatgtgaactgggagttactctgaa

SEQ ID NO: 38168 - DNA, 140 bp, Macaca Mulatta
caggatatggagcctagtagatcatgcattaatagcaaggtgtaatatggaagaaccaattcgttgtgcagctgtcaatgcagatggaatccatcttgcccttggaatgaaggatggctcattcactgtacttagagtaa

SEQ ID NO: 38169 - DNA, 1278 bp, Macaca Mulatta
  misc_feature (1)...(1278): n = A,T,C or G
tgacatcagaaataggtttccaaactttctgggtattataggactctatgactatctccagcaattacacgagaacccccagtccctaggaacttatctacaggggacagcatctgccctcagccaaagccaggaacgaccaccaccagtaaacagagttcccccattgtcaccctcatctcaggagcccaggtcaggccagcctctccccaaggagtcagtagcaatcaagggaaggtcctcctgcccagctttcctgagataccccacagagaatggtactggaaaaggtggagaccaagatggtgcagggaaaagccctactggacatagcacaaacttgcctgatcttgtctcggggctgggagattctgccaacagggttccatttgttcccttaacctcttcccccacggcagccattcctggaatccctgagcctccctggctgccatccccaccttatccaagatctctgaggccagatggcatgaatccggctccacagttacaggatgagatacaaccacagctgccactgctgatgcaccttcaggcagccatggcaaacccccgtgccatgcaagccctgcggcagattgagcagggtctgcaggtcctagctactgaagcacctcgcctcctactctggttcatgccttgcctagcagggatgggtagtgtggcaggaggtatacagtctagagaagatccccttatgtctgaggatcctctcccaaatccacctcctgaggtgttcccagcactggactctgcagagctgggcttccattcccctccctttctccatatgctgncagatttagttagtacaaatccccagcagctgcagcctgaggctcactttcaggtgcagctgnnnnnnnnnnnnnnnnnnnnnnnnnnnnnnnnnnnnnnnnnnnnnnnnnnnnnnnnnnnnnnnnnnnnnnnnnnnnnnnnnnnnnnnnnnnnnnnnnnnnnnnnnnnnnnnnnnnnnnnnnnnnnnnnnnnnnnnnnnnnnnnnnnnnnnnnnnnnnnnnnnnnnnnnnnnnnnnnnnnnnnnnnnnnnnnnnnnnnnnnnaaacaaaatttactatgatgccctttactgtggaggcaatgttgttccagagtcaacgagcattacgaattgccaaaacatagtggaggcactgtgtatgagtcaaccacttgtaccactataccatcggggggccccggtctgagctctgcttatgcctatcttgagatgcaattacacccaatttccaatgtgaa

SEQ ID NO: 38170 - DNA, 498 bp, Macaca Mulatta
gcacaaggtaaaggtaatttacagcatgccacaaaacaatttgttttatttcttgactttccctaagcagataagcagtttcttctttaactcattactttgtttgatgtgtcttgcatatttttgactaaaagttataggaagttattcctctgggggaatcttttacaggtggaggaatggggatagcagtatagcctcagattcaaactggcatcaccctaaaccctgtaggccagggtggaatgaagtcagctcctttttatggttgaaatacaattttttattcaccattgtctgcacaaatccttgaaaataaacgttttttcccctacaatctttgtcaatttatttgtcacatgctgaatttattgaagtttgttcaatactcccctgtgttcagttcatagcctacctttttagttcacattagtgaataccatcattcctgttatcccgttgtgacagcactgaatatattatatagttcagaatctg

SEQ ID NO: 38171 - DNA, 2162 bp, Macaca Mulatta
  misc_feature (1)...(2162): n = A,T,C or G
ctggctgctttgtgccctacgccgtgtgtgtggtctccaggttcccctattacaactccctcaaggactgcctctcctggtgagctggggcaccagggggctgggggtggtggggggcagttctctgtgcctcccctagtgagctgggggaccgggggctgggggcgggtaggaggggggcagtctctgttgctcttaggctgctgcttaaggctgggggcagtgggcaggggggtgcggcagccaggcgctcctctctgtgactggtaacatacggtaatggcatggtaggaaagggataaagccacactgtgggaagtaaggttgatgtgcaggattttcattttgtttagattttcacaaagaggcatatattaggaaaaactcttttcctagctgggaatattaggaggctgctgtttgttccagtgaggtttattgacattttaaagatgaccttggctgggtgtggtggctcacacctgtaatcccagtgtattgggaggctaagatgggaggattgtttgagcccaggagtttgagacaagcctgggaaacatagcaataccctgtctctaaaaaacaatttaaaaactaactgggtgtggtggtatgtgcctgtagtcccagctactggggaggctgaggcagaaggatggcttgagcctaggggttcaaggctgcagtgagctgtgattgcaccacagcactccagcctagatgacaaagcaagaccctgccatcttgttttgtagaacctgtaactgtctccctgctgatagtaagtagaaaggctgagaacgtaaagaacttgtgaaaaatcagaaagacatcgtgtagaacccagtaggctctcgttatcaaaggatgcttttgtgacttcgggggctgtagtccgagttcagacatggtcagtcccagtgggcacttgtgcatggagccgtttcttttgagtctcgtaaagttacagtcttagaatttgtacttgtttgattaaaggtcgaggagaaagcagttaacaacgttcccttttgtgtcatcgtgctggagaatgagctatggcaaatcgctgaattggtgctattctgtttcttgaaaagcacagtcatttgagaccttctgccttgaccagagggatgagccccatggnnnnnnnnnnnnnnnnnnnnnnnnnnnnnnnnnnnnnnnnnnnnnnnnnnnnnnnnnnnnnnnnnnnnnnnnnnnnnnnnnnnnnnnnnnnnnnnnnnnnnnnnnnnnnnnnnnnnnnnnnnnnnnnnnnnnnnnnnnnnnnnnnnnnnnnnnnnnnnnnnnnnnnnnnnnnnnnnnnnnnnnnnnnnnnnnnnnnnnnnnnnnnnnnnnnnnnnnnnnnnnnnnnnnnnnnnnnnnnnnnnnnnnnnnnnnnnnnnnnnnnnnnnnnnnnnnnnnnnnnnnnnnnnnnnnnnnnnnnnnnnnnnnnnnnnnnnnnnnnnnnnnnnnnnnnnnnnnnnnnnnnnnnnnnnnnnnnnnnnnnnnnnnnnnnnnnnnnnnnnnnnnnnnnnnnnnnnnnnnnnnnnnnnnnnnnnnnnnnnnnnnnnnnnnnnnnnnnnnnnnnnnnnnnnnnnnnnnnnnnnnnnnnnnnnnnnnnnnnnnnnnnnnnnnnnnnnnnnnnnnnnnnnnnnnnnnnnnnnnnnnnnnnnnnnnnnnnnnnnnnnnnnnnnnnnnnnnnnnnnnnnnnnnnnnnnnnnnnnnnnnnnnnnnnnnnnnnnnnnnnnnnnnnnnnnnnnnnnnnnnnnnnnnnnnnnnnnnnnnnnnnnnnnnnnnnnnnnnnnnnnnnnnnnnnnnnnnnnnnnnnnnnnnnnnnnnnnnnnnnnnnnnnnnnnnnnnnnnnnnnnnnnnnnnnnnnnnnnnnnnnnnnnnnnnnnnnnnnnnnnnnnnnnnnnnnnnnnnnnnnnnnnnnnnnnnnnnnnnnnnnnnnnnnngaaagcagttaacaacgttcccttctgtgtcatcgtgctggagaatgagctatggcaaatcgctgaattggtgctattctgtttcttgaaaagcacagtcatttgagaccttctgccttgaccagagggatgagccccatggggagtgagctggaaccttactgttcaaatcaatgacttgtaattctaatcccagcactttag

SEQ ID NO: 38172 - DNA, 384 bp, Macaca Mulatta
gggtgggaacacttttttcaggtcctctatgactgtgagccttgtgcctggcccgaagtactgctcgttggactccagtgcctgttcttggctgctggcacagaaataaactccagaatcctcgagttctgcaggctgcaccttcagagtagaataggtccctccagtcctttcagctgagaatcgcttgttgggcataccggactcatcctgcatagacgctctcagaaagtatatcagaaattttatttcttttcccataacacgtcgataccaataaagataatcatgtccagaaattgggtcacatctcagagttacagcctggcccttctctattactctgtggctggggaactgagtaactccagcttctgtatgctc

SEQ ID NO: 38173 - DNA, 621 bp, Macaca Mulatta
ttggagctgaaattctgccaaatattatcaaaataagcttccttagcttaccaagtatcacaaggaaattctcttatacctctttttggtgggctaggggaagcatgctatgaagcagttgttcctgcttcatagttgtctttggcttggctttgacttctgccatggtttggacgggatcccatggtaggtgtgggaagtactggcctcccatctccccatactcaccttccagagctgttgatggacatgagctcttgggggagcctagagattcttttttcaatggtcatgtaagcattcaaggttgagcttcagaaagatgagggaggagtcatagctacagtaaagaaaagaacacattttatctgttgcctgtatacagtctcatagaattcttcatattttttataattgtgcattttaattgacagtcatatggtatttccgttaataacagcaaaggcattaaatcggtaccattgttccttctgcctgatgacttcttgtttgtaacacaatctgtattatcagaatcactttaaaccaaagcttttatattccctgtacacatagccgaaataattagcactgttacttctgtccacttgtaagctaata

SEQ ID NO: 38174 - DNA, 770 bp, Macaca Mulatta
gttctgcctgggcatctactccatgaatgtgctggggaatgccctcctcatagggctgaatgtgctgcaccctcacctgcacaaccccatgtacttctgtctcagcaacctctccctcatggacatctgcggcacctcctcctttgtgcctctcatgctagtcaacttcctggaaacccagaggactatctccttccctggctgtgccctgcagatgtacctgaccctggcgctgggatcaacagagtgcctgctgctggctgtgatggcatatgaccattatgtggctatctgccaggcgcttaggtacccagagctcatgagtgggcagacctgcatgcggatggcagtgctgagctgggggacaggctttgccaactcactgctacagtccatccttgtctggcgcctccccttctgtggccacaacgtcatcaaccacttcttctgtgagatcttggcagtgctaaaactggcctgtggggacatctccctcaatgcgctggcattaatggtggccacagctgtcctgacactggcccccctcttgctcatctgcctgtcttaccttttcatcctggtcgccatccttagggtaccctctgctgcaggccggcacaaagccttctccacctgctcagcccacctcacaatgtggtggtggttttttatgggacaatctctttcatgtacttcaaaccccaaggccaaaggaccccaacatgataagattgtcacattgttctatggggttgagatgctctcactgg

SEQ ID NO: 38175 - DNA, 4359 bp, Macaca Mulatta
  misc_feature (1)...(4359): n = A,T,C or G
gaagccgccacagctgtacgacactccctacgagcctgcagaaggggggcccagggcagaggggaaggcacggccccctgacagccggctgcccgagaatgacgagcggcccgcggctgagtatgagcagccgtgggagtggaagaaggagcagatcgtgcgggctctgtcannnnnnnnnnnnnnnnnnnnnnnnnnnnnnnnnnnnnnnnnnnnnnnnnnnnnnnnnnnnnnnnnnnnnnnnnnnnnnnnnnnnnnnnnnnnnnnnnnnnnnnnnnnnnnnnnnnnnnnnnnnnnnnnnnnnnnnnnnnnnnnnnnnnnnnnnnnnnnnnnnnnnnnnnnnnnnnnnnnnnnnnnnnnnnnnnnnnnnnnnnnnnnnnnnnnnnnnnnnnnnnnnnnnnnnnnnnnnnnnnnnnnnnnnnnnnnnnnnnnnnnnnnnnnnnnnnnnnnnnnnnnnnnnnnnnnnnnnnnnnnnnnnnnnnnnnnnnnnnnnnnnnnnnnnnnnnnnnnnnnnnnnnnnnnnnnnnnnnnnnnnnnnnnnnnnnnnnnnnnnnnnnnnnnnnnnnnnnnnnnnnnnnnnnnnnnnnnnnnnnnnnnnnnnnnnnnnnnnnnnnnnnnnnnnnnnnnnnnnnnnnnnnnnnnnnnnnnnnnnnnnnnnnnnnnnnnnnnnnnnnnnnnnnnnnnnnnnnnnnnnnnnnnnnnnnnnnnnnnnnnnnnnnnnnnnnnnnnnnnnnnnnnnnnnnnnnnnnnnnnnnnnnnnnnnnnnnnnnnnnnnnnnnnnnnnnnnnnnnnnnnnnnnnnnnnnnnnnnnnnnnnnnnnnnnnnnnnnnnnnnnnnnnnnnnnnnnnnnnnnnnnnnnnnnnnnnnnnnnnnnnnnnnnnnnnnnnnnnnnnnnnnnnnnnnnnnnnnnnnnnnnnnnnnnnnnnnnnnnnnnnnnnnnnnnnnnnnnnnnnnnnnnnnnnnnnnnnnnnnnnnnnnnnnnnnnnnnnnnnnnnnnnnnnnnnnnnnnnnnnnnnnnnnnnnnnnnnnnnnnnnnnnnnnnnnnnnnnnnnnnnnnnnnnnnnnnnnnnnnnnnnnnnnnnnnnnnnnnnnnnnnnnnnnnnnnnnnnnnnnnnnnnnnnnnnnnnnnnnnnnnnnnnnnnnnnnnnnnnnnnnnnnnnnnnnnnnnnnnnnnnnnnnnnnnnnnnnnnnnnnnnnnnnnnnnnnnnnnnnnnnnnnnnnnnnnnnnnnnnnnnnnnnnnnnnnnnnnnnnnnnnnnnnnnnnnnnnnnnnnnnnnnnnnnnnnnnnnnnnnnnnnnnnnnnnnnnnnnnnnnnnnnnnnnnnnnnnnnnnnnnnnnnnnnnnnnnnnnnnnnnnnnnnnnnnnnnnnnnnnnnnnnnnnnnnnnnnnnnnnnnnnnnnnnnnnnnnnnnnnnnnnnnnnnnnnnnnnnnnnnnnnnnnnnnnnnnnnnnnnnnnnnnnnnnnnnnnnnnnnnnnnnnnnnnnnnnnnnnnnnnnnnnnnnnnnnnnnnnnnnnnnnnnnnnnnnnnnnnnnnnnnnnnnnnnnnnnnnnnnnnnnnnnnnnnnnnnnnnnnnnnnnnnnnnnnnnnnnnnnnnnnnnnnnnnnnnnnnnnnnnnnnnnnnnnnnnnnnnnnnnnnnnnnnnnnnnnnnnnnnnnnnnnnnnnnnnnnnnnnnnnnnnnnnnnnnnnnnnnnnnnnnnnnnnnnnnnnnnnnnnnnnnnnnnnnnnnnnnnnnnnnnnnnnnnnnnnnnnnnnnnnnnnnnnnnnnnnnnnnnnnnnnnnnnnnnnnnnnnnnnnnnnnnnnnnnnnnnnnnnnnnnnnnnnnnnnnnnnnnnnnnnnnnnnnnnnnnnnnnnnnnnnnnnnnnnnnnnnnnnnnnnnnnnnnnnnnnnnnnnnnnnnnnnnnnnnnnnnnnnnnnnnnnnnnnnnnnnnnnnnnnnnnnnnnnnnnnnnnnnnnnnnnnnnnnnnnnnnnnnnnnnnnnnnnnnnnnnnnnnnnnnnnnnnnnnnnnnnnnnnnnnnnnnnnnnnnnnnnnnnnnnnnnnnnnnnnnnnnnnnnnnnnnnnnnnnnnnnnnnnnnnnnnnnnnnnnnnnnnnnnnnnnnnnnnnnnnnnnnnnnnnnnnnnnnnnnnnnnnnnnnnnnnnnnnnnnnnnnnnnnnnnnnnnnnnnnnnnnnnnnnnnnnnnnnnnnnnnnnnnnnnnnnnnnnnnnnnnnnnnnnnnnnnnnnnnnnnnnnnnnnnnnnnnnnnnnnnnnnnnnnnnnnnnnnnnnnnnnnnnnnnnnnnnnnnnnnnnnnnnnnnnnnnnnnnnnnnnnnnnnnnnnnnnnnnnnnnnnnnnnnnnnnnnnnnnnnnnnnnnnnnnnnnnnnnnnnnnnnnnnnnnnnnnnnnnnnnnnnnnnnnnnnnnnnnnnnnnnnnnnnnnnnnnnnnnnnnnnnnnnnnnnnnnnnnnnnnnnnnnnnnnnnnnnnnnnnnnnnnnnnnnnnnnnnnnnnnnnnnnnnnnnnnnnnnnnnnnnnnnnnnnnnnnnnnnnnnnnnnnnnnnnnnnnnnnnnnnnnnnnnnnnnnnnnnnnnnnnnnnnnnnnnnnnnnnnnnnnnnnnnnnnnnnnnnnnnnnnnnnnnnnnnnnnnnnnnnnnnnnnnnnnnnnnnnnnnnnnnnnnnnnnnnnnnnnnnnnnnnnnnnnnnnnnnnnnnnnnnnnnnnnnnnnnnnnnnnnnnnnnnnnnnnnnnnnnnnnnnnnnnnnnnnnnnnnnnnnnnnnnnnnnnnnnnnnnnnnnnnnnnnnnnnnnnnnnnnnnnnnnnnnnnnnnnnnnnnnnnnnnnnnnnnnnnnnnnnnnnnnnnnnnnnnnnnnnnnnnnnnnnnnnnnnnnnnnnnnnnnnnnnnnnnnnnnnnnnnnnnnnnnnnnnnnnnnnnnnnnnnnnnnnnnnnnnnnnnnnnnnnnnnnnnnnnnnnnnnnnnnnnnnnnnnnnnnnnnnnnnnnnnnnnnnnnnnnnnnnnnnnnnnnnnnnnnnnnnnnnnnnnnnnnnnnnnnnnnnnnnnnnnnnnnnnnnnnnnnnnnnnnnnnnnnnnnnnnnnnnnnnnnnnnnnnnnnnnnnnnnnnnnnnnnnnnnnnnnnnnnnnnnnnnnnnnnnnnnnnnnnnnnnnnnnnnnnnnnnnnnnnnnnnnnnnnnnnnnnnnnnnnnnnnnnnnnnnnnnnnnnnnnnnnnnnnnnnnnnnnnnnnnnnnnnnnnnnnnnnnnnnnnnnnnnnnnnnnnnnnnnnnnnnnnnnnnnnnnnnnnnnnnnnnnnnnnnnnnnnnnnnnnnnnnnnnnnnnnnnnnnnnnnnnnnnnnnnnnnnnnnnnnnnnnnnnnnnnnnnnnnnnnnnnnnnnnnnnnnnnnnnnnnnnnnnnnnnnnnnnnnnnnnnnnnnnnnnnnnnnnnnnnnnnnnnnnnnnnnnnnnnnnnnnnnnnnnnnnnnnnnnnnnnnnnnnnnnnnnnnnnnnnnnnnnnnnnnnnnnnnnnnnnnnnnnnnnnnnnnnnnnnnnnnnnnnnnnnnnnnnnnnnnnnnnnnnnnnnnnnnnnnnnnnnnnnnnnnnnnnnnnnnnnnnnnnnnnnnnnnnnnnnnnnnnnnnnnnnnnnnnnnnnnnnnnnnnnnnnnnnnnnnnnnnnnnnnnnnnnnnnnnnnnnnnnnnnnnnnnnnnnnnnnnnnnnnnnnnnnnnnnnnnnnnnnnnnntgtcttgagacaagtattttcctgtagtcctcattgctttgagttactccatctcccaggatattctctcgtgagaagaatgtcttttagtgaatttgccttgaatttagcatttgtagagctgtgtcagtgttgttcttgctcacacctcttttaaaaaatactctgcttgtgatgactgggcaagttcattgggttagtctcaggcctgtaagaatagagagtaaaggaccttgttatttactttgatgccatagttctatctatcaggatggcctgcaaaccactggccttatgtgtatttaagctaggaataaaataatggagaaatgttaatatgtctaccaaaaggtaaatattgatatacctactctctgttgggggcagaagtgtcatttcaagttattcaaagcactttcttaagcattttagaaagcctttattctttgctgttggaagtctccgtactttgcagaattggtatttgtgtactagcctctgccacaggatggggaggtgggcaggtagttgataaggcagccaggagtttttgaggcgggtgggaaattgtcctaatttgttaattggattatgtaactctgttactagtctgttattggctgttattattggacgcatcttgatactcag

SEQ ID NO: 38176 - DNA, 2997 bp, Macaca Mulatta
  misc_feature (1)...(2997): n = A,T,C or G
ngcgagaaactgcatgcggctgcaggtcctggagcttgaccatgtgtcagagatcacccaggaggtggcggcagaggtctgccgggaaggcctgaagggattggagatgctggtgctcacagcgactcccgtcacccctaaggccctgctgcatttcaacannnnnnnnnnnnnnnnnnnnnnnnnnnnnnnnnnnnnnnnnnnnnnnnnnnnnnnnnnnnnnnnnnnnnnnnnnnnnnnnnnnnnnnnnnnnnnnnnnnnnnnnnnnnnnnnnnnnnnnnnnnnnnnnnnnnnnnnnnnnnnnnnnnnnnnnnnnnnnnnnnnnnnnnnnnnnnnnnnnnnnnnnnnnnnnnnnnnnnnnnnnnnnnnnnnnnnnnnnnnnnnnnnnnnnnnnnnnnnnnnnnnnnnnnnnnnnnnnnnnnnnnnnnnnnnnnnnnnnnnnnnnnnnnnnnnnnnnnnnnnnnnnnnnnnnnnnnnnnnnnnnnnnnnnnnnnnnnnnnnnnnnnnnnnnnnnnnnnnnnnnnnnnnnnnnnnnnnnnnnnnnnnnnnnnnnnnnnnnnnnnnnnnnnnnnnnnnnnnnnnnnnnnnnnnnnnnnnnnnnnnnnnnnnnnnnnnnnnnnnnnnnnnnnnnnnnnnnnnnnnnnnnnnnnnnnnnnnnnnnnnnnnnnnnnnnnnnnnnnnnnnnnnnnnnnnnnnnnnnnnnnnnnnnnnnnnnnnnnnnnnnnnnnnnnnnnnnnnnnnnnnnnnnnnnnnnnnnnnnnnnnnnnnnnnnnnnnnnnnnnnnnnnnnnnnnnnnnnnnnnnnnnnnnnnnnnnnnnnnnnnnnnnnnnnnnnnnnnnnnnnnnnnnnnnnnnnnnnnnnnnnnnnnnnnnnnnnnnnnnnnnnnnnnnnnnnnnnnnnnnnnnnnnnnnnnnnnnnnnnnnnnnnnnnnnnnnnnnnnnnnnnnnnnnnnnnnnnnnnnnnnnnnnnnnnnnnnnnnnnnnnnnnnnnnnnnnnnnnnnnnnnnnnnnnnnnnnnnnnnnnnnnnnnnnnnnnnnnnnnnnnnnnnnnnnnnnnnnnnnnnnnnnnnnnnnnnnnnnnnnnnnnnnnnnnnnnnnnnnnnnnnnnnnnnnnnnnnnnnnnnnnnnnnnnnnnnnnnnnnnnnnnnnnnnnnnnnnnnnnnnnnnnnnnnnnnnnnnnnnnnnnnnnnnnnnnnnnnnnnnnnnnnnnnnnnnnnnnnnnnnnnnnnnnnnnnnnnnnnnnnnnnnnnnnnnnnnnnnnnnnnnnnnnnnnnnnnnnnnnnnnnnnnnnnnnnnnnnnnnnnnnnnnnnnnnnnnnnnnnnnnnnnnnnnnnnnnnnnnnnnnnnnnnnnnnnnnnnnnnnnnnnnnnnnnnnnnnnnnnnnnnnnnnnnnnnnnnnnnnnnnnnnnnnnnnnnnnnnnnnnnnnnnnnnnnnnnnnnnnnnnnnnnnnnnnnnnnnnnnnnnnnnnnnnnnnnnnnnnnnnnnnnnnnnnnnnnnnnnnnnnnnnnnnnnnnnnnnnnnnnnnnnnnnnnnnnnnnnnnnnnnnnnnnnnnnnnnnnnnnnnnnnnnnnnnnnnnnnnnnnnnnnnnnnnnnnnnnnnnnnnnnnnnnnnnnnnnnnnnnnnnnnnnnnnnnnnnnnnnnnnnnnnnnnnnnnnnnnnnnnnnnnnnnnnnnnnnnnnnnnnnnnnnnnnnnnnnnnnnnnnnnnnnnnnnnnnnnnnnnnnnnnnnnnnnnnnnnnnnnnnnnnnnnnnnnnnnnnnnnnnnnnnnnnnnnnnnnnnnnnnnnnnnnnnnnnnnnnnnnnnnnnnnnnnnnnnnnnnnnnnnnnnnnnnnnnnnnnnnnnnnnnnnnnnnnnnnnnnnnnnnnnnnnnnnnnnnnnnnnnnnnnnnnnnnnnnnnnnnnnnnnnnnnnnnnnnnnnnnnnnnnnnnnnnnnnnnnnnnnnnnnnnnnnnnnnnnnnnnnnnnnnnnnnnnnnnnnnnnnnnnnnnnnnnnnnnnnnnnnnnnnnnnnnnnnnnnnnnnnnnnnnnnnnnnnnnnnnnnnnnnnnnnnnnnnnnnnnnnnnnnnnnnnnnnnnnnnnnnnnnnnnnnnnnnnnnnnnnnnnnnnnnnnnnnnnnnnnnnnnnnnnnnnnnnnnnnnnnnnnnnnnnnnnnnnnnnnnnnnnnnnnnnnnnnnnnnnnnnnnnnnnnnnnnnnnnnnnnnnnnnnnnnnnnnnnnnnnnggaaagcccctcagtcctccaccttgttctggctgtgtgtgaaggatgtgtgtgagcaggcccaatcctttgcagcaggaatgacaggtcagagtatcccactgcacacgcacccccgggctgacagacttgtgccccccagccttcatgcatgcctgagcactggcagctttgcagcccctgccccaccagccccttgacgctcttcttttgttctctccttggggatgagccctgctgctgagtagggagcttttgcttgctgggaggctctatgcattgatttctttggcaaccatacagctagggctgaggatgggaacaaggacagagggcctggctatccccagaagcatttcatccatctttacccacccaaagggatccctccacatacccagtaagatgcaagaaaggaatatctgagagcaagcagccctgctccaggggacccaggtatgtgtagaggcccagtgggggtggccacttggtgtttctaccaccccctgccatccagtctggctccagtgcctacctgggaggttggtgtacttggcttaagtacttcatgctttatttaggctgcttccccacagcaccgacaggaaatgaagatgcacttacatgcatccctgcgggaataaagagtgggtgggctgcccagcaccacggcctttccccagccaggagagaccacgtaaggatcaaggcagctcctgttttcttggtcctgtgacactcgagtctgagccagcccctcaggaattgcctcaaaag

SEQ ID NO: 38177 - DNA, 765 bp, Macaca Mulatta
  misc_feature (1)...(765): n = A,T,C or G
ggtaatagtaaataataactattgatcactgacatagcataaccatacttgacattttaaatttacaaatattaatgaatactaatgcttgtgaaataaagtattgtataaagagtcctaactatatgaactcctttcttctttgacttgtgcacaatcaagactatctgattcatgtcaatagaatattagcaaaacaagaaatgcaatggcaatagacatatgaaaaatgtaaattattttgaataattaatatctactaatttaagcaaagatgtaattgttcacttctataattgatacagattatttcttaaatgagcacctctgatattagcaaagtatattaaaatgatttcttgggcactacagtaataaagtgtacattagtataactacctttgagataagtagaactagttataaaaatctgaaatactctcacccttggcctcagaattaatctttatatatttattctgaggaaatgaatttgatttataaacaatctataattgcaaaagcataaaaacaagcaaaataataggataatggttagttgaatgtttaataaacaaatgatgcagtattttcagcagtaacattcatattttaaaaagaattatgataaaatctatatgaagaactattaaaatatccngatggaaaggaaataaaaataatttaaaataaaataggagaataggtcccacggtttcattggaataagggcaggacctcctataattaattcaaagaatgttt

SEQ ID NO: 38178 - DNA, 196 bp, Macaca Mulatta
gggttcattagaccagtcattaaaagatacactcaagaaattttccatcgagaaacgctttgcctactggtcagggtatgtcaagtcattggcagttcacgtggccgaaacagaaggcagcagctgcacctccttgttagagtaccagatgctggtgtccgcctggaggatgcttctcatcattgccaccactcat

SEQ ID NO: 38179 - DNA, 697 bp, Macaca Mulatta
  misc_feature (1)...(697): n = A,T,C or G
ggggcagttcggcggtcctgcgggtctgtctcttgcttcaacagtgtttggacggaacagatccggggactctttcttccagcctccgaccgccctccgatttcctctccacttgcaacctccgggaccatcttctcggccatctcctgcgtctgggacctgccagcaccggttttgtggtgagctccggcttgccgaccagccatgagcgcccanattcntcanaattattccacggacntgnangcggcccctgcaccacccctgttcaatgtgtaacctgccaaggcctccctgcaaccctaccctcttcgtctggggccttcttaattttcaagccgccccattgaatgttgggcccttcttcgggaaaaggccggttgaagacccaactttttctttttcccgccgggaaaatttgggcccccccaaaagggaataaaaaagcccccccgaaaggggggccttaaccaaaaacccgtttccctcccctgggaaaaaaatggccaaaaaaaacccccaagccgggggggtctaaacacccctcctactttttttcttttttcccagggagaaccttcctaaaaaaaaagtcccccacccctgtaaaaaaaaacaaaaaatgtggggaggttaaaaaaaaccccccgcaaaaatggcccccttggaaaaaacccgccccccatggggtgccccc

SEQ ID NO: 38180 - DNA, 143 bp, Macaca Mulatta
aggagccttcatgatcccgttcctcatcctgttggtcctggagggcatccccctgctgcacctggagttcgccatcgggcaacggctgcggcggggcagcctgggcgtgtggagctccatccacccagccctgaagggcgtag

SEQ ID NO: 38181 - DNA, 918 bp, Macaca Mulatta
  misc_feature (1)...(918): n = A,T,C or G
tttatataacaaaggatttatttatctggatgtaccaatatctgatgacagttgtatagcagnnnnnnnnnnnnnnnnnnnnnnnnnnnnnnnnnnnnnnnnnnnnnnnnnnnnnnnnnnnnnnnnnnnnnnnnnnnnnnnnnnnnnnnnnnnnnnnnnnnnnnnnnnnnnnnnnnnnnnnnnnnnnnnnnnnnnnnnnnnnnnnnnnnnnnnnnnnnnnnnnnnnnnnnnnnnnnnnnnnnnnnnnnnnnnnnnnnnnnnnnnnnnnnnnnnnnnnnnnnnnnnnnnnnnnnnnnnnnnnnnnnnnnnnnnnnnnnnnnnnnnnnnnnnnnnnnnnnnnnnnnnnnnnnnnnnnnnnnnnnnnnnnnnnnnnnnnnnnnnnnnnnnnnnnnnnnnnnnnnnnnnnnnnnnnnnnnnnnnnnnnnnnnnnnnnnagctgacacagccagtgtaagcagcctgagtctgtctacaggacacacgaagcgcatcgcgttcctgtttgactccactcttactgccttcttaatgatgagaaatctttcnnnnnnnnnnnnnnnnnnnnnnnnnnnnnnnnnnnnnnnnnnnnnnnnnnnnnnnnnnnnnnnnnnnnnnnnnnnnnnnnnnnnnnnnnnnnnnnnnnnnnnnnnnnnnnnnnnnnnnnnnnnnnnnnnnnnnnnnnnnnnnnnnnnnnnnnnnnnnnnnnnnnnnnnnnnnnnnnnnnnnnnnnnnnnnnnnnnnnnnnnnnnnnnnnnnnnnnnnnnnnnngttttcctctggatctcttacgctgtgaaagccttcttggtctggaccctgcaacttgcagcagagttctaaacaaaaattacacgctgcttgtttccatggctcccctcaccaatgaaatccggcctgtcagcagctgcacccctcagn

SEQ ID NO: 38182 - DNA, 811 bp, Macaca Mulatta
ggagatggagtggggagaagtacaggaagctgctggtaatgtctcagagcctgatgagctcataggtgttcattatattataaataaagcaaataaaagggccatgcaaacatcaatgataataatgggttgtgaatcaaggattatgatgaatctacttctccgaacctgagtccctgtcacccataaaggaggagggaaggaagaggacatgttataaataggcagctcaaaaagaaaaagcctgaaaggccaataaatacgtgaaaagatattcagcctcactccaatcaggaaaatgcagcattaaagttagaaacaataaggtatcacttctacatcaacagatgagcaaaaactcaaaagtttcacaatataaagtactggaaaagatgcagctcaataaaattaccagtacaatgcagagggaatgtaatctgactactgtgtaaagcaatgtgtactatcgagtaaaggtgaagacaactttggagtgaaagacactcacgtgctatcacaccgaaattccactctcacgtcatgtccccagagaaatgcaaatacccctcatacccccctcagggaaacatgtataagaatgtccacatccgtggctatttacatttaatgaaaattttgaaaacactccaaaaaatatctgaccataaggagaaccggactaattatactggaaggacaggcccgggccccggggggctcccctcctgtaaatcccaagaacttttgggaagggcaaggccgggggggatcccccttgagggccagggaatttcaagaaccacgccttggc

SEQ ID NO: 38183 - DNA, 837 bp, Macaca Mulatta
  misc_feature (1)...(837): n = A,T,C or G
gggcatccacttcagtccctcagacatctcactgtttgccttatattttgtgatcctactttcattcctgctttacatctttttttacataatttctttgtctccagactctatttaattacatcttttttggnnnnnnnnnnnnnnnnnnnnnnnnnnnggagtcttgttctgttgccaaggctggagtgcaatgttgtnnnnnnnnnnnnnnnnnngcgctacttcccgggttcgtgccattctccgnnnnnnnnnnnnnnnnnnnnnnnnnnnnnnnnntcccgccaccatgcccggctaattttgnnnnnnnnnnnnnnnnnnnnnnnnnnnnnnnnnnnnnnagnnnnnnnnnnnnnnnnnnnnnnntctcgtaatctnnnnnnnnnnnnnnnnnnnnnnnnnnnaatttgagccaccacgcccgaccatttaattacatcttaaccatttctaaagccacagttcaagtactatgaaacattccttagctactgtggtacacattgacctttccttgacttcatagtgtgtagtgagttctgtacaatttagcacttaatcactcttaattttttttcaatgctgttctaataagctatttgaaggtggggacaacaactttcacatctttttatttttcacctggtagtaggactagtgaatatatttttttgtttattgcatttcttagaagcactttttattttttttccacataattaattcccgtggtttaaaacaataatgataattttcctcccaaaccagatatttaaaccggatggtgcatttttaccgaataaagggacctgacagccatttgataaattn

SEQ ID NO: 38184 - DNA, 315 bp, Macaca Mulatta
ttcttccctgaggctcaggctgacttcttccctcctggctccagctttggggttcagctgttaggtctccttctgccatcagagggcgccctgggacttttttaactggggagtgtagtcttgcacggccacccaaatgatgtgttgtgagagccgggtctgagccagccctcggctgtgcgggcacagacacaaactgagccttttggtccctgtccttagggaactcccagtcccatagaggatcctgacgggtagggtgatgcatccatgagaagggaggaaagaagtagagggactcacacagcaggaacg

SEQ ID NO: 38185 - DNA, 242 bp, Macaca Mulatta
aattacacaggatacattttaatttcatgaagagattaatgtagcccctataagtaatgattattcacaccactattcactggatttggatacatagttattttacgttttggcaaacataaaatacgagaaagatcagaatagaagatgaatgtatattaataaggacagtattttatgagtacacaggatctgttatatatccctatccattatgtaagttaatctatcatctatatcca

SEQ ID NO: 38186 - DNA, 696 bp, Macaca Mulatta
  misc_feature (1)...(696): n = A,T,C or G
aaaggtgagactcagacacattgaaagtgactgcatttagggaagtttaacgacttcttactgatcgttccaattcttcctggttaagataatttgccaacaggtttgtttccaagtcctctcccagcaccaggctcctggtattcaggggctcgtaggctgcatagatggcccctcttctgctgcccctgagcacagacaccaaaccagaggtggaggaagaacggtaggaaggctgattgcaaaggcagctgtgtgtcaaaggttattttaactttttattatttgttattgtttctgcaaatgctaacacgtaaactatgacctaacttttgtcacctttgatatctattgaatgttaaacatctctatttaataaagatggccagcnnnnnnnnnnnnnnnnnnnnnnnnnnnnnnnnnnnnnnnnnnnnnnnnnnnnnnnnnnnnnnnnnnnnnnnnnnnnnnnnnnnnnnnnnnnnnnnnnnnnnnnnnnnnnnnnnnnnnnnnnnnnnnnnnnnnnnnnnnnnnnnnnnnnnnnnnnnnnnnnnnnnnnnnnnnnnnnnnnnnnnnnnnnnnnnnnnnnnnnnnnnnnnnnnnnnnnnnnnnnnnnnnnnnnnnnnnnnnnnnnnnnnnnnnnnnnnnnnnnnnnnnnnnnnnnnnnnnnnnnnnnnnnnnnnnnnnnnnnnnnnnnnn

SEQ ID NO: 38187 - DNA, 1285 bp, Macaca Mulatta
gcacgaggactcaagctgtaccaaagactgtgtttaatgaactcaggtattcaaatttattatatataagtatatatatgtatatatggatcccttatatttagattttactcatagttttatttgaacgtagacaagaactctacaaaaacaggaagaatgtgtctttcttccgttcttgactactaatagatgtcattgaaatgtagaatctaaatgtgaaattatgaaaggatattctttactgcccactgaacacatatttaatatgtgcccagattattctaaaatctttaaaaaagatgcatatcatgaaattttttaaatgaatatacttttaataaagttttataactcacggacaaaacatatttcaatagtatatgagtatgagatttcttatcaagtatgagtaaaatattctatctgaatgcatttgaaggcatttacagtatttgatttcaacagttactgattatggtattttagagagcatgaaatatatcaaacacatcatttgaaggacgtatgtgatcttgactgtggttatgggttttttggtatgtattccttgttttgtattgatagcatctaattcctttatttgacaatcttaatatgtaggttcatttaaattttaagacagttcagtccatatataggagaagccttaagaaaaaagaaaacgggcaagcaaatatttgaagaaaattataaaactatagatttctttaggaaaaaaacagacataggaacagttttctcttcatatattatgattgtgaataataggaaaaattgtattaattcagtatttgtctgaattaatatgcagtattttaatacctacataagtctattttattattatattttgtgcttggtatatttattcctttatgtttttaatcactaacatattctacttaagagtataaaactccactaaataaattgtattgtatctggaatatacttgccattatgaagaacagctgggtataccattatttcaagcaatgagtctgaattctattagtttaaaaattgtaaaattcaagttaaatgatatgtatgatatataagcttaacacattttctatagcccttaattcagttgtgttaatttttcaatgtgatgtatcaacagctttttttattttgcatttattttttcaatgtgtttacattgtatgaattgagatttttgcccgcagattcttgatttgtagttgcttggcaggatttttctttgtgatataatcatttctataaaaaatatgat

SEQ ID NO: 38188 - DNA, 550 bp, Macaca Mulatta
ccctgaccttgctctgtgaaacttacagtgttttcagtacaggaaaatctgccttacgcatggcagacctgtcaagaaaatgaaggtgaactacccctgtaatttcctgttatttctttactgtcatttcctcatggcttacagtgctccttagagctgttgaatgagtccgtattttcccaacattaagcatccaccatcatggcaccagtcggagctgcgcctttcatccctgtggattaatcccactaatttgtgcatgcttttgctgtgccccctctgtgcaggacacgcataactaaggaggccggcagtgtatctctgcgtatgaagcaggtggaagaactgtgagtaggctgagagtcttgcagagcaccagtgtccactgctaccctgtccattctccctctgccgcttctcttgaaggcctttgttcatccagaaagatgaggtggtgggaggaacttgcctgtctgtgcagcagctttgcctcacaagggaagaggtcgcggtgcagatgtgttggttgatgactgcttatctcattggt

SEQ ID NO: 38189 - DNA, 799 bp, Macaca Mulatta
  misc_feature (1)...(799): n = A,T,C or G
ggcaaatatatttggccgtggtctctccttttttaaagatgtctctagaacttcctgaagactacagtgttttgtggaacatgacttaggaaatgttactagagtcatattgtagagttgcagacataggtggaatttttgaattttgttttacagaacttatttaggtagagcaattaataacttttttcacatgatacttttcatatacgttacaaattgttaagtatctcttaatagcagagatttcttagccctatttgttgtgcttaaaatatattttaattggtcaatgtgttacatttttagaaaagtgagaaagtaggctgggcacggtggctcgtnnnnnnnnnnnnnnnnnnnnnagaggctgagacannnnnnnnnnnnnnnnnngnnnnnnnnnnnnnnacctgaaccacatgtgnnnnnnnnnnnnnnnnnnnnnnnnnnnnnntagccaagcatgctctgtaatctcacctactctggaggccgaagcaggaaaatcgcttgaacccaaagggtgggaggttggggatgagttgagattaccccatttgcactccagcctaagccaaggagagcgaaaattccatcttctgaatagaaaacagaaactacacactatcgtaccttgctcggcccgccctgggcccctcctgagaaacttttctagaaccctttttgtttggaccgcccggggcccccagaaagtgtaatttgaaacatgggtctacaacctggtattccccacagaaaatccctgggttactccaactgagcgcctttggaaatt

SEQ ID NO: 38190 - DNA, 586 bp, Macaca Mulatta
aatagccagcaaaactgtggccaacatgttgattgatgacaccagcagtgagatctttgatgagctctacaaagtcaccaaagagcacactcacaacaagaaggaagcccacaagatcatgaaagacttaatcaaggtggcgatcaaaattgggatcctctaccgaaacaaccagtttagccaagaggagcttgtaattgtggagaagttccggaagaagctgaaccagaccgccatgaccattgtcagcttctatgaggtggaatacacctttgataggaatgtgctctccaatctcctgcatgagtgcaaggacctggtacatgaactggtgcagcggcacctgacgcccaggacccacgggcgcatcaaccacgtctttaaccactttgccaatgtggagttcctctctaccctttatagtctggatggagactgtagacccaacctcaagaggattcgtgaaggaatcaataagttgctagatgagaaaagtcctttaaatgccttccccactcctggacttagctgctttaaagttacagggactcaaccatgatctgggtgagaatcaagaacataagca

SEQ ID NO: 38191 - DNA, 962 bp, Macaca Mulatta
ggggtgggcgtctgcgctcggtttgagggctccgcgcggcatttcctgttctctcctctccgcggctgcagctcgggccttcggcctgatccagcccccatggcttcagaagagctacagaaagatctagaagaggtaaaggtgttgctggaaaaggctactaggaaaagagtacgtgatgcccttacagctgaaaagtccaagattgagacagaaatcaagaacaagatgcaacagaaatcacagaagagagcagaacttcttgataatgaaaaaccagctgctgtggttgctcccattacaacgggctatacagtgaaaatcagtaattatggatgggatcagtcagataagtttgtgaaaatctacattaccttgagtggagtgcatcaagttcccactgagaatgtgcaggtgcatttcacagagaggtcattcgatcttttggtaaagaatctaaatgggaagagttactccatgattgtgaacaatctcttgaaacccatctctgtggaaggcagttcaaaaaaaagtcaagactgatacagttcttatattgtgtagaaaggaaagtgggaaacacaaggtgggaattacctgaacccaggtttgaaaaagagtgccaaagaaaaagaagaagcccttcctatgaacaacttgaaacagaattcctagttggagggaattggattgaaatgtttctaaagaaaaattttatgaaagaatgggaagatgattgaatattgaaaaaaaaacccatttaattaaaagcctgggggtgggaaatccagggaaaagaaacgccaagccccaagggaagaaaccgggaaattttttgagaaaatttttaaggggcccctttttgggggaaactcggggaaatggggaaagtggggaaaaaatcccgggggggggttttccccccggttaggaggggaaaatattttgggggggaaacccct

SEQ ID NO: 38192 - DNA, 712 bp, Macaca Mulatta
  misc_feature (1)...(712): n = A,T,C or G
gggggggtttcttagaacattccctctgtgatgctggacccaccatgccggaggagccacagttccatccctctgagtcgttgctcatcaatcatactgggaagctgacttttattccgcacacttcaccactaactgcattagagagctgaaaaacttactcaaagtttagaatgtgataaacgtaatcaaattgctctagtcaaattctaacagtggtgaatagatgacactaattaccttttcttattatgctacaaatgtggtttactccatctttattcatgaagaaatatcatgcgacccaccgagaggactgcagcaggatgtaatattggcttatttgtttccttagttttacttctttctttaccagcatccaaaagatgaaattttaagctgcaatatatttatatgcagtagttttttacccactttggaagataattgctacccagtgcaaagcctcacaattctgcataaacaagtgcttttgaaactccagtaaaatgatataaacttttttttttgtggtggttggcacttacttttgtttcagagtaagtgatatatttttttttnaatgagttaacacagaaaaaaatgaagcatgtgcttaanaatgcatcgagatgagagaaattgaccactcattcagaaaaaatatgactatgcacagtaagttttctacatttacagtgaattnccacat

SEQ ID NO: 38193 - DNA, 691 bp, Macaca Mulatta
  misc_feature (1)...(691): n = A,T,C or G
ggggagcgaagctggggcgagggactgaggcagctgaaggctctagagtaaaacaacaggaaaaaagatctcccagaatctgcttccagactccctcacttggacagaagctagaggaagcctagtactggggaaagagaacccaggcttattccctttccactgtcccacaagccaacccgtccctctgtcctgtacacattcgacactggagccgtggattcttcaaacaacgtggaagcaccccagaacatagagtgtttttttttctgcaaaggaaggaacgttctctccaactaaagatgttggaaaggaccccggggacattctgccagaatttccccctcttggactgacttttttgtgtagattaactttctcttcaccctgttctcataaattctaaattattttcttccactcctaactgaacacgggaggagaaagggaatttggttttcaagatttgttcttctagtatctaattaagaagagaaagtgaaacataaagccagagagctganaatagccacgagaaagggcatgagcctgtctatcattacacacatgccgagctccctaccccgcagagatcgtgctcagcagaggccttctgagaagcaggaaaaaaacggnagctgtctttcaatttgtgacactccctaggagcaagaatacctgagaacaactc

SEQ ID NO: 38194 - DNA, 407 bp, Macaca Mulatta
ctgaggctgagaatgagttcatcaactgggtagccactgccgcaacagaagccaactgcagtcagtgctggctatgtgtcgggttgccagaggctgctgggaatgggctaccttggaggattgtccctgctaacatttctgaatggatatgccaataccaatgggagtggggtaacacttggtttggttttgttttgttttgcttttttgagccgaagcctctctctgccgcccaggctggagtgcagtggcacgatcttggctcagtgcaacctccacctcctgggttcaagtgattctcctgcctcagcctcccaagtagctgggactatgggcacacaccgccacgcccagctaactttttgtattttcagtacagacggggtttcaccgtgttgcccaggctg

SEQ ID NO: 38195 - DNA, 659 bp, Macaca Mulatta
  misc_feature (1)...(659): n = A,T,C or G
nnnnnnnnnnnnnnnnnnnnnaataataaagtatattttaatggactctactaaaacacaattcaaccacaaataaccacattattctttttcccttagttactagcaaaacttagaggcaaacccaacagctcctctcaaaatatttcaatcttcccattgatttacaaaaagtagttcaatnnnnnnnnnnnnnnnnnnnnnnggaaatattaaaaaccaaaccaacacttccatgtgaagtcttcagttactcaccaattgctaatgcaattgtgtctagttttgagattaggaatcagactacgcctgtgtccgtgctacagaaaaataatctatttttttccacactgaaatttaagagaacttattaaagttaacatattccattttaggaagtgaattataatgtgtaattattacaattatcacaactggaatgtgacagggttatttttcacagagcaaaaatttgtcagaaggagaaggaagaaaaagattatgaatgattaaatgaatttctattggatgtataaaaagtcaaaacttttcaacacacacagcttagctactggaattagtaactatttactcttgagactctcttttcagttatttgtgctactccttcttcttgttcttgtgcataaagagtgata

SEQ ID NO: 38196 - DNA, 793 bp, Macaca Mulatta
ggctgcccccaatccttcgtgccacccaacacccacagaaagtataactagcaactatctacagaccacacatcttttttgaaaacctccatacttggcaactgtcttgagacacctacgtcatttgtggaactgaaggaaaacaaattagatgagtaggaatgatctcactatgatgctgtccttcatcccccctgaagtcagtcagcacaatgccagacagagaatttccctgggcacacagtttccacagtggggaaaagaaaactggaggcatccaatcttccctaacactctgagacacctcccagaaagcccacttcagtctcaactcatggggaacagtggggttaaaggcataaactgcctggggtcagatagaaacaaaggaggcagagctcatagtgaccagcctacagaatcttgctggtatttttgtgtttttgacagctcaatcagtgataccagctgactttataaccactctttaaaactgagctgattgccttcataagtaaggtaagaagttcattttgcgttgagtctctagatagctaatctccgtgcttcacctcagagcatgacctaatgaccctgcccaggcaggggaactcccccccccatacattttggagaattagaaaggctagacccgctttgacctggagaaagcaaacgggccactccgcccaaaacctcccccaaaggcctcccccctgaatgggcaggccaatccctccaggcagggaatttcccaagggagcccagcccttcggggcccctggccggtccc

SEQ ID NO: 38197 - DNA, 767 bp, Macaca Mulatta
  misc_feature (1)...(767): n = A,T,C or G
gggtcagcagaggggacgaggtggccagcgaagaaggcagagaaaagaaggggctgaaactccaggaaacccatcactttccacatactgcagaagacagacccctctgagaaaggcattagaagtcagaggagggaaggagtatggataagccatgttagaccctctatgaggctgagataacaaagaaagaatgtccacagggtttggctcttaggacaaagccactggtaatttgcggtttctattactgttccccgcaagagaatgaggtcatagaaggcttgctcagctctacaagcttcagagaaaactcttagaaaacatcttctaaatgaagaaggaaagaaaaagacaaaacggcacaagagatgtttctttgagattcatttaaaacagcataactgtatcagaaagaaatctggtgaagagcaaataacatgtaaggaacttgaattttttttactctgttgtttatgttcaagaaaaaaaaataaagctacttatgtctttagaaaattgaagataaagttccaagtatgttgccaaatatataagatgtaaaagaatgaaaaaacatttatttaaatatggcagataatttttctttctaaagagttgtttaaaagattgttaatttgcatgacgcattgcaggtaagattctagttttcatatataattaaataattattatttcaatttgtttaatgaaagctagtacactggtatttaaaggaatgaattngctaccntttattggccacc

SEQ ID NO: 38198 - DNA, 780 bp, Macaca Mulatta
gggacagacacctaaatcctagcccagtgcccccccgagtctgtgtggacggtctggatcagtaattagaaacacagcgcaataaatattgaaagaagctctgtaaacattctagaggacaatgaaattagaaataataagcagatgggcttttattcaaagcaaatcacgccagatggactcagtacctttcttttttgcagtaaaagtacaaagttggtagataaaggaaaatggtacgcttgatgtcgtatgtttgaagattgttaaaacatttgagtcttccaagaagtttgatttgcagaattggctcagaatgcctggaatagaagcacatacctgacagaaaaaagttggataaatgctgctaattgggcaatagaaagtactggaacaatgggctgttgggacaacctcacaaggggtcttctaagagaccgtagagatcatcagttccaaccctctcaattaagagtaaagaaactcaatcaaaaggagacaattactcacaaaagcagggctaggaaaaaggtacttgacaattagttctgcagtgtgagtgcttggtctcctctttacctggtgtctctattatctaggaaaggaaatagatatggtcaagtctggtttttgaaaggatcctaaatacggagatgcaataatcgggaccctggccaccaaaccctgtatcaatcatgtcttctaaagagggtgggggcttcaaccaagtggaaaatgggggttgagaaaccaattggggaagttttgccgcagaccgaa

SEQ ID NO: 38199 - DNA, 3019 bp, Macaca Mulatta
  misc_feature (1)...(3019): n = A,T,C or G
caacccagttcctggtggcacatacggtgccctttgtattaaggatgaagnnnnnnnnnnnnnnnnnnnnnnnnnnnnnnnnnnnnnnnnnnnnnnnnnnnnnnnnnnnnnnnnnnnnnnnnnnnnnnnnnnnnnnnnnnnnnnnnnnnnnnnnnnnnnnnnnnnnnnnnnnnnnnnnnnnnnnnnnnnnnnnnnnnnnnnnnnnnnnnnnnnnnnnnnnnnnnnnnnnnnnnnnnnagatgaggctgaggcacacattgactatgaagataacttccctgatgacagatctgtgtcattcagagagctcatggaggattcccggacagaggcagaagaggacaggagtcagggagactcgtctgagaaggctccaaaacaggaccatctggtctccatttctgtggggagagaaaacatagcccaggataaaggctttgtgccaaccacaggcttgcctggcgctgggagcagtgtctctgcagactcgccaggatcgcggctgctccagaagcacttgttctggtttcctgctgaggctttccacaagcctgggttggaaaaggaggtggatgatgacaccaaaaagcagttttctgctggagacaaccacagtggtgtaaaattggtcccaggtgaacctgaaactaaggtgatctatgacaacactgatggtcccttggggccatttgtgggcaagaatgatagcaaggcaggggatccagtggtgagcagcggagatgagtcctggttnnnnnnnnnnnnnnnnnnnnnnnnnnnnnnnnnnnnnnnnnnnnnnnnnnnnnnnnnnnnnnnnnnnnnnnnnnnnnnnnnnnnnnnnnnnnnnnnnnnnnnnnnnnnnnnnnnnnnnnnnnnnnnnnnnnnnnnnnnnnnnnnnnnnnnnnnnnnnnnnnnnnnnnnnnnnnnnnnnnnnnnnnnnnnnnnnnnnnnnnnnnnnnnnnnnnnnnnnnnnnnnnnnnnnnnnnnnnnnnnnnnnnnnnnnnnnnnnnnnnnnnnnnnnnnnnnnnnnnnnnnnnnnnnnnnnnnnnnnnnnnnnnnnnnnnnnnnnnnnnnnnnnnnnnnnnnnnnnnnnnnnnnnnnnnnnnnnnnnnnnnnnnnnnnnnnnnnnnnnnnnnnnnnnnnnnnnnnnnnnnnnnnnnnnnnnnnnnnnnnnnnnnnnnnnnnnnnnnnnnnnnnnnnnnnnnnnnnnnnnnnnnnnnnnnnnnnnnnnnnnnnnnnnnnnnnnnnnnnnnnnnnnnnnnnnnnnnnnnnnnnnnnnnnnnnnnnnnnnnnnnnnnnnnnnnnnnnnnnnnnnnnnnnnnnnnnnnnnnnnnnnnnnnnnnnnnnnnnnnnnnnnnnnnnnnnnnnnnnnnnnnnnnnnnnnnnnnnnnnnnnnnnnnnnnnnnnnnnnnnnnnnnnnnnnnnnnnnnnnnnnnnnnnnnnnnnnnnnnnnnnnnnnnnnnnnnnnnnnnnnnnnnnnnnnnnnnnnnnnnnnnnnnnnnnnnnnnnnnnnnnnnnnnnnnnnnnnnnnnnnnnnnnnnnnnnnnnnnnnnnnnnnnnnnnnnnnnnnnnnnnnnnnnnnnnnnnnnnnnnnnnnnnnnnnnnnnnnnnnnnnnnnnnnnnnnnnnnnnnnnnnnnnnnnnnnnnnnnnnnnnnnnnnnnnnnnnnnnnnnnnnnnnnnnnnnnnnnnnnnnnnnnnnnnnnnnnnnnnnnnnnnnnnnnnnnnnnnnnnnnnnnnnnnnnnnnnnnnnnnnnnnnnnnnnnnnnnnnnnnnnnnnnnnnnnnnnnnnnnnnnnnnnnnnnnnnnnnnnnnnnnnnnnnnnnnnnnnnnnnnnnnnnnnnnnnnnnnnnnnnnnnnnnnnnnnnnnnnnnnnnnnnnnnnnnnnnnnnnnnnnnnnnnnnnnnnnnnnnnnnnnnnnnnnnnnnnnnnnnnnnnnnnnnnnnnnnnnnnnnnnnnnnnnnnnnnnnnnnnnnnnnnnnnnnnnnnnnnnnnnnnnnnnnnnnnnnnnnnnnnnnnnnnnnnnnnnnnnnnnnnnnnnnnnnnnnnnnnnnnnnnnnnnnnnnnnnnnnnnnnnnnnnnnnnnnnnnnnnnnnnnnnnnnnnnnnnnnnnnnnnnnnnnnnnnnnnnnnnnnnnnnnnnnnnnnnnnnnnnnnnnnnnnnnnnnnnnnnnnnnnnnnnnnnnnnnnnnnnnnnnnnnnnnnnnnnnnnnnnnnnnnnnnnnnnnnnnnnnnnnnnnnnnnnnnnnnnnnnnnnnnnnnnnnnnnnnnnnnnnnnnnnnnnnnnnnnnnnnnnnnnnnnnnnnnnnnnnnnnnnnnnnnnnnnnnnnnnnnnnnnnnnnnnnnnnnnnnnnnnnnnnnnnnnnnnnnnnnnnnnnnnnnnnnnnnnnnnnnnnnnnnnnnnnnnnnnnnnnnnnnnnnnnnnnnnnnnnnnnnnnnnnnnnnnnnnnnnnnnnnnnnnnnnnnnnnnnnnnnnnnnnnnnnnnnnnnnnnnnnnnnnnnnnnnnnnnnnnnnnnnnnnnnnnnnnnnnnnnnnnnnnnnnnnnnnnnnnnnnnnnnnnnnnnnnnnnnnnnnnnnnnnnnnnnnnnnnnnnnnnnnnnnnnnnnnnnnnnnnnnnnnnnnnnnnnnnnnnnnnnnnnnnnnnnnnnnnnnnnnnnnnnnnnnnnnnnnnnnnnnnnnnnnnnnnnnnnnnnnnnnnnnnnnnnnnnnnnnnnnnnnnnnnnnngaaatgttttcagagggccgaacaccaggatatcaagtatgggcacatatttgatggagaagcagaggaatctgtaaaagagtatgaaatgatctgtgctgatctgttctctagtgtggaaaccgggagctctgtggaaacagaatccatcctgtctgttgggcaaccgatttcatggcatctaaatcatttcttagggtggctcagccagtatggtttatggcagtggttctcaaagtgtggtcctcagaccagtagcatcagcatcacctgggaatttgttggagatgcaaatt

SEQ ID NO: 38200 - DNA, 492 bp, Macaca Mulatta
attattagattcattctaaacattttttggcacgaatacaggacatgactgtataatgcatcatatcaagaggcacataatgtaagggtatcttgattttagtctgtcagcttaactgtgatcagcttggatgattagagcttgttctgtacagtattaaagtaattactattgtagaaacctgtagattttccaacatttactaaaatatgaaaggattgagtagtttattattcatacttaaaatacttaatttatttttatctagagatgtttttatcaaaataagggcaaaaagtaaatacaatttttatccgtgaaaactctaaagtctttcaaagatctgtttaaatctatatagttttatgttttgtatttcctacttatcatttagcagaaatgatgaagaaattgttctgatggcttgcttttctgtccttttcctactgctttaaacattaattttcttttgtactaaatcgtatagccaat

SEQ ID NO: 38201 - DNA, 844 bp, Macaca Mulatta
  misc_feature (1)...(844): n = A,T,C or G
aaggagagcaaaattctgtaattgcaaacacagcttcttatctctcaaatatatccagatatntatgttaagctgcaaggaatctccatcagttaaaaccagcaattacattccaatgtaacatgaccgatgatttcaagagatcagggccttacttgattgcatctaaatgcaacttaattctcttcttgttcaaatatcctgtgttctctatcttattttattgcatagtttctttgcagaaattctgactcaaagcccttatttgatgtgttattttgtgaatccactctgtatcctaggtccagacccctttctgtttgctggcatagggcagttatctacaagatgccctaccttgcaggcacctatttgaactgatattccagaatccactagaacccatatttctctgttttgatccaaatgtgtggagttttaataattttctaagtacccactatgtggcaggtatacacactagacattttatcatttattctacccaagagcctgagtgaaagatgggcagtcatttgatccccattttaagttcaggcacttaaagtttactgaagttaaatgactttcttaaggtgacatagctagtgattcgaccaaccagaatcaaaaagctgtatgattccaaagtccatacccttcacatccacaatgcctcctgattaagaactttgcttccatcacttactttctaccaggtctaatgagatctgattggctggggcacccggccacattttcagcagtacccagtgcctctctctctatgtgtgtgtcctacatttcagtcagggttgtgtttttcatacagtccttatatgca

SEQ ID NO: 38202 - DNA, 180 bp, Macaca Mulatta
ttcctgagcctccagatgccctagaagcagacactttcccagatgaaattcatcaccctaagatgactgtggcagttatcatttaatgatgctcatgtatccaaattcagtgaccaatatagcacagaactgatgaatagtgttatggtcagaacagaagaagaaatttctgacaccgac

SEQ ID NO: 38203 - DNA, 769 bp, Macaca Mulatta
  misc_feature (1)...(769): n = A,T,C or G
gggacatgtgaccggaagggaagtaacgtcagccttgagaactgagtagcggtgccgtgtggcgccttgttctagagaactgaatagctgtactgtgtggcgccttgttctaggcacttcttggacaccatgtctcacctgccgatgaaactcctgcgtaagaagatcgagaagcgcaacctcaaattgcggcagcggaacctaaagttgcagggggcctcaaatctgaccctatcagaaactcaaaatggagatgtatctgaagaaacaatgggaggtggaaaggttaaaaaatcaaaacattgtgtgaatgtgggcttatcagaaactcaaaatggaaacatgtctcaagaagcagtgggaaatataaaagttaaaaaatctccccagaaatccaccgtattaaccaatggagaagcagcactgcagtctcccaattcagaannnnnnnnnnnnnnnnnnnnnnnnnnnnggaaaacggtgaatgatgctgggcctgatgcaaaaaaagcaaaaactgaaaacaaaggggaatctgaagaagaaaatgccaagactcctaaagaaacagaaaataacgtggagaagccagataatgatgaagatgacagtgaggtgcccagcctgccccctgggactgaacggagctttttgaggatacttcatttgcttctctatgtaaacttgtcaatgaaaacactctgaaggcaataaaagaaatggggttttacaaacctgaactgaaaattcagcattaaaacatccgaac

SEQ ID NO: 38204 - DNA, 704 bp, Macaca Mulatta
ggggaggcggcttatgtaaccgaggggtggtttcttttcctgtagtcgcgatgtgcgatagcagatggaaaacaaagtgttttatgcatacgtttctaagataaaagaaatggacttggtgagaagaagccagtctgtaaagaacacagtaagaaaatttaaggtaccaccaccggagagaagttgaaagtgcgtttgacttcttggttctttgccaaacgcgaggttttccgtttccttccgggccaagttgaacctgtccagcccccgtaggccgtgggtcaaaagtgctggtcaaaatggaagtgaatccccctaaacaggagcacctgctggcgctgaaagtgatgcggctgactaagcctactttattcaccaatatcccagtaacatgtgaagagaaagacttacctggagatctctttaaccaactgatgagagatgatccgtcaactgttaatggtgcagaagttttaatgttgggagaaatgctgactttaccacaaaattttgggaatatatttttgggagagaccttttccagttacatcagcgttcataatgatagcaatcaagttgtaaaagacatattggtaaaagctgatcttcagacaagttctcagcgtttaaatctttcagcctccaatgctgcagtggctgaacttaaaacggattgttgtcttgatgatgtcctacatcagtga

SEQ ID NO: 38205 - DNA, 794 bp, Macaca Mulatta
  misc_feature (1)...(794): n = A,T,C or G
ggnnnnnnnnnnnnnnnnnnnnnnnnnnnnnnnnnnnnnnnnnnnnnnnnnnnnnnnnnnnnnnnnnnnnnnnnnnnnnnnnnnnnnnnnnnnnnnnnnnnnnnnnnnnnnnnnnnnnnnnnnnnnnnnnnnnnnnnnnnnnnnnnnnnnnnnnnnnnnnnnnnnnnnnnnnnnnnnnnnnnnnnnnnnnnnnnnnnnnnnnnnnnnnnnnnnnnnnnnnnnnnnnnnnnnnnnnnnnnnnnnnnnnnnnnnnnnnnnnnnnnnnnnnnnnnnnnnnnnnnnnnnnnnnnnnnnnnnnnnnnnnnnnnnnnnnnnnnnnnnnnnnnnnnnnnnnnnnnnnnnnnnnnnnnnnnnnnnnnnnnnnnnnnnnnnnnnnnnnnnnnnnnnnnnnnnnnnnnnnnnnnnnnnnnnnnnnnnnnnnnnnnnnnnnnnnnnnnnnnnnnnnnnnnnnnnnnnnnnnnnnnnnnnnnnnnnnnnnnnnnnnnnnnnnnnnnnnnnnnnnnnnnnnnnnnnnnnnnnnnnnnnnnnnnnnnnnnnnnnnnnnnnnnnnnnnnnnnnnnnnnnnnnnnnnnnnnnnnnnnnnnnnnnnnnnnnnnnnnnnnnnnnnnnnnnnnnnnnnnnnnnnnnnnnnnnnnnnnnnnnnnnnnnnnnnnnnttcttaaaccccataaaaagttccccctccctaaaaaaccctccggtaattactatggcatcccggaatttacaaattacactgaaaccccaacaccagtcttattaaaaacgaggattcggaaaaaaaaaccaatccc

SEQ ID NO: 38206 - DNA, 882 bp, Macaca Mulatta
  misc_feature (1)...(882): n = A,T,C or G
agaagaagaaagaaaaggaatcaggaatgactcttactcagagtcacttgacattcatggatgtggctacagaattctctcaggagtggaaataactgaaccctgtgcagagggctttatacagggaggtgatataggagaactacaggaacctgnnnnnnnnngggaagagctgtacattgggaagtaatacagaaaacgagcttattaaaaatcaacttggattaacccttcagtcacatctgcctgaattgcagctattttaagctagaaggaaaatttgtggaagtaatcaagttgaaaagtttacaaaccatagttcctcagttccaccacttcaaaaaatttctgctagtgttaaaacacacactttaaatatagaaatgatttttattgatttcccattactcccacaagaaggcaaagcacacgttagaggaaaatcttatgaacatagttaagatggcaaagtttttagagtgtctacaagccttactaaccatcaagtaatccatactacagataaaccttgcaaatgcagtgaatgtggcaaggtctttagttgcaaaccacaccttgtagatcactggagaattcatactgggtagaagccttacaaacgtagtgactgtcacaaggtgtttaacagcaattcaaaccttgacatcaaataattcatactggagagaggcctcacaaatgtaatgaatgtggtaaagcatttagagtgttcaggacttactacccatcttgtaattcatactggagaaaaacttatcaatgtaatgagtgtgcaagaacttgaggcacaaattttccctcactcagagatgtcatactgcagaaaagccttacacatgtaatgaatgtggcaaggtcttt

SEQ ID NO: 38207 - DNA, 545 bp, Macaca Mulatta
ggacgaggcacacggttgaatgtctttttacatttgccacgcatctttacattattttttaacttcttgttgagggagatagtgggaaaaataatctttgttgtttctcataaggaaacagacatacagaatgtttaagaccttttaaagtatagcaataagaaagtcagtggaaagactaaaattagaaacccaacatattccatgtgccaatgtgttgagccaagctatctgtgctctctattgagaattccaacaacaaaactattagctggcattctccttattgagaattcaaacagtaaaaccattagttggcgaagtacatgttaagataggttattctagtctttaaaaattgtattaacttgtgtctgctttagatatatcctgttacttaacagttggttcacctccaagattacttgtgcagcttgatttcaatgggtgtagacaattaaagtattgggctagctatcccttatgacttttaagggctaaatatcttttatagccgtcaactggcgttttctccaactttgatg

SEQ ID NO: 38208 - DNA, 812 bp, Macaca Mulatta
  misc_feature (1)...(812): n = A,T,C or G
gggtaaaaagtacctaaacattcatgaaattattattatttttttttgctgaaaaatgctggcaagaagaattttaaagcttaaaataggtggtaaatttgaaatatgagtgtgttcaggagaaacatacgcttttcaaaaaaatttgtattcaaggcaaagcaaggaacatcttgagatatgtctcctaagaatataaagatgtattattttaagccaaggaactgaaatatgtctcagtttataaattcaggtatattctttttgtctccatggcaaccataacttttgaannnnnnnnnnnnnnnnnnncatctttatgctgaaaatgtgtttaggaatatggtcaggctgaatttgctgttgctccctaaccaaatccacctcctgttttccctgtgagtcaatggctaaatcaaagatgcccctgagaagagacttaatccaagcctgattgtactagtggcatcacttagaaataggctgtccctcttcctagtagatctcaatgttttataatttcttaaaacagctgaaaattgggacaacatactttacgcaatgaacagtagttaaatagggaaataaattatttccatataagtataggcctaaagttttaattacccttataatggttcctcaacaaaagtgaaacttaaatacaattgggaattggatacttaaaatactaagggaaactttagtggaaacaatttttgatccggttaaattgggattttaactgtaacttttgaaagccccaaaatttccaaaataaaacccccgggtttaggaaaattttaaaagtt

SEQ ID NO: 38209 - DNA, 799 bp, Macaca Mulatta
  misc_feature (1)...(799): n = A,T,C or G
cgaaggcccttttctgtatttaaaagcgcaaggggggttttgttgaaaaacgcacgtttttccggattttttagggcaatttttatgtaggaaaattttccccaaaacttttcaatgctgaatgaaccaaccttatattggtagaaaggccccattgcaggaactttcatggctagagagaagtcaatgcctaacttaaaaggacaggttctcattgggggttaatgcagctggtgttaagatgaagccagtgcttctttaccattccaaaatttttagggcccttaagaattatattaaatctacccgactgtgctctatcaatggaacaacaaatcttgcatgacagcccatctgtttacagcacggtttactgaatattttaagtccactgctaagacctaccttccnnnnnnnnnnnnnnnnnnnnttcctttgaaaatactactgcttgttgacaacctggtcacccaagacctctgatggcagtgtgcaaggtgattgctgttgctttcatgcctgctaacacaacatctgttctgcacctcacagatcaaggagtaatcttgattttcaagtctcgttatttaagaaatacatgttgtaggccgggcacagtggctcatnnnnnnnnnnnnnnnnnnnnnnnnntccaaggtgggtggatcacctgaggtcaggcnnnnnnnnnnnnnnnnnnnnnngnnnnnnnnnnnnnnnnnnnnnnnnnnnnnnnnnnnnnntcaggcttagtggcgcatgcctgtaatcccaggcatttattgattgatgaattgcc

SEQ ID NO: 38210 - DNA, 788 bp, Macaca Mulatta
  misc_feature (1)...(788): n = A,T,C or G
ggtgtgatggcacatgcctgtaatctgttactttggaggctgagacagnnnnnnnnnnnnnnnnnnnnnnnnnnnnnnnnnnnnnnnnnnnnnnnacnnnnnnnnnnnnnnnnnnnnnnnnnnnnnnnnnnnnntgtcttataaataaataagatgaggaagggtaagggtaaggtcataatgagggcaacagaaaaacaggtgccagaggcaagggctgtgtgaggatggttgtgggtacaagggcacattcagagcttgagatcttggtgctggctacattgtcatgtgtgatgacaaagtctgatgtttacatgctatgggggaagctaaaatggagagaataactcatgatgaccaaatcaaggctaaggatctttgaagccaagttgtatattgaggcatcattttcaatggtgaagtcatcaacattcatatattttttttaactaaataaacatttatttctggctttgtgaattgcttttgtattttgtaatttctttttttcttggaggatgtttttgtgttgtttgttctgacggaaggttatgaagtaagagaagaggtctgtggaagaaggtatgattagcatatggtggaaaatcagattttttgcagagcaatattttatctctctgaagggaatgcagattgataaaattttttgttttggttcttttgaatcatgtattgcacaaacatcggtgaaaaaattttggtttcccctcttttttcaaggtaaataattattaaaaataattggggtaaaacttttccaaaaatgg

SEQ ID NO: 38211 - DNA, 1177 bp, Macaca Mulatta
  misc_feature (1)...(1177): n = A,T,C or G
agtctccgcgacgcggcccgcctcggtcaccgcggccaggcccaggctggtactgaattaccttctattaccagcaacgccgcttctcgggccttggactacatttcccttgaggctttggtggtcaactctctgtctcctcccctccccccgcgaacctggctgcctccttctgnnnnnnnnnnnnnnnnnngactctgcacttgtccaagagaagaatccagagaaatcagagcaggtcaaatagttctaaaagccatggcccaggnnnagggactggtgacattcagggacgtggctatagagttctctctggaagaatggaagtgcctggaacctgctcagagggacttgtacagggaggtgactctggagaactttggtcacttggcctcactaggnnnnnnnnnnnnnnnnnnnnnnnnnnnnnnnnnnnnnnnnnnnnnnnnnnnnnnnnnnnnnnnnnnnnnnnnnnnnnnnnnnnnnnnnnnnnnnnnnnnnnnnnnnnnnnnnnnnnnnnnnnnnnnnnnnnnnnnnnnnnnnnnnnnnnnnnnnnnnnnnnnnnnnnnnnnnnnnnnnnnnnnnnnnnnnnnnnnnnnnnnnnnnnnnnnnnnnnnnnnnnnnnnnnnnnnnnnnnnnnnnnnnnnnnnnnnnnnnnnnnnnnnnnnnnnnnnnnnnnnnnnnnnnnnnnnnnnnnnnnnnnnnnnnnnnnnnnnnnnnnnnnnnnnnnnnnnnnnnnnnnnnnnnnnnnnnnnnnnnnnnnnnnnnnnnnnnnnnnnnnnnnnnnnnnnnnnnnnnnnnnnnnnnnnnnnnnnnnnnnnnnnnnnnnnnnnnnnnnnnnnnnnnnnnnnnnnnnnnnnnnntgggaaggccttcagccgtgcctcacaccttgttcagcatcagagaattcacacaggtgagaaaccttatgactgtaaggactgtgggaaggccttcggtcgtacgtcagaacttataaagcatcagagacttcatactggtgtcaaaccttatgaatgcaaagaatgtgggaagagctttaggcagcattcccagctgattctgcatcaaagaactcacacaggggaaaaaccctatgtatgtaaagactgtggcaaggctttcattcgtggctcccaactcactgtgcatcggagaatccacacgggcgcca

SEQ ID NO: 38212 - DNA, 1524 bp, Macaca Mulatta
  misc_feature (1)...(1524): n = A,T,C or G
gagccgagtgccctgggccgcagcggctgtggtcaggagtggctgcggtcaggggcagctgatgggttggggtggaaaatggatcctgtgtttgcagaggcagaggtgctggagatcaggcacaagccgtgctcagcaggcagctgctgtaaggctctgtgatcaagtctgctatctccgccttctggggacctgccctggtgcccatggtactacctctgccctggggcttgccagtttctgtttgcctgggcagggatgtggctgatggtacctgacacttggcacggggatgcagggaggaggcctgtgcccgctcctccctggagatctggccctactctgctgcttctgtcccctgtagtgtccctctgccatcctgtcccacccagctgggtgtgctcagaagtggggacagagccccagcggtgccatatctgatctgtgtctttcttcccctctgctctcccgtacgccagggagtttgagcctttgctgaagccacacgtggctgtgaagaaagtcccgtatgtggatgaggaggggaacctgataaagccgctaaaacccaacgggataaagatggagaagtttgtgtttgatgtgttccagtttgctaagttagtagtgggactcattcatttttcccttcttccttccctcggttttggtggtgggaactgaggcccagctgacagggaagnnnnnnnnnnnnnnnnnnnnnnnnnnnnnnnnnnnnnnnnnnnnnnnnnnnnnnnnnnnnnnnnnnnnnnnnnnnnnnnnnnnnnnnnnnnnnnnnnnnnnnnnnnnnnnnnnnnnnnnnnnnnnnnnnnnnnnnnnnnnnnnnnnnnnnnnnnnnnnnnnnnnnnnnnnnnnnnnnnnnnnnnnnnnnnnnnnnnnnnnnnnnnnnnnnnnnnnnnnnnnnnnnnnnnnnnnnnnnnnnnnnnnnnnnnnnnnnnnnnnnnnnnnnnnnnnnnnnnnnnnnnnnnnnnnnnnnnnnnnnnnnnnnnnnnnnnnnnnnnnnnnnnnnnnnnnnnnnnnnnnnnnnnnnnnnnnnnnnnnnnnnnnnnnnnnnnnnnnnnnnnnnnnnnnnnnnnnnnnnnnnnnnnnnnnnnnnnnnnnnnnnnnnnnnnnnnnnnnnnnnnnnnnnnnnnnnnnnnnnnnnnnnnnnnnnnnnnnnnnnnnnnnnnnnnnnnnnnnnnnnnnnnnnnnnnnnnnnnnnnnnnnnnnnnnnnnnnnnnnnnnnnnnnnnnnnnnnnnnnnnnnnnnnnnnnnnnnnnnnnnnnnnnnnnnnnnnnnnnnnnnnnnnnnnnnnnnnnnnnnnnnnnnnnnnnnnnnnnnnnnnnnnnagcttacccccaaatggagaccctccgcccatctgtgagatatcgcccttgtgtcttactctggagaggtgagagctgcctgtccctatctggggctttctgggagtcaggtttttaataccacctggggagaggtggctgcttgggtggagacggcacagctctacctcggtta

SEQ ID NO: 38213 - DNA, 376 bp, Macaca Mulatta
tcctgggggtggacagggtgacatggtagatctgccacctcccagctgcgtgacttggggggttcctttgttttctcatctgtagaatgaggtcagtaatcaccctccctcatgggactgttgtgaggactaaatgagttaatataggtaaggtggttgaaacagtgtgagcacatcatcagtgctgtttgctgttcttatttactgaagtgaaagctgaattctgaatccaacttttcttatggaagcacaatttctgtcaatactgaattcccatgcacatcagggctcttcataatcttagattttaaaaataaatctaataatctcctgtttttgactttttaattagctgtatgtctttgtttctagcaat

SEQ ID NO: 38214 - DNA, 829 bp, Macaca Mulatta
  misc_feature (1)...(829): n = A,T,C or G
ggcatctaggtgtcccatttctccaattgcccctcataaggcatcaaacctccaacaaaggaaggcaacagcccatggcgtgaccacgggatctacaggttcagatctcactgggaatagcccagacttcaactcttgctttttttgggtatcaggtccccaatcccttagtgcccagggactcaaagtttggaataaacccagccctaccaagcattaagggtaccggtgagggccgggtgtgannnnnnnnnnnnnnnnnnnnnnnnnnnnnnnnnnnnnnnacaggcagatcacgaggtcaggagattgagaccatcctggctaacacgnnnnnnnnnnnnnnnnnnnnnnnnnnnnnnnnnnctagtcgggcgaggtggcgggcnnnnnnnnnnnnnnnnnnannnnnnnnnnnnnnnnnnnnnnngcgtaaaccccagaggcgnnnnnnnnnnnnnnnnnnnnnncgnnnnnnnnnnnnnnnnnnnnnnnnnnnnnnnnnnnnnnnnnnnncannntanaatnntaaaataaaaaatatatcttgttcggnnnnnnnnnnnnnnnnnnnnnnnnnnnnnnnnnnnntttcgtttttggcgcgccggggcccagataaggtaaagttgaaacattggctccaaaaccctggttttccctaagggagaatcccttgggtccaaggaacctataatggctttgggaaatatcctccaccnnnnnnnnnnnnnnnnnnngcccccggggggtggggataaacaccgtaaaccgggttttcctggtaaaaataaaaaattccccacaaaaaaaggggggaattttttta

SEQ ID NO: 38215 - DNA, 275 bp, Macaca Mulatta
agagcctaactgactatttctaaggtcacttaattgcattacatcaggataacatatagtgttagggtaatcatttggtattcttctatgacaaagcatttctgcctttgtattataactttctgaacgaattggttctgtttaacatgatgctttcatctttggtctcttaataacctattttctctattttattcactgagaacaaattaaaaatgctgaggtgatttgatgagtacagtataatgcatttgcactacccagataaaattcac

SEQ ID NO: 38216 - DNA, 662 bp, Macaca Mulatta
  misc_feature (1)...(662): n = A,T,C or G
ttaaatactttccatcagtcttaagctaccacaaaacatacctttgttcctgttttcatgtgaaaccttacaataactgttcccanttacccctctcacatacacatccacacagatacttgagacaactttagtgagtctctattctttgtggtcaaaggatcctaatttatacaactgctctatgagttcaatgtttattattttggctctgtaaccaaggcagggactgatgaacagtagcagttttgtggccacccaagaatgtattgaccttgaataggaaaaagcaatgtatataatcctaattgtttaagagaggtgatgcattacagggagggctcagagaaagatggctaacactaatagcacacattggcattgaggagactacatggaaatgtgcatttagcaaaatagcttcagaacaatatgttttctttctcgcctattagattatgaattcctgaagaactcatctacctatgcctcaccaattcccaggagagggctctgtatataataagtgaaacacaactgagcacatcatgtggcccagctatggttctgtcttaaggtttagcagcagctttgaactgcctggtaaaaatattttttcaggcagactaaactgaactgaagagagagacacaagttagaga

SEQ ID NO: 38217 - DNA, 698 bp, Macaca Mulatta
  misc_feature (1)...(698): n = A,T,C or G
gccagctgagccttgcggtgcagtgcggccccgcagtgcatgtccagaccccagggacccactctcaggtctagaagatctagttgggtagtgttggtaccaccaagagtggacaggacagagaagcagagacggccccacccagcaggacgcaaggactcgggcagtggcttttcaggtgtgtgggctgagaactggggagttggtgaattctggggcccctggggtagccattcgggaatggcagcagctcccccaaccgcagatgctcactgcccacagaagcggccacgtgtttgaatgaagagcagttagaggaacatttgcaagagaatgtgtttactcactgaggttatgacaacacagaaaataacaactctttctgtagaaaatgtgatactagagaggaaaaggtcactttgattaaatggcaattagaaataacaacattgcaaggccgggtgcagcagctcacggnnnnnnnnnnnnnnnnnnaggaggccgaggcgggtnnnnnnnnnnnnnnnnnnnnnnnnnnnnnnnnnnnnnnnnnnnnnnnnnnnnnnnnnnnnnnngaaaatacaagaattagccatgcatggtggtgcatgcctatagtcccagannnnnnnnnnnnnnnnnnnnnnnnctctctggaatccaagaggcagaagttgcaccgagccaagactgtgcca

SEQ ID NO: 38218 - DNA, 641 bp, Macaca Mulatta
ggggaaaacgaggccagttacccggcggagatgtgcgcccactttgacaatgatgaaattaaaaggctgggcaggaggtttcggaagttggacttggacaaatcaggctctctgagcgtggaggagttcatgtccctgccggagctgcgccacaacccgttggtgcggcgagtgatcgacgtcttcgacaccaacgacgatggagaagtggacttcaaggaattcatcctggggacctctcagttcagcgtcaagggcgacgaggagcagaagttgaggtttgcgtttagcatttacgacatggataaagatggctacatttccaacggggagctcttccaggtgctgaagatgatggtgggcaacaacctgccggactggcagctccagcagctggtcgacaaaaccatccttatcctggacaaggatggcgatgggaagatatcctttgaggaattcagtgctgtggtcagagacctggagatccacaagaagctggtcctcatcgtgtgagcctttttcttacaagcaccacccaacaacttttgctttcttccctacctctttcagatttgctcagatgtccactgtctctctaactagctgaagtattctcttgtgagcctatgtccacggagctc

SEQ ID NO: 38219 - DNA, 763 bp, Macaca Mulatta
gtcactttaaaggggttaaggcatatttcccttcaaggaaaaccaccccccaggtttatttttccactttgaatcctgtccctaaaacctaaagttcaggcaattgattggcgccctttaattcatttattaatttttccgaaatgggggttaaatgctttgaagatggaaaggttaagtgtcccttaggattcattaagtttaatctctatgtcaggcacatgacgaatattcaataaatgtttgcaaattcaagatggatgagagactaaaaatgttagacctaaaagcataaaaaccctagaagaagactagggcaataccattcaggacataggcatgggcaaggacttcatgtttaaaacaccaaaagcaacggcaacaaaaggcaaaattggcaaataggatctaattaaactaaagagcttctgcacagcgaaagaaactaccatcagagtgaacaggcaacctacagaatgggagaaaatttttgcaatctactcatctgacaaagggctaatatccagaacctataaagaactcaatcaaatttataagaaaaaaacaaccccatcaaaaagtgggcaaaggatataaacagacacttctcaaaagaagacattcatatggccaacagacacatgaaaaaatgctcatcatcactcgccatcagagaaatgcaaatcaaagccacaatgagataccatctcacaccagttagaatggcaatcattaaaaaaatcagtaaacaacaggtgctgcc

SEQ ID NO: 38220 - DNA, 588 bp, Macaca Mulatta
tttgagtctcaatgttttgtttatgatacacatcacaagtattttctgtagtctgtttgggtgactggtagtgccattagctaaaatagggactagaggaagagcaacaatgcaggaggagactctagcaaagtgacgacttttagtttgggatattttgagatatccaggtagagagaagtgatattgataggccattgattggtcggctatagtcattctcttcattccttggatgatattaatccgtcatcaaaaaactacatgcttgaatcagatttacactgagttttatgtgtttctgcctgctgttttttttatcaagggaaataggtatatgctgtaggtgtctttggatgtgcttctcttaatacccgtttatatgaagttgcccatgagaaatctctgtggggctggatgctatatttcttcctgttaagcaacagtaattactgccggaatgttttattctgttcacgttgtcaggaaacttgacactcatgggcacatttgtcagggtcattctctggaaacctttgtattggctgtaaggtccatcttcttcaccctacatcttgatcccccacc

SEQ ID NO: 38221 - DNA, 850 bp, Macaca Mulatta
  misc_feature (1)...(850): n = A,T,C or G
gggcagtaatatgtacttgtccatttgattagacggtgatcagnnnnnnnnnnnnnnnnnnntcactttatttggattacatctcatcctagagtctttttgcctttgttcttcaaccttctttaatctcacttatcagaaacagcctttcatttttaaaaggtatttcctaaaattcacttttccaagcaatttcagcactagatagaatatggtacaattagtaataatatattcatcaaagccagatagttttcagtgttgtttttgtatggtatagcactgtgccatttgcatagctgtttacttacatacattatgtgattttctgccaggagtcaagccctaaacaataaaccctagagaattgtgatctagcagaaatctctctcgtgttggtgtgggtttnnnnnnnnnnnnnnnnnnnnnnnnnnnnnnnnnnnnnnnngtgatccggatttatgtaatcttgggtatgaattatattgtgcggttaaactctgccccggtatattaagaatatagggatatggcggtattttcgcgcgaaaacgggggcaatttaagaaaaagtcggctcttcccaaattactttgggccatcttaagagggaaggatcgtaattgcccgcccagtctcctacaaaaagtttaagcgacgcatttgccccggggaaaaggttaacttttttgctctgagaaaactctggcggtagatctttttttgagggcgtggcgaccgccaaagcggccattaagagaccacccgcgcgccgggggagagaaaatcccgtgatttcgaggaaattccgcaagggggctataatataaccggaacggcgcgtgaaaac

SEQ ID NO: 38222 - DNA, 831 bp, Macaca Mulatta
  misc_feature (1)...(831): n = A,T,C or G
ggcaagattgtaccactgcactccaacctgggtannnnnnnnnnnnnnnnnnnnnnnnnnnnnnnnnnnnnnnnntaaaactatttgtttcaagaaagactccttagggagactctgtggtagagatcaccctctttcccctgaagagccatagcagctctctctttcacagccctgagctgtagactgcccctgaagatttactgttgtgatgaaacaaggacttccaaatggttgtaaaaactcttgggaatatgtatagagaatgaggcctggtgcagtggctcacgtttannnnnnnnnnnnnnnnnnnnnnnnnnnnttnnnnnnnnnnnnnnnnnnnnnnnacccacttcggcctccccaagtannnnnnnnnnnnnnnnnnnnnnnngcaccaggcctcattctctatacatattcccaagagtttttacaaccatttggaagtccttgtttcatcacaacagtaaatcttcaggggcagtctacagctcagggctgtgatagagagagctgctttgtgctccttgggggaatgagagttcttaatgtccccttaaatgccttcaaaggctccttggttgcctttaaaaattcagcatccaaatgggcccggaacgtggtggctcaaaacctgttatcccccgcacccttgtggaagcccggaggcaagttggaataatggaggtcctgaaagttacaaggaccagcccctggcccaagaaaggtgagaaacaccgcttctcttctcttaaaataaacaaaaagtacaacctggggcattggatggtttaggcacaccctaatagatccccacatttaccctag

SEQ ID NO: 38223 - DNA, 753 bp, Macaca Mulatta
  misc_feature (1)...(753): n = A,T,C or G
ggtgataattgaagtattcctaagtgaagctgtctctatgctgagctgtgagtggcccctcccagctccacctccccacctccaaccctacatccaatcaaggatgcatgggtagtgcttttctctcatccaagctatttatggggctttgaggaggcctcagagagtgtgatacctgtttcctccagcttcagagacacagtgggctgttgtttgactcacccttgaagaatcccaaggcctttacaaggctgcatgaagcggctttggcaacagagcagggcagcacagctgtgctcctgttgacaaggggcagatgatgcagaagagtccccaggagccaagatgctgtctggcccttaggtccctacatcatgccctggccaagggactgaagaagctttaattctgaatgaagttaggaatgttggccactatctcaaatgaatgtaatatttactaaaatgagatcaagagaccactgtgatatcaggattattagtagtaataacagtatctaacactgagcatgggccgggcgccnnnnnnnnnnnnnnnnnnntcaaaactctgggaaggtgagcccggaggatcccaaggtcaggagatccaaaaacatcctggcttaaaccgtgaaaaccctttctcttcttaaaaattcaaaaaaattactttggttgttgataccccctttcctttaaatccaaccgtctttggaaggctgaaagcaaggaaaattttttttgaaccccg

SEQ ID NO: 38224 - DNA, 714 bp, Macaca Mulatta
acgcgggaagctgagttcaccaagtccattgctaagttttttgaccacagtgggacactggtcatggatgcatatgagcctgaaatatccaggctccatgacagtctcgccgtagaaagaaaaataaaatagccaattctaaaagtagccctctttctgctggatcttgctgaattactggcttgcggggtgggggagataaaaagaacttaaaatgggtaaagtaagaaatgtttagaagtccctgttttgtcctgaaattttagtctattctggataaataggattttctgacacagatatgagaagttgtagctctgatgtctagctgtagtctccttgatctgctgattacattattttaatttgcttttctgggaaagtagttttgctaaaagctgtacagatgttttcttttgtacctagcatactttatatagtatagctttgggccatgtagcattttaagactgaattttaaaaaattattaatctgttgctgactctgttaattcctatttcaatatgtgtttccttgaagaattcaggatacaacgtcttgtgtatgacagctttccttcacacactatttttgtgggtgtgtatatatctgatttggggagaatttaaaaaaacatagctttttaattagttgaaacagacttactgcctgcacgtttagtgctttggacttaaccgaaaacaaagccattg

SEQ ID NO: 38225 - DNA, 289 bp, Macaca Mulatta
acatacagatgaccagtctccatcctccctgtctgcatctgtaggagacagtgtcaccatcacttgccgggcaagtcagagctttagtagtagtttagcctggtatcagcagaaaccagggaaagcccctaagctcctgatctatagtgcatccagtttgcaatctggggttccttcgaggttcagtggcagtaagtctgggacagatttcactctcaccatcagcagcctgcagcctgaagatattgctagttattactgtcaacagtattacagttaccctcccaca

SEQ ID NO: 38226 - DNA, 822 bp, Macaca Mulatta
  misc_feature (1)...(822): n = A,T,C or G
gggtagagcagggattaaatgcaagtttgttttaccttaaagccaagctttttaagtggtaccgtgaagctgtagtatgtatagtgtaagtataacagcaaatcagtaagtatttggcagtctttgatagtttttaatctctgtaccagtttatagctttctcagtgtaatttttaaatactcttcatgcgtcattatttcagtaaatattactgtccttactaaattatgtattgtttcagtgaaggcaatcagtttgcagtcataaaccaatcttactaagcagttaaaccatgtccgttcctcttttcttctcagccctccccatcaccttccttctttacaggttagagatgtaatcattttagatattgactactatacaactttgaagccatgttgtgctttgaaatgctaggcatttatgggaattatccaaataaattctctttgggccaggcacacattaacttcaactggacagtattctaaccaccaatttgaatttacgtctccaatgggcttttggggtcccttattatggcccagggtcaaactggatacattccaccctggggcaagacaggagcaaatattaccggatttactataaaccttgacccccagtgggtcaatttgggatccaacctaccccagccccttacaactaccttggcggggcctacacttatccttagcccgaagggtccccccctcatctcttcgtaaaaaaaccttccctctcagataactcgccttccccttaccacaattttcgaacctaattctggcgccctgtaacaaccttcatgggagcctgtn

SEQ ID NO: 38227 - DNA, 544 bp, Macaca Mulatta
atttttgaagaagtttatttagaataggattttataactaatttggacgcttcatcacattgatggatataatactcagaattataaattgctagatttgataaatacctaccaaaatgtttatttttttcagtcatacactgaccataaaacaaatattttactaaatttccagagtcatttctttgaaaaacagtataattgcatcataacatttcactaaatcctatttatcttctgggaaatgtatattttaattttagctgttggatttcctaaatatgataagcttatatattcatggtatgaatttctttaaaaagagcatctgctcttggacttgtatctgttgcatcttgtcaatgcttgactcatggtcagcatccaatagttgttaaacaaataaataaatataatacattacctatgtatcaaaaagcatgtataagaattccaaatgtgttaacttgttctactttgttttatttatgtaattacattttcattaatactttagtaggtatggctgtatagagagaaaaac

SEQ ID NO: 38228 - DNA, 801 bp, Macaca Mulatta
  misc_feature (1)...(801): n = A,T,C or G
gggatcacgannnnnnnnnnnnnnnnnnnnnnnnnnnnnnnnnnnnnnnnnnnnnnnnnnnnnnnnntaatagatttagggtttggcactattcgcagttccaagcatccactgagggtcttggaacgagtcccccaaatataagggggagactcctggcccttcatttctcttgtcctcccagttgattcatctgcattcctacatgccctggggccatttcacgggtgtctggcttcttttactgtattgcttgtgattcccctacactccttgccatcagtatacatttttttggggggtggggacgnnnnnnnnnnnnnnnnnnnnnnnnnaagtaacagtggcacgatcacgtccnnnnnnnnnnnnnnnnnnntgagttcaagagatttnnnnnnnnnnnnnnnnnnnnnnnnnnnnnnnnnnnnagcgtnnnnnnnnnnnnnnnnnnnnnnnnnnnnnnnnntagagttttgttctnnnnnnnnnnnnnnnnnnnnnnnnnnatnnnnnnnnnnnnnnnnnnnnnnngccctctgggttccagcaattctccctgcttcagactccccagtagctaagattacaggggcccacccacacactggtcctttgatattttttattctttttttggnnnnnnnnnnnnnnnnnnnnncacccccgttgggccacgcttggtatttgaactcctgaacctccagggatctggcctgtctctgggtcccacaaataaagaagtgaaacccccctcccctgggccactatcgatacctgttttatattgccaaaaagctt

SEQ ID NO: 38229 - DNA, 1062 bp, Macaca Mulatta
  misc_feature (1)...(1062): n = A,T,C or G
tgggaagtggaattagttcagagagcaaggagtcagccaaaagatcaaaagaactggagaaaaagcttcaggaggatgctgagcgagacgcaagaactgtaaagctgctactattaggnnnnnnnnnnnnnnnnnnnnnnnnnnnnnnnnnnnnnnnnnnnnnnnnnnnnnnnnnnnnnnnnnnnnnnnnnnnnnnnnnnnnnnnnnnnnnnnnnnnnnnnnnnnnnnnnnnnnnnnnnnnnnnnnnnnnnnnnnnnnnnnnnnnnnnnnnnnnnnnnnnnnnnnnnnnnnnnnnnnnnnnnnnnnnnnnnnnnnnnnnnnnnnnnnnnnnnnnnnnnnnnnnnnnnnnnnnnnnnnnnnnnnnnnnnnnnnnnnnnnnnnnnnnnnnnnnnnnnnnnnnnnnnnnnnnnnnnnnnnnnnnnnnnnnnnnnnnnnnnnnnnnnnnnnnnnnnnnnnnnnnnnnnnnnnnnnnnnnnnnnnnnnnnnnnnnnnnnnnnnnnnnnnnnnnnnnnnnnnnnnnnnnnnnnnnnnnnnnnnnnnnnnnnnnnnnnnnnnnnnnnnnnnnnnnnnnnnnnnnnnnnnnnnnnnnnnnnnnnnnnnnnnnnnnnnnnnnnnnnnnnnnnnnnnnnnnnnnnnnnnnnnnnnnnnnnnnnnnnnnnnnnnnnnnnnnnnnnnnnnnnnnnnnnnnnnnnnnnnnnnnnnnnnnnnnnnnnnnnnngaatagaatgcatgaaagtcttcacctgttcaacagtatctgtaatcacaagtatttttcaacaacctccatcgtcctgttcctcaacaaaaaagatatctttcaagaaaaggtaaccaaggtgcatcttagtatctgctttccagaatnnnnggccaaatacatttgaagatgcaggaaactacatcaagaaccagtttctagacctgaatttaaaaaaagaagataaggaaatttattcccacatgacctgtgctactgatacccaaaatgtcaagtttgtgtttgatgcagttacagatataataatcaaagagaatctaaaagactgtgggcttttctaa

SEQ ID NO: 38230 - DNA, 1136 bp, Macaca Mulatta
gggcgggcagttccaggcactgcagctgagccagatgtactacatgcagcttctgttgtgggcacccatgcctggacaaggggaatgcagtggtgcctggaaacttggagatgccaggaaccacagagccccaaattgggtatcatcatagccctaacgtggggagcccctaggtctgggctcccctaagggccgcaggtcttttctccttcttctcgctcacaacatggtgagtggcagggtatgtttcagccctgtttgtgttacagccctttcagtcctgccattcagcacgtcctgagttcttgtcccacatccacgaataatgaggtacatggacaactggagggtaaacaaggcggagagaagcttcattgagttacagaagaactgtcaatagacccaaaatgggtagctcctttccgctggcaggttgccaccctcagcggagagaccaggcgtgggtagctcccatctgcaggcaggttgtcccaacatctctgtgagtgtagctgagcaaggggcggaagtgggagagggtcgtttatgagctttagaagggagaaaatgcgttgtgtgtgctgattgatccatgggcagccataggcaggcctggaaaaagcaccgtaagttcttactccaagccatggactccacctagaactaacagcccagaccccatacttcaagcaatccctggcttgaagtgggggcttcactgtggactcaccgttttctgtgcggacgtctgtcttcctcctgctgctatcaatcatattgttcatagtgcccacgctgctcacgccgaggagtgcctgcaggctccttctaagctgccatcaattctgcctcagcctccctcccatgctggtcggcgctcaaagtccgatggggccaagggccagtgtttggcatgtcagcgtcaccccaagcatgcgcacacacggccagctcagaagagcactccggcttggcctcaactttgctctgaaatcagagtgggcaccaggcacagggagaagtcaggcagcgggggcaagcgcttctgagcctgtgaggctgagggggctcacaggtccccaagagtacacggtgcccaggtctgcagctgtggctgggtggctgcagcagtgcct

SEQ ID NO: 38231 - DNA, 644 bp, Macaca Mulatta
cttgccctcccctagagcccagtgccccccaggacggcgtcccagctgagaatggcctcccccagggggaccctgagccactgccccctgtgcccaagccccggacagtccttgtggcagatgtactagcccaggacagcagtggtactggctgggccctggagctccccaaagaggaggctccccagaatgggacagaccataggctacccaggatggcaggcccaggccacgccccactccaggggcagctatctgtgacccaggatgaccccgacagacttggggtggggctccccaatgggctggatggggcggaagaagaagatgatgacgactacataaccctcagtgaccaggacagccactcaggcagctccagccgtgggcctggcccccgacggccctcagtggcctcctctgtgtcagaggagtactatgaggtgagagagcactcagtccctctccggaggcgccactcagagcaagtggccaacgggccaaccccaccaccgcgccggcagctgagtgccccccatataacccgagggacctttgctggaccccagggtggctccccgtgggcccagagtcgggggagagaagaagcagatgtgtcgaggaggatgcaggcccagcactcc

SEQ ID NO: 38232 - DNA, 660 bp, Macaca Mulatta
  misc_feature (1)...(660): n = A,T,C or G
tatgtgaaagcattttgaaaactataccatctgcttccagatgtaggcaacagaagacctcactgaaattgatcttaaaaatagggatattgggcgnnnnnnnnnnnnnnnnnnnnnnnnnnnnnnnnnnnnnnnnnggggtattggttatgtcatgtaacaaaaattccagcagcatggtagaggttaggtagaggctgtgttcaagcgggctccaggtctctgcctttgcccatgcatcattgtcttcacactggctttttcatgttgataaaatagcagtggccgctctaggccttatatctgaacacagcatcatctaaagcagcactatctaatagaattcgtgatgatggaaatgttccatgtttgtgctgtccaatatagtaggcattaactatgtgtggatattgagtgtgtagtgcaacagaaaaacctgagtttttagtctttttaaattttaatttaaccacatgtggctattggttactatattcttgagcatcaatctaaagtatcagagatgagttgtgtcccagaatccgcagcagatgttctaaaattaattctaattgtactgtttaaatcacttgcctctccatctcccactctgaaaacactaaacacagtggtagagaacggatagaatgtcctgattgg

SEQ ID NO: 38233 - DNA, 586 bp, Macaca Mulatta
catcctggcaggcaggtgaaagagcagcactggtacagagcaggcaatgccatgccaagagtcggcctgcagctgggggtccaagtcctttcctgtcagacacaatcagtgtccacagcagtccctccccacgctgaatgttaccacgtacatgaggccgagtgacccccctgtggttcctttatagacagtaaagcaagtctgtgtttaacagcaagatgccaggtgaaggactgcaggtaactggcaagtgtcaaggctggaacatgggaagtggccccaggacagagctttgggcatggggagtctcacacaaggagacacaggtgctgggcttcacctcctcactgtggaccaggagagcctgtgcgccctacaccaccagctaggattcaagcatggtgggtccacggggacatgctgcgtctgggctcctgaaaccatactgtcccctgtgggtcagggaaggccaaagtttctcccacgtgctgatctgaatgatccctggggagcccagctcaacttagactcctaaggccttcccctggggagctggctccccactgttccttaggaccagcaagca

SEQ ID NO: 38234 - DNA, 261 bp, Macaca Mulatta
tgtcctaagtacatgttcatgtcagcagcaatgtcaggatctgtggagtttgcgagtgtaagatctttaagtgttgaaggttccatctctataattgcagttgctttagctacaaatattataggaagctgttccttctttttctttacgtcaccaaaccttccagtggttataggcattttgttatccttcaagtgacctggaacctttgttgtattacaggattgtacctgaagatcacattctttaacagttgtacct

SEQ ID NO: 38235 - DNA, 1267 bp, Macaca Mulatta
  misc_feature (1)...(1267): n = A,T,C or G
ggcccagcttgggacattgttcacttcccctcgcttcccctctgggagccccctttgccacccctgcaacttgttttgggcgatgcccgagagggagctgtggccagcggggcctggctcagaacccgtgactcgtgtcggcagctgtgacagcatgatgagcagcacctccacccgctctggatctnnnnnnnnnnnnnnnnnnnnnnnnnnnnnnnnnnnnnnnnnnnnnnnnnnnnnnnnnnnnnnnnnnnnnnnnnnnnnnnnnnnnnnnnnnnnnnnnnnnnnnnnnnnnnnnnnnnnnnnnnnnnnnnnnnnnnnnnnnnnnnnnnnnnnnnnnnnnnnnnnnnnnnnnnnnnnnnnnnnnnnnnnnnnnnnnnnntcactcagcaaggacgagcaccacggacagtgactgagtccagctcatcccatcctcctgagccccagggcctaggcctcaggtctggctcctacagcctccccaggaatatccacattgccagaagccagaacttcaggaaaagcaccactcaggctaacagtcacacccctggagaagcggggaggcttgtgcaagagcctgagaaagaacaggtcagccagagcaaccaacccagtcaggcacctgccagcccccaggaggctgcccttgacttggacgtggtgctcatccctccaccagaagctttccgggacacccagccagagcagtgtagggaagccagcctgcccgaggggccaggacagcagggccacacaccccagctccacacaccatccagctcccacgaaagagagcagactgcttcagaggccatgtcccaaaaagccaaggaaacaggttcaactgggtacacacaacaatcccggcctccttctgcagtgttgcctcagaaagcaagagctgaagatgttcccttcccattaggggaggacccaaacagccgactagctcctctcacaacccctaagccccggaagctgccacctaatattgttctgaagagcagccgaagcagtttccacagtgatccccagcactggctgtcccgccacacagaggctgcccctggagattctggcctggtctcctcttcactgcaggagcagagaaaagcacgtagagaagctctagagaagctggggctaccccaggatcaagatgagcctggactccacttcagtaagcccaccagatcgatcagacccaaggagacacgtgcccagcgtccgtccacaggtccagatctggctcagcctgcag

SEQ ID NO: 38236 - DNA, 292 bp, Macaca Mulatta
atgatactgaagaatatgctccaccaaaatcagaaagtaaaccaagtaggaggtagacatagaatatctttaaaaagagctccaatttgagggagatgcaaagagaatctctaagaagatgataatgagtgataccaggggaataggtgcacatcaggtgggaaggtcaaccaatctagactggggcttatctgagggctccaggaggaactctattcaagatgaaattgacatattacttgatagttctgaatacattaaggcaactaactattcatctgtgagtggtgtt

SEQ ID NO: 38237 - DNA, 661 bp, Macaca Mulatta
cagggcaacgtggaggcactgacacgcacggctgcgcgcctgcacttcccctcggtgcagaaggtctgcggccgctacctgcagcagcaactggatgctgccaactgcctgggcatctgtgagtttggggagcagcaagggctgctgggcgtggctgccaaggcctgggccttcctgcgagagaattttgaggctgtggcacgtgaggacgagttcctgcagcttcctcgagaccggctggtcacttgtctggccagtgacctgctgcaggtgcagccagagcaaagccgacttgaggccctgctgcgctgggtgcgccatgacccacaggcccgagcctcccacttgcctgagctgctcagcctagtgcacctggacgccgtgcccaggccctgcgtgcaacaactgctggccacagagcccctgatccaggagtcagaggcatgccgggcagccctgtcccagggccatgatggggtgagtgagcagctgggaggcccccattcctgggaagcagggaggagagccccagaaaccccacctgaatcaggacagagtaaggagtggacattccaaggtacactgaccttgcaatgctccttgttttgggccagttccctataaggacatcaccattcacccctcaagtgcagatcgtgcc

SEQ ID NO: 38238 - DNA, 685 bp, Macaca Mulatta
  misc_feature (1)...(685): n = A,T,C or G
catttgtcatctcatactactatgcattttggttcactgtgatgatgatctatatttagtgactgcaacatgtttataccactgattcaaattccatccatgatgaagttatacaaataatgcatatattgataacttttattgcaaaaatgtaaatttaaaacttgtataatgttcttgtgnnnnnnnnnnnnnnnnnnatgtgtannnnnnnnnnnnnnnnnnnnnnnnnnnnnnnnnnnnnnnnnnnnnnnnnnnnnnnnnnnnnnnnnnnnnnnnnnnnnnnnnnnnnnnnnnnnnnnnnnnnnnnnnnnnnnnnnnnnnnnnnnnnnnnnnnnnnnnnnnnnnnnnnnnnnnnnnnnnnnnnnnnnnnnnnnnnnnnnnnnnnnnnnnnnnnnnnnnnnnnnnnnnnnnnnnnnnnnnnnnnnnnnnnnnnnnnnnnnnnnnnnnnnnnnnnnnnnnnnnnnnnnnnnnnnnnnnnnnnnnnnnnnnnnnnnnnnnnnnnnnnnnnnnnnnnnnnnnnnnnnnnnnnnnnnnnnnnnnnnnnnnnnnnnnnnnnnnnnnnnnnnnnnnnnnnnnnnnnnnnnnnnnnnnnnnnnnnnnnnnnnnnnnnnnnnnnnnnnnnnnnnnnnnnnnnnnnnnnnnnnnnnnnnnnnnnnnnnnnnnnnnnnnnnnnnnnnnnnnn

SEQ ID NO: 38239 - DNA, 470 bp, Macaca Mulatta
  misc_feature (1)...(470): n = A,T,C or G
gcgttccccacgtcttctgcctggtctgagggtgcagccagggcagagcagcggctgggagggcgcctctggccccccacctcacggccagttcccgcgggcaccgcctcgccctccgctggccccaggtcagctccgagaaagtgccttcagtgccttcagtgtcctggagccgagcgacactgccctccgtggggccgggctgcctccccgtggctcctgcgcgtcctggcctgggccttgcccagccgcccccgtctccttcccttcctccggtccttgtcctgacctgcagctcttcccagccccggggggagcttcccgaactgtcccgccgcctctcccttcctcggnccgtggtccccagctggtgactgctcangagtttgggggctccagggcagtgggcccggggtctggcaggctctcggttgggtggggtgggggccccccaaccaaagtcctctggt

SEQ ID NO: 38240 - DNA, 668 bp, Macaca Mulatta
  misc_feature (1)...(668): n = A,T,C or G
ggacgaggctgtgctaatcggccgaggcagaatgaccanttgagtagtcggatgaatggaatatttagtgggaggaaccctttcctttttccttctttttggggtctctgcttaaaatgaaaagcttccaaaatatcaaatctagggctgtttcctaaattacactattctaggcatcattttgattcccatgtcactccttaactcacttctttgagcactacaagtatgttgtcagccacgagacaggacttcctaaatagtgtgtgcaccagcctaactctgccttactcagaaaccaaccacctaagaggaaactcagaagatattaatgaaaactaattgaaagtatgcacacttctcatgtaggaacaaaattaaaattttacatttttattttacaatgtaaattacattttgtagcaacaaaatgtaaattttgtaaataccaaattctttttaaagtcctgtttaaagaacaatagaactaagtgaaaatattcagaacgagctccttagaagaaaggagtaagaatttcttactggggctatttcccatctctagaaaaagtgcttcttcccttcccctccctctccatggtgcgtaattgtgaaactgcttttctatcaggttaaacagtttgacgtagctcattgacagaacctat

SEQ ID NO: 38241 - DNA, 774 bp, Macaca Mulatta
ggggtaaaatccttctctttatccaacttctgccaccctcatagaactgattttgcttgtgtttgtagtatctgtttgagttaacaggtattttttgtattaagccactaaatttttaggtagtttgtgttaataactattaaggctttctgaagtttctattattctatgaatattatccgcatctctttaatttgttgcattttaataatgttagccatacttgccgtttccagtcctttcctgctattccttattgaaactttttattttgcctttctctgttcttccttccttctttcctccttttctccctcacagctttctccctccctccatttttttcacaaatgctatgtggttaggctaaaaggaagcattagtttaatcttaggctaaaagtataatgccataaattatagaataaaaataaagaaacagaagctattaatggaatatgaaaaaatgcctaaggtgattctgtagccaagacagtggtttttaacatttaatctccaccttcaactgaatgttttcagaacacctgagcaacatgagctctttcccattcttggtacaagcacttgggaaaatcaattagccttatctagtatgattaacatccatgcaccaaataatcccaacatctgctcctgagcatatactctggggatattccttggctatgtgtccaggagacatgtacaccaatgtttatggacaaaaactggaaacaatcacatatacatcaatgggaatttaaaaaaatggtga

SEQ ID NO: 38242 - DNA, 3466 bp, Macaca Mulatta
  misc_feature (1)...(3466): n = A,T,C or G
aggagtttgagaaccctgaaggggaggactgctccggggagtacactccccctgcggaggagacctcctcctcacagtcgctgcctgatgtctacattctcccactggctgaggtctccttaccaatgcctgccccgcagccttcacactcannnnnnnnnnnnnnnnnnnnnnnnnnnnnnnnnnnnnnnnnnnnnnnnnnnnnnnnnnnnnnnnnnnnnnnnnnnnnnnnnnnnnnnnnnnnnnnnnnnnnnnnnnnnnnnnnnnnnnnnnnnnnnnnnnnnnnnnnnnnnnnnnnnnnnnnnnnnnnnnnnnnnnnnnnnnnnnnnnnnnnnnnnnnnnnncaggagcctgcagcaccccaatgtcctccagtgcctgggtctgtgtgtggagacactgccgtttctgctgattatggagttctgtcaactggngggggacctgaaacgttacctccgagcccagcggccccccgagggcctgtctcctgannnnnnnnnnnnnnnnnnnnnnnnnnnnnnnnnnnnnnnnnnnnnnnnnnnnnnnnnnnnnnnnnnnnnnnnnnnnnnnnnnnnnnnnnnnnnnnnnnnnnnnnnnnnnnnnnnnnnnnnnnnnnnnnnnnnnnnnnnnnnnnnnnnnnnnnnnnnnnnnnnnnnnnnnnnnnnnnnnnnnnnnnnnnnnnnnnnnnnnnnnnnnnnnnnnnnnnnnnnnnnnnnnnnnnnnnnnnnnnnnnnnnnnnnnnnnnnnnnnnnnnnnnnnnnnnnnnnnnnnnnnnnnnnnnnnnnnnnnnggtccctgggggtgaccctgtgggagctgtttgagtttggggcccaaccctaccgccacctgtcagacgaggaggtcctcgccttcgtggtccgccagcagcacgtgaagctggcccggccgaggctcaagctgccctatgcggactactggnnnnnnnnnnnnnnnnnnnnnnnnnnnnnnnnnnnnnnnnnnnnnnnnnnnnnnnnnnnnnnnnnnnnnnnnnnnnnnnnnnnnnnnnnnnnnnnnnnnnnnnnnnnnnnnnnnnnnnnnnnnnnnnnnnnnnnnnnnnnnnnnnnnnnnnnnnnnnnnnnnnnnnnnnnnnnnnnnnnnnnnnnnnnnnnnnnnnnnnnnnnnnnnnnnnnnnnnnnnnnnnnnnnnnnnnnnnnnnnnnnnnnnnnnnnnnnnnnnnnnnnnnnnnnnnnnnnnnnnnnnnnnnnnnnnnnnnnnnnnnnnnnnnnnnnnnnnnnnnnnnnnnnnnnnnnnnnnnnnnnnnnnnnnnnnnnnnnnnnnnnnnnnnnnnnnnnnnnnnnnnnnnnnnnnnnnnnnnnnnnnnnnnnnnnnnnnnnnnnnnnnnnnnnnnnnnnnnnnnnnnnnnnnnnnnnnnnnnnnnnnnnnnnnnnnnnnnnnnnnnnnnnnnnnnnnnnnnnnnnnnnnnnnnnnnnnnnnnnnnnnnnnnnnnnnnnnnnnnnnnnnnnnnnnnnnnnnnnnnnnnnnnnnnnnnnnnnnnnnngctggtgtccgagacctgggcctcccccctcttccctgcaccccggcccttcccagcccagtcctcagcgtcaggcagcttcctgctgagcggctgggaccccgagggccggggcgccggggagaccctggcgggagaccctgccgaggtcctgggggagcgggggaccgccccgtgggtggaagaagaagaggaggaggaggaaggcagctccccaggggaagacagcagcagccttggaggtggcccaagccgcaggggtcccctaccctgtcctctgtgcagccgcgagggggcctgctcctgcctgccactggagcggggggacgccgtagcaggctgggggggccaccctgctcttggctgnnnnnnnnnnnnnaggacgactcctcgctgcgggcagagcggggttccctggccgacttgcccatggnnnnnnnnnnnnnnnnnnnnnnnnnnnnnnnnnnnnnnnnnnnnnnnnnnnnnnnnnnnnnnnnnnnnnnnnnnnnnnnnnnnnnnnnnnnnnnnnnnnnnnnnnnnnnnnnnnnnnnnnnnnnnnnnnnnnnnnnnnnnnnnnnnnnnnnnnnnnnnnnnnnnnnnnnnnnnnnnnnnnnnnnnnnnnnnnnnnnnnnnnnnnnnnnnnnnnnnnnnnnnnnnnnnnnnnnnnnnnnnnnnnnnnnnnnnnnnnnnnnnnnnnnnnnnnnnnnnnnnnnnnnnnnnnnnnnnnnnnnnnnnnnnnnnnnnnnnnnnnnnnnnnnnnnnnnnnnnnnnnnnnnnnnnnnnnnnnnnnnnnnnnnnnnnnnnnnnnnnnnnnnnnnnnnnnnnnnnnnnnnnnnnnnnnnnnnnnnnnnnnnnnnnnnnnnnnnnnnnnnnnnnnnnnnnnnnnnnnnnnnnnnnnnnnnnnnnnnnnnnnnnnnnnnnnnnnnnnnnnnnnnnnnnnnnnnnnnnnnnnnnnnnnnnnnnnnnnnnnnnnnnnnnnnnnnnnnnnnnnnnnnnnnnnnnnnnnnnnnnnnnnnnnnnnnnnnnnnnnnnnnnnnnnnnnnnnnnnnnnnnnnnnnnnnnnnnnnnnnnnnnnnnnnnnnnnnnnnnnnnnnnnnnnnnnnnnnnnnnnnnnnnnnnnnnnnnnnnnnnnnnnnnnnnnnnnnnnnnnnnnnnnnnnnnnnnnnnnnnnnnnnnnnnnnnnnnnnnnnnnnnnnnnnnnnnnnnnnnnnnnnnnnnnnnnnnnnnnnnnnnnnnnnnnnnnnnnnnnnnnnnnnnnnnnnnnnnnnnnnnnnnnnnnnnnnnnnnnnnnnnnnnnnnnnnnnnnnnnnnnnnnnnnnnnnnnnnnnnnnnnnnnnnnnnnnnnnnnnnnnnnnnnnnnnnnnnnnnnnnnnnnnnnnnnnnnnnnnnnnnnnnnnnnnnnnnnnnnnnnnnnnnnnnnnnnnnnnnnnnnnnnnnnnnnnnnnnnnnnnnnnnnnnnnnnnnnnnnnnnnnnnnnnnnnnnnnnnnnnnnnnnnnnnnnnnnnnnnnnnnnnnnnnnnnnnnnnnnnnnnnnnnnnnnnnnnnnnnnnnnnnnnnnnnnnnnnagccccaggggctgggaggctggacctcgggagtgggggccgagccccagtgggcacggggacggcccccggcggcggccccggaagcggcgtggacgcaaaggccggatgggtagactacacgaggccgcagccaccaccgccaccgctgccaccgccaccggaggcacagccgaggaggctggagccagcgcccccgagagccaggccggagtttcaagccgagggagagcccggggccccagacagcagggccggcggagacacggcacccagcggagacggggacccccccaagcccgagaggaagggccccgagatgccacgactattcttggacttgggaccccctcaggggaacagcgagcagatcaaa

SEQ ID NO: 38243 - DNA, 802 bp, Macaca Mulatta
  misc_feature (1)...(802): n = A,T,C or G
gggaagtgatctagtggaagttggaaattccagctaatgggagagaatgtaaatgtttttgagtgcaaaggtacatattaagcttaggaatttttgaatttttacgtcaatttatattttaattcttactgtacttggcatgcgcaataatgcagcacnnnnnnnnnnnnnnnnnnncagtgcaaggactttattataaaggttggatgtagttttatttagaaatttaggtgagagattttggccttttttattgcataaattgggccagaaaggcagggtagatttcgaagcactggttctgttgaagttaagtttattaagcctgggaacattaaaagctaatttataaaagcaatactttttaatatgaaaacttactgcaaagtttgtttatacttttgcctaaaaaaggaaatttgatgggatactgtggcaaatcataaaaatcaaaaaccagataattgaactttgaagttatagaaaatcagagaggggtaagtttattagggcattttgttctgatggttcaaccagagggctgggaaatagcactgctggaccaaacagaacaaccttttagaagataaaagcgagcaagaaggaatctggtgaattttagtcatcccagctttttagtcttaaccacagttctcactttcttcaatggtacctcaaaaagctggagcctctctgccatgattatgcttctacaaatttcctttgtaaagagactcaaagctaatgatagctttaaagaaaagttaatgccttctcattggaaatgtataatccaataaat

SEQ ID NO: 38244 - DNA, 639 bp, Macaca Mulatta
aaagggaaactatgacctaagacagaggtaccaatatctgattagtattagccatcccattccaacaacaaatcactttaataaggcatttttagaagcagcaaagcatagtggttaagaacgtatgttctagaactagacagtctgggtttgactcctgctgccacttattttattctaaaactttgggcaaattattacataatctacccatgcctcaattggcctaactgtaaaatgggactaataatggtgtccaactcataggattgctatgcaggctaaaaggttaaaagagttttatatttctaaaacaatgtgcttgtaatagtcttggcacattgtaaacattgtgtaagtgcttattaaacaaataaattcgtgcttataattgaagatcgccatataagatacacattctagtgatctatatgtttatcattagatatatgatgtatatacacactcatatttcagtcccctcagggattaacttttaattccttgatttgcaaatcaagttgtaaattacatgtataaataaagtacctttgtagtgatttgttcattataaaattatgctaactatgttggttttcatgtggaataagctagctttataaataaagtttgaaagta

SEQ ID NO: 38245 - DNA, 813 bp, Macaca Mulatta
  misc_feature (1)...(813): n = A,T,C or G
gggagtcctgcctcgggataagtaaaaggatggcaggagaaggtcacagagatttttttcctgaggtctgcttctgagtcctgacatatctaacgttataacaaaagacagtaacaaggattatgggagttatgaagcaggaagcgtggacaagaatctccatatataaatgtgtgggatacagtgaaagcagtgcttagagagaaatttaaaacatgattacatgtattagaaaataagaaagatctggccnnnnnnnnnnnnnnnnnnnnnnnnnnnnnnnnnnnnnnnnnnnnnnnncgnnnnnnnnnnnnnnnnnnnnnnnnnnnnnnnnnnnnnnaccggnnnnnnnnnnnnnnnnnnnnnnntgaaatgcaannnnnnnnnnnnnnnnnnnnnnnnnnnnnnnnnnnnnnnnnnnnnnnnnnnnnnnnnnnnnnnnnnnnnnnnnnnnnnnnnnnnnnnnnnnnnnnnnnnnnnnnnnnnnnnnnnnnnnatgnnnnnnnnnnnnnnnnnnnnnnnnntgactnnnnnnnnnnnnnnnnnnnnnnnnnntctaatactagtaatctgtttgtactttagaacactataaaaaaagagcaaataatatgccaagtaagaagaatgaaagatatcctaaaaatagagcaaaaatccaaaggatttaaaaatataaatgggattttataaaatcagtttaacccaaaagcaattttttctaaaagtatccataaaaattggatcagccctctaaacaagaaccggcttaaaacccctagagggaaaaacaccaattggctccctttcagc

SEQ ID NO: 38246 - DNA, 775 bp, Macaca Mulatta
  misc_feature (1)...(775): n = A,T,C or G
ggaaaggagccaggatatacaaggtcacatgtgtgagcatatttctaatacggaaactttcaaatcttcattttagtctggtgaaaggctaccttttaaaacaaactcaagtagcatgaaagcattctaacttttgtgttaaatgttgttttccccaaaggaaagaaaaaatatggcatagaacacttatcttcaatcactttatatttactttgaggtaaatcttctcagtggcttaaaaccgtaaacaaaaattccatgacaatgactcatagattcctttcgacatgtgactcagtcctagtggtcagcacttgggactcttgtccacttcatcaaaaccattcctgcttttatctgcttaacatattggagaaaatgaaacaaacaacaataataaatgttctgttaccaaacatnnnnnnnnnnnnnnnnnnnnnnnnnnnnnnnnnnnnnnnnnnnnnnnnnnnnnnnnnnnnnnnnnnnnnnnnnnnnnnnnnnnnnnnnnnnnnnnnnnnnnnnnnnnnnnnnnnnnnnnnnnnnnnnnnnncggaaggaaggaaagaaggaaggacnnnnnnnnnnnnnnnnnnnnnnnnnnnnnnnnnntgaaggaaggagaaaaaaagatagaatgtgacttgtgaaataactgtaatcaattactatctgtgtgggaatataattatacacactaaatttctgtcactnggtaaatatttttattgaaaatgtttacttccctacataaatagtgaaatttcactttctctgg

SEQ ID NO: 38247 - DNA, 294 bp, Macaca Mulatta
ctgatccatggcacaggtgatacaaggcaagctagaaaaaaggcctagagagtaaaggcatgtgtttactaagcgatcgtctgagcaggcaaacccttgggatcaagcctgccctggaagacagtgaacgctgcatcggggccgcctaatgcattatctcttcagggcagcattgtgaagctggatctttttggattatcttttagacccagagagaatgtctagctaagcaggcagagaagaccataagcccaaatgctgtcactcacttgtttactatcctgggcaatcaag

SEQ ID NO: 38248 - DNA, 1468 bp, Macaca Mulatta
  misc_feature (1)...(1468): n = A,T,C or G
ttgttgaatagtcatcgagttgtattatggtcacgaatgtgctgagcagngataagtagtattagagaatgtgcgagacgaatatattacggagggcaggaatatgtaaaagcataagattagagagttgacagctctaccagagtttgtatcttgctatgtaacatacaacgttgatgtatgggggattttaatgaggagtccacgtttaaggtttgttgcgtgtttcttgtaggtaagtgctaacccagtattcaaacaaaccctgagaatatggtcccagttgtggtttcttgtatgggccagtttttgcctcatcataattccacagtaaaataagtggggaaattatcgcttttcaaaggtgctctttctatgaaggatgtaacagggggtattcttttctccctcggaaaggnnnnnnnnnnnnnncnnnnnnnnnnnnnnntgtaaaaattgtgaattgcatgttgtttggaaggaaagatctttaggatttttaaaacgggtgaaaagtggtaagttaaactggcatggggcagaatgtggggattcagattaatccccttggtctttttgtggggaccagtgaattaatcccagtttgggtaaattaatgtagggaaacaagtatttatattaatacgacttgaacggtattcaaagtagtaatatttgctgaaatgttttctgaatagttttcattatgtggtccgtagctggcttcctcctttgtgccaagagtttactcagcatattataatccttggaaaatgaagtagaaactgcatgagatttttattttcacactccttcaacacgtaagactttccccactttgtgttacaactaaattggttgactaatgtcatataatctgaggaatacactgaacttctagtagatatttaaggtccctttaggatcgaaacttacagaaatcagattccaggaattatccaatctcattttgatttcagataaaacattaatttgccttattcattaaatatagtgaattcattatgaagtctttggcatacttttaaaggtggaagtacaaaattgtgatattatacatatactttgtgtgccatgggtcatctatgtacagtaaaataaagcatgacattattgacatctagtcacaaagaaaacttaaaatatcatctgaatgttcaattttccccccaagtttaataagacttgagagtctaaattaaaaataaattgtgttttaggttctagtcacccaataacttatcagatccaggcttaattattgcttcatgttgtaaatttagcatagaatgattctttgagtaaagatcaagaaataattaaatatgatttgaaaaagcctcgtgccgaattcggcacgagggcgaactctaacccaccggcagagtattcttggacgattaatgggaagtttgtgccatccggaccagaactctttatcccccaa

SEQ ID NO: 38249 - DNA, 357 bp, Macaca Mulatta
aagtcgaaagattctccgttcaatgtccagaaaagtgacaaccaacaagcggctgctttccattatcatcttcctggagctcgccatcccgggaggcctggtttactacaaattctttcccaaccattgaacttcctgtagggcagggtttgtggaccaggactttcaccttgtgaatgcatgatgttagggatgtggacggaatgagcatattgctgctgtgggctaacagttcaggcacgcactgtgtagccaggctatgggaggagggaggaaagatggaaagccacttaaatgtgaaggaacagcaacaagaccagtatgatataccaaggtaataaatgctgtttatgactt

SEQ ID NO: 38250 - DNA, 296 bp, Macaca Mulatta
gaggtgcagctggtgcagtctggagcagaggtgaaaaggcccggggagtctctgaagatctcctgtaagacttctggatacagctttaccagctactggatcagctgggtgcgccagatgcccgggaaaggcctggagtggatgggggcgattgatcctagtgattctgataccagatacagcccgtccttccaaggccaggtcaccatctcagccgacaagtccatcagcaccgcctacctgcagtggagcagcctgaaggcctcggacaccgccacgtattactgtgcgaaaga

SEQ ID NO: 38251 - DNA, 908 bp, Macaca Mulatta
  misc_feature (1)...(908): n = A,T,C or G
gagcagcgttgcacctgccggccagtacttgtatgttcttaatgacatcattgaagatctagatggcataaattatgacgtctgccatcgcatatcagtaaaggagacagtcatttttggaatgtggagagaacacggaacaccagtcaccaagtgtatggaggatgcaaagcttaccgttctccactgatgggggcctccggaaagagctgtgccttgtggttggcctggccgtcttccgtcccgaggtgaaattcctttaaaagctcagactctgacctatgtctttgaagcagctgctttgtagcatccctctctttactgtcctcgttaggactgttttgtggttccgtgaaaatgtttagcatccttgcagaattacttgagaaggggctggtaccagtgtaaagagtctatttctgtaaaactacgaacttttgcatagggaatttattctaagcagggcatagccatgatccagagctgctgctgctcattgccagtccttgtgggtggcggtgattgctggacagagcctctgtaggctgactctcatccttggtgtgtcagcccgcagcaggctgccagccgtccatgacaatcatgtgagctcagncacagacctcagttggcggtttgatccctggcagttcctccagcaatacttggtgagaagtcccccatttttcccccttaacgggcattcccaagaagaaaggccgggttccccgaagtctaagatctcctgcagcgtcttggagaacaaanggcggagagaangccncgggcgctcgccgcaagtgtggtnggccaccgaaggggggttgcaagagccgattaccataacatgcttgttaaaacgaccggccagatcagcgtactgaggaggagtttnccctacttactac

SEQ ID NO: 38252 - DNA, 764 bp, Macaca Mulatta
  misc_feature (1)...(764): n = A,T,C or G
ggcttgacaaatttgtattcccagtctcccgtattgctactcaaattgctccactatgctcactaagtccttgttaatagtcttaccctccttgaaacacttgaacacttgattactttagctttgagaagataccatctccgcgtatgctgtcttagtctttgcaggcacctcttcccttaaatatctgttcttcgtattttttttaaaaatgtgttttagactgccttattctatgtcatctcgctagctgatcttatttccttccatggtttcgttaccacttatatgcaaatgactctcagattcattatctcctttctagaccttccctaattgatatatctaattgctaacaaatcctctttgctgtctcaggcactacgtgttattgatcttgcccccaatcctgcttctctcatgtttcctctttcactaaatggcattaccactaccaaccattcatttgtcctttttcccaattctccaatgctaccactttaattcaggccattaacctacctaattatagcaacagcctccttattagtctccctgtttttatttttattcctttctacactacaactaaattgctccaaaagacttactgatcatatcactgcactgctttcaccattgctcttanggtactatacaaatttatcttcatctttaaggtctcagtatgctacttcatctangaaaccttcattgatgctctctagattaggtgccccttactcctcatttccctatacatt

SEQ ID NO: 38253 - DNA, 638 bp, Macaca Mulatta
gggggagatggtgacagcatgagtgataagatgttctctccccttgctctttctgaagatgacaaactccatcttttttctgaagtcttactaaaggatctgaaccaatgatgctgggttcacccacttctccaaagccaggagttaatgcccagttcttacctggatttttaatgggggatttgccagctccggtgactccccaacctcgatcaattagtggcccttcggtaggagtaatggaaatgagatcacctttacttgcaggtgggtcaccaccacaaccagttttaccagctcataaagataaaagtggcgctccaccagttagaagtatatatgatgacatttctagcccaggacttggatcaacacctttaacttcaagaagacagccaaacatttcagtaatgcagagtcctcttgttggattacatctacccctggacaggccaaagtatgtttattcagcaagtatcggtcagccccaaaaacaacttttcctctgcccagttggatccttttatactcaagaaattcttgacttcaaaaatccctccataccttgggggacgggtttggttccccaaccactgccccacatttatcaattgcccggtgggaattctaaaatggta

SEQ ID NO: 38254 - DNA, 382 bp, Macaca Mulatta
  misc_feature (1)...(382): n = A,T,C or G
ggttctaatgattttagcacaaaaaagtacataaggtaaggatatgttaattagctttatttagtcattctacatcgcatgcatatttcaagacattgtaccccataagcatatacaattataatttgtcaattaaaaacttaaaaagaaatttaaaatgtagtggctgaaaagaataaacggaaatcaaataaccatgttagagattattgttaaactccataaaagttattagtttgaactttaaaagaaaaaaaagccaattgctgtcattactagtatgagctttgctctacccagctgtaaaaattcctctctttcttataataaatgtccacaaatatacnnnnnnnnnnnnnnnnnnnnnnnnnnnnnnnnnnnn

SEQ ID NO: 38255 - DNA, 98 bp, Macaca Mulatta
atagggtctttttttcggtaatgttgtaaaatgtcatgatgctactgtgactctgtgatatgctttttcattcattggtcttaatatatttttcaata

SEQ ID NO: 38256 - DNA, 681 bp, Macaca Mulatta
aagatgatcatggttcagaatatcttcagagaaagcaaaatctttaatattgcaggcaggctggcaatacagaaatacatttctgtgacttcatttcttaaatatgctgagacccaatttggactgcatttggcagaaatgatggagtaaacagcaaggctttaaattaaattaatagttacaaggtaggttggctcttaggtgaatttagccatgtcagctaatagcttttctatggtgtataacaaatctgagttatgttatgctgtgaattattcagtgcattataagcaatcatagtttaaacaatgtgagtcatgcttctgggcttcattggtcagtgtaattggcctttttattttctttccataacttatctgctattattaatttcttactccttattaatctgttagctcattatctttagcttactaacttaaaaattagattaatatcaaaataagaatagcactatgaagagttaataaaatgcaatttcatgttagagctagaataaaagtaattgagcagttatttgcagtgtttcattacaacatttatgtgcttaagatttctaaggttttaaaagttacctttaatataatccttagaaattcagaaattcctgatattagattatggggtttgcctgatttatactggtttcactgtagattt

SEQ ID NO: 38257 - DNA, 757 bp, Macaca Mulatta
  misc_feature (1)...(757): n = A,T,C or G
ggctatgtgatcaaatgcacagagtaatccagtcatcacatactattctaaaaagacagtctaatcaagcacgctgaagtcggaagctggaaggcataatattacacagtcccatgggtgtgttcctctttaaatgagtttgtgtatgtgtgcttttttgtttcatggaactgttttatggtaaacaaccaaaagtagagatattttaacattttctttttactcaatctatttgaatatgttcgccataccattttccctttgaaattctaatttcatttgcttaagaccaacattaattatatcaaggaaacttcctcaaattatcattttacttaaagatgtgatcacaactagatgttgcctaacacaattcatgttacattaagaaataacttaatcctttttggttcttctttgctgctcctcagaagagaaataagctagaggataggtttcatcttgtcacctctcacagataaacaacgttttggcctcagtcttagagtcacttgtcaatttactatttaatacttttttttacaaacaagtataagccacctgactgggtnnnnnnnnnnnnnnnnnnnnnnnnnnnnnattgngaggatgaggccannnnnnnnnnnnnnnnnncgagttcgagaannnnnnnnnnnnnnnnnnnnnnnnnnnnnnnnnnnnnnngtagaaaaattagtcggggcatgtttcgtgtgtgccctgtaggtcccagcctactcaagaaggttgaaga

SEQ ID NO: 38258 - DNA, 1266 bp, Macaca Mulatta
  misc_feature (1)...(1266): n = A,T,C or G
gttgcttcctcatggcacctgctttccttcctctgcggtctggggcagggacagagagaggaccatttagatgagaatggaagggaggggaggggctgctggcttctcactccccaggaaggctcccctgctgaggccccttgagctgggagtgtcctgcactgtggtctcagcatgttccaggcccccccggcccctgttctctgctgggcctccccttcccaagggaactaggggaggaggctgggatctgcccagagcttggtcctcaccttcctctttctgggctccccagcctgtcagaccctcgctgtctctttgctatgaccacacagttggacagaggcttctccaaggaaaaggcagaggccagggaccagcaacccccctgtggctgaacatggaactctcaggccaagaggagcccctggggcgagcaacagccccgtggccttgctgttgggttcaggcggtgcagggaggcaccacgggcctccgtgaaggccagtgaaatggacaggacaaggtgcttgacctgtggctggagagccatcttctcacctgctggccgcgtggctctgggaaggcactgacacttcataaaacttgcctggtnnnnnnnnnnnnnnnnnnnnnnnnnnnnnnnnnnnnnnnnnnnnnnnnnnnnnnnnnnnnnnnnnnnnnnnnnnnnnnnnnnnnnnnnnnnnnnnnnnnnnnnnnnnnnnnnnnnnnnnnnnnnnnnnnnnnnnnnnnnnnnnnnnnnnnnnnnnnnnnnnnnnnnnnnnnnnnnnnnnnnnnnnnnnnnnnnnnnnnnnnnnnnnnnnnnnnnnnnnnnnnnnnnnnnnnnnnnnnnnnnnnnnnnnnnnnnnnnnnnnnnnnnnnnnnnnnnnnnnnnnnnnnnnnnnnnnnnnnnnnnnnnnnnnnnnnnnnnnnnnnnnnnnnnnnnnnnnnnnnnnnnnnnnnnnnnnnnnnnnnnnnnnnnnnnnnnnnnnnnnnnnnnnnnnnnnnnnnnnnnnnnnnnnnnnnnnnnnnnnnnnnnnnnnnnnnnnnnnnnnnnnnnnnnnnnnnnnnnnnnnnnnnnnnnnnnnnnnnnnnnnnnnnnnnnnnnnnnnnnnnnnnnnnnnnnnnngccacaaaatatgcagcttcctttccctgagaaaatggcaaagaaaattaaacacagaaggccagggagggtgcgtggaaatggttcacatgttcaaaagttttatatgtatagaagaaagctgtgaagtgtgaagt

SEQ ID NO: 38259 - DNA, 651 bp, Macaca Mulatta
  misc_feature (1)...(651): n = A,T,C or G
ttttgcatggtttctgacgtaatctctggttacttgagtaagattatttccaaagggataagaatgtcttaagtgccaaaaaataatgaccatttgtgcagaagatatacttttgtatccgtttgtacacaagtatttaaaataactttttttatttttaaatagagatgaggtcttcttgctttgttgaccaggctgctttcgaactcctggcctcaagcgatccttttgtnnnnnnnnnnnnnnnnnnnnnnnnnnnnnnnnnnnnnnnnnatgtccatgcagtctaaatatattgaggtgtagtgaaggcgatagaactgagagtttatttgattttgagttttccttctgtgaaagagaattattaagaatttagatttaaacttatatgtaaccaagtatatgaaatctggaattgcattggctgagatggtagccattaccttttttggctatttaaatttaaattaactaaaattgaaagttcattttatcagttgtcatacgtggctattggctaccgtattggacaaaacagaacatttgcatcatcacagaaagttgtattgcatagcactgcagtgcattagcagatatgaaaagtgtgtggttattgttttcataacatgctgttgtaacttgtctacc

SEQ ID NO: 38260 - DNA, 403 bp, Macaca Mulatta
  misc_feature (1)...(403): n = A,T,C or G
ccgcccgcctccccggacgagccgtcggtggctgcgtcgtcggtgggcagcagccgcctgccgctcagcgcctcgctcgccttctccgacctcactgaggagatgctggattgcgggcccggcggtttggtgcgggatctggatgagctgcgctcggataacgactatctcaaggnaggatgagattgaggagctgcgggccgagatgctggagatgcgagacgtctatatggaggaggacgtgtatcagctgcaggagctgcgacagcagctggaccaggccagcaagacctgccgcatcctgcaataccggctgcgcaaagctgagcgccgcagtctccgtgccgcccagactggccaggtggacggcgagcttatccgtggtctggagcaggatgtcaag

SEQ ID NO: 38261 - DNA, 326 bp, Macaca Mulatta
  misc_feature (1)...(326): n = A,T,C or G
gaatagtaagtggtacttacagtaccagggcaatttacgtgtattttggggtccacttctccaggacatcatccctacccaacaannnnnnnnnnncaacaccaacacttcagttcattcctctctcatcttctggaaagacagaagttttcactatgagacacaggaattctggcctaagttgtcccagtccttcacggacagcaagaatccaagtgtccccacgcgtcacctgaagccccaacttctggaaacgccctcctttcctcgcctccacgagctgcgagagcagaacatgcagccgcgggcgctactgctgtcgccgc

SEQ ID NO: 38262 - DNA, 701 bp, Macaca Mulatta
  misc_feature (1)...(701): n = A,T,C or G
catgacagccatcaccatgttctgatgacaggntgaacctctaattgtctgaattccttagacaaatatgaaaacaaagtttagtatgaaactcattccatgaaggtatactttgctactttttgtactctctttagaaaaattttcataggttatgttgcattctatggtgtaattctgaacaatggtgaaattaaagatccggcaacttgaatttagtatgtttaggttgattcacatagctgttaaatataccctagaatacaaatgaatactgcttactttgagaatcatgcctccattggggttgaattccttgtttgccaatgactgactggtgccttctttgtcccccccaccccatttccatggaatgtatctttcacatccccccgtctgttggaagcaaacacttggaatgtagcacagattcttaatgctttgagagcttgtgttctggcatgaatggcnnnnnnnnnnnnnnnnnnngttccagcaactgattggatcattttggctaatattctgtttgaacaacagtacctatttgattagggtttttcctttctttataattccccaagcttgcctctgttatgtttcgtaggaaatgaatctatgagcagaaaaccttcattgatatgtaaatatcttagaaccaagttaatactcaatattcttttcatcttaatttcagaaac

SEQ ID NO: 38263 - DNA, 700 bp, Macaca Mulatta
  misc_feature (1)...(700): n = A,T,C or G
ggataaaaattcatggcaatagagatttgtttagaatttcaaattgaataatatgctcaataagtatgacaaggtaaatgtaggaatgcactttatgattatacaaattaaaattggttgtcatataacgtttttataagtattcatatttgtaattgcaagtggctaagaacttgtaaattcatcattttgtcaaaaccatttttttagaaaataataatttctattaaatacaaatatacttattacaaaattttcaaaaatcgtaaaatataacaaataaaatgtgtcattttttccaataattgttgtgttaagtgagtttatttttgaaactagatagttaataaagttggtttgaaatctttgtgtgcacatttaacgtttatgcgatactgttttgtttttgtaaattatacctttaaaaacattaatttatgtttataatatattacatgtgtatctagtttctctcatgtcaacagtctgcattcnnnnnnnnnnnnnnnnnnnnnnnnnnngacggaatctcactctgtagcccagactggagagcagtggcgcacnnnnnnnnnnnnnnnnnnnnnnnnnnncggttcaagcagnnnnnnnnnnnnnnnnnntnnnnnnnnnnnnnnntacagtgcacgtcaccacacctggcctattttttgtaatttttagtaaagacaggggttcc

SEQ ID NO: 38264 - DNA, 667 bp, Macaca Mulatta
agctgtccagagtgagaggtgacagagggctaggtactttaagatgagggagccttagacatatgggaatgtgatgcagtgagttagaaagagaagctgaacacacaggatgtctggatcccctcccccttggattgtgatggtattttgatatcaagcttatataatacaagctatcaacatcttatagaaactgttttaccgtatgactgtgagtgatttacttcacagatcatacaaatgtaatgtttaggagaaacatggatgataatcacgctacagaggtgcagcatggctaagagcaaggcctctacagtgagactgctgagctcctggatctgactctgtcactcgctagcttaggaccaggcccaagcttcctgaccttcctgtctgtgtttcctggtctctgaaatgacaccacacctagggggtacgtgctctacagtacctccttgtgggctgttgtaaggattgcctgtgtgcattatgcaagcacaatgtgtacatcatgtgtgccttatgcctagcacatagtaagtgctcagtaaaccttagtcctggtggtgttattatcatgatgccatttcaatcatttctggttgtagaatctgaaacctagagaatgttgagaacctgtccaaagtcatacagccaaaactgtggc

SEQ ID NO: 38265 - DNA, 317 bp, Macaca Mulatta
agacttcctcctggggataatgggaaggagaacctcatggccaggtttgtgccttaggtccccaagggggagcctggaaggcccacttttttcttttggccaatcggacccccagaggctctgcctccccacacccaagaaaaaatccccaggctctgggaggccaagccttagcccctctcctgtgctgctccttcccccagagacccgcatctgccctcagcacttcagggccctgcatgtgcccgcacctctccactccccgggctcagcttggacctctcttctgaacatcagacttgtggatcctgctcccc

SEQ ID NO: 38266 - DNA, 306 bp, Macaca Mulatta
  misc_feature (1)...(306): n = A,T,C or G
gatgaaccactgtggaactcaggcccccatctggctgtctctgagagattcagaaacactgccatctcctggggagatcaagcaattgacagcttgtgcaacatggcagtttttgtttagcactacaaaagactgctgtctctttcaaatcccagtgtctgtaagaaactgtgggaacttttttgtatacttactacagccaactcagggatgtatgggctattgtgcagaaggnttctttgccaagattgcaaagtacccccaaacatttgatgtgaaagcatcaaagcagacatctcacatttt

SEQ ID NO: 38267 - DNA, 795 bp, Macaca Mulatta
  misc_feature (1)...(795): n = A,T,C or G
ggtaacgaaggagtagagttgttgacttagatgataagtctgtttaactttttaaggactgctagactgttttccaaagcaactacactattttatatttctacttgttgagggttctgctttctttacatccttgtcaacacttgtggttatctgaatttttattataactgttttagttgatgtgaagttgtacctcattgtgcttttgatttccatttccctgatgactaatgataataagctgtgcccactcttgtcagtagcaattatttaaccccagctgtgttcttcctatcatctgtgtgctcccaggcatatgataaccttttccctggctgaccatttctagtagcagcaccgtggggcttatcagaatggagggttggtgtaaatatgatattatggctgtgtgtaaatagcattcttatataactgtttttcatactgagaatctcggtcctagatcccctttttaatactaatttaccaaaaagggagaaatcttaatgctgggcttaacagncttaattagacaaatcctgccnttaaataaataaataaccgaggatatgacaaaaggaggtatgaaggatctgggattatttggctgaattgtgatttgaaaatttatgacattgcccggccgcgnnnnnnnnnnnnnnnnnnnnnnnnnnnnnnntgggaggcccaagcccggccggatcacaagggtcaggaagatcgaaaaccatggttgaaaaccccctctcttccttaaattcccaaaaattttccccggcccccgtttgttgg

SEQ ID NO: 38268 - DNA, 816 bp, Macaca Mulatta
  misc_feature (1)...(816): n = A,T,C or G
ggcatggtggcagacacctgtagtcacagcaactcgggaggctaaggcggaagtatggcgtgaacccaggacttgnnnnnnnnnnnnnnnnnnnnnagcaccactannnnnnnnnnnnnnnnnnnnnnnnnnnnnnnnnnnnnnnnnnnnnnnnnnnnnnnnnnnacagcaccccccatattaattaataaaagtcactatcacaggaatcaggacattctgagttctttccttttcttgggagtagtggggcagagagagaggtactggttagataacatcaagtgtgtttcaataagttcacttgctctgactgctatgcaaggagcaggaangcaggnaagctattatgatagccaaagttagaaacaatagcgctaattgggggggcctggaacatgaaannagaaaatagccaagagatcacggaggggaaaaaacccaacctggaataagggggtttttggggggaagggaaaaggaaaaatggtccgggaaaaaaccccggttttcccctttaaannnnnnnnnnnnnnnnnnnntagggcaaattcccttaaccgggaaactttggnnnntttggannnnnnnnnnnnnacnnnnnnnnnnnnnnnnnnnnnnnnnnngggggccaaggccaagttataaaccttcctcaaaaaaatacccacactttggggaaaaacaagggggggtttcnnnnnnnnnnnnnnnnnnnnnnnnnnnnnnnnnnnnnnnngcgcnnnnnnnnnnnnnnnnnnnnnnnnnnnaggggggagatgatttttaaacccactcttcaaaaaacacaaaaaa

SEQ ID NO: 38269 - DNA, 376 bp, Macaca Mulatta
tcctggagccagtaggcctactgccttcactgcttggttactcctcctggcattttaggttgtcccggctgctgcaggcacccagcaaaccagcccaggttttgctgctaaacaggtcagtctcctttgcatacttctatgcctgggagcccatctcttaaactcaggttggggcccagagctttgccctgtacttttgctcctactttgccccagcatccagggaactgagggatacatcgagggtttcatggaggcaccgaagatggagatgtcccaggcacccagcagcatcatgagtctggtatgtcagctcaccatctcaagtagtgggcaccaaggctgctccagagtactcccctgcccccaccaagct

SEQ ID NO: 38270 - DNA, 860 bp, Macaca Mulatta
ttacagatcacccagagctgaagactctgctgtttgtggtgttctttgccatctatctgatcaccatggtggggaatattggtatgatggcactgatatttacccaccgtcgatttcacacaccaatgtacatctttctgggaaacctggctcttgtggattcttgctgtgcctgtgccattacccccaaaatgttagagaacttcttttctgaggacaaaaggatttccctctatgaatgtacagtacagttttattttctctgcactgtggaaactgcagactgctttcttctggcggcaatggcctatgaccgctatgtggctatatgcagcccactgcagtaccacatcatgatgtccaagaaactctgcattcagatgaccacagaggccttcatagctggaaacctgcattccatgattcatgtagggcttgtatttaggttagttttctgtggatcgaatcacatcaaccacttttactgtgacattcttcccttgtatagactctctcgtgttgatccttatatcaatgaactggttctattcatcttctcaggttcagttcaagtctttaccataggtagtgtcttaatatcttatctctatattcttcttactattttcagaatgaaatccaaagagggaagggccaaagccttttctacctgtgcatcccactttttgtcagtttcattattctatgggtctcttttcttcatgtacgttagaccaaatttgctcgaagaaggggataaagatataccagctgccattttatttacaatagtagttcccttactaaatccattcatttatagcctgagaaatagggaagtaataagtgtcttaagaaaa

SEQ ID NO: 38271 - DNA, 579 bp, Macaca Mulatta
  misc_feature (1)...(579): n = A,T,C or G
gtggacccgggagcccaggacgcaggcggggcttgtgcttcgcgggggcagggcgtagggtgggcctcctcccgcctctactctcgcggtttgctcctcagtctcctttctttgctgattttatgccnnnnnnnnnnnnnnnnnnnnnnnnnnnnnnnnnnnnnnnnnnnnnnnnnnnnnnnnnnnnnnnnnnnnnnnnnnnnnnnnnnnnnnnnnnnnnnnnnnnnttttatctctttcattggagctttctggaccctgtgcttgacggtgctctaggtggcttggagacacacgcgagtctgataagcaccctgccccgggatcatgcggtgctgtgaggcctagcgaagatgaagatagaatgcaaggtagaaagtgctggatacctttagaaagctgcagaactggtgcgatgggagttgagacgtaagaacctgcccgtccgtagggctctggatgctgctgaggcccgaggcccccatggcacatttgaaaactcacccttgtagagtcattcctgcctttgagaggactccctattaagtttaccgaagcacttgcagaactcatcagaag

SEQ ID NO: 38272 - DNA, 1338 bp, Macaca Mulatta
ggggctcggcatctggggacgctctcagctctcggcgcacggcccaggaagtgcccccatctgctctaagttactgtactcagaacaaacgcgcgcttgtggagttgaaggggctcggcatctggggacgctctcagctctcggcgcacggcccagcttccttcaaaatgtctactgttcatgaaatcctgtgcaagctcagcttggagggtgatcactctacacccccaagtgcatatgggtcagtcaaagcctacaccaactttgatgctgagcgcgatgctttgaacattgaaacagccatcaagaccaaaggtgtggatgaggtcaccattgtcaacattttgaccaaccgcagcaatgcacagagacaggatattgccttcgcctaccagagaaggaccaaaaaggaacttgcatcagcactgaagtcagccttatctggccacctggagacggtgattttgggcctattgaagacacctgctcagtatgacgcttctgagctaaaagcttccatgaaggggctgggaaccgacgaggactctctcattgagatcatctgctccagaaccaaccaggagctgcaggaaattaacagagtctacaaggaaatgtacaagactgatttggagaaggacattatttcggacacatctggtgacttccgcaagctgatggttgccctggcaaagggtagaagagcagaggatggctctgtcattgactatgaactgattgaccaagatgcccggggatctctatgacgctggagtgaagaggaaaaggaactgatgttcccaaagtggatcagcatcatgactgaacggaagcgtgcccccaccctccagaaagtaatttgataggtacaagaagctacagccctttacgacatgttgggagagcatcaggaaagaagttaaaggagaacctggaaaaatgcttttcctgaacctggtgcagtgcattcagaacaaaccccttgatttttgctgaccgggctgtatgacttccctgaaaggggcatggggactcttataataaggtgtctcaatcacaaatcttgggtcttcccttcaatgtaatagggacattgtttaaaaattaaggtcccggaatttcaagaagaaaagtcccggccaagtgccccgtggtattatattccttccagccaagaactactaaaggggcgaaattcccaataaaaagcgctgctgtaaccctggtgtgggggggaaaacttatcatgaagcttttaaccgcgtaccctggaacatatccaataataaagggtgggctctccgcagaggttttcaagaataaaaatagggctcaata

SEQ ID NO: 38273 - DNA, 1436 bp, Macaca Mulatta
  misc_feature (1)...(1436): n = A,T,C or G
gggaaaaaaatataacaatacaacaataaaaaataatgacaggaacgaaaatcgctatcttctggctgacagcattttaacatcagtcatgttacccaggtggcattttgatgaccttagcaattcatttatagagatcattctatggaaagttatagttttgaataagatagatatggaaagtagaaatgatagtaaaaaaaaatcaattatcaagaaggactaatcttctgaaactaccaggtgtcctaataactgtaacttaagaagtaaaggaaaacaatggcccatgtagaagtagtttctgagcaggaagtaatcatgacagcaaatgagaaaaatgaaagacttgtaaattatgcccagtgtaaaattatacccagtttctcaatcacaaagaaaggagtactttgatggctcacaatattcataataggccaaattataggtcaaggagggacaaaaatatttattttatattaaatacttcttgatcacctactgtttgccaggcattttgctaggccttgatgaaagaatgatgtaaaagacactaaaatataaattccacagtagggnnnnnnnnnnnnnnnnnnttccccttgcctagactgtctggtattccccttgccttgactgtctggcacaaatttgacactcataaaataatttgataatttgctgagtcaatggaaaagacaggcatggcctctgctactgtgaagctttacttctagcccaacattgatcaatagaaatatacagttggccctccatatctgaagtttccacatctgtgaattccacatctgtgaattccaccaattgcagatcaaaaatannnnnnnnnnnnnnnnnnnnnnnaacaatataatgataaanataccaatttaaaagccaaatacagtgtaacaactatttacatagcatttacattgtattaagnnnnnnnnnnnnnnnnnnnnnagacggagtctcannnnnnnnnnnnnnnnnnnnnnnnnnnnnntgatctcccctcactgcaaacctccacccccccaggtttcaagccatttctcctgcctccgccctcccgaataactgggatttgcaggcactccccacccataccctgggctaaatttttggaatttttaaaaaaaagcaggggtttttgccctggtttggccacaacttgaccctgaaagaaatccccccccccccttgnggctttcccaaaagtggctggggaaattcacggggattgaaacccatctcggcccctggggcgggtattaaaggttttattaaagataaacccccaaaaaaggaatatttaaagggggtacccggggaggggaaattttttttaagggttttatattgcccaataaatataataggccccctccttttttataataaaaaagggaactttgttttacacctcaact

SEQ ID NO: 38274 - DNA, 631 bp, Macaca Mulatta
gggtacaaggcaagttgtcctctcatgggacaatttaggaggattgcttaaagcaggttttcttctcaaccggtgagtattaatgctgatttccaggagtgatgagttaaaagaaccacaaccaccttcttttctcctcctatgattatttttctagctttgcctccaggtagtgatgcgcttttcagccagctgtagacattctactcatttaaacagcagagtttagtttttgtattggaaaggctaaaaactcaaaaagcagagctacagggaatttgccaacagagtggttaccaggtccttgcttggtcatttatgacctaattttgagggagaggagtaaatgcaacagtgatctttaagttactggctgagtggtaaatgcttgcatcaaaaatcctgcattgctgaacagtatgtctaatagcactcatatctcatatagcaagaatcaggtgtcgttggccttgggaatgaagcagagctgatgttacccaacagactagcatacaggaaaagatgggtaataacagaagtccaagcacagatggagtttccagtggaagagagcaagggcttattgaggccaatgagtgcaatggggagtcagagctgtcagccctgccaa

SEQ ID NO: 38275 - DNA, 708 bp, Macaca Mulatta
  misc_feature (1)...(708): n = A,T,C or G
gggggcagatcannnnnnnnnnnnnnnnnnnnnnnnncnnnnnnnnnnnnnnnnnnnnnnnnnnnnnnnnnnnnnnnnnnnnnnnnnnncgtggtggcggnnnnnnnnnnnnnnnnnngtatcccaggaaatcaattcaaaaaggcactgagtggaattagcaaaactttacctatcattctgatcaccatcccaggccagtaagtagttcagctatggcatcccattctttatgatacttgcagtgaatgatgggacccacttcttgcatatctctggatgtcgtaagggtgtttcattgatcagaccatatttacttctctgcgtcttatgttcttgaccttgcagtgttgaatcttcttgctccttgcacttagaattcctgtgacagacataaggcatgtcaacaaagaaaagggcgacagcaaagtccaggcagccagcctcttgggaaaattactgaaactggtactataaatccagtttatgagcttgaaatttcctagtactcataagtattcaattaaatattgatatgaaccttgacacaagtttggctcaagtgctggtagaaagcaaacagggacattcagacaaactttatttttcacttagaggtcatacagttctagagtagtgtgagtaatggagttagctctcaccaaaaacaccgaagaaaatattcaaatcaattattagttatctttt

SEQ ID NO: 38276 - DNA, 184 bp, Macaca Mulatta
tcagaagaattaaagcagaccgcttagtctggggctcctctctactagttccagtgggatatggaattttaaaacttcaaatatcgtgttgaagatgataaagttggaacagatatgcggtaggagcagatcactgctttgagaactatatgcaaccatggatatggctgcgttcaacaagatc

SEQ ID NO: 38277 - DNA, 914 bp, Macaca Mulatta
gggcttttcctgtagcagcatccggggtgagaggaacgtggttttctcctctctccgccatggcttgtgctcgcccactgatatcggtgtactccgaaaagggggagtcatctggcaaaaatgtcactttgcctgctgtattcaaggctcctattcgaccagatattgtgaactttgttcacaccaacctgcgcaaaaacaacagacagccctacgctgtcagtgaattagcaggtcatcagaccagtgctgagtcttggggtactggcagagctgtggctcgaattcccagagttcgaggtggtgggactcaccgctctggccagggtgcttttggaaacatgtgtcgtggaggccgaatgtttggcccaaccaaaacctggcgccgctggcatcgcacagtgaacacaacccacaaacgatatgcgctctggttctggccctgggctccctcacgccctactcaccgctgggtccctgtctcctagggccagcagtaattcgaggaaagtcgcgtgcactctccctctggggtgcggggtaacgagtcgcggctggaccggcgaccaagcaaacggagcggaggaaaagccggtgcttcgcatgcacggcgtgaccgtgtcgcagcgctctgcggacgggctggccccggtctgggtatcagcgccctttcgggggcgacacggggcagctcgtgcgagcgggcgctaatatcgtacccgaccccttgcttgctgcgcccgtccgccgtgttgtggtgtaatccggctccacgggcgcccccgtgtcaccggacgcgtctggccttgccgaccttacgcgcgcccgtcggccgcaccggtcccgccgggtcacactcacgtcgtccgaccccgtccgcctgactgccatctgccgggacacgtttccgtgtg

SEQ ID NO: 38278 - DNA, 730 bp, Macaca Mulatta
  misc_feature (1)...(730): n = A,T,C or G
gctatgcagtatttaaataaattccacttaatatgcaaagcaaccacataccanatagatactgttataacataggtttcattnnnnnnnnnnnnnnnnnnngattcttaacattgtcataaagttgctgagcaacagtgtgaaccccgggttaacagcccttaaccactgagccttaatatttcattacatacaggtggcaagaagagacctgtttaaccagtcccaactttcacctgatatcccaactgcaaagacaggactcaggctttacacctacccattctctaccctgcatatgccttaccccagctgtaccttagtatgtttctctaacataagctctctcaggcttccaggcatattctgttccctttgtccagaatatgtctccactctcttcccctggctaactcctactcatccagtgaatgccagcgtaagcttatcttccttctgaagtcttccctgattctcaggcctgagttgggagttcctctccatgctcctgaaggcccgattcatccacccatagcacatctcaaaccactgcctggctacatgtttatctccccaactagattgtaagcttggagtcctatgaagtcaaagactaggactattttgtatataccatgtgcctgggacacagcaggtactcaataaatattaaactagcgtataaatcagtcaattcaagaccgagagaacctaaagtccaatctcccct

SEQ ID NO: 38279 - DNA, 297 bp, Macaca Mulatta
tgcgcccgtttttgtagactgaaggagttccacgacttggcgcatgcgggtctacgactctttcttctttacttttgttagtgccccttctgcgaaagtagggcgattagtacccttattctcctccttcgccgaccgttgacttcagaccttgtgaacgatgacctattagcatcgaaaattacaacgtggagaagtccaagaattccctaagaggcaaaaccaaggtaaaacatgtgcaaaccttttattagacgtctttgctcgacacgaacgtttctgaagtatcaagggttc

SEQ ID NO: 38280 - DNA, 801 bp, Macaca Mulatta
  misc_feature (1)...(801): n = A,T,C or G
gggtagttaaattagtttcaaaaaatctatttttttaaacaacatctggtgaccagtctctaatttctgaagttttggaatgaaaaggcgccgccccagttcattgctacgaacaatttgctggctgtttaccttaatgccaatctcacccccctgccagacacatatatttccaatgtgttttctannnnnnnnnnnnnnnnnngcaaattcagtttcccgggcatgaagttaatgccattgagtcaccaagtgtcacctgctttaagatgtcatgcttctcttggcacagaggaatcagccacattgtaaagaaaaatgatttactggctatgccttcgcttcagtttgccacagtaccctgataggcaaagtgccgggagaagggagggaggaggcgagactgataatccgcttgatctcagctggtagtttcaatttcctcttcttctttgagctgatgcagtttgagatacctttaacacgaatgatctgaaaagattgaaaaatatctggctaaacccataagcaggagtccacccagtcccccagtcagggctttgtccaatgttcatggacatgtgggcataaccaggaatgggcaggtgaaggaagccacccaccaggccgtggaaaacaccttaatggtgggtatccccataatttttcaaatgccagagtttggccaaaaaggcccccccttccacnnnnnnnnnnnnnnnnnnnnnnnnngttcttaattggggctggaaggttttaattttaaaatatgccccatggggaaatatttacccgcgggat

SEQ ID NO: 38281 - DNA, 633 bp, Macaca Mulatta
cctgcttcgagccactgccccagtgtctgctgctccacgagctgcctgaccgccgcagctgccttgcggctggccaccagtggcggggctacacggtctcctcccacaccttcctgctcaccttctgctgcctgcttatggcagaggaagcagctgtgttcgccaagtacctggcccatgggctgcctgctggcgcccccctgcgccttgtcttcctgttgaacgtgctgctgctgggcctttggaacttcttgctgctctgtactgtcatctatttccaccagtacactcacaaggtggtgggtgccgcagtgggcaccttcgcctggtacctcacctatggcagctggtatcatcagccctggtctccagggagtccaggccatgggctcttcccccgtccccactccagccgcaagcataactgaaagaaataaaagccatcgggcctggctctggctcctctcatcatttggttgggtccttgaaagggtgggaagagggtctggtagtcactagggtttcccagccattccttgctctcatcaaccttgaatgtccttccttatgcttgacctccatccctccagctgtcctttcagtctcctagtttttgcaaactttaagctatct

SEQ ID NO: 38282 - DNA, 818 bp, Macaca Mulatta
tttttttttatggtatttattgaaattcaagtaattgatcagtgcgacagttgccttggggagcatgaaatgccagctgcctgctcttctgccttccagcctgtctaggctgaggaaaggaagacagcagatgtcatggtggtgtgtctggcgcagcttcagctgtcaaactagaaacaatggggcagggcgtctcctgggccaccaccagaccgccccccagttaacatgtggggcaggtgggaatgagcatgactcccagctcccttgccctggctctttctggccccatcatgcgacaggcctgcctgggaaacactgtgcatgctcatctgtggccctgcctgagccagcccctgagcagtgtccacaagagacctgggctcaaggagcagcagtctgcagaggtgtcgagtccttcctctctgtggtctcctcgtctggtcggtcagcatcactgctttgccacctctgaatgtactttccctctatcctgcccacggtgttactgctagttcataaagttgtaaactgtgcaactgctccttcccctagccaggctcacgtggctgctgggctgagtcgcctgagctgccgtggcagcgtcaccaactccaacctcactggccagcagtggggagccgttgttccgttagtcagccactggttgcttggtcgccttgtggtgtgagcctcccaggaaattcctggaacgctggagggaacattttcacccagccttccaagggtaagtcatctaactttggctcggattccacaaggcggggacttggactcaaaattccctctcagctcta

SEQ ID NO: 38283 - DNA, 1440 bp, Macaca Mulatta
gggggacctgctgcttctctgaggaaatgcataatctgttaatactcagacaaaatgagcaattggcagtgctcataatatattccaatttttattggaattttcgatggaatgttatttcaataaagccatgtaaggtgaaactttgataacttcttactcttcaagttagggtaaattctgatccgatattcaaatcatttgtgtactcccacatgcaaaatgctaaattacgatgcagacattaagaaaagtattgactggaggggttgaattcattgagagtttattttatagtctaaatcacaaatactttactcaatttagtttttaaaatagtaaactgaatatttttgtttgtaagcctatcagaatcaatcctttgtttggaattttttttcctgtttttccttactataaatcatttaaaaactgaattaattttcttagatggcctgagtccgtctcttgagaaataagtaaaatactcttcttttcagtatctgtagcatctgaaataggtctttgtatagccagaaacaagttatgttgaagttagcttttctttggtcacagttttgggacaataaaaatcttaaagtattaacacttgattttctactggggcccttgaaacttgtatggaagaaattcaaccagaatatctacattagagtataatcatgtatggtaaggaagatggactagttaatcaagatttgttgtcacttacatttttagtgattttttttccaaaccaattttttaaaaattctaaatgtgtttttgaggtatgtgtacattaattgtaatgtaaactattatacaactgttttttgtgactttatagggcaggtaaattttggctatttactatttgaatacaaatgacaattccattttatggaccactcaaacagcgttaggaaccatttagtgacaaaggattaaaacatcatcgtggatgttaattttgaagatgtaaattatatgttgtttaaatttttccaggcatctgaaaaccttacctgctagacaatgtaagattcacacagagttatctgggattctgaaattttaagtagtacatatcattaaaccattttctctaaatgtaggaagaggagaaaaaattgttatcagatttttctaatgacacagaaatgtaagaaaaaaatcccctttatattgaaaaaagatgcagttgaagtctttttcagacgtgcccaaaactttgagaattttcttcaaccatctaatgctgtgaaggttttttgtttctccctgttcacaaacagttttgtataacagaaatactagctactgtttttccttcctggtgtgtgaaataatggaatcatttgattatggtggacttgttatggtaattcaatttaacgccctaaagaataaaaccaatccactcctttttaaaaaaaa

SEQ ID NO: 38284 - DNA, 783 bp, Macaca Mulatta
  misc_feature (1)...(783): n = A,T,C or G
ggattctagaggctgaggcagaggatcgcgtgagtccagaagttacaggctgcagtgtgtgatccgggatgtgaatannnnnnnnnnnnnnnnnnnntcaacacagtcagatacatctctaaaataaatgcatacttttaaaacattnnnnnnnnnnnnnnnnnnnnnnnnnnnnnnnnnnnnnnnnnnnnnnnnnncagcggctccaatgtgaacactccatagtccctacccaagctcagagaatagtcacactcactggatctgccattcaagatatgcgcagttcggccctccctaatcaaccttggcccttctgaaccttcccttcctcactccatcagcactcctgtccagcgggcagtcaccaatttggaaagccttctctcttctttctccttccaaaccctgcccatccagcaccaccctgctgtcccaccctactgcatggagccttctctaatctttgagcggcctcttccccaaactgccacagcactgtcactcggtctgtccgtaaatcatgggaagtgttttctgtgtacaatgttttacctcccctcttaaatacacctacggggcgggaggctgtggctcgcgtctgtcnnnnnnnnnnnnnnnnnnnnncaagcaggtagatcacttgaggtcaaaagttcaagaccgttctggccgacatattgaagcccccgtctctgctaaaaataccaaaattatctgggtgtggttggccccacccttgtaatccccagctacctgggaaggttaaaggaaggaaaatcc

SEQ ID NO: 38285 - DNA, 191 bp, Macaca Mulatta
tgtctggcctggcggtgcgtctgtcacgctcagcggccgcccgaggctcgtacagcgccttctgcaaggggcttacgcgcacgctgctcaccttcttcgacctggcctggcggctgcgcatgaacttcccctacttctacatcgtggcctcagtgatgctcaacgtccgcctgcaagtgcgtatcgagtga

SEQ ID NO: 38286 - DNA, 214 bp, Macaca Mulatta
  misc_feature (1)...(214): n = A,T,C or G
cccgcccctctatccatcacatggccggagagtcacaaaaacaacagctttggccaagaccgtgacttcaggaaagggaacccggggctctcgcagccagccctcctgcccatggaggacagtttccttcaatcttttgggaggctgagcctnnnnnnnnnnnnnnnnnnnnnnnnnnnnnggcagcgtggcggcccgggcggccccgcggggg

SEQ ID NO: 38287 - DNA, 911 bp, Macaca Mulatta
  misc_feature (1)...(911): n = A,T,C or G
ggtaaggttctgatggtttagacatttaaatataaggaataaagaatatgaacaaacaatgcgcagcagagaaacgtgttttataatattatgaaaatacactcaatgtcattagaactcaggaataagcaaactgaataatctgtggttttatcaataacttggaatatgatgtagtttttaaaaatattgatccagagtctcacttgctgagacagagagatgaaaaaatcacattgcttaagtgtaattttttttaatcaatcataaaacacactatacttggagataccaatttttataggtctgtacaagcataaggaaagatatggaccaagggacatcgagctgttactatctgcttgtttatggggtgaggatggaagggactggaaaaaagttattaatgttattcttatatatatcatgaatacatttttacctttttcaaactaacaaagaccttgcctggataattnnnnnnnnnnnnnnnnnnaaattttttacaaataattttaaagagcccataatatttaaggaaaaaataggataaaacaccctaagggtgaagggcgtttttgttccaagaaaaaacccccccccctgtccctggtctcgggggaaagaacccccgggagtaaactaggtccccaagcccctaatggggcttttaacccccccctatctggttggctcttttatcttgtaaaacatattggcccggaacacaaacgagaccgaaaaacccctttagggggcgaccagtggtatattcccaatttaaaagtcctgggttctgtctcaaaacacaaaatttctcccataaacaaaccagcctataaacccccctttttccatggatcaccatgaaaataattttgggaaaagaaacagagggattttgccgcttg

SEQ ID NO: 38288 - DNA, 116 bp, Macaca Mulatta
gggacctctagatttctaaaatggctcctggtattgactcagaatcccctccccttgactaggctggacctagtgtaacttctgagtcttactagctctttttcttattctcctta

SEQ ID NO: 38289 - DNA, 696 bp, Macaca Mulatta
  misc_feature (1)...(696): n = A,T,C or G
agcctgggcgtatgatgaaacctctactaaaaattagctaggcctggtggcannnnnnnnnnnnnnnnnnnnnnnnnntggctgaggtaggagaatcacttgaagccaggaggcannnnnnnnnnnnnnnnnnnnntgtgtcactgcattccagtctgagcaacagagcaagaccctgtctaaaaaagaagtagtcaatataggagtttaaaattatagcatattagatgcagttgaagagaattaataagtggcactggaggctgaaatgggagaatcccttgagcccaggagtttgaagctgcattgggctatgatcatgccactgcatnnnnnnnnnnnnnnnnnnnnnnnnnnnnnatagaaaaagataagataattaatgactggtgagtagatcagaaggaaattcagactgaagcatgaagaaagacaaaaggatgaaaaacatagagcaatgtgagaaattatttgcaaagatgatcatgataactctttccatttctgtgtacctactctgtacaccattattttgcagctcctcctatcaagaagtagagtcttttttccccaacccttgaattttagctgaccttgtgacttgttttggccagtagaatgtggcagaaatggtacacaagttctgaagcctagccgaaacttcgaatattttgtagttgcccttgctgtcttgga

SEQ ID NO: 38290 - DNA, 649 bp, Macaca Mulatta
  misc_feature (1)...(649): n = A,T,C or G
tgagctatgatcnnnnnnnnnnnnnnnnnnnnaggcaacagaggaagaccctatctctaaaaatatatacatacaaattttataagctatttttctttgctcagtggttgtgctttctataatgtaattaaaatagtaattgcaaagagaatttcttttcatgtatggtgtgaaattaatcagccatcaaaaagccaacataatgtcttttatctctgtgcttctatacttacacaggttttggtagagttggatacatggtttttaactcttataatatgcatcccatattgtaactcgatacaatgagctcttgtagattttaatggtctatgaatagtgcagatttcctagagaactacctctcactgagcatccttatcttctcagctcagtcattataagccatcaatcgtaacattgctcattattgtcatcaactggggaagcccgtagaagagttttttaaatcactggattttgttttacagtgttctgtataatataactgcctccatgtactgtttaaacctgcagcaccccatgcattactgcatataattctagtgtgtatccagttgtcctttttctgtgtgtgtgtgttaatattcttttaaccaaaagtaaataaaatataatccgatttcag

SEQ ID NO: 38291 - DNA, 816 bp, Macaca Mulatta
  misc_feature (1)...(816): n = A,T,C or G
ggggattcaatgtttgccctgagagaattgtcccattctcattgcttctctcctgagtacccactaccacagtgtctctgtcaaggaattacaagtagcaaggaaaggtctgaatgtaaggacagacctagggaccttgcaagcacttgatatctctcctcttgctgactgtttcaacatagacatacaatgaaatgatgagggaggcagtctcggccctcatccaggtatcnnnnnnnnnnnnnnnnnnnnnnnnagaaagcacagataagtggtgaatggtctttttctgacttttattattatgtggactgtgtggaggctttcaaactgaaacccatactgctgcaggacctaaagggagccccatctttatggctgatcaagtacaaccctatatgcctgaatactctgcaaaaaggcctgaaaaattttgcaaaactgatttatttgagaatggcaaggagaaaccttgtgaactttttagcttttggtgcacagcctgatacccagaagggaacattcctgaaaatgtcaaaaccaaaataagggcctattggcctttaaagtgatgacccccaatcagaaaccaggcccaaatggaaattggccttcctgatggttacatggtcattcttttttccctaattagcccaaaatggactattcnnnnnnnnnnnnnnnnnnnnnngtgaccttccaaggggaaacttgggaacatccaggggattttaaatcctatggtcccaaatcctgggtttaaaaaaaggatgggcccaagggcttaactataaaaaagggtataattttaaaatc

SEQ ID NO: 38292 - DNA, 585 bp, Macaca Mulatta
  misc_feature (1)...(585): n = A,T,C or G
ccacttctaacattggaggtcacatttccacatgaaatttgaagggggaaaaaattccaaaggatatcatactgtnnnnnnnnnnnnnnnnnnncagtggatgacattaatagatactgcattaaaaaagatcagtgtctgaatacatagcaataaaaactatccgaaataggccaggcacagtggctctnnnnnnnnnnnnnnnnnnattgggaggtcgaggtgtgtgggnnnnnnnnnnnnnnnnnnnnnnnnnnnacttggccaacatggcaaaaccctgtcaccacnnnnnnnnnnnnnnnnnnnnnnnnnnnnnnncatcnnnnnnnnnnnnnnnnnnnnnnnnnnnnntannnnnnnnnnnnnnnnngtggagcctgcagtaagctgagattgtgccactgctnnnnnnnnnnnnnnnnnnnnnnnnnnngcatctgtctcnnnnnnnnnnnnnnnnnngaaacatctattcaaaataaagcacaaagtgcatagagaaaagaaatagggactgaagataaaaacagagcttcagtaagcagctgtggaacaatatataaagttgcttatcatacatac

SEQ ID NO: 38293 - DNA, 742 bp, Macaca Mulatta
  misc_feature (1)...(742): n = A,T,C or G
ctgtttttctggctcctccgntggaatgcagttacgatcaggctgcatggacaaagcaggtagaggggcaccatcaggggctcttgcactattgtctcctctaaatattacatactcagtagtgccctgcttctaaggctctgaatacaggcttaaagtcatcttgtcctgctggaatttgctgtgcagagccataagcctcccattttgttagtgtcagctaggccagtaggaacagactgggaccttgtctcacactgatgatacctcaaatgttggccggctatgtgaactgcctatttcctattgctggagttttgatttttaactaaatgcaaatctgtagattctctcctctcccatcccagaaaacaaaacaaaataatgctttttgaaattgtttataggactttaaaacaaaatagtatatccaaaattctttatttcagaacacaacaatagattccattaatatagactcaagatcaaaacagcatacctgctaacgatagatggtgttgactccactgggttttgatcaatacaataacaaaccttttccctttgacacactctgaattttgttgtttgcggggagggcnnnnnnnnnnnnnnnnnnnnnnnnnnnnnnnnncgtgcgtgcgcgtgcagtgtccatcagtatcagtgcctgtctgagttaggaaaattacattcctggttctgtatcgaggagaacgatgtatcaagcaacatgaaacat

SEQ ID NO: 38294 - DNA, 840 bp, Macaca Mulatta
  misc_feature (1)...(840): n = A,T,C or G
ggaaggaagggaccaaactgtccccatcaagccctttctgtcaaagcattaattcatacaagagggctctgcttcatgacctgaaggcttcccaaaaggccctggctgccaacactgttgcattggggggttaagtttctaacacatgaattttcggggacacattgaggccatagcaggtcaccacgacaatatatagatacttaaatgaaaactgaataaaagaaaaaagtcactcagtcacatagtgacattgacatcctcaatactgacatgtggttttagctaccgttttgtgcagcacagataaagaccattcccattgttaaagaaagttgtattggacaatgttggtttaggcagagcacatttatacagaaaatttgaagaaataaaagtttgtggacaaataattcctgtttcaaatttcatgttttgaaataattttaaacttgcagaattataaaaatagtacaaagctctcctacacacctttcacctcacttacccatgtgtagcattttaccatatgtggctcctggtgcttggccgcatggcatctctagcctctgtaggcctcctctatatnnnnnnnnnnnnnnnnnnnnnnnnnnnnnnnnnnnnnnnnnnnnnnnnnnnnnnnnnnnnnnnnnnnnnnnnnnnnnnnnnnnnnnnnnnnnnnnnnnnnnnnnnnnnnnnnnnnnnnnnnnnnnnnnnnnnnnnnnnnnnnnnnnnnnnnnnnnnnnnnnnnnnnnnnnnnnnnnnnnnnnnnnnnnnnnnnnnnnnnnnnnnnnnnnnnnnnnnnnnnnnnnnnnnnnnnnnnnnnnnnnnnnnnnnnnn

SEQ ID NO: 38295 - DNA, 377 bp, Macaca Mulatta
gggtgggaacacttttttcaggtcctctagcacggtgagccttgtgccttgtccaaagaactgctgattggtgttactgtcccggtttcactgctggcacagaggtactgagaggtgtgtgaggggctggcagactccagggtcaggggaaaatgctctatccttagtctggagactgttgactcagaggaaaaatctcccctctctgtggaattaaccccataggaatagtggatgaggtgtaattccattcctggatcttgttgataccagtacattttgtcatggcccatggtttgagaacattccagagtgatcttctttcctgtccctataacacggtgtcttgggttctggtagatatcagcttccgtaag

SEQ ID NO: 38296 - DNA, 204 bp, Macaca Mulatta
gaaaatccaagacctggaggccacactgtacacagcgctgcagcaggagccggggcggagggccggtgaggcgctgagcgagggccagcgggaggacctgcaggctgctgtggaaaaggtgcgcaggcagatcctcaggcagagccgcgagttcgacagccagatcctgcgggagcgcatggagctgctgcagcaggcccagca

SEQ ID NO: 38297 - DNA, 796 bp, Macaca Mulatta
  misc_feature (1)...(796): n = A,T,C or G
gggtactccaggatacacacaaatatgtttgctgacctccagtggcccatggtatgcaggcgctttcaatgattttttaaacaaggaaacctaaaaacttccaaaacccaaaattgcagaatgtgatagatggactttgagtggtcattttatgttttaagatgtagtcttgctctgtcaccctggctggagtgcaacagtgtgatcttggctcactgcagcttctgcgtccctagttgaagcgatcctcccgcctcggcctcctgagcagctgggaatacaagcatgcaccagcctgcccggctaatttttgtgtcttttcttcttttagaggcaaggtttcaccatgctggccaggctgannnnnnnnnnnnnnnnnnnggtcatcccccacctctgcctcccacggcgctgggattataggcttgagctacggggcccggccaagtcaatagtttagataaactacaatgacaaaattatgacagtgaagtattaccatattggtattaaagagtctctgcttcgagaactgtttatttgcaacaatagatgaaatgtttcatggaaactcttcatggacaactttacaaaacacacccaaaaaaatccctttgcggaacaaattttgaaagccaaaaatttaaattttccaccatttccaaggaattaaaatttttaagttccaggtacagtccttggttaggtttgcccaaggcctttccctcaaaactccctggggcccccaaaccaatctttctttggcctccaaacttccccaaattaacccgggata

SEQ ID NO: 38298 - DNA, 593 bp, Macaca Mulatta
  misc_feature (1)...(593): n = A,T,C or G
nnnnnnnnnnnnnnnnnnnnnnnncgcatgtatcttgaaatgcttgtaaagaggtttctaacccaccctcacaaggtgtctctcacccccacgctgggacgcgtgtggcctgtgtggcgccgccctgctggggcctcccaaggtttgaaaggctttcctcagcatccgggacccaacagagaccagattctagcatctaaggaggccgttcagctgtgaagaaggcctgaagcacaggattaggactgaagcgatgacatctccttccctacttccccttggggctccctgtgtcagggcagagagtaggtcttgtggctggtctggcttgcggcacgaggatggttctctctggtcacagcccgaagtcccacagcagtcctaaaggaggcttacaactcctgcatcacaagaagaaggaagccagtgccagctggggggatctgcagctcccagaagctccatgagcctcagccaccccgcagactgggttcctcgccaagctcgccctctggaggggcagccagcctcccaccaagggccctgcgaccacagcagagattgggatgaattgcctatcctggatctgctcc

SEQ ID NO: 38299 - DNA, 650 bp, Macaca Mulatta
gtggccctgctggctgtgagagacaccccggacgaggagccggtggacagcgacgcttcggagagcgactcgcaggaaagtgaggaccaagaaacagaggggttggataatcctgagttcgtggccattgtggcctataccgacccgtcggacccctgggcccgggaggagatgttgaaaatcgcttctgttatcgagtctctaggctggagcgacgagaaagacaagcgagacgccctccgacaggtcttgtccgttatgtccaaagacactaacgggacccgcgtgaaggtggaggaggcgggccgcgaggtggacgccgtggtcctgcgcaaggccggggacgacggggacctccgggagtgcatttccaccttggcgcagccagatctccctccccaggcgaagaaggctgggtgtggcctcttcgggggctggagcgagcacggtgaggacgaggggggccttctggagctggtggcgctcctggctgcccaggacatggcggaggtgatgaaggaggaaaaagaaaacgcctgggaaggtgggaagtacaaataccccaaaggcaaactgggggaggtattggcgctcctggccgcccgggagaacatggggtccaacgaggggtcagaggaggcttcggacga

SEQ ID NO: 38300 - DNA, 1604 bp, Macaca Mulatta
  misc_feature (1)...(1604): n = A,T,C or G
ccatggatataattgatagtccaaagcatggctctatcatttatcgcccatccatcctgcccaggcacagaggagcctctgctatcaattgnnnnnnnnnnnnnnnnnnnnnnnnnnnnnnnnnnnnnnnnnnnnnnnnnnnnnnnnnnnnnnnnnnnnnnnnnnnnnnnnnnnnnnnnnnnnnnnnnnnnnnnnnnnnnnnnnnnnnnnnnnnnnnnnnnnnnnnnnnnnnnnnnnnnnnnnnnnnnnnnnnnnnnnnnnnnnnnnnnnnnnnnnnnnnnnnnnnnnnnnnnnnnnnnnnnnnnnnnnnnnnnnnnnnnnnnnnnnnnnnnnnnnnnnnnnnnnnnnnnnnnnnnnnnnnnnnnnnnnnnnnnnnnnnnnnnnnnnnnnnnnnnnnnnnnnnnnnnnnnnnnnnnnnnnnnnnnnnnnnnnnnnnnnnnnnnnnnnnnnnnnnnnnnnnnnnnnnnnnnnnnnnnnnnnnnnnnnnnnnnnnnnnnnnnnnnnnnnnnnnnnnnnnnnnnnnnnnnnnnnnnnnnnnnnnnnnnnnnnnnnnnnnnnnnnnnnnnnnnnnnnnnnnnnnnnnnnnnnnnnnnnnnnnnnnnnnnnnnnnnnnnnnnnnnnnnnnnnnnnnnnnnnnnnnnnnnnnnnnnnnnnnnnnnnnnnnnnnnnnnnnnnnnnnnnnnnnnnnnnnnnnnnnnnnnnnnnnnnnnnnnnnnnnnnnnnnnnnnnnnnnnnnnnnnnnnnnnnnnnnnnnnnnnnnnnnnnnnnnnnnnnnnnnnnnnnnnnnnnnnnnnnnnnnnnnnnnnnnnnnnnnnnnnnnnnnnnnnnnnnnnnnnnnnnnnnnnnnnnnnnnnnnnnnnnnnnnnnnnnnnnnnnnnnnnnnnnnnnnnnnnnnnnnnnnnnnnnnnnnnnnnnnnnnnnnnnnnnnnnnnnnnnnnnnnnnnnnnnnnnnnnnnnnnnnnnnnnnnnnnnnnnnnnnnnnnnnnnnnnnnnnnnnnnnnnnnnnnnnnnnnnnnnnnnnnnnnnnnnnnnnnnnnnnnnnnnnnnnnnnnnnnnnnnnnnnnnnnnnnnnnnnnnnnnnnnnnnnnnnnnnnnnnnnnnnnnnnnnnnnnnnnnnnnnnnnnnnnnnnnnnnnnnnnnnnnnnnnnnnnnnnnnnnnnnnnnnnnnnnnnnnnnnnnnnnnnnnnnnnnnnnnnnnnnnnnnnnnnnnnnnnnnnnnnnnnnnnnnnnnnnnnnnnnnnnnnnnnnnnnnnnnnnnnnnnnnnnnnnnnnnnnnnnnnnnnnnnnnnnnnnnnnnnnnnnnnnnnnnnnnnnnnnnnnnnnnnnnnnnnnnnnnnnnnnnnnnnnnnnnnnnnnnnnnnnnnnnnnnnnnnnnnnnnnnnnnnnnnnnnnnnnnnnnnnnnnnnnnnnnnnnnnnnnnnnnnnnnnnnnnnnnnnnnnnnnnnnnnnnnnnnnnnnnnnnnnnnnnnnnnnnnnnnnnnnnnnnnnnnnnnnnnnnnnnnnnnnnnnnnnnnnnnnnnnncaggtcacgccctagactgctctgaagtttgcagaactgtctgtgaaagcaggctttccaaagggggtcatcaacatcattc

SEQ ID NO: 38301 - DNA, 347 bp, Macaca Mulatta
gacgtcctccccaacgtcgccctcaattccaccgcctatgatccagtgaggcatttctcgacctatggagcagccgttgcccagaaccggatctactcgactcccttttattcgccacaggagaatgtcgtgttcagttccagccgggggccgtatgactatggatctaattccttttaccaggagaaagacatgctctcaaactgcagacaaaacaccttaggacataacacacagacctcaatcgctcaggattttagttctgagcagggcaggactgcgccccaggaccagaaagccagtatccagatttacccctggatgcagcgaatgaattcgcacagtgg

SEQ ID NO: 38302 - DNA, 454 bp, Macaca Mulatta
atgtacccgtcctcattttttcaggttgccttcctttatctggatattttggttgtaagaatattggaaagaaagtgaaggaagctggtttaatccatgtagttgccctgaggatttcctaggtaaaagaagtggtgtttaggaagtaggaaagcagtcaggcccccgcttcccaaatacagtcaaaaagcaaacaggagagtctcctacagtgaggtggacatggctagcttgcctttttcttgtctatttcatagccaaggaggaaggaaaaactggacctcattatggatttacttttgggatgcactgattattccagaggaaggtacaaagtctgagaagcttaaggtatttcagtgtgttttatattactcacttgcaaaaagcaggctcatcaaacacaggtgagtttcaacgcatcttgaatatggcagcatttaaaagtcttcag

SEQ ID NO: 38303 - DNA, 434 bp, Macaca Mulatta
ttacttcacctattgttccattatttttattactaacatggtattatccttacctttcttgttttaatataatggcataaatataggtttaaatttttttccagtttggagctgaagaaagttgatgatgccttctcttttacagactcaagcttttgcaggccgattgagcaggctaaagcagaaatgtgcaacgtgcctttccccagacatttagaatgtgtaatgaagatggaaatttccaagacctgaatccccaaacccagactgatctctcttctcttcttgaatataaaagtaagctggcaagatttaaaaaactgaacccaaataaatattcatcatttttttcttccattctgagtcctacagagtaatgaatggtgctctttgccctgagtttggcatattaaaatgccctgatgtgtgtatat

SEQ ID NO: 38304 - DNA, 112 bp, Macaca Mulatta
aggacagcagcaaaatgtatacaacgcacatttcctatttggaaatctacaacgaatgtggttatgatcttttggatccaagacatgaagcctccagtttggaagatttgcc

SEQ ID NO: 38305 - DNA, 600 bp, Macaca Mulatta
cctcacatggtagttaagtagtgagtaactgtgcgtgtccttagtggtaggtgagtaccagtccccatgaccaaaaatgccccctgatttcctttgaaaaagccactagttctgtgaattgtccttttccctcctgcccctaacagtcctacccctctagcctacattagcatatttctcatgtattttgctggtaagctcatccattagctgcatccttcagctattcctttagatcagggagcaagacctttagattggaggaagtggatatgaagatggattgattcagctcaccttccatgattgcttctgagggaaaagctacagtggccacatttcagatgttcacttttgcagtttggggaggatagagagaggtagactttttgttgtgtgttttataaagtgctctcagtaaggagtgtttgagttgaagagtcatctgatttgaggccactcatgttctttgtaactttgacaaattcttcacttcccactttttcacttcttcccaatatacagtaagtacatgagccagtcatccatacactaaggcctagttgagaaaagcctttgattcaggatggctgggttact

SEQ ID NO: 38306 - DNA, 436 bp, Macaca Mulatta
catggagctgatgtttgcggagtgggaggacggagagcgcttctcattcgaggattcggaccgttttgaggaggattcgctctgttccttcatctccgaggccgagagcctctgccagaactggcggggatggcgcaaacagtcagcggggcccaattcccccactggcggcggtggcggaggtggcagtggcggtaccagaatgcgaggtgagagtgagctggggggaggaggagcggcaggccctgcttgggcctcgctcgggagctgtccgggaccaggagctgtccccgaccgagagctcccttcagccaggggaagagcggggagctgtccccggccgggagctgtccccgactgggagctgtcccaagcttagaacagacttcagaactcgcttttccggctttcctggggtgggctggcttctccacac

SEQ ID NO: 38307 - DNA, 631 bp, Macaca Mulatta
  misc_feature (1)...(631): n = A,T,C or G
gggggttggtctggttctaaagttcacattctttaagcaccacactattcctcctctcaatgtattataaccatactgatccctgaaagtaaaatcaaataactgaacctctacaatttgaacaaagagttaataaaatatcttgaannnnnnnnnnnnnnnnnnnnnnnnnnnnnnnnnnnnnnnnnnnnnnnnnnnnnnnnnnnnnnnnnnnnnnnnnnnnnnnnnnnnnnnnnnnnnnnnnnnnnnnnnnnnnnnnnnnnnnnnnnnnccaaaaaacaaataaaattaataataaaacactaaaaaatactctatatacttttgccccccccctcatcataaagatttttttatatcctttcttcggccgcggttccatttatataaaactgacggacttcttttttttcagatgacacggtagattatttttctttttatatactcaaataaaaaaccccccagtctgccccttatttttacataaatatcaaaggttttttaataactcatagtatattataacatatcataataacagtcataatttatctcccctcccctctcccataaatgtattatattaataaatcatctctgccacaagaaaccataattctttactcta

SEQ ID NO: 38308 - DNA, 562 bp, Macaca Mulatta
gtgtgagagaagtttcacctggaatagaagtcttattgaacatcaaaaaatccacactggtcgagaaaccctatcagtgtgatacatgtggaaaaggtttcactcgaacttcataccttgttcaacatcagagaagccatgtagggaaaaaaattatttcacagtgacccatagtattcatgccagcactggtgctcatttgtcactgaactgaagccaccctggagcccttaatggttacagaagttgtggaccagggctttatttaccactatacatcatcaggtatgggaaaatgtagtctggctgagatgatgagttatcttctacattctagaaagtgattggaagaagaagtcatttgataggaggccatgggagagtcatctgaaagttgtaggacctaaaatagtttgttctcacccagtggatttaaatggccttctggacttgttaattgccctcagctagcactttaggacatctggttggatggctctgatctggggggctgctgctctgaccattcattttgcctctaatgaatctttcacatattggt

SEQ ID NO: 38309 - DNA, 240 bp, Macaca Mulatta
gcagatacgtctgtgattatacctattacctctctctgcatcatggaaagggctgcgcggcactcattcatgtccctccactatcgcgtgggctcccagccagcctgctgggaagagccttgcaagtcatcatccaggaaatgctggaagagtgtgggaaagcccgagtgcaaagcccggttcgaagaaaactcaaccatggtgctaccagccaaagggaactgaccggggcattgctcc

SEQ ID NO: 38310 - DNA, 656 bp, Macaca Mulatta
ggtttactgtatgactaatagagaccccaatgagcaaaactaataaaattctcctggctcctctcccagacttcccctccctttgagaaatgccagaagcttcttcaggaggctcttgccagcctagacatcacaggcacacatggggcagctccagcctctgcctcctgtcatcaccataatgcatccatatctacaatatggcaaatttcatatccttccaacctctttcctgcattattgatgggctgtgtgcactttttaaaaaatcaattagatcagggcgtggagctggagttaaaagaagcctttaaaagtctgctcttcttgttttgctgttttgaataggcacagataaagctttccctctggtttgaataagtcaagctcagtgctaggttggctctgattggccaggactaggaaaacgcagttaagatgcaaacacaagcaaatataactcagtgtctctgcggccattactaagctaaggcagcagacccggagcctcctgctttggagtggttcttcaatactgctgctgctgcttactcaccgggaaacaactgggaaagctggtgagcgagaaggcaaggtaaggtctctgatttacgggggcatgccagttaatcctcctgaaagaggaataaatgaaa

SEQ ID NO: 38311 - DNA, 749 bp, Macaca Mulatta
  misc_feature (1)...(749): n = A,T,C or G
ggagcatatgcttgcctacctactgccatctgctgtcatggtcactgccactgcacatgtgtacttcccagccccccagagacacaccacttagcctgctgctgtactcctcatctaggcattccatccaagatcctagggactagtctgcccagcctacaaacactacttctggtgtcttcacttccacgggcccaaggctgtcctgccactgctattgtcactgccagcgctatgcacactgtccagggacccaaagtcatgccaacctggccctcctcagctaccactaatgtccaagcatgcttcctggggcttgaggatcagcctacctgggtcactccacagccattactggtgccagtgtatatactatccaaggtcccaaggactggcatgcctagtttaccggcaacatcactcatgcccaaggaccagcccacctggtgaccttgtccccagcaagtccttgtcacagctgccagtaacaactgcagccaatgtcactgaggaactcactgatactgctcacatatattacagccaaataaatcatatgggagactacatttactgcacccttcttgagagtcaaagcccaaaacacccctacctgaaacaaactaataaaagattctacttaacagggggaaaaaatcttttccccttactaaaagcccagtcccataaaaaatttgggaaacaaggtgggannnnnnnnnnnnnnnnnnnnnccagaaagaattttt

SEQ ID NO: 38312 - DNA, 671 bp, Macaca Mulatta
atattccttatacgcaatactacaaatgtgaagtgttgagacagatccttaacaggtcttcttagacttcccagtgaccaggttccaaggagaaaaatcagttgttctctccaccctgacatggtgtgggggtaatagccttttcttaggtcttgcctacacagtgacaggagctataacatggttggcctcctttgccatgatggcaattcacatcacactgaaaaacaagcaaatgtccttcttccatcagtaaagtcaagctttaaaaagaaaaggaggaaacaaaaatggacagtgaagtaacagaaccaaagatgtctgaaaggcttgaaatgactggaatgtttcaacaaggggaactagattgactgaactaaaatcaatttgaaataggtaatgaagagaattttagagttaaaaagaagaaggaggaagaagaggggaggcataattatatgtagtaaaatgtccttggtatggggagaataaatcactcttgagctctagaccagttctccagtatttatttgaagtccttgagcctaaaggcaggtgaactccgtaagagagtgccatcaccagaaaagagcaagcaacctggggtgcccacgtttaggtgagtcctaaccatcagatcaggctcaaaccatgagtcttcactggctatc

SEQ ID NO: 38313 - DNA, 908 bp, Macaca Mulatta
  misc_feature (1)...(908): n = A,T,C or G
ggacagacgaaatgatgagcattgtttgtgaagaggaggttatttgtggtcataaactcaaatgaccctcttctttatttttttctctttgttgacatgtttctcatgagagataaatggcccttttgaaaggtacctaccttagcatgtgccacagtatgatgtgttcatgttgatatacataaacatttgctagtctcaagttctaggggttatgtaatatttgatttgcctcaagtttttgaattaacacataccgtattctcaacatttaaaataaaataattttgcatatatatttgattattatgttggtgagcagctccttgtttatagagcatttattgtgtacagttgtcagaattagggaaacagtagtcatatactattcaagaatagtaaaagccacaaacaattaatgtgatatgtagcacactgttagtaaaccagagattataagtaacgtttggggaaacccagaacttccaagattatctgggtataatctcagaggcaagactggaatgtgagtttcatttatcaattacattcagacctcgaacatattgagatatctctnnnnnnnnnnnnnnnnnnnnnnnnnnnnnnnnnnnnnnnnnnnnnnnnnnnnnnnnnnnnnnnnnnnnnnnnnnnnnnnnnnnnnnnnnnnnnnnnnnnnnnnnnnnnnnnnnnnnnnnnnnnnnnnnnnnnnnnnnnnnnnnnnnnnnnnnnnnnnnnnnnnnnnnnnnnnnnnnnnnnnnnnnnnnnnnnnnnnnnnnnnnnnnnnnnnnnnnnnnnnnnnnnnnnnnnnnnnnnnnnnnnnnnnnnnnnnnnnnnnnnnnnnnnnnnnnnnnnnnnnnnnnnnnnnnnnnnnnnnnnnnnnnnnnnnnnnnnnnnnnnnnnnnnnn

SEQ ID NO: 38314 - DNA, 925 bp, Macaca Mulatta
  misc_feature (1)...(925): n = A,T,C or G
gggttgcgctttcttaccctccagtcatttgctgtgatcaagcctctctgggtcaggtgttttgatcaggtgtctggcctctcggtatgctgttggccacatgataacaagctcactgctcggcacacagcaggtgattaacaaaagtgtgtgtctggatcaatttctaactaaatttacagttcacagaaactctttattgtgatcaaaattgccagtaccaacaacacgagcaaacagaacaaagagtatcctgctgtaaagagcttctttttccagttgacatccccacctgatctatcacaggaaccttatttcagctctttctccaaatagtatacacctacgaatgtcttagaccatacacatatcnnnnnnnnnnnnnnnnnnnnnnnnnnnnnnnnnnnnnnnnnnnnnnnnnnnnnnnnnnnnnnnnnnnnnnnnnnnnnnnnnnnnnnnnnnnnnnnnnnnnnnnnnnnnnnnnnnnnnnnnnnnnnnnnnnnnnnnnnnnnnnnnnnnnnnnnnnnnnnnnnnnnnnnnnnnnnnnnnnnnnnnnnnnnnnnnnnnnnnnnnnnnnnnnnnnnnnnnnnnnnnnnnnnnnnnnnnnnnnnnnnnnnnnncnnnnnnnnnnnnnnnnnnnnnnnnnnnnnnnnnnnnnnnnnnnnnnnnnnnnnnnnnnnnnnnnnnnnnnnnnnnnnnnnnnnnnnnnnnnnnnnnnnnnnnnnnnnnnnnnnnnnnnnnnnnnnnnnnnnnnnnnnnnnnnnnnnnnnnnnnnnnnnnnnnnnnnnnnnnnnnnnnnnnnnnnnnnnnnnnnnnnnnnnnnnnnnnnnnnnnnnnnnnnnnnnnnnnnnnnnnnnnnnnnnnnnnnnnnnnnnnnnnnnnnnnnnnnnnnnnnnnnnnnnnnnnnnnnnnnnnnnnnnnnnnn

SEQ ID NO: 38315 - DNA, 802 bp, Macaca Mulatta
ggtcctcacaagcaggttgcttgctgaaatctaatttattaaatccatcaaattttggtttacagtgtgtactcaacaaaagcaaaataatctcaatttcaaagataaacttatacaaattgtataattcatataatagactgttctactgataatcaatgaataaaaatatgtcatattttaagatgattttgcaattaggggaaaaaggagattttcctcaattaaaaaaattagtaggtatatgtagaatatagtatgttttaagtgaaaaatcagaaaaaatgatttagaaatggcagtatttcttcgtctttgaagggtttaagctattttaaagagatttttaaacctttgaactttagagggaaaaaatggtctaccagtagtcacaaaaataaaatgtaaattaatttttgctttaagaagcaaaatatgaaatgctccacaagatttacttttgtgtggtgtttttttccttcttgttttgcttttactttgagcaagaaacacaaagtgtcatgaaataattacaagtagtaacaaattttttataagactggaaaacattgctcttagacaagtttgagggtcaatctcaagtctaacacttactgactgtgttattttacatgagttagttaactctctaagttctaaaaatgtttaatataaagtaagacactctcccgcggaattctggaataaacaaattgtgggtagactatgtatgccaagaggtggggcatagttgcatgcccttatagcaaagtgcttcgatgggatgccacattggcaatcc

SEQ ID NO: 38316 - DNA, 615 bp, Macaca Mulatta
tagggaaggaggctctgccacccccacccatgggacagagcactcacggagtggggacaacctctgcccctgagggctggggagccctttggccacgcctgagccaatggctggatcacccctggttttgtctaaaaaagctctggccaggaaagtgtccctggctgtcctcacacaggaggccccatggtagcagagggaagaccagagtcaatggcaccccacgccagcccctgaccccatccctgaagaggggccctgtgcacagcagccacctgctctgccctccacccgccatggggtgcgcccgttaacctgggacactcacctgctggccactaggggagcagggggcttcggccatcttcgctccagctgctccagacgcacctgcccctccagctgctccagcccgtcctccccttggtgccgtgtgcctgcccaatcccccaggagcctccgcctccagccagcaggtgaagctctcacactgccaccccggcctgctcgggctgaccgcgtggccgggatagccttggaaggcattctactggacgccccgccaggatgctgcagtactgtcccgggtccgtccccatcacagctcacagggct

SEQ ID NO: 38317 - DNA, 579 bp, Macaca Mulatta
gcagggcacccccggctggttgcaccctccatctaaaggcaacctgcaccacagggggttccagctcctcatactctccaaggaaacggattcctacttccatatgtggcagctgggcttcctaagcctggattggttgctagggcaacataatcagagctcagtgacagaaatgacagagacctacctgtgggggactggttgccctggtgctcccaggaataacgcaaacaaggagctgccattcttctccagacctgagctcaagggcaaaccatggagagatggggctacatgtgagatccaagggtacaggctctcagtcagtgagctgtcaccatgccgaagggttactcaaatcaggctgttactacagtatttgtggaaggagggcagatgagggaggagccatcatctcacatcctgactctagatcccttgtttcttctcattttaggacttctctggaccatttcctactgtgggccgcaaccttgtggctgattgagacctcatgtggagcctccctgccccagcacccttcccattgaccttcagaggggcagttcttggatgacc

SEQ ID NO: 38318 - DNA, 606 bp, Macaca Mulatta
gccttttgtggggaagagaccctacagacttctcaaatacggagaaagctttgaaagagcgctcgtctgatgtgccggatgacccaccacaaggagaatccttacaagtgtggtgtctgtgggaagtgctttggtaggagcaggagcctgatcagacaccaaagaatccacacaggtgaaaaaccttttaaatgtcttgactgtggaaaaagctttaatgactcctcaaattttggtgcccaccagagaatccacacaggagagaaaccctacagatgcggagagtgtggaaaatgctttagtcagagctctagtcttattatacatcagagaacccacaccggtgagaagccctatcagtgtggagagtgtgggaaaagcttcaccaacagttctcatttcagcgcccaccggagagttcacactggggagaatccctacaaatgtgtggactgtgaaaaaagtttcagtaactgtacaagatttcgagaacatcggagaatacacactggagagaaaccctatggatgtgcccagtgtggcaaacgtttcaataagagttctgttcttaccaaacatcgggaagttcatgtgagagaaaagcct

SEQ ID NO: 38319 - DNA, 630 bp, Macaca Mulatta
cagaatgatgggaacgcagagagaaagggcccaactctaccaggaggggtaaataaaaactcctgaagaattatacagaaagagaatgcttagaattctcaacatcatttttccctgtttgaatccaggaagtcagcagttggtcactcaagagcactaccccctccctggtttgaagatgttcctgactttgaatacaaacatctgatattccagcttagactcctccacaagaactagactgtcatcctattttggcttccagctcagtccctctgctacaagtcctgactccagaactctgtgggataataaaatacaagatcatagcttgaaaatagagtgtgcatctggtgtggattgttgttttggcttaattaggacttgctgtttcctgaattcctgtaatctcatttgatgaattgtgttggttactggctctgcaggctttgagcatgtggcacatatcagaggaaatgatttccccttctttgaaaatcatcttctggtgcattaaaaaaagaaagcaaatgtgtttggatttctttagctgtccatagaattaccaatgctgtgatagacatttacttctctggaggaaggacttggttccagtgcattcagctacat

SEQ ID NO: 38320 - DNA, 449 bp, Macaca Mulatta
  misc_feature (1)...(449): n = A,T,C or G
gggggaagagctggatcaccatgaaatttatcttctatttgggtgtcctcactgnnnnnnnnnnnnnnnnnnnnnnnnnnnnnnnnnnnnnnnnnnnnnnnnnnnnnnnnnnnnnnnnnnnnnnnnnnnnnnnnnnnnnnnnnnnnnnnnnnnnnnnnnnnnnnnnnnnnnnnnnnnnnnnnnnnnnnnnnnnnnaaatctgaaagtgatgctgggaaatttcaagagtagagtcagagatggtactgaacagacaattaaccccattcagatcgtccgctattggaactacagtgatagtgccccacaggatgacctcatgttcatcaagctggctaagcctgccatgctcaatcccaaagtccagccccttccccttgataccaccaatgtccggccaggcactgtctgtctactttcaggtttggagaggagccaagaaatcagtg

SEQ ID NO: 38321 - DNA, 182 bp, Macaca Mulatta
gcctgctgggacaatagttcaagcaggtgaacctacacagcgtgaaagtatcacacatttccttggtgcagttcaccttgcatgcccagggcttcaatacataccaaaggaccacaacctagtcataaccatgagcctcaccaacaagtgcaaaatgctaaaatatgacaatggcagtgaag

SEQ ID NO: 38322 - DNA, 755 bp, Macaca Mulatta
ccagcacttctcgtcagtctaccttcctcctcactggttttccaggcctggaaacctctcatcattgggtttccgtccccatcaacctcttctgtgtggtttccatcctgggtaataatatcatcctcttcctgatccacacatatccagacttacatgaacccatgtatatcttcctgtccatgttggcagcctctgatctgggcctctgtgcctctaccttccccaccatggtgcgtctcttctggctgggagctcgtgagctgccctttgatctctgtgcagcacagatgttcttcatcataccttcacctatgtggagtctggtgtactgctggccatggcctttgatcgctttattgccatctgggaccctctgcattatgccataatcattacctgctcagtcacagccaaggtgggaactgccattctggtgagggctgttctgctcaacctcccgggacctatcctcctgcagcaggtgctctttcccaagatcagcgctctctgtcactgctactgcctgcactgtgaccttgtggggttggcctgctcagacacccagataaatagcctggttggcctggtttccatcctattctcactgtgccttgactccttcctcatcatgctttcatatgccctgatcctaagaaccgtgctgggcattgcatcacctggggaacggctcaaggcactcaacacgtgtgtctcacatctctgcattgttctcatcttttatttgcccaaag

SEQ ID NO: 38323 - DNA, 680 bp, Macaca Mulatta
  misc_feature (1)...(680): n = A,T,C or G
gggggatcatgaagctaggtgctactggcgagcccaatgtggacgaaatgctgccccagcacaagttcgacagcaagtccctggaggcttacctaaaccagcacttgcctggctttggggccgaacgtgaggctacgctgaccattgcccagtacagagcaggacagtccaatccaaccttttatctccagaagggctttcaaacatatgtgctcaggaaaaaaccaccaggttcacttcttcctaaagcacataagattgatagagaatttaaagtccagaaagccttgttttcagttggattccctgttcccaagcctatactgtactgcagtgatacttctgtcattggaacagaattttacataatggaacatgtgcagggtcgaatctttcgtgatttaacagttcctggagttagcccagcagaacgttcagccatatatgtggccatggtagaaacattggctcagttacattccttgaatatacagtcattgcagctggaaggatatggtgtaggtgctgggtactgncaaagacaggtatcaacctggacaaagcaatatcaagctgcagctcatcaggacatccctgcccatgcacagtttatcgactggctaatgaagaacttgccgngatatgacnatgaagagaatttgattcatggagattcagan

SEQ ID NO: 38324 - DNA, 659 bp, Macaca Mulatta
atggatttgggatccttcactaagttaattattttgaagtcaagaacggttccttctgctcacaaaacatgatcacttttcattgattttgtatgaaatattctgactggttttgcgtatctggaaaagataaatcttcaaaacttggaaataaatctttttcctcctgccaaatccataatatgatccctttctatcactgacagcaccatcagataagtggacatgccttgcttggttagaaggatgctgcgattttcagcaggaacaagaatgtagttacagacccagcctaagacatgtttagggcacgtcgttacagattcttttgggttcttttctagaggtgtcttcttaagtcccaatttgacgttagaaattctcattcagggccaacgtcccccacaaaccaggtgtcccacaggtgggatacaccttcaggacttgggaggaggccttcaagacttgggctgcagcaggagacacaaagacaagagactaaataaatacaggggcttggtctcttcagattcttgggatcttcctctgctcctcaaactggagatgagtttaccccagaactgatgctgagaacaaactggggagggacaggcaaatctgaagatgtgcaaaacccaaaaaaactgggaggctgagaa

SEQ ID NO: 38325 - DNA, 776 bp, Macaca Mulatta
gggcctgctgaagggcccccttgtcattttcattataacccagtttccacttacttgacctctcagtcataaatgtgtaatgatttatgaattagcacagtaagttgacactagaaactgcccatttctgtattacactatcaaataggaagcattggaaagatgggggaaaaagtcttattttaaaatggcttagaaagttttcagattactttgaaaattctaaatttctttgtttctaaaacttgaaaatatgtagatggactcatgcattaagattgttttcaaagctttcttcacatttttaaagtgtaattttccttttaatatacatatttattttctttaaagcagctatatcccaacccatgactttggagatatacctgtaaaaccaatataacagcagggttattgaagcagctctctcaaatgttgcttcagatgtgcaagttgcaaattttattgtatttgtagaatacaatttttgttttaaactgtatttcaatctatttctccaagatgcttttcatatagagtaaaatatcccaggatgactgcttctgtgtcagttgcatttgacgcatagctgcacaaatgaacagtgtgtactcttggttgtgcgttaacttacatgtataatttttggcatctgtgttcacaaatgcatgtgttagcaaatcacctttatttataagtgaccatatttgaagttaatgatataaagaaacctgcatttgtagtccagcattttcatttggtccataacacaatgt

SEQ ID NO: 38326 - DNA, 630 bp, Macaca Mulatta
ttgcctgagaaaatgccaaaacgcccgggacaagctgaatagaatcaagaacatggccatgacgacaccgagaaagaccatctttcccaatctgatctcacccaattctatggccaaggactcctgggaagactggaggtgacttggaccctgaccctgaggcagaagggaaagagagagggagggaagagggcagtgggctgcagccacaggaaaccaagggctctcctgtggctgcagcagctctttcagccaagcccataaaactcctttctttacttcatcagcgtgtgattggattgattgaggggcttttggttccttgggattccacacatttctccctcctctgcacacacactcacaaatacaggcacagtgagtcaggaaggggctgtccatgtccatcctactcttacccccagatctctcttgtttaccgctgtggcctaggcagttaatgcccccacacactcactatcgctggcatttcagaacccacaaccagctcccaaatgtgaagtttattcagtggaaatgttttgggtctgggcttcaaaggcaaggaatctcagagcatgagtttgtaagaaagtagatgagcacttcgtgttgggtaggggacagagg

SEQ ID NO: 38327 - DNA, 778 bp, Macaca Mulatta
catgtgcccaccttggcggcttaagcctgctgctttggcagtgccacgggtgagccgagcagctgtgagttgggtggggcagggctgtagcccacgccgggtgctattccaggctccaggggctggtgctcatccccacccccagcgacttcagtcctacctggcacgctgcagccctctgccggctgcggggtcctctgaatcgagacccaggttgcctgcttttggtgtgggggtgggattggggctgtctgagcttgccaggtggagctcatgtttgtgatcctctgtccggacagctctccagaatcctgtgttgcccctgctctgcctttctgggatgggagagaacgtgagggagccggcgagcaggttctacccactctgctaagggcctagcacactttgatgaggttcctagatatgagcccctcacaaagaccaaccattcctctaacagccatttaaaggtactgaagttcatgggaaaatgtcctcattcttaggagatagatgctgaattatataggtgaatgtcttcaagaaatgtgtagtttaattccaaatggttccccccaaaatacacaaagcaaataaggccaaaatgttcattgttgaatctgcagtggctggtatttcagtgaacagtgtacttgttctttcaacttttctgtatgtttggaatttttcttaataaaagattgtgggaaacggtcatttgctgagcgcctcctagttgccaggcgctggagggcgcatcaaagaagagtcctatcca

SEQ ID NO: 38328 - DNA, 5974 bp, Macaca Mulatta
  misc_feature (1)...(5974): n = A,T,C or G
ctgcttgaccaacgcccgtctccaaagctggtccttattattctccagctgtgccgggcggcgctgcctctgatgagcgtagaagactgtggaaacgtggagctcccaccctggagctactctgtcccctccttaaacagtgagcaggaggatcccagcgacccagcttccaagatcgcctcnnnnnnnnnnnnnnnnnnnnnnnnnnnnnnnnnnnnnnnnnnnnnnnnnnnnnnnnnnnnnnnnnnnnnnnnnnnnnnnnnnnnnnnnnnnnnnnnnnnnnnnnnnnnnnnnnnnnnnnnnnnnnnnnnnnnnnnnnnnnnnnnnnnnnnnnnnnnnnnnnnnnnnnnnnnnnnnnnnnnnnnnnnnnnnnnnnnnnnnnnnnnnnnnnnnnnnnnnnnnnnnnnnnnnnnnnnnnnnnnnnnnnnnnnnnnnnnnnnnnnnnnnnnnnnnnnnnnnnnnnnnnnnnnnnnnnnnnnnnnnnnnnnnnnnnnnnnnnnnnnnnnnnnnnnnnnnnnnnnnnnnnnnnnnnnnnnnnnnnnnnnnnnnnnnnnnnnnnnnnnnnnnnnnnnnnnnnnnnnnnnnnnnnnnnnnnnnnnnnnnnnnnnnnnnnnnnnnnnnnnnnnnnnnnnnnnnnnnnnnnnnnnnnnnnnnnnnnnnnnnnnnnnnnnnnnnnnnnnnnnnnnnnnnnnnnnnnnnnnnnnnnnnnnnnnnnnnnnnnnnnnnnnnnnnnnnnnnnnnnnnnnnnnnnnnnnnnnnnnnnnnnnnnnnnnnnnnnnnnnnnnnnnnnnnnnnnnnnnnnnnnnnnnnnnnnnnnnnnnnnnnnnnggttctgtctcgagcactgatgtacattccacaattggggaaatacgcagaaagcattctggaaaatggcagcagcagtggcaggaaacttgccaaacttcagagaattgcccgccaggctgttgctgcactgtgtgcacttggaggcttcaaagagacaatcaagataggatccgaggttcaggtnnnnnnnnnnnnnnnnnnnnnnnnnnnnnnnnnnnnnnnnnnnnnnnnnnnnnnnnnnnnnnnnnnnnnnnnnnnnnnnnnnnnnnnnnnnnnnnnnnnnnnnnnnnnnnnnnnnnnnnnnnnnnnnnnnnnnnnnnnnnnnnnnnnnnnnnnnnnnnnnnnnnnnnnnnnnnnnnnnnnnnnnnnnnnnnnnnnnnnnnnnnnnnnnnnnnnnnnnnnnnnnnnnnnnnnnnnnnnnnnnnnnnnnnnnnnnnnnnnnnnnnnnnnnnnnnnnnnnnnnnnnnnnnnnnnnnnnnnnnnnnnnnnnnnnnnnnnnnnnnnnnnnnnnnnnnnnnnnnnnnnnnnnnnnnnnnnnnnnnnnnnnnnnnnnnnnnnnnnnnnnnnnnnnnnnnnnnnnnnnnnnnnnnnnnnnnnnnnnnnnnnnnnnnnnnnnnnnnnnnnnnnnnnnnnnnnnnnnnnnnnnnnnnnnnnnnnnnnnnnnnnnnnnnnnnnnnnnnnnnnnnnnnnnnnnnnnnnnnnnnnnnnnnnnnnnnnnnnnnnnnnnnnnnnnnnnnnnnnnnnnnnnnnnnnnnnnnnnnnnnnnnnnnnnnnnnnnnnnnnnnnnnnnnnnnnnnnnnnnnnnnnnnnnnnnnnnnnnnnnnnnnnnnnnnnnnnnnnnnnnnnnnnnnnnnnnnnnnnnnnnnnnnnnnnnnnnnnnnnnnnnnnnnnnnnnnnnnnnnnnnnnnnnnnnnnnnnnnnnnnnnnnnnnnnnnnnnnnnnnnnnnnnnnnnnnnnnnnnnnnnnnnnnnnnnnnnnnnnnnnnnnnnnnnnnnnnnnnnnnnnnnnnnnnnnnnnnnnnnnnnnnnnnnnnnnnnnnnnnnnnnnnnnnnnnnnnnnnnnnnnnnnnnnnnnnnnnnnnnnnnnnnnnnnnnnnnnnnnnnnnnnnnnnnnnnnnnnnnnnnnnnnnnnnnnnnnnnnnnnnnnnnnnnnnnnnnnnnnnnnnnnnnnnnnnnnnnnnnnnnnnnnnnnnnnnnnnnnnnnnnnnnnnnnnnnnnnnnnnnnnnnnnnnnnnnnnnnnnnnnnnnnnnnnnnnnnnnnnnnnnnnnnnnnnnnnnnnnnnnnnnnnnnnnnnnnnnnnnnnnnnnnnnnnnnnnnnnnnnnnnnnnnnnnnnnnnnnnnnnnnnnnnnnnnnnnnnnnnnnnnnnnnnnnnnnnnnnnnnnnnnnnnnnnnnnnnnnnnnnnnntcagcgctaacttcgaggcccttcccctcttcatggcatctgacagtgacaatgatgctggcaccagtacttgcatcagacccaggcactcatgggccaccatgccggattgctgctgtggccaccgctcagcaacnnnnnnnnnnnnnnnnnnnnnnnnnnnnnnnnnnnnnnnnnnnnnnnnnnnnnnnnnnnnnnnnnnnnnnnnnnnnnnnnnnnnnnnnnnnnnnnnnnnnnnnnnnnnnnnnnnnnnnnnnnnnnnnnnnnnnnnnnnnnnnnnnnnnnnnnnnnnnnnnnnnnnnnnnnnnnnnnnnnnnnnnnnnnnnnnnnnnnnnnnnnnnnnnnnnnnnnnnnnnnnnnnnnnnnnnnnnnnnnnnnnnnnnnnnnnnnnnnnnnnntaggtatggtggatattgcccgacagacggttgaatttctctatgaagagaatggtggcatcccaagagatctttatcttcccaccattgaagacattaaagacgaagcaaacaagttcacaattgataaagttcgaaaaggnnnnnnnnnnnnnnnnnnnnnnnnnnnnnnnnnnnnnnnnnnnnnnnnnnnnnnnnnnnnnnnnnnnnnnnnnnnnnnnnnnnnnnnnnnnnnnnnnnnnnnnnnnnnnnnnnnnnnnnnnnnnnnnnnnnnnnnnnnnnnnnnnnnnnnnnnnnnnnnnnnnnnnnnnnnnnnnnnnnnnnnnnnnnnnnnnnnnnnnnnnnnnnnnnnnnnnnnnnnnnnnnnnnnnnnnnnnnnnnnnnnnnnnnnnnnnnnnnnnnnnnnnnnnnnnnnnnnnnnnnnnnnnnnnnnnnnnnnnnnnnnnnnnnnnnnnnnnnnnnnnnnnnnnnnnnnnnnnnnnnnnnnnnnnnnnnnnnnnnnnnnnnnnnnnnnnnnnnnnnnnnnnnnnnnnnnnnnnnnnnnnnnnnnnnnnnnnnnnnnnnnnnnnnnnnnnnnnnnnnnnnnnnnnnnnnnnnnnnnnnnnnnnnnnnnnnccagacggcaccatcagctccagctcaatcctcctggcgcagtctttacagcattgcatccattcccagaactgctccgccacggacctcttttaccagggcaactcccagacagtgagagagtggctcaannnnnnnnnnnnnnnnnnnnnnnnnnnnnnnnnnnnnnnnnnnnnnnnnnnnnnnnnnnnnnnnnnnnnnnnnnnnnnnnnnnnnnnnnnnnnnnnnnnnnnnnnnnnnnnnnnnnnnnnnnnnnnnnnnnnnnnnnnnnnnnnnnnnnnnnnnnnnnnnnnnnnnnnnnnnnnnnnnnnnnnnnnnnnnnnnnnnnnnnnnnnnnnnnnnnnnnnnnnnnnnnnnnnnnnnnnnnnnnnnnnnnnnnnnnnnnnnnnnnnnnnnnnnnnnnnnnnnnnnnnnnnnnnnnnnnnnnnnnnnnnnnnnnnnnnnnnnnnnnnnnnnnnnnnnnnnnnnnnnnnnnnnnnnnnnnnnnnnnnnnnnnnnnnnnnnnnnnnnnnnnnnnnnnnnnnnnnnnnnnnnnnnnnnnnnnnnnnnnnnnnnnnnnnnnnnnnnnnnnnnnnnnnnnnnnnnnnnnnnnnnnnnnnnnnnnnnnnnnnnnnnnnnnnnnnnnnnnnnnnnnnnnnnnnnnnnnnnnnnnnnnnnnnnnnnnnnnnnnnnnnnnnnnnnnnnnnnnnnnnnnnnnnnnnnnnnnnnnnnnnnnnnnnnnnnnnnnnnnnnnnnnnnnnnnnnnnnnnnnnnnnnnnnnnnnnnnnnnnnnnnnnnnnnnnnnnnnnnnnnnnnnnnnnnnnnnnnnnnnnnnnnnnnnnnnnnnnnnnnnnnnnnnnnnnnnnnnnnnnnnnnnnnnnnnnnnnnnnnnnnnnnnnnnnnnnnnnnnnnnnnnnnnnnnnnnnnnnnnnnnnnnnnnnnnnnnnnnnnnnnnnnnnnnnnnnnnnnnnnnnnnnnnnnnnnnnnnnnnnnnnnnnnnnnnnnnnnnnnnnnnnnnnnnnnnnnnnnnnnnnnnnnnnnnnnnnnnnnnnnnnnnnnnnnnnnnnnnnnnnnnnnnnnnnnnnnnnnnnnnnnnnnnnnnnnnnnnnnnnnnnnnnnnnnnnnnnnnnnnnnnnnnnnnnnnnnnnnnnnnnnnnnnnnnnnnnnnnnnnnnnnnnnnnnnnnnnnnnnnnnnnnnnnnnnnnnnnnnnnnnnnnnnnnnnnnnnnnnnnnnnnnnnnnnnnnnnnnnnnnnnnnnnnnnnnnnnnnnnnnnnnnnnnnnnnnnnnnnnnnnnnnnnnnnnnnnnnnnnnnnnnnnnnnnnnnnnnnnnnnnnnnnnnnnnnnnnnnnnnnnnnnnnnnnnnnnnnnnnnnnnnnnnnnnnnnnnnnnnnnnnnnnnnnnnnnnnnnnnnnnnnnnnnnnnnnnnnnnnnnnnnnnnnnnnnnnnnnnnnnnnnnnnnnnnnnnnnnnnnnnnnnnnnnnnnnnnnnnnnnnnnnnnnnnnnnnnnnnnnnnnnnnnnnnnnnnnnnnnnnnnnnnnnnnnnnnnnnnnnnnnnnnnnnnnnnnnnnnnnnnnnnnnnnnnnnnnnnnnnnnnnnnnnnnnnnnnnnnnnnnnnnnnnnnnnnnnnnnnnnnnnnnnnnnnnnnnnnnnnnnnnnnnnnnnnnnnnnnnnnnnnnnnnnnnnnnnnnnnnnnnnnnnnnnnnnnnnnnnnnnnnnnnnnnnnnnnnnnnnnnnnnnnnnnnnnnnnnnnnnnnnnnnnnnnnnnnnnnnnnnnnnnnnnnnnnnnnnnnnnnnnnnnnnnnnnnnnnnnnnnnnnnnnnnnnnnnnnnnnnnnnnnnnnnnnnnnnnnnnnnnnnnnnnnnnnnnnnnnnnnnnnnnnnnnnnnnnnnnnnnnnnnnnnnnnnnnnnnnnnnnnnnnnnnnnnnnnnnnnnnnnnnnnnnnnnnnnnnnnnnnnnnnnnnnnnnnnnnnnnnnnnnnnnnnnnnnnnnnnnnnnnnnnnnnnnnnnnnnnnnnnnnnnnnnnnnnnnnnnnnnnnnnnnnnnnnnnnnnnnnnnnnnnnnnnnnnnnnnnnnnnnnnnnnnnnnnnnnnnnnnnnnnnnnnnnnnnnnnnnnnnnnnnnnnnnnnnnnnnnnnnnnnnnnnnnnnnnnnnnnnnnnnnnnnnnnnnnnnnnnnnnnnnnnnnnnnnnnnnnnnnnnnnnnnnnnnnnnnnnnnnnnnnnnnnnnnnnnnnnnnnnnnnnnnnnnnnnnnnnnnnnnnnnnnnnnnnnnnnnnnnnnnnnnnnnnnnnnnnnnnnnnnnnnnnnnnnnnnnnnnnnnnnnnnnnnnnnnnnnnnnnnnnnnnnnnnnnnnnnnnnnnnnnnnnnnnnnnnnnnnnnnnnnnnnnnnnnnnnnnnnnnnnnnnnnnnnnnnnnnnnnnnnnnnnnnnnnnnnnnnnnnnnnnnnnnnnnnnnnnnnnnnnnnnnnnnnnnnnnnnnnnnnnnnnnnnnnnnnnnnnnnnnnnnnnnnnnnnnnnnnnnnnnnnnnnnnnnnnnnnnnnnnnnnnnnnnnnnnnnnnnnnnnnnnnnnnnnnnnnnnnnnnnnnnnnnnnnnnnnnnnnnnnnnnnnnnnnnnnnnnnnnnnnnnnnnnnnnnnnnnagcaggactgccttaagtgagaagaagccaactgtgaagccaaagtcaccagaaaagagcaaaccagatgaaaaggacccagaaaagtcccctaccaaaaaacaagaag

SEQ ID NO: 38329 - DNA, 235 bp, Macaca Mulatta
gcgagtgggtgaattaatggaccataatgctttttcccttacccaaaaatgaaaatactcaatatggaccatttaggaattataagcagcaaatgtgaaagacttgccacttgataggtgactgattagacatagagggttgttgtaggagcatgccacaggaaagaccaagggatcatgatcatttgttcagaaaaaaaagcccctgaactgattttgttataccatagaatta

SEQ ID NO: 38330 - DNA, 653 bp, Macaca Mulatta
  misc_feature (1)...(653): n = A,T,C or G
gagctatgattgagtcactannnnnnnnnnnnnnnnnnnnnnnnnnnnnnnttatctacctnnnnnnnnnnnnnnnnnnnnnnnnnnaatagatcctgaaacgtcggctgggcgtgnnnnnnnnnnnnnnnnnnnnnnnnnnnnnnnnnnnatgaggcaagtggataacnnnnnnnnnnnnnnnnnnntnnnnnnnnnnnnnnnnnnnnntcccgtttctactaaaattacaaaaattagctgggggtggtggtgggnnnnnnnnnnnnnnnnnnnnnnnnnnnngnnnnnnnnnnnnnnacctgaacccggannnnnnnnnnnnnnnnnnnnnnnnnntgcaccattgcactccagcccaggcgaaagagcaaaactccgtctcaaacaaacgatcctgaagagtcagtcattcatccaagaagccctgactgagctcttgttctgtgccagactctgttctaggtgctatggatggagcggggaccaggaccgacaaacacatggagcgcattctaatatcagtgatactctgcaagactgttaaagaaatccttgctaccactggccctaaatcaggaggcacagggctccctatgaggagtcattgcatgggctttctgcagtttggctttggattttgagctctctga

SEQ ID NO: 38331 - DNA, 809 bp, Macaca Mulatta
  misc_feature (1)...(809): n = A,T,C or G
ggaacttccttctttggttctccttccctgaaactgaaaatagatactgatagagtccaaagcctgaattccctgtaagtccttcttctaacctgaagtttggctctgcccataagaattattaattggcctcagctttatctttttttttttggagactnnnnnnnnnnnnncnnnnnnnnnnnnnnnnnnnnnnntcannnnnnnnnnnnnnnnnngtctgcctcccaggttcaagcaattctcannnnnnnnnnnnnncnnnnnnnnnnnnnntaggcacacaccaccatggccgggtaacttgtatttttagtagatatagggtttcgccattttagtcaggctagtctcgaactcttcaggtaatccacctgtnnnnnnnnnnnnnnnnnnnnnnnnnnnnnnnnnnnnnnnntgtgcctggctggcctcagctttaaataagtgataaatctgctgaagtcagagataccatcctttttcctggttcaactctggttttctagaactctgctactacaaagttttttaaatctcaattaccatacatttatcctattccaacaatctttccaataatgcaaattttttctccagaattttggtagaatatccggaaaaaccatttcccgggaaaattaattccccgtaaaaagaaaaaatccccatatatccaggtaaaggggaaaggttaaccctttttagtaaaaaatttcaccttttgaaacgtgtcctaaacaacctgtcccagcacacctttttcttaaacccccgaacggggcgaaaaagaaaataacagggggaaa

SEQ ID NO: 38332 - DNA, 636 bp, Macaca Mulatta
  misc_feature (1)...(636): n = A,T,C or G
cgtggtggcgggtannnnnnnnnnnnnnnnnnnnnnnnnnnnnnnnnnnnnnnnngcgnnnnnnnnnnnnnngnnnnnnnnnnnnnnnnnnnnnnnnnnnnnnnnnnnnnnnnnnnnnnagnnnnnnnnnnnnnnnnnnnnnnnnnnnnnnnnnnntgccccttctgaataatattcttttactaattgaaataagagagaatgaagatcaattttcctttgaacattcacaaatatactggaataatgtcagagctagaactagggagaggttgagttagatactgaggggcacanaaatattaaatagggccactttcagggttaatgcagatacagaatggatgagtaagtgcctcattaaatttcgtgccccatgtaccttggttgttcacgctgttcctgtccctagataataaattgaaaacacttccatatttgaaagcagtttgatcttcattggggaaaaacaggtgaacgggtgtcaagcagtacccattgctgaataaaatccgtcactacaagcacttgcaatctctgtgctataatgaattcatttctgaagcagctaggataagtattaaggaatgattgtctgcctgcctcagaagggtactgactcactgatctgacgaa

SEQ ID NO: 38333 - DNA, 482 bp, Macaca Mulatta
  misc_feature (1)...(482): n = A,T,C or G
ttggggaaacactagtaaggtcatgtggtcttttggaccaggatttctcctctcttctgtctctctctgnnnnnnnnnnnnnnnnnnnnnnnnnnnnnnnnnnnnnnnnnnnnnnnnnnnnnnnnnnnnnnnnnnnnnnnnggaggacagaagggctaccaggaggtgtcaaccatgttagattttctgtagccttccagaaacagtgcagcccatgaaacaggaatcttaattttcctcattgcaaatataacaggatggaacagttagtgaatagactgttttgtatttgcaagtgtccaccactccatccgccctgcatggagagggctctctcactgctaggtctaggctgagccatctggaaggatcaaagggtgtgcgagtatcactgcctctcaggctgcagaaggtctcgagggtggtgtcacagcaggatttccgccttctgcattgcgctgcacagccccatggaacgtgag

SEQ ID NO: 38334 - DNA, 1079 bp, Macaca Mulatta
  misc_feature (1)...(1079): n = A,T,C or G
gcacgagcgtacgtttatgactcctggcactctcgctgattagcctaaaactctcatgctttttatgagaattaagtgcaagtgcctaactccaggcacaagatattgaaatgcttagtagctannnnnnnnnnnnnnnnnnnnnttgactggaactgtatatttcatcaagctgtaatcaggttaacaaattatggtcaaaatatgagtgcttactgcatgctaaactttgttaggcactttatatgcattaactgacgttaactcttaatggcccagtgagataaatgctgtttttatctccccacttataccaagaacattgagggttaggaatattaactaacttgcctaagattacaacagctattccgtggagatgccagaattcaaacccagttcgcagtgactccagcccgtgctctttactgctttgctgtgtcatctgagctttatgaaatggggctttgatttgtaactaggcttttgctcagaatccctatttagactttgctcttcgaagcagattcatagctcactttagtcctctgccataagacaattttgtattgcatcaatacctttttggatgcttacacatctgtagcctcttgcaaaaagggcattgtaggtacttgatgaagagttttggaaagttttctttgtctgtttttaaaaagagacgcatctgccaattgcccagctggatcaactcctgggcatagcaacctcctgccaantctctttacaaaccttatcctgacaaccttatagaagtccctaggaaggtggacaggtcacaaaacttcgccaccatattaagcggacaaccaatggttctaaataacaacaaaacaagggaaaacattgtacacaaaagggtttctcgttctctttcgctctcgtcgtnnnnnnnnnnnnnnnnnnnnnnnnnnnnnnnnnnnnnnnnnnnnnnnnnnnnnnnnnnnnnnnnnnnnnnnnnnnnnnnnnnnnnnnnnnnnnnnnnnnaaacgcagaagcggagaaaagaacaaaagacagcaagcaggaacagaaaagaaacaaaagaaaagaaaaaa

SEQ ID NO: 38335 - DNA, 1232 bp, Macaca Mulatta
  misc_feature (1)...(1232): n = A,T,C or G
ccatagaaacgcccgggctggcgcggcggcgcgaggggcgggctctccggctcccggcggctgcttgcgccccagcgcgcgcccaggcgccttggagtccccgtccttgggcccccgcaaggtcccctgccgtgcgcgaggcagcatgatgaggcgcaccctggaaaaccgnnnnnnnnnnnnnnnnnnnnnnnnnnnnnnnnnnnnnnnnnnnnnnnnnnnnnnnnnnnnnnnnnnnnnnnnnnnnnnnnnnnnnnnnnnnnnnnnnnnnnnnnnnnnnnnnnnnnnnnnnnnnnnnnnnnnnnnnnnnnnnnnnnnnnnnnnnnnnnnnnnnnnnnnnnnnnnnnnnnnnnnnnnnnnnnnnnnnnnnnnnnnnnnnnnnnnnnnnnnnnnnnnnnnnnnnnnnnnnnnnnnnnnnnnnnnnnnnnnnnnnnnnnnnnnnnnnnnnnnnnnnnnnnnnnnnnnnnnnnnnnnnnnnnnnnnnnnnnnnnnnnnnnnnnnnnnnnnnnnnnnnnnnnnnnnnnnnnnnnnnnnnnnnnnnnnnnnnnnnnnnnnnnnnnnnnnnnnnnnnnnnnnnnnnnnnnnnnnnnnnnnnnnnnnnnnnnnnnnnnnnnnnnnnnnnnnnnnnnnnnnnnnnnnnnnnnnnnnnnnnnnnnnnnnnnnnnnnnnnnnnnnnnnnnnnnnnnnnnnnnnnnnnnnnnnnnnnnnnnnnnnnnnnnnnnnnnnnnnnnnnnnnnnnnnnnnnnnnnnnnnnnnnnnnnnnnnnnnnnnnnnnnnnnnnnnnnnnnnnnnnnnnnnnnnnnnnnnnnnnnnnnnnnnnnnnnnnnnnnnnnnnnnnnnnnnnnnnnnnnnnnnnnnnnnnnnnnnnnnnnnnnnnnnnnnnnnnnnnnnnnnnnnnnnnnnnnnnnnnnnnnnnnnnnnnnnnnnnnnnnnnnnnnnnnnnnnnnnnnnnnnnnnnnnnnnnnnnnnnnnnnnnnnnnnnnnnnnnnnnnnnnnnnnnnnnnnnnnnnnnnnnnnnnnnnnnnnnnnnnnnnngtatccacttgtcgactaagaaaggatcaacaagcagatgatgatgaggatgaagagttagatgttacagaagaagaaaattttcttaagtaaactacacatttccattttcatcataaatgacatggaatccacaatgactaaactatagaactttatactcactttgatatgttaagcctcaaagtgaagtccaa

SEQ ID NO: 38336 - DNA, 2057 bp, Macaca Mulatta
  misc_feature (1)...(2057): n = A,T,C or G
agcttggagttcagccctgggatccccaaccacctttgggcctgtctttgaagaccaacccctcagtgtgctattcccagaggagtccacggaggagcaggtgctgctggcatgccgcgcccgggccagccctccagccacctatcggtnnnnnnnnnnnnnnnnnnnnnnnnnnnnnnnnnnnnnnnnnnnnnnnnnnnnnnnnnnnnnnnnnnnnnnnnnnnnnnnnnnnnnnnnnnnnnnnnnnnnnnnnnnnnnnnnnnnnnnnnnnnnnnnnnnnnnnnnnnnnnnnnnnnnnnnnnnnnnnnnnnnnnnnnnnnnnnnnnnnnnnnnnnnnnnnnnnnnnnnnnnnnnnnnnnnnnnnnnnnnnnnnnnnnnnnnnnnnnnnnnnnnnnnnnnnnnnnnnnnnnnnnnnnnnnnnnnnnnnnnnnnnnnnnnnnnnnnnnnnnnnnnnnnnnnnnnnnnnnnnnnnnnnnnnnnnnnnnnnnnnnnnnnnnnnnnnnnntgtacattgcccgaaccaatgcctcagacctgggcaactactcctgtttggccaccagccacatggacttctccaccaagagcgtcttcagcaaatttgctcagctcaacctggctgctgaagnagatacccggctctttgcacccagcatcaaggcccggttcccagcagagacctatgcactggtggggcagcaggtcaccctggagtgctttgcctttgggaannnnnnnnnnnnnnnnnnnnnnnnnnnnnnnnnnnnnnnnnnnnnnnnnnnnnnnnnnnnnnnnnnnnnnnnnnnnnnnnnnnnnnnnnnnnnnnnnnnnnnnnnnnnnnnnnnnnnnnnnnnnnnnnnnnnnnnnnnnnnnnnnnnnnnnnnnnnnnnnnnnnnnnnnnnnnnnnnnnnnnnnnnnnnnnnnnnnnnnnnnnnnnnnnnnnnnnnnnnnnnnnnnnnnnnnnnnnnnnnnnnnnnnnnnnnnnnnnnnnnnnnnnnnnnnnnnnnnnnnnnnnnnnnnnnnnnnnnnnnnnnnnnnnnnnnnnnnnnnnnnnnnnnnnnnnnnnnnnnnnnnnnnnnnnnnnnnnnnnnnnnnnnnnnnnnnnnnnnnnnnnnnnnnnnnnnnnnnnnnnnnnnnnnnnnnnnnnnnnnnnnnnnnnnnnnnnnnnnnnnnnnnnnnnnnnnnnnnnnnnnnnnnnnnnnnnnnnnnnnnnnnnnnnnnnnnnnnnnnnnnnnnnnnnnnnnnnnnnnnnnnnnnnnnnnnnnnnnnnnnnnnnnnnnnnnnnnnnnnnnnnnnnnnnnnnnnnnnnnnnnnnnnnnnnnnnnnnnnnnnnnnnnnnnnnnnnnnnnnnnnnnnnnnnnnnnnnnnnnnnnnnnnnnnnnnnnnnnnnnnnnnnnnnnnnnnnnnnnnnnnnnnnnnnnnnnnnnnnnnnnnnnnnnnnnnnnnnnnnngatgcaactaagatcaccctagcaccctcgagtgccgacatcaacttgggtgacaacctgaccctacagtgccatgcctcccacgaccccaccatggacctcacattcacctggaccctggacgacttccccatcgactttgataagcccggagggcactaccggagaaccaatgtgnnnnnnnnnnnnnnnnnnnnnnnnnnnnnnnnnnnnnnnnnnnnnnnnnnnnnnnnnnnnnnnnnnnnnnnnnnnnnnnnnnnnnnnnnnnnnnnnnnnnnnnnnnnnnnnnnnnnnnnnnnnnnnnnnnnnnnnnnnnnnnnnnnnnnnnnnnnnnnnnnnnnnnnnnnnnnnnnnnnnnnnnnnnnnnnnnnnnnnnnnnnnnnnnnnnnnnnnnnnnnnnnnnnnnnnnnnnnnnnnnnnnnnnnnnnnnnnnnnnnnnnnnnnnnnnnnnnnnnnntcctgcaaacatcgagggcaatgccgagactgcacaggtgctgggcctcaccccctggatggactatgagttccgggtcatagccagcaacattctgggcactggggagcctagtgggccctccagcaaaatccggaccaaggaagcag

SEQ ID NO: 38337 - DNA, 751 bp, Macaca Mulatta
aaggctgcactgatgcgggaactgcgagctgcgcacgctgcggcccggggggagcgtccgggaccatgtctggagaactgccaccaaacattaacatcaaggaacctcgatgggatcaaagcactttcattggacgagccaatcatttcttcactgtaactgaccccaggaacattctgttaacaaacgaacaactagagagtgcaagaaaaatagtacgtgattacaggcaaggaattgttcctcctggtcttacagaaaatgaattgtggagagcaaagtacgtctatgattcagcttttcatcctgacactggggagaagatgattttgataggaagaatgtcagcccaggttcccatgaacatgaccatcacaggttgcatgatgacgttttacaggactacgccggctgtgctgttctggcagtggattaaccagtccttcaatgccgtcgtcaattacaccaacagaagtggagacgcacccctcactgtcaatgagttgggaacagcttacgtttctgcaacaactggtgccgtagcaacagctctaggactcaacgcattgaccaagcatgtctcaccactgataggacgttttgttccctttgctgccgtagctgctgctaattgcattaatattccattaatgaggcaaagggaactcaaagttggcattcctgtcacagatgaaaatgggaaccgcttgggggagtcagcgaacgctgcgaaacaagccatcacacaaag

SEQ ID NO: 38338 - DNA, 779 bp, Macaca Mulatta
ggggtcagtttaggagctgatgcaaaggatgaattgcacaacagagaaattcatagcctgaaacacacttaccagtaaaagtgggaaaaaaaccccccaaatgtctaagcaagaaattccaatcccaaaaaagctatcagaagaacaaaaggaattacaaagaagaaaataaagataaaagtagaaagcagtgaggtagggagaagaaaaacagatgaattacaacagtcctctatatctgcagattctgcatttgcagattcaaccaaccatggattgaaaatagagtcttaatttagtactaataaagtaatgatttctgcatatacgtatgtttttattaatagatagaccactacctaacttcattaaaaggaactagtgctgcttggagaaatgtctgattttaggactgttgctgagaaagcacctaataagcttggagcatctgatgccacgatgtaagaagtgtttagagaatagtggggggataataaaaggaaccagtttgtaggggctcctattgcctaaatctgggaccatttaggtatccgtgataataacagatgataactaattgaataaaataagaatttatgagtctatattgacataaataaagtaaatacattagtaaatgatggggaagggaaagctcttccctacagtagaatttcccaacaataaatatagaaaacaattagaaaaatcagcattttgacaaataccacagaaaaaaaacatattgttttctggggaagagggcatcaggtggaaac

SEQ ID NO: 38339 - DNA, 375 bp, Macaca Mulatta
ttttaaatatttttcaatacaacagtttaggtttaagatgaccaatgacaatgaccacctttgcagaaagtaaactgattgaataaataaatctccgttttcttcagtttatttcagtgtaatgaaaaagttgcttagtatttatgagaaaattcttcttcctggcaggtagcttaaagagtggggtatacagagccacaacacatgtttattttgcttggctgcagttgaaaaatagaaattagtgcccttttgtgacctctcattccaagattgtcaattaaaaatgagtttaaaatgtttaacttgtgattgagacctacatgcatgtcttgatattgtgtaactataatagaaactcttttaggagaatct

SEQ ID NO: 38340 - DNA, 631 bp, Macaca Mulatta
  misc_feature (1)...(631): n = A,T,C or G
gcaggtagtatctgattctcagatctgcaatcttagatgttgccagtggtccttaggttattggtcagagaacctgggagttcaattctctgctttgcttcctaaaaacaccactttagagcaggggttataacctctagcacttatacgtggcagcggccatggcttgtctctttgttcccatgctacaatattttactccaaaagacactcatggggctagacacaannnnnnnnnnnnnnnnnnnnnnnnnnnnnnnnnnnnnnnnnnnnnnnnnnnnnnnnnnnnnnngnnnnnnnnnnnnnnnnnnnnnnnnagtgagaccctgtttctaccaaaaattagccaggtgtcccaactacttgggaggttgagtctgcagtgagccatgactgtgccactgcactgttataatgctgtcaactagatacctaaagcagtttgcttaatttaaagggtggcaatagtctggaaacataaatcatgtatgtatttctaatactgcaaaccttgattcccacttctgggatatgctaaaggtgcaggtttagtcagtggaaatcaagagacaaatcaggaacacaggtccgtgtgcaggaaatgatagacatgcgacagtaatacacctgt

SEQ ID NO: 38341 - DNA, 603 bp, Macaca Mulatta
  misc_feature (1)...(603): n = A,T,C or G
atgtgtgtttacccaaggctactcctcaaaaagaattgnnnnnnnnnnnnnnnnnnnnnnnnnnnnnnnnnnnnnnnnnnnnnnnnnnnnnnnnnnnnnnnnnnnnnnnnnnnnnnnnnnnnnnnnnnnnnnnnnnnnnnnnnnnnnnnnnnnnnnnnnnnnnnnnnnnnnnnnnnnnnnnnnnnnnnnnnnnnnnnnnnnnnnnnnnnnnnnnnnnnnnnnnnnnnnnnnnnnnnnnnnnnnnnnnnnnnnnnnnnnnnnnnnnnnnnnnnnnnnnnnnnnnnnnnnnnnnnnnnnnnnnnnnnnnnnnnnnnnnnnnnnnnnnnnnnnnnnnnnnnnnnnnnnnnnnnnnnnnnnnnnnnnnnnnnnnnnnnnnnnnnnnnnnnnnnnnnnnnnnnnnnnnnnnnngagattatctctgtgagtgacacacagaattatgtgtgtttaactgaggctacatatcaaaaagaaataaagacaataaatggcaaaatagaannnnnnnnnnnnnnnnnnnnnnnnnnnnnnnnnnnnnngaaatgcaaaactctgttccaaataaagctttagaatggagaaataaacaaacattgagagcag

SEQ ID NO: 38342 - DNA, 161 bp, Macaca Mulatta
tgacaggccaacggaagttggaggcccggagggcgcacaccccttcgctgccggccaccccctccccaagcaaagctgcctgtgggctcaccaggaactgccgagtggatagcgcaagaagcgagcctgcaagtggaaaggaggggcaaggctccttattg

SEQ ID NO: 38343 - DNA, 795 bp, Macaca Mulatta
  misc_feature (1)...(795): n = A,T,C or G
gggaaggtggatatcctactaacagttgcaattagacaaggtagtcagcctcaaagatgatttttcattttatctagttacttctataaaatcttacttcaaaagggagagccgctttgcaagggaactcctgttccattttaacagtgtggtttgcagtgctttcatagctgtgtcatcttggtcattctcaaagatccttttaagccacaattaattgccagagacttttcaagttaacatttttctaatttatcatgcttctcttcaccccaggtcccctccaaactgtaagctttatcaaggtcttttaaatttcctttgtaactgccagacaggcagttagttcgctttttcgtttgggggagtcaaaagaggttacatgctgccctagannnnnnnnnnnnnnnnnnnnccatgtagcaattataagacttcaatttcaatagaaaattgttcatttccagtgaaaccatttttattttaatttgcatttaatttctatggctgtggtatctctaaatacatgtgacttttggccccacacagatttatttttgtaagagttcatctttgtttggggcattaaactgataccaaagggtagtttgataaaagataaattttagatgtctcttggttggtggtgaccagtcagaacttttccannnnnnnnnnnnnnnnnnnnnnnnnnnnnnncccatgttcgggccgccttcgcccctccagaaaccttttctaaaccaattctttttggcgcccgcggggccccagtagggttaagtggaacatggg

SEQ ID NO: 38344 - DNA, 98 bp, Macaca Mulatta
tcacaaaatgaatgtttgccagagcatttagcaaattttaaacaccaggttttacaccacatagtgtaacagactgaacaagtatgatcaaaagcaaa

SEQ ID NO: 38345 - DNA, 727 bp, Macaca Mulatta
ggcaagtattatgtgctacacataattatatgcgctatatttttatataactggcagcacacgaggtttgtttacaccagcatcaccacaaacttatgagtaatggcttatgctttgacattataacattcacgatatcactaggcaataagaatttttcacctccatcctgatcttatgggactatcatcatatacacagtccatcgctgaccgaaaccttatgtggtgaatgactgtacatgtatagaacacgtaggtggcatgatttgttaatgtcagtgcttttgtgattttaagcaattttgatggcctagtgaaaagctcagactttggagcctagcaaatctgggctcaaacaccagttctattacttgctagctggtgtttaacccctccaagcatcattttccctatctgggtgccttaaagatttaatttggtgatgaacgtagacaattcaacttcaaatctctaatgcctgcatttagtaggcattcagcaaatattaagattaaattgaatattgagaatctgacttcaatttattcatcctttgaaccataggtactctatatctccaaatattacattagcccacatgcaacataaaaacagtttataagcatctttatatttttgtaaaaacagttttttccacagaatttttcaaaagtatggcccataaccctggtttacttttggattccagtcctggaaaaaaaaaa

SEQ ID NO: 38346 - DNA, 796 bp, Macaca Mulatta
  misc_feature (1)...(796): n = A,T,C or G
ggggagacagaagggtaagacaagatcagagggagactttgcttccgaggctgctgctgaggccttccaatctcttttagttcgaagtactcagcatgccaaagtgtcatacttctgggtagcattttctgagccccaacacaaccctcagagagtgggatctatttgccaagagtattcttctgttgttatggttgaaactgcctggtaagatggcagatgtacggtatttacaacttaggagttgactggaaaaatgacagaatcatatttcagcaggttgttggactaaatacagtcgtgcgcctcttaacaatggggatacgttctgagaaattggttgttgggtaattttttcattgtgcgaacatcatagagtgaacttttataagcctactacacacctaaggctatatggaatagtctattgctcttaacctagaaatctgtacagcatattattgtactgagtactgtaggcatttgtaacacaatggaaagtatttatgtatctaaacatagaaaaggtacagtaaaataaagtattataatctttctgttgtatatgcaatccatggttgactganagcttttatgncatgcataattgtatatgaaacatacgaaactaccccatgctgagataactgcgtaaatttacttttatgacccctaatttccatatttgcaataatttcctataatcagtattccttcccctctcatttctggtatatattttccgaattaagttagaaagttttatcagtacgatttcccctaagtttttcaagta

SEQ ID NO: 38347 - DNA, 1027 bp, Macaca Mulatta
  misc_feature (1)...(1027): n = A,T,C or G
gggcatccaaatagctaattaacatatgaaaaggtgcttaatctccttagtaccaacaaggaaacacaaaaccacaaataccattgtagcaggacgagccatagacaaaacccctcagacaccaggttaaagaaggaagaggctttattcagcagggagcgttggcagacttgcatctcaagaaccgagctccgggaagaaagagttcctggcccttttaagggcttgcaattctaaggggttccacatgaaagggtcatgatagattgagatctatagatagcacatgtgattagaatcgggggttaatcttttaacctcagacctggtcatcagtggcgctggctggtattgccactgacttcattcctgtgttcttcagcttttacttcctccttctcttcagagacaggcgacagtaagagaaatggcctgtctcctcaccaccacttacctagcaagatgacttaaaacttgaaaagactgacaaaataagtgttggctgagatatgtagcaactgactgtcaaccttgccgaggagggagtgacatactggaactgtacagacacagagatcactgtctggacgaaaatgtgcaaaannnnnnnnnnnnnnnnnnnnnnnnnnnnnnnnnnnnnnnnnnnnnnnnnnnnnnnnnnnnnnnnnnnnnnnnnnnnnnnnnnnnnnnnnnnnnnnnnnnnnnnnnnnnnnnnnnnnnnnnnnnnnnnnnnnnnnnnnnnnnnnnnnnnnnnnnnnnnnnnnnnnnnnnnnnnnnnnnnnnnnnnnnnnnnnnnnnnnnnnnnnnnnnnnnnnnnnnnnnnnnnnnnnnnnnnnnnnnnnnnnnnnnnnnnnnnnnnnnnnnnnnnnnnnnnnnnnnnnnnnnnnnnnnnnnnnnnnnnnnnnnnnnnnnnnnnnnnnnnnnnnnnnnnnnnnnnnnnnnnnnnnnnnnnnnnnnnnnnnnnnnnnnnnnnnnnnnnnnnnnnnnnnnnnnnnnnnnnnnnnnnnnnnnnnnnnnnnnnnnnnnn

SEQ ID NO: 38348 - DNA, 808 bp, Macaca Mulatta
ggggagccctcaggcatggaattagtgcccttattttaaaaagacaagagaaacataatctctctctccaccatatgaagatatagcatctggcaaccagaaagagtgccctcaccaggaaccaaatcacatggcaactttgttttggacttctcagcctctagaagtgtgagaaataaatgcatgttatgtgatccacccagtcgctggcatttatgttatagtagcctggactgactaaaatgctctctgaatacaggatattttagaaagtcagggaagaaaggcagggaagtttccatatcaagagacaattttctcaacacacaattatggtcaaatctgaattcccaaaaatatgtttctttttaaatcaaaaatatttattgggcatctgtaatatgccaggcatcatagtaagggagataaaaaattaaatacaaccactcctattcagcacagtactggacgttttacccagagtattcaggcaagagaaagaaataaaaggcatccaaacaggaaaaaagaagaggtcaagccatctatcttcatggatgatatgattctataactaaaaaaccttaagacttcaccaaaaaggtcctgaaactcattaatgacttcagtaaaggtttctgggatacaaaataaatggatgaaaaatcagtaagtatttctgtaccacacattaatgtttccagccttaaaacccaatccaggaaacataattcccattttaccaatagcccccccacaaggataaaatttaaattttcctagaaaataaccttctcaacccccaggc

SEQ ID NO: 38349 - DNA, 660 bp, Macaca Mulatta
ggtcaaaatcctcctaaaaagcaagccggttccaaattccatgcgagacctcgttttgagcctgtacattttgtagctagtagttcaaaagatgaaagacaggaagatccttatggccctcaaacaaaagaggtaaatgaacaaacacattttgccagcttgccaagagacatctaccaagattatactcaagactctttcagtatacaagatgggaattctcagtattgtgattcatcaggattcattctcacaaaagaccagcctgtagcagccaacatgtattttgacagtgggaaccctgccccaagcagcacatcacagcaggcaaactctcagtcaactcctgagccttcaccatcacagacatttcccgagtccgtggtagccgagaagcagtattttattgaaaagttaacggcgacaatctggaagaacctttctaatccagagatgacttctggatctgataaaattaattatacatatatgttaaaacgttgtattcaggcatgtaagacaaatcctgagtatatatatgctcctttaaaggaaattcctcctgctgacatccccaaaaataaaaaacttctaactgatggctatgcttgtgaagttagatgccaaaatatctacttaactacaggttatgctggcagc

SEQ ID NO: 38350 - DNA, 287 bp, Macaca Mulatta
agaagacagctcgctggaagggttctgtggaggtctcccacctgtggaagaaggtgatagaaaaattagcctgataatggaactgtcgacccaggtttcccttcagactgagaggatcactcagctgaaagaagttttggaggaaaaggaaaggaagattcagcagctggaagctgagcggagtccccatcctccccaagaggtcaaggaccctccaggatgtttaccagaagccccagttttctctactgatgacgtccctcctgtggtctctgatgagaatttgt

SEQ ID NO: 38351 - DNA, 811 bp, Macaca Mulatta
  misc_feature (1)...(811): n = A,T,C or G
accgccccggcactaaatctttggtgttccctctaccatggacannnnnnnnnnnnnnnnnnngtttagctcagggaggatttccctttgaaccccctgaggcccagaggcttgccattgattttgaaaccccatgcctttcgcatttctgggctgggcaaccaagaaccaagacttttgttttcaaaaagaattaatttaacttgatttaaagtttaaggcaaaggaaaaaaggagaatcatcaaatacctaggaataaatttcccggaaggacatgcaagactttttcacagaaaactacaaaacattaaagatgacctaaatcatgggaaagatattacatgtttttagatgggaagattaaaaattataaattataaaattacaaagagatctagtcttcccagattgatctatatatttgattataatcacaatcaaaatcccagtacgttttttaggggtagaaattaacaagcagaatatctgtagaaatgtaaaggacnnnnnnnnnnnnnnnnnnnnnnnnnnnnnnnnnnnnnnnnnnnnnnnnnnnnnnnnnnggtgcggtggccgnnnnnnnnnnnnnnnnnnnnnncgccttcccaggtttacgccattctcctnnnnnnnnnnnnnnnnngnnnnnnnnnnnnnnngcccgccaacccgcccggctagtttttttgcatnnnnnnnnnnnnnnnnnnnnnnnncgtgttggcgaggatggtctcgatctcctgaccttgtgatccgcccgtnnnnnnnnnnnnnnnnnnnnnnnnnnnnnnnnnnnnnnnnnnnnnn

SEQ ID NO: 38352 - DNA, 270 bp, Macaca Mulatta
tgacgaacataaagggaaagaggagaggcacctggtgtatgttctctaggccctttagaaaacattgagttgttcctttggccacatgtatgcgcatctataagaaaggtgatattgtagacatcaagggaatgggtactgttcaaaaaggaatgctccacaagtgttatcatggcaaaactggaagagtctgcagtgttacccagcacgccgttggtattgttgtaaacaaacacattaagggcaagattcttgccaagagaattaatg

SEQ ID NO: 38353 - DNA, 806 bp, Macaca Mulatta
ggggccagtgggaagctgcttcttgggcagggtggatttccatctgtgtctcctttttggtgtcgaaagctggacccaggttgatgaagcagcaccatctggagccattgagggtctcatggaagagacaaaagagatcacagtgaatcacatgctgcttctgaacttcttctgcctggaagtgacaaacatcatttccatcacatttcactgaccaaagcaagacatgtgggacattcctgctgacagccatttctggctgtgtatgcgatatgccatggagacatgggaggaccagatgacacttctgagcttcaccctcaggaaagatagagtgactcacctgatcggcatctgtgagaagcacaaactgggcatgtttcaaccatatctacccctcttcatcttgggaacgttctatcctcaggaagtcatgcttttcttggttcttccaaggaatgcctgccccattcaattccactgcctgcatcaggagtacaactgaatctcaattggacatcatgatgcatcttggcttaactccggccggggtgcggtggcctcacgcccgtaatccccggcatatccgggaggctgaagacagggtgggatccactttgaagggtcagggaaaatccaagaattaaagccctgggcccaggcaaggggttggaaaacccccccatttctcctactttaaaaaaattaccgaaggggaatattggggccttgaaaatgggttgcccctggggttggggggcaccaccctttggataaaagtccccccccatctccttaaatctttt

SEQ ID NO: 38354 - DNA, 724 bp, Macaca Mulatta
  misc_feature (1)...(724): n = A,T,C or G
aattatctcagagcaccacaggtattttcagtggctttttaagagatgatactagtcagagggaaagtgggtgaagctcttactatttgaaccctttcttcaaaaaaccacaaaacatgtattaatttagcacttatcttatttccagtttacagagttccttccaagagagtaagatttttaagcttttagaggcaggttcatgtctgtaaaagtccagcaagttctggtgtatcacataatgaacatcctttcatgagaaaccctggcaatgagagactccatgtataagggcatagagttggattaggtacactgtaagctcctgggtggtgggtctgaataagacgatctgtgcagcgaatgcaaacacatgcatgggacaaggctggaacaaaagcttccatttacaaagtgggcgggcacctgaagggagccctcacagaggtgggcactgctcgcccttgatgagtgcacattagccagaggcatgatcacaactggtcttgcagggaaagagcacctctgaggtcacagattatgaaaatgtttgtcatcctccagctgagcaagtccatctgcttgcatgtgggtgccaaccccatggagggtgcactgtgggagatgacaagatgaacgtaaacctcctctcactaattatccactgccacacactcanggaacaaacctgtgctcctcaatcgagtgaggtcttctgcaagtg

SEQ ID NO: 38355 - DNA, 492 bp, Macaca Mulatta
aaaacagaaaatactgaactaggagtaggaggctgtatgtgctaaaaatgataaaactgaccataagttaaactggggagaatcagtattattaaagtaccattttatacaaaataaaaagatagctgctctcactgtcggctctcatattcttccaggttttgcactctacataaaattatttctacaatgtcaagactagccgaaggactttataatacaatattatatgactgaagaatgagttaagtttgagattttgatgattcgattttgtgtgtgtttaataggcttcaccttattacatgctattttattttgcttttttaaaaactcaggacattaactagttttaggttttcctttatcatggcttctacagtatttctattgtttaacataaaatggttttccaaagaagtttctgaagtcttcacagctcttaaaagccaggcctggactgactgtgtggtggtaaatgctattcattac

SEQ ID NO: 38356 - DNA, 752 bp, Macaca Mulatta
ggattacattgggcccacacctgtcatcctagctcctgggaggctgagctgggatgatcccttgaccccaggagttggaggctgcagtgagctatggttgcaaccagtatactccagtctgggtgacagaggaagagtctgtctctaaaatccaaaaacaggaacatagcctctttttgctgtttcctctgccatccccagggtgggggccttttccttgtgttaacgagatggctgctggaagtccagacctcatatttctgttccaggcaaggtggaaaggattaaggataaagggtaggcctcccagctaaattttaaagactttttctggaagtctcgctaatagctcattggccaccaaatttgcaaggaaggctgggaaatatttatagccaagtacactgacatacccaacaataaaggttttttgtttccaagaaagaatggctgttaaatagtggtctcagccacagagacccatgtctcagtcttttatattttcacagcacctagtaggtgccccatgacactggtgggcagtctaacgtaaagaaatagacaggagcccaggtaaatttaaaaaacggatgcatgaagaaactggagaaaatggccatatggtagtttccaatttaaaaagtacttttttaggaaaaatagacccccccctggatttccgccccctaaacaaatcctaacgtggtaaaactcaggcctttccttggggtggggaaggggatttataaaat

SEQ ID NO: 38357 - DNA, 830 bp, Macaca Mulatta
  misc_feature (1)...(830): n = A,T,C or G
ggatgccccagttagatacatcaacatgattcaccactattatgacgatgcttcccacactatatcttatcatgcagctaaagctactaaacacaaatcaccaccaaccaccccttacaaaaacccccacccttcagtctcacaatgtccgctgacannnnnnnnnnnnnnnnnnnnnnnnnnnnnnnnnnnnnnnnnnnnnnnnnnnnnnnnnnnnnnnnnnnnnnnnnnnnnnnnnnnnnnnnnnnnnnnnnnnnnnnnnnnnnnnnnnnnnnnnnnnnnnnnnnnnnnnnnnnnnnnnnnnnnnnnnnnnnnnnnnnnnnnnnnnnnnnnnnnnnnnnnnnnnnnnnnnnnnnnnnnnnnnnnnnnnnnnnnnnnnnnnnnnnnnnnnnnnnnnnnnnnnnnnnnnnnnnnnnnnnnnnnnnnnnnnnnnnnnnnnnnnnnnnnnnnnnnnnnnnnnnnnnnnnnnnnnnnnnnnnnnnnnnnnnnnnnnnnnnnnnnnnnnnnnnnnnnnnnnnnnnnnnnnnnnnnnnnnnnnnnnnnnnnnnnnnnnnnnnnnnnnnnnnnnnnnnnnnnnnnnnnnnnnnnnnnnnnnnnnnnnnnnnnnnnnnnnnnnnnnnnnnnnnnnnnnnnnnnaaattaaccgcaaaattcacagccgggccatttggttataacacctggatcggaaacactggttcttagccctttattaaccaccaaccttttcccattagtcctacttagccctctaacacttttggggtattaactaactaatttctttaaaaattgcagtaagccccttatattcaagcccttatggctct

SEQ ID NO: 38358 - DNA, 712 bp, Macaca Mulatta
  misc_feature (1)...(712): n = A,T,C or G
ttagcgtgaaaacaggatgataatgaagccagaggttcttcagaggtgtcatcttggatttcgccagcttcagctggtttcatcctaaaaagggacttcagaacccaggcattctttttcctgaaaataagcagagttaaagctgagtagggatttagctctgtcacatatgctatcgcatggggcaacaaaagcagagtcggtccagagaaatcagcaggcactacgatgggtaacagacccagctatatttatgcagcatttttacaaaaatgaaaccatgctacctgtaaaggaagatatgctaacaaacaacaaaactggcaggaaccaagattcctgctgacactacccttaaatagttttaattttccctgacaacaaatgaggttaacagagcataattatcatctaccgtgaccctttcaaaaagacaggctgtatatatttgcactaagggaagaaatcgtgtaatcgtgtaatttcccctacttaaagcttctttatttaaaaagcttcacccacatacgcatgcatgtgtcttcaaggtgaccacaatttattttgcagtcattctttgcaccagttcccggttttctcactagcttgccagctccatgactcaaggagaccagggaatgagagtttgtttttgctgagaagtgagtcctttatgccccanaatagtgactgacacagagaaggtgctcag

SEQ ID NO: 38359 - DNA, 816 bp, Macaca Mulatta
  misc_feature (1)...(816): n = A,T,C or G
gggccttgcttctcgcctaacgccgccaacatggtgttcaggcgcttcgtggaggttggccgggtggcctacgtctcctttggacctcatgccggaaaattggtcgcgattgtagatgttattgatcagaacagggctttggtcgatggaccttgcactcaagtgaggagacaggccatgcctttcaagtgcatgcagctcactgatttcatcctcaagtttccacacagtgcccgccagaagtatgtccgacaagcgtggcagaaggcagacatcaatacaaaatgggcagccacacgatgggccaagaagattgaagccagagaaaggaaagccaagatgacagattttgatcgttttaaagttatgaaggcaaagaaaatgaggaacagaataatcaagaatgaagttaagaagcttcaaaaggcagctctcctgaaagcttctcccaaaaaagcacctggtactaagggtnnnnnnnnnnnnnnnnnnnnnnnnnaagttccagcaaaaaagatgaccaccgcgagtaaaaaggctccagcccagaaagttcctgcccagaaagccacaggcccaaaaagctgcgccctggctccaaaagctcagaagggtcaaaaaagctccaggccaaaaaagcaccttgctccaaaaggcatcttggcaggaaagccttaagtggcaattcaaaaaaaagtaataaaggttcttttttgaaatgttggttcnncaacatctaaatcttattcttaatacaattgtcgggccgcccttgggccctttgaaaacctttctaaaccatttattttgggggcc

SEQ ID NO: 38360 - DNA, 125 bp, Macaca Mulatta
ttcttccagagagtgtgggagttgtattccatgttccctcctgcaaattctccaacgagaccagctgcgttcattgggtcctgggtggccgcgcctctctctccccgccctgtctcctgccctca

SEQ ID NO: 38361 - DNA, 672 bp, Macaca Mulatta
caaatgcacgttgatagcggagttgctgttgtaacaggtgggagtggacagtttcctgttagctgcaacaacaatccaatggtcgaagacgccaaacagcaggagagtggttctgttggaccaaaagaaatagaaatatatactgtgtcagcaatgcagaccccgtgtcgttgcaagaatcagtatgcgtattatttctaacatgagtttttctcagatgttttgcactgtgttgtccagtgtctttttaaaaatgttacactataatttgcgtatcttgggcaagtttgtagatacaaggatcagtgttttgggtatattctatgaacatgaaaaatgtaagtgcaatctttctattctgatttgaagctgttgcttaatgtgccttgcttatttttaatgaggtttgcatttttaattttctgacatatggcctttgggtgaatataccgaacatgctacggttaatattttcaaaccaatataccgcaaagaggacgactagcagtaaacactgagaactagtcagtgtggttctgactccacccggtcactccaggctggaatcttttacccaggacttggttgctttgggtactgtggtcttcattctgagtctgttaaaatgatatgaaaaacagtagctccgtatcgaatacattgacaaatgga

SEQ ID NO: 38362 - DNA, 1579 bp, Macaca Mulatta
agtcactgcatcctggcagcagaagctgcaccaagtccatgtcgcccatggtcgtcatcctggcctgtcttgggttcttcttggaccagagggtgcggtcacatgtgggtggtcaggacaagcccttctgctctgcctggcccagcgctgtggtgcctcagggaggacacgtgactctttggtgtcactatcgtcctgggtttaacatcttcacgctgtacaaggaagacggggtgcctgtccctgagctctacaaaagaatattctggaacagtttcctcattagccctgtgactgcagcacatgcagggacctacagatgtcgagtttttcatccgcactcccccactgagtggtcggcacccagcaaccccctggtgatcatggtcacaggtctatatgagaaaccttctctctcagcccagccgggccccacggttcccacaggagagaacatgaccttgtcctgcagttcccggcgctcctttgacatgtaccatctatccagggagggggaggcccatgaacttaggctccctgcagtgccgagcgtcaatggaacattccaggctgacttccctctgggccctgccacccacggagggaactacagatgcttcggctctctccgtgactctccctacgagtggtcagacccgagtgacccactgcccgtttctgtcacaggaaacccttcaagtagttggccttcacccactgaaccaagcttcaaaactggtatcgccagacacctgcctgttgtgattaggtactcggtggccaccatcttcctcaccatcctcctcttctttctccttcgttgctggtgctccgacaaaaagaatgctgctgtaatggacccagagcctgcgggggacagaacagtgaacagggaggactctgatgaacaagaccctcaggaggtgacatacgcacagttggatcactgcgttttcacacggggaaaaatcactcgcccttctcagaggcccaagacacccccaacagataccagcgtgtacatagaacttccaaatgctgagcccagatcgttgtctcctgcccacgagcaccacagacaggcctggagggggtcttctagggagacaacagccctgtctcaaaaccggcttgacagttccaatgtaccagcagttggaatctgaagtctcgactctgcatcttagggcattgctcttcctcacaccacgaatctgaacgtggctctgtcttgcttgccaatgtctgaggttctcactgcctgctggaaagaaaatgcactcctttgcttagcccacaattctccacttcacttgatccctgcccacctctccaaactaactggcttgcttcctagtcctacttgagaatgcagtcacactgaggaactcacaattccaaacatacaagaggctccgtcttaacacggcacttagactcatgctgttccaccttccctcatgctgttccacctcccctcagacgatttttcagtcttctgttatcagtaaaccttataaaaatttgttgtgatttctatgttgctctctcgtcttcaaataaacgtgactgtcctcat

SEQ ID NO: 38363 - DNA, 847 bp, Macaca Mulatta
  misc_feature (1)...(847): n = A,T,C or G
ggnnnnnnnnnnnnnnnnnnnnnnnnnnnnnnnnnnnnnnnnnnnnnnnnnnnnnnnnnnnnnnnnnnnnnnnnnnnnnnnnnnnnnnnnnnnnnnnnnnnnnnnnnnnnnnnnnnnnnnnnnnnnnnnnnnnnnnnnnnnnnnnnnnnnnnnnnnnnnnnnnnnnnnnnnnnnnnnnnnnnnnnnnnnnnnnnnnnnnnnnnnnnnnnnnnnnnnnnnnnnnnnnnnnnnnnnnnnnnnnnnnnnnnnnnnnnnnnnnnnnnnnnnnnnnnnnnnnnnnnnnnnnnnnnnnnnnnnnnnnnnnnnnnnnnnnnnnnnnnnnnnnnnnnnnnnnnnnnnnnnnnnnnnnnnnnnnnnnnnnnnnnnnnnnnnnnnnnnnnnnnnnnnnnnnnnnnnnnnnnnnnnnnnnnnnnnnnnnnnnnnnnnnnnnnnnnnnnnnnnnnnnnnnnnnnnnnggctcataagcaaaggatcggaaggcgaacaatgccaagccgcgactcaatgcaagagctaactcgggagcgtgattttcgcccctagctgcaaagtgcgcagagaggcgtttggagagaggcccggggaccgatcgtcgcaagtgggcgttcgtgcaggagtcaagcagttgcctgcgatgtagccccacgggggcttgcgcatgggaacgtcgcgccggtgtatgtaatgggggagtgccgagagaatggcctccctggtggggtcgggcgctgcatatgcaggcgggactggaaggaaagaagcggacgtggtctggaatgcgggaaagcaagtcngaacggtgtccgaactgtgatgagatgagcggccagaacgcgtaagagagagt

SEQ ID NO: 38364 - DNA, 675 bp, Macaca Mulatta
  misc_feature (1)...(675): n = A,T,C or G
ggattaccaatttttagaagtaattttctagtaagcttatggcattagaaaatactagaagttttttttagttaaattagttagaacatttatgaatgaatataataaatattttttttcagaatgaaatatggaccctttgtgtttactaatagataaagccagatannnnnnnnnnnnnnnnnnnnggccacaaaatacggcctttgttaaagaacactaaagttagaagtctaaagttagagcaactttttaatggctatttcctattattgtaagtgttaaaacccctgcagaattcttgataaggtgctatttatactatatttcttattataagacaactgtctttagcctttttagtactagtctttttagtactaaatcaatcagtaaacatcatcatttcaccctcaaattttgtcactngaaaggcatatcaaatgaaaaataatttgagatctttctttcaagataatttttcccgataatttcctgatacttttggttttgaagtaaatacctttgtcaaaaacctaattgccatttctgtttaaatctaaagtaattttggtaaaaccgtggtttccacccttatttattttagggatgttaaaatgcccaattttcctttcccctggaattacccccctaataccggggaaacccggggta

SEQ ID NO: 38365 - DNA, 639 bp, Macaca Mulatta
aggcgtctcggggaaaggccagggacttcggggtctctcttctgcaccagcaaggggttcgcctctggacctctagctgccggcgccgcggactccggggccggcaggcggggccgcccgggaggcgcagagggagcggcgcgcaggtgccgggctcagggatcgccgcccgcccacggcggagcgcgccgcgcctggggccgcacagcctccaccctcgcccgcaggcggccgtcgcggcgcgccacccgcgctcttcagcagaggacccgcttcccctggctggcgcctttgttccgctcaccgacccgcttcatcgcgccgggcagaggggaagctcgcgcggggcgcccgcatcctcgaggctccgcagtcacgctcaagtctcaattactctcaaagtgggggcaacactagggggcggcgcggggccgagcgcgacgtcctctccgccccccgcgcggggtctaccccacctcgccggcaaactcaccagcgcgctcagcgccgccggctgccggacacgttccaagcccccaaaccgcgccaagagccttcggggcctgcagggagcaccggcctgtctcggagctggcgcgtcgcgaggctggccggaaggagtcggacctcaaaagtcac

SEQ ID NO: 38366 - DNA, 287 bp, Macaca Mulatta
gggaatcagtaaggaatggtaaaccctgtgtagtaagcagaagatgctttccagccatataaaagggtttcagccccagataagggctgtacaggtaagggaaaaaaaatactcaccacatatggagaaaatatgtagctttggcccatgtgaaaggaaaatggacctaaaacgctgaatgagttcaacatcctctaaggtctggtctatctgtggaaatgagactacaaaaaatctaaccattagcccagaggaagctgtaagaaaggctgccgtttgatcaggcc

SEQ ID NO: 38367 - DNA, 729 bp, Macaca Mulatta
cccggctcggatcccagctctgccgcgcagcgctcgctgcctgcgcgacctccaggccccgggaggcggggcgcgtcctggctccggcggggtcacacggagcagcgggcgctgggatccagggtggccttggggacgcaactttagggaagtcacctacccctgtgtgtgcgctggccccctgggacactgggagcgaaatgaggtggtcgtgcatattttattttccaaaatatgcaccaggcaccagaccgaggaagccggagccccggagagcacggaggggcgggtgggggaggaaggcgggggaggctgctcagcgggtgctgggagaccgcagccgcgggggactcgcagaagagccaagactggccacccagcctgggaagggagggaaggaccgcgagagggtgcccgatttcagcccggggagacgcgtgtcccggctgccagtctctcttcccggcagagggccccggtgctgaccccagccccttttccatgctcgatgcttcttacaaagaggcccggcgaggagtgtcgctctccaagaggccaggcccttactaagcaccaaagtgccaggaagatgaaatagaatgtcctggatgcccgctttgcttaattactaattacgttcgtttactcgaagccactgcgtaggttgcccacagccacctgcagcgcctctggagtgcagagaagaacatgcctcaggcttttctccat

SEQ ID NO: 38368 - DNA, 630 bp, Macaca Mulatta
  misc_feature (1)...(630): n = A,T,C or G
ggggaccacaccgaacctcaaatgaatttctgtgtatgatacaagagacagcatctcaccatgatgcccagactagccttgaactcctggcttcaagtgattctccctactcggcttcccaaagcgctgggattatagggctacatgccttctgcctgtacagaacaacatatgtacctagaagcagcagcatgaaatgtgttagaagaatggaagaacgtagacagctactgacaactctaaaacgcttcttgactacaatcccctttctcatctgaattggcctctagnnnnnnnnnnnnnnnnnnnngcgccaacgccgccaccggcaacggttgctccttcaacccgaattttttattgcttgactggcaaaaaatggggtttccttcctgggcctttgcacaggggttaactttcaaaaagattcccaagtttttccaggaggttcttcctccaggaccctacaaaagaatctctctccccaaccgccttaaaggcttttaaaattctgggcttttcaaaatccccaaaggggtttttaatccttttgggtgaaaaaacctttttcctttgaaaaactttttcccagggccnnnnnnnnnnnnnnnnnnnnnnnnnnnnnacagg

SEQ ID NO: 38369 - DNA, 710 bp, Macaca Mulatta
gggagatacctcgggacttcattccaatgaagcggttctccacgatgtcaatacggcccacaccgtgcttgcccgcgacttcgttcagaattgccagccaaatctgccttgcttacctgtgctttgtgaagaggatttgctatttagatgcagcgaagtgctgattgttacttcaaggttggcgtggggcaaaataaacagaagtcacacctggagacaaccaacatctaggttatatagtatagactctggcttgcccttgtgacttgttttggccagagacaacagaaaacttgatgccggcagaggcctggaaaagcacttgcttacttgcacctgtctactttcccccttgctcctctgccttcaccataagaacatgcatggactagacttttgaatagtgagaaacatgtggcccagtgaccccagttgcttcagctgacagccaactgccgggtatgtgaagtgagctcacctgagaccagaactatccagccaggcccaaccaagatcagaagaactgctcagctgacctggaagctcatgataacaaatgagtggttactgatcttttgccactgagtttcggggtgatttgtcacacagggattgttgtaacaatggggtagtttgatacgacagtgtcattaaaaagtaacacaacaccctgcccttctgcccatagttcaggaaatagttgaaggaaa

SEQ ID NO: 38370 - DNA, 199 bp, Macaca Mulatta
acagaatgccaactagaaaccatcaacctaggtgtcccttaaaggctggaatccccccattccaggggtctgtgttccaaatggtctggggtggcttctggccctagaggcagagccaggccttagctctctgcctgctgatgaggtatgaggatcatgcattcttccagggcacactcctcgctgcaggcgctgcctg

SEQ ID NO: 38371 - DNA, 816 bp, Macaca Mulatta
  misc_feature (1)...(816): n = A,T,C or G
ttttttgtgttttttgaagagtgggtttaaaaatcatctcccccctnnnnnnnnnnnnnnnnnnnnnnnnnnngcgcnnnnnnnnnnnnnnnnnnnnnnnnnnnnnnnnnnnnnnnngaaacccccccttgtttttccccaaagtgtgggtatttttttgaggaaggtttataacttggccttggcccccnnnnnnnnnnnnnnnnnnnnnnnnnnngtnnnnnnnnnnnnntccaaannnnccaaagtttcccggttaagggaatttgccctannnnnnnnnnnnnnnnnnnntttaaaggggaaaaccggggttttttcccggaccatttttccttttcccttccccccaaaaacccccttattccaggttgggttttttcccctccgtgatctcttggctattttctnntttcatgttccaggcccccccaattagcgctattgtttctaactttggctatcataatagcttncctgcnttcctgctccttgcatagcagtcagagcaagtgaacttattgaaacacacttgatgttatctaaccagtacctctctctctgccccactactcccaagaaaaggaaagaactcagaatgtcctgattcctgtgatagtgacttttattaattaatatggggggtgctgtnnnnnnnnnnnnnnnnnnnnnnnnnnnnnnnnnnnnnnnnnnnnnnnnnnnnnnnnnnntagtggtgctnnnnnnnnnnnnnnnnnnnnncaagtcctgggttcacgccatacttccgccttagcctcccgagttgctgtgactacaggtgtctgccaccatgcc

SEQ ID NO: 38372 - DNA, 4556 bp, Macaca Mulatta
  misc_feature (1)...(4556): n = A,T,C or G
cccaagatggaggctaatcacgctgaacagctctcagcggaacaacagtcaacacctccaggggacagttcatcattaccccgtcacaatggcctggagnnnnnnnnnnnnnnnnnnnnnnnnnnnnnnnnnnnnnnnnnnnnnnnnnnnnnnnnnnnnnnnnnnnnnnnnnnnnnnnnnnnnnnnnnnnnnnnnnnnnnnnnnnnnnnnnnnnnnnnnnnnnnnnnnnnnnnnnnnnnnnnnnnnnnnnnnnnnnnnnnnnnnnnnnnnnnnnnnnnnnnnnnnnnnnnnnnnnnnnnnnnnnnnnnnnnnnnnnnnnnnnnnnnnnnnnnnnnnnnnnnnnnnnnnnnnnnnnnnnnnnnnnnnnnnnnnnnnnnnnnnnnnnnnnnnnnnnnnnnnnnnnnnnnnnnnnnnnnnnnnnnnnnnnnnnnnnnnnnnnnnnnnnnnnnnnnnnnnnnnnnnnnnnnnnnnnnnnnnnnnnnnnnnnnnnnnnnnnnnnnnnnnnnnnnnnnnnnnnnnnctggatgaacatcgtactgagcaaaagaagttaaagctcctccaaaagaaacaggtacaaattcaaaaagaaaaggaccagttacaaggtgaacacagcagagctatcctcgctcgaagcaaattggagagtctgnnnnnnnnnnnnnnnnnagcaaattggagagtctgtgccgggagctgcagagacacaacaagactctcaagnnnnnnnnnnnnnnnnnnnnnnnnnnnnnnnnnnnnnnnnnnnnnnnnnnnnnnnnnnnnnnnnnnnnnnnnnnnnnnnnnnnnnnnnnnnnnnnnnnnnnnnnnnnnnnnnnnnnnnnnnnnnnnnnnnnnnnnnnnnnnnnnnnnnnnnnnnnnnnnnnnnnnnnnnnnnnnnnnnnnnnnnnnnnnnnnnnnnnnnnnnnnnnnnnnnnnnnnnnnnnnnnnnnnnnnnnnnnnnnnnnnnnnnnnnnnnnnnnnnnnnnnnnnnnnnnnnnnnnnnnnnnnnnnnnnnnnnnnnnnnnnnnnnnnnnnnnnnnnnnnnnnnnnnnnnnnnnnnnnnnnnnnnnnnnnnnnnnnnnnnnnnnnnnnnnnnnnnnnnnnnnnnncagctcactctctactcaggaaggtttgaagaattccagagcacgctaacaaaaagcaaagaggtgtttgccactttcaaacaggaaatggacaaacaactaagaaaatgaagaagctggaaaaggacacagccacatggaaagcccgatttgagaactgtaacaaagctctgttggacaagattgaagannnnnnnnnnnnnnnnnnnnnnnnnnnnnnnnnnnnnnnnnnnnnnnnnnnnnnnnnnnnnnnnnnnnnnnnnnnnnnnnnnnnnnnnnnnnnnnnnnnnnnnnnnnnnnnnnnnnnnnnnnnnnnnnnnnnnnnnnnnnnnnnnnnnnnnnnnnnnnnnnnnnnnnnnnnnnnnnnnnnnnnnnnnnnnnnnnnnnnnnnnnnnnnnnnnnnnnnnnnnnnnnnnnnnnnnnnnnnnnnnnnnnnnnnnnnnnnnnnnnnnnnnnnnnnnnnnnnnnnnnnnnnnnnnnnnnnnnnnnnnnnnnnnnnnnnnnnnnnnnnnnnnnnnnnnnnnnnnnnnnnnnnnnnnnnnnnnnnnnnnnnnnnnnnnnnnnnnnnnnnnnnnnnnnnnnnnnnnnnnnnnnnnnnnnnnnnnnnnnnnnnnnnnnnnnnnnnnnnnnnnnnnnnnnnnnnnnnnnnnnnnnnnnnnnnnnnnnnnnnnnnnnnnnnnnnnnnnnnnnnnnnnnnnntctccctgtggagcacaggctgatcagcagtcctggaagccagaggcagaagcttccagtcaggccccacaggctcccaccgaggcctccctacaggagatggaggcagatgtgcccactccagcatgcacagctgaagagcacgttgcagccatggtgcctgcatgcgagcccagtaggcagcccccaccagcagcagcagaggagctgccagtaggggcctcagctgggcctcagccgcccaacctggctgacaccaatctggaaggtgtcgactaagcctcgccatgccttcagaggcttcgtcctgactcagcaccttcagcataacagattgtcttccgaaaaaggcattaagggctagagatgtcaaatgaaagagaagtaggatcaagtcattttttaatgttatgcagaacacattcattcaggcttcgctatttgttgccagtttgtaactgatttgaaggttttctatttaacactggttgacagtataattttcccaaagggcaacaaaacatcagacagcaaatttatattacttttctgttaagataatacttaattaaatttgttaatcaccagtaagatttgatgtttaaagacttctactgcaatatataaatattgaaaatgtgatgttctgcgtatttggatatatagtttannnnnnnnnnnnnnnnnnnnnnnnnnnnnnnnnnnnnnnnnnnnnnnnnnnnnnnnnnnnnnnnnnnnnnnnnnnnnnnnnnnnnnnnnnnnnnnnnnnnnnnnnnnnnnnnnnnnnnnnnnnnnnnnnnnnnnnnnnnnnnnnnnnnnnnnnnnnnnnnnnnnnnnnnnnnnnnnnnnnnnnnnnnnnnnnnnnnnnnnnnnnnnnnnnnnnnnnnnnnnnnnnnnnnnnnnnnnnnnnnnnnnnnnnnnnnnnnnnnnnnnnnnnnnnnnnnnnnnnnnnnnnnnnnnnnnnnnnnnnnnnnnnnnnnnnnnnnnnnnnnnnnnnnnnnnnnnnnnnnnnnnnnnnnnnnnnnnnnnnnnnnnnnnnnnnnnnnnnnnnnnnnnnnnnnnnnnnnnnnnnnnnnnnnnnnnnnnnnnnnnnnnnnnnnnnnnnnnnnnnnnnnnnnnnnnnnnnnnnnnnnnnnnnnnnnnnnnnnnnnnnnnnnnnnnnnnnnnnnnnnnnnnnnnnnnnnnnnnnnnnnnnnnnnnnnnnnnnnnnnnnnnnnnnnnnnnnnnnnnnnnnnnnnnnnnnnnnnnnnnnnnnnnnnnnnnnnnnnnnnnnnnnnnnnnnnnnnnnnnnnnnnnnnnnnnnnnnnnnnnnnnnnnnnnnnnnnnnnnnnnnnnnnnnnnnnnnnnnnnnnnnnnnnnnnnnnnnnnnnnnnnnnnnnnnnnnnnnnnnnnnnnnnnnnnnnnnnnnnnnnnnnnnnnnnnnnnnnnnnnnnnnnnnnnnnnnnnnnnnnnnnnnnnnnnnnnnnnnnnnnnnnnnnnnnnnnnnnnnnnnnnnnnnnnnnnnnnnnnnnnnnnnnnnnnnnnnnnnnnnnnnnnnnnnnnnnnnnnnnnnnnnnnnnnnnnnnnnnnnnnnnnnnnnnnnnnnnnnnnnnnnnnnnnnnnnnnnnnnnnnnnnnnnnnnnnnnnnnnnnnnnnnnnnnnnnnnnnnnnnnnnnnnnnnnnnnnnnnnnnnnnnnnnnnnnnnnnnnnnnnnnnnnnnnnnnnnnnnnnnnnnnnnnnnnnnnnnnnnnnnnnnnnnnnnnnnnnnnnnnnnnnnnnnnnnnnnnnnnnnnnnnnnnnnnnnnnnnnnnnnnnnnnnnnnnnnnnnnnnnnnnnnnnnnnnnnnnnnnnnnnnnnnnnnnnnnnnnnntgtctaatccaactctatcttaaaagttgaactcaagtagaaaaatggatagaaacaaaattctctagtactcatccaggaaaccattcttcaatgttgcatgtggctgtttgccaaggcacacaaagtgcttgtaggcagcaaccatatgctacaagaattgtaaactgcatacagtttgtttgaagtagacagtgaggataataacaaagttgctaggcaggaaaaaaaaattaggaaaaaagcttgtcgctatttgagaatctgtatatttttaaaggcttaaaatattataaccacagggtatccagccaaattcaacattattgcaagtcttagagatttaaacattcatttgattcaaagctaaatattcaccataatccaggagggtctccttccccactacagaggcagaacgtccaagaatggagtaagattagtcacagtaaagtctcagtctgaatgtttagcaagagaaacaggcaggagaggaacccaaaggcagtaaatcacatattctaaaacccaaagttcattattttcatccaaaagactttcacagaaacacattactcacagccatgtgtatcttggacagagtttcagatggaatgacttgcctgaaatttgtaaagcttaatataggttttgggggaattattttaacattaaaagaatgttttattatagtcctttgtgttagaatttagccttactaattgtaacaataactcataaagttctaaatgcagaaggaatatctgttctttatcaagtgtatgtaactattttttagtaatgccatctactttctagaaacactaaagttattgttttctaaattaaataactataatttatgtatctattaaaaaaggtacttctcttcccaa

SEQ ID NO: 38373 - DNA, 1245 bp, Macaca Mulatta
tatgtgacagacttgcttgttatcattggtctcactagaggatacctttttacatttacttctctcttggatcaaatatgtctttaactgtacatctcagtggctggaggccatgccttttaagcatgtataaaattttaaagaaatgaacatacaaatagttattttagtaatacttcctgaaagaaaaaccaaattctgctataaatcttgaccgtcaatgaacttttaaataacgcatttagctggaaaacaatactttcccagcttgtgttacctagaagcgtgaatgtataggatccctgactactaagactatattctcagcccttccctgtcttttatttgcggatctaatctaatattagaacatattaactgcttaaggcattgaagccatatgggatggggatacatttcttcagtgtttctccgagagactttccatttccttggagttacggaggcaagtatcatagtattaagaaatttgcctaaatctgagttgtgcctttctttactcacaaggcatgggttttgtcctggtgatcagtttgcaagacttcttccttcccagctctttaataaaagcaaagtgattgagtaggtaatgttcaaagtgtctacctgtgtacatgtacttgtatcgattatgtagttcagtaagatgtgcccaagtcatttcagaaggaaagatcctttggttttgatgcactttgctgaacagttgggtagtgagtgggatcctatccaggtgaggaatgcttgcaatgcttattgaaaggatttgctttgggactttgtcatcttccagaaaggaaacatattgtatatttggcccagtgtgattgattgcttaatctttggtaatttttacttgaatgggatttgctgaattcatgactattgaatttaaatctaattatgagttgacaaataaataaaaggtagtgtttatgtctgagcttattgtgtttgagctaacaccaggttactcggtaaccatgacctgctcctccatttccatttattctcaacattaaatagttttatcttgttgttgccagaaatgcacttgtgccaggtgttgacccctgctgtatgaaaagcttattggcaaatcactctgtaatagtggtgggatttgtttttaacaagtgaccaccccagccattttccataataatttttcgcttttaatgggttatttaccaaaaaaaattcccacctaagggaattggaagc

SEQ ID NO: 38374 - DNA, 744 bp, Macaca Mulatta
gaatccagtgactcaagctgtaaagactcagaagagttgtcagaagatacctggatggagcagccaaatatggcagatactatggatttaatagggccagaagtacctataatacctacctctcaagatgagaaacctttaaactatggccatgctttgctccccggtgaaggtgcagctatggctgagtatgtaaaagctggaaagcgaatcccacgaagaggtgaaattgggttgacaagtgaagagatcgcttcttttgaatgctcaggttatgtcatgagtggcagcaggcatcgcagaatggaggctgtacgtctgcgtaaggagaaccagatctacagtgctgatgagaagagagctcttgcatcctttaaccaagaagagagacgaaagagagaaaataagattttagccagtttccgagagatggtgtacaaaaagacaaaagggaaagatgacaagtaagaacttgtttgttgtgcagcaggacttttaacaaagttttatgtgtccgaaagtgttaaaaggctttacagtgctactgtacttaccatattactaagtccctcaggaaaagcttcttttgagatacctttagcagcttattttttgttattttaactttaaaaagtaatatgtgcacatggtttttaaaatattcaaccattacaggaggatagttcgtaaaaagtgaatctttcactttaacccctgacacctttcccccgaaaaaatatcttt

SEQ ID NO: 38375 - DNA, 513 bp, Macaca Mulatta
tcatgtgtgatgagatggagcactcttcacatgatgcagtttgtgtagtgaagagagttttcaagtcaaaatccgtggttccaggtgggggtgctgtagaagcagccctttccatatatcttgaaaactatgcaaccagcatggggcctcaggaatagcttgctattgcagagtttgcagatcacttcttgttattcctaatacactggtagttaatgctgcccaggactccacagatctggtcgccaaattaagagcttttcgtaatgaggctcaggttaacccagaacgtaaaaatctaaaatggattggtcttgatttgagcaatggtaaacatggagacaacaaacaagcaggggtgtttgaaccaaccatagttaaagagtttgaaatttgcgacacaagctgcaattatcattctttgaactggtgatcttattaaattacatccagaaagtaaagatgataaacatggaggttatgaagataccattcactctggagcccttaatg

SEQ ID NO: 38376 - DNA, 316 bp, Macaca Mulatta
agcacagacatggcaaaccctctcctgattgcattaagaacagggatgattacacctacgaagtctgagttatggtgtgagttggaattaatatcgtaaaggagacaccactcttggaattccaagtagaattttttttctaaaaacaggaatgagagtctaaactacagtctttaaaagtattgggggcatgggaataaagatgcaaatgccaaaaagagggattctctggatcttgccatgaatccagagtgtatctaccacttcagaaggtataattgccaatcacgtggtcctcagacatatctgggaagcc

SEQ ID NO: 38377 - DNA, 774 bp, Macaca Mulatta
  misc_feature (1)...(774): n = A,T,C or G
ggaacagaacctgtggagctggcaggggggcgggtggcttttattcctaatattatgtgccagtcctttttcgtgtgatggtgccttccgaataacgaatatttctgttctggacaatgattaaatcttatgagaaatatatgtaggttatattaattcttgttcatttttgctaagcctgtgaaatactttggctctgatacaacttgacttgaataatatcttatcctgagtcttcctccaaggcagtacatattcctgctaggactgtagtaatcctttgggaactacatgtgagtaagcacctgtatgtaagccattatactgctgtaactaatgcatacaaacaattcttctctttacatttatagtctaaaaggggatatgcagtgggaaggaaaattcctgagagtttccagcgtagctttgtcaattccaactgagccatactgttttccacaagggctcaacacatatcagtattccatgctttcactgtgtgttcagattctccttttattggttttcttagactgtactgttctataagcaaatgcccatgtgtgatttttaagatgtgctggggaaaaaataatcaatacccccaaccnnnnnnnnnnnnnnnnnnnnnnnnnnnnnnnnnnccccccgtacattaaaataaataaaattaaannccaattgtttgggcgccccttgggcccttgaaaagccttttttaaacccatttcttttgggccccgcggggccccctttagggtaagtggaacatgg

SEQ ID NO: 38378 - DNA, 803 bp, Macaca Mulatta
  misc_feature (1)...(803): n = A,T,C or G
gggaggtgagatcnnnnnnnnnnnnnnnnnnncaggtgacagtgnnnnnnnnnnnnnnnnnnnnnnnnnnnnnnnnnnnnttttttaggttgctttttcactaaatctgtgcccttttttataaattttggtgctgttttgaatgggacattcctctcaattttttatttctaactatatagtgctggtatagagaaaaccctggtggattcaaggtgacttttttttgaggagtttaaatattaagatatttatctaactccagtcaagtacggatttgaatgtgtagatagacttgctttccccagtaggtggcagtgtcttatgaatctgcaagccttggtgacgaaaagacagcctcagtcttttgttgtggttgaggttatggcttagtcggttttatttcgtttcactagtagtagtaataacatgcatatgtatgtannnnnnnnnnnnnnnnnnnnnnnatactttatgccagtaatttgggtacttttgaaatgctagnnnnnnnnnnnnnnnnnnnnnnncttttcttaactgtgtttaaataggttagttttattagccaagattttttagagnnnnnnnnnnnnnnnnnnnnnnnnnnnnnnnnnnnnnnntggagtttcactcttgttgcccaaactggagtgcagtggtagatcctttgggctcactggcacctctnaacttcccggggtnnnnannaatcctttggcctacgtgctcctgaaagaattgggaaaaagcggggtgggagggcaccgggacgcaaaaaaattctgctctaaccctattcn

SEQ ID NO: 38379 - DNA, 178 bp, Macaca Mulatta
atgctgagtttcttccatagaacactaggaaatctgtctatgggtaaacatgaagagaaagaacgactccgagaagcacaacacactgccacacttattcctgcagctggagattccaagtccatcatcacatgttgggtgtcccttctggatggtactgatgttagtgccgacttgc

SEQ ID NO: 38380 - DNA, 804 bp, Macaca Mulatta
  misc_feature (1)...(804): n = A,T,C or G
ggatactccgtctcaaatatctatatatttatatctctannnnnnnnnnnnnnnnnnnnnnnnnnnnnnnnnnnnnnnnnnnatttcacaaaagcacatttaatgcaggctaattggccaggcnnnnnnnnnnnnnnnnnnnnnnntnnnnnnnnnnnnnnnnnnncactttggatcacctggggttgnnnnnnnnnnnnnnnnnnnaccaacagggagaaatcctgtctctactgagaatacaagattggccgggcatggtggcgnnnnnnnnnnnnnnnnnnnnnnnnnnnaggatgaggcaggagaatttcttgaacccgggagatnnnnnnnnnnnnnnnnnnggatcataccattgcactccagcttgggctacaagagtgaaactctatctcacacacacacacaaaaaagcaggcaaattttgagcatcagagaaattggtctggattaagtccagagatgcagtgttgtgttggttacaagaatagtttggaatcccaacttctacatgttaataactgcctggcctagcaagatatgtaaccctgcctttgcctcagtatcttctccataaaatggggatggcagtagtacagtggttccatgcctcaaaagggtttgaagaagttcagtttacatgntgggcgggccaccatagttaatgcctcatttaatgccaaagcctatttaactttcattcttggtaacccaggggnnnnnnnnnnnnnnnnnnaaccctgggattcaaaattaaaaattctttcacaaaacccaatgggcttaaaaaaaaaaactggc

SEQ ID NO: 38381 - DNA, 797 bp, Macaca Mulatta
  misc_feature (1)...(797): n = A,T,C or G
gggtttcccccaactccttaattttattctcccctagattttaatgtccagtcttccctcagctgaatgggaagggcatccctgcaaaagggaacagaagaggccaagtcccccaacgccatggcccggggttcaaggctagagctgctggggaggggctgcctgttttactcacccaccagcttccgcctcccccatcctgggcgcccctcctccagcttagctgtcagctgtccatcacctctcccccactgtctcatttgtgcttttttctctcgtaataaaaaagtggggagccgctggggagccaccctattcatccccatatttccccctctcataacttctctccatcccaggaggagttctcaggcctggggtggggccccgggtgggtgcgggggcgattcaacctgtgtgctgcgaaggacgagacttcctcttgaacagtgtgctgttgtaaacatatttgaaaactattaccaataaagttttgttcagttaaaatgattaataataaaaaaaattttcctgttcggccgcccccggcccatcaaaaagctttttagaacatttcgttttgggcccgccgggtcccctctagggtaaggtgaaacatggcgcaatagcctggttttcctaaaggaaaatcccggggtctattaacataaagagtcaatggggaattcttccacnnnnnnnnnnnnnnnnnnnnnnnnnnnnnnnacaaaactcaggaagcgggtcttcctgtaaattaaaaatcccttagaaagggggggatgttctcctataaa

SEQ ID NO: 38382 - DNA, 812 bp, Macaca Mulatta
  misc_feature (1)...(812): n = A,T,C or G
ggctgtaatattctggctttgcgttggccagttgaatgctaacagtttatctgggaattgtatttttaaaaattagagcaccagattgctattgaggtcttggatctttgccagaaagtctcaattccaatcgctgtggaaaacaattccctcaggcactggtggcgtgtgagactaaatgtgttgcagttagtgccaacttggaaaaacataacaactgctaatgttcaaggcatagtgcctttgtgttcaataatccttgcttaagaatggattaaattaatactttctatagacatagttttctgtcaccttgtgcctgaaggtgattgcaaaggtctgaatcctggctgcttttcagtacctcttatacttcataggatgagattgtaattttgactttagaaaaatctgtcagggaaaattaatgacctcccgaatgctctgccttacacacatggataatagaactaggatacaaatctactttctatattcatgtcacaggggaggcttacccctcgcatggattaaaggatggattctttggggggaggaggtttggagaagagattggccttctgtttttcctggatggaggggaaggagtccagggggaaggaggttaggaattagttatttnnnnnnnnnnnnnnnnnntttacgggaaagcaccccacagggcatgaagcggggaaggggggagggggggctctgagaaaggtattagcccggaaggaatgccccacaaagggccattttcgtgaaaacacgcacgggagtttttaaaacccgttccaaaagggcccccg

SEQ ID NO: 38383 - DNA, 1496 bp, Macaca Mulatta
  misc_feature (1)...(1496): n = A,T,C or G
gggagagcacatccggtgttagaagcgcctgtaggccttggagaggctagttaggaagtagagacgcgcttttgccatgttgtccagcnnnnnnnnnnnnnnnnnnnnnnnagtgattcgcccgcctcgacctcccaaaatgctaggattgggagagcacatccggtgttagaagcgcctgtaggccttggagaggctagttaggaagagtagagactgttgcacagactctggaaccatgaacatatttgatcgaaagatcaactttgatgcgctttttaaattttctcatataaccccctcaacgcagcagcacctgaagaaggtctatgcaagttttgccctttgtatgtttgtggcggctgcagggtcctatgtccatgtggtcactcatttcattcaggctggcctgctgtctgccttgggctccctgatactgatgatttggctgatggcaacacctcatagccatgaaactgagcagaaaagactgggacttcttgctggatttgctttccttacaggagttggcctgggccctgccctggaattttgtattgctgtcaaccccagcatccttcccaccgctttcatgggcacagcaatgatcttcacctgcttcaccctcagtgcactctatgccaggcgccgtagctacctctttctgggaggtatcttgatgtcagccctgagcctgttgcttttgtcttccgtggggaatgttttctttggatccatttggcttttccaggcaaacctgtatgtgggactggtggtcatgtgtggctttgtcctttttgatactcaactcatttattgaaaaggcccgaaaatggagatcaagattatatctggcactgcattgatctcttccttagattttgttactctcttcagaaaactcatgatgatcctggccatgaatgaaaaggataagaagaaagagaagaaatgaagtgaccatccagcctttcccaatttgacttcctctccttccacccctcatttcctttttgcacacattacaggtggtgtgttctgtgataatgaaaagcatcagaaaagcttttgtactttgtggtttcctctattttgaattttttgatcaaaaaactgattagcagaatatagtttggagtttggcttcatcttcctggggttctcctcactcccttttttgttgaccccatctgtagcctcttcctctacttaggcagtcgacccgctgtgatgaggagtgggaccacagaaggcgctaacttcaaaagtcgcttcccaccagtggacctgaaactgttccggaagcgcccacccggccccttcctttcctcaatccctgttttgggaaagccccacagtgttccctgtggggaaaatgggggcacatgaaagtttttcccnnnnnnnnnnnnnnnnnnnnnnnngggggggctcccccaaatttgaataaaaacatttagagccccctccccatataacccttgtaaatacctcgt

SEQ ID NO: 38384 - DNA, 826 bp, Macaca Mulatta
  misc_feature (1)...(826): n = A,T,C or G
ggggctggagtacagtggcatnnnnnnnnnnnnnnnnnnncttgaccacctgggcttagatgatcctcccatctcagcctcctgggtaactgggactacaggcatgcaccatcatnnnnnnnnnnnnnnnnnnacaggttctcaccatgttgcctaggctggtctcaaactcatgggctcaagcaacccannnnnnnnnnnnnnnnnnnnnnnnnnnnnnnnnnnggtgcgccaccatgcccgacctatttacaataatttttactacttgtgttgaagtcctctgaggcccacaataggcattctgcacagagtttcatggttgtatcccatggtggtttatctgttttatagaagaggagttggaagtatagagttctcctggatcacaaggaaaaatggcatagctggtaatagtacaactctgtttatttacttttatttcacctctataattccctcacgctctgatgagagatgtacttnnnnnnnnnnnnnnnnnnnnnnnnnaaaannngagaaacagaaacagacaggcaagaaggaaacagaggcaacacaagcgacaaaacacggacacacaaaaagacgagcgaacaaagcgagagnnnnnnnnnnnnnnnnnnggaacggaagcaacagaaaagacaacgaacaggacaacaaaaagaacaaaagacaaaagacaacaaaggacacaagcacgacaccaaaagcgacccacaggaaaaaacaagaaanagcgacacagaaaggaaggcggacagaccaaagagggaaaggcaagaaaaaaggaaagacacaggagacaaaagacacagcagag

SEQ ID NO: 38385 - DNA, 781 bp, Macaca Mulatta
  misc_feature (1)...(781): n = A,T,C or G
ggccaacctacttgcattttaaccaataattgataaatccagagaaaatgtagaactttgcctagtttttttctgttacagttcttacatgtagaacaatgacataacccataagtaatataaaacataatggttgtcttaattatctattgctgcataacaaaccactccaaaatgtagttgtttaaaacagcaacaatttattttttattgactaagtcaagggtgtccaatctttggcttccctgggccacattgcaagaaaaattgtcttgggccacacataaaatacactaacactaatgatagctgatgagcnnnnnnnnnnnnnnnnnncctggcatannnnnnnnnnnnnnnnnnnnnnnnnnnnnnnnnnnnnnnnncaggcagatcacttgaagnnnnnnnnnnnnnnnnnnnnnagccaacatggcgaaatcccatcgnnnnnnnnnnnnnnnnnnnnnnnnnagcatggtagcgggtgcctataatccaagctactcaggaggctaaggccagaaaatcacttgaaccctgggagtggaggctgcagtgaaccgacatcannnnnnnnnnnnnnnnnnnaagcannnnnnnnnnnnnnnnnnnnnnnnnnnnnnnnnnnnnngaaaaaatattgcaaaaaatctcataatattttaagaaagcttactaatttgtggttgggccaccattcaaagctgttcttgggccacatgtggcccacgtttgaacaagcttgggacttagtttcaactagatgggctctcttttt

SEQ ID NO: 38386 - DNA, 656 bp, Macaca Mulatta
atttcataattttaggtcattagcatgcatatggagtttgcccttacatggtaagaggtcaaacacacaaagacccactgtttgcacaaaactattgttgctggtttggaatagcctgccatgcttttttaatgttattgcagcacgtatattcattacagaatttaatttgcttatgttctgctattgtttgacctactcttagtcacagtgagcccttcattagctcaatatgtggtttgccctcaagtgtgcactgtttattactttgtaatatgccactgtgagtactgacatttagagttgtttaaaggccgagaactggaaacagcctttcccccattttctgtgtattgatgatgggagtaataacattttgggggagctttttaaatctcacagaagaggaaagtggcctgctctggcaggtgtgtgcaggatagagtgcgtttcatttgttccggtaccaagaatgagcgctgtactatggtagttccctcaggatttgtatgtgctctgggctcatgaagatgttgcaccatgagctgcagcagttgtactctttcttgatgacctaaaaagggaatatgtctgaggaatgaaaggctcccatcattgactgtggaagtggaaaacctttcctagcttagagcatt

SEQ ID NO: 38387 - DNA, 225 bp, Macaca Mulatta
ttccaggtgacaacacaaaacccaagaccacagagcctagcttttttcacctggccttgcctgaggaagtcttactccgggaacgactgacacagggagtctcaaaggactcccagttagggcaagccaaggatcaaggtgggccatctgaaatgcaagaagtccactcgaaagtagggatagactcccagggggagaagctcctggaaaaaatgagttctgaac

SEQ ID NO: 38388 - DNA, 650 bp, Macaca Mulatta
  misc_feature (1)...(650): n = A,T,C or G
ggggatattaaaatgtaatatttttaaaagagatgtctggttcaattggtataatgatgtgattatgcaatatgctgatctacaccttgcactcacattgtgccaaacttaaatgtgcaagtgtacgtgagaaaagcacatgtgaatgtgaattctttaattctttgcttattatgttaaaattagtcttaatagtccactgatgtgtatgcttgaataatgtctatttactttggaatttcaagatttccagcttcaatggtaatttgtaatttctcagatcacctcaagaaatattgagatactcccccatctgaaaataatctgttctttaatccacctgactatgggagtagccaggctggtgcctcactggcttcttcagatgaggcttcctcaggtggatgcatgaccattaggggaaaagaggcttttgagacagcttattacctccttcacctttttgaactaagtacattgtctcagtcccagtatgaatttgtcccatttggggtatttttaaaataaaagatggctaacatggaatctggggcatagccttggcctantaatatggnttgtagcccaaataatggcagagaaacacagggctgtttttacaacagaaactcnaatatagttttatgtag

SEQ ID NO: 38389 - DNA, 993 bp, Macaca Mulatta
  misc_feature (1)...(993): n = A,T,C or G
gggaccctgaactggaataagccagtcagaaaatgaatgaacgaacgaatgaatgaatgaatgaatgaatgaatgaatgaatacaaagtttataaataaaaattcataaagcctacaataatcatacagatgcacaacataagcaatgctatgatagaaagcattcagcgaggcctccagaattgtgattgtttgcccttgaactgcgtggtggtaggagatgctccttacagttttcactttgcaaacttttattccttcatttaactcaccactgctacaaatactgtccctccctgacttaacaaaaaatggggtaaaaaaattccctcactaatttttaaaaaaccttccctttcctcccttttttttttggtaagatcctctcactgagggacctccctcctcctcgtcggatccctgccnagtgatcgtgcctgcgcaacttcagttactcctctgttataaatggaacttcgtttttgaagttacaaactggtgaaacacctnnnnnnnnnnnnnnnnnnnnnnnnnnnnnnnnnnnnnnnnnnnnnnnnnnnnnnnnnnnnnnnnnnnnnnnnnnnnnnnnnnnnntctnnnnnnnnnnnnnnnnnnnnnntaatgtgggagttgttttccnnnnnnnnnnnnnnnnnnnntccctnnnnnnnnnnnnnnnnnnnnnnnnnnnnnnnnnnnnnnnnnnnnnnnnnnnnnnnnnnnnnnnnnnnttttnttnncnnnnnnnnnnnnnnnnnnnnnnnnnnnnnnnnnnnnnnnnnnnnnnnnnnncnnnnnnnnnnnnnnatnnngtcacaccgtggtgcgagtcacgtgacgcgcgccgttattttgtgcgcgtgagatcacgctcttcaatgtaggcaaaataggtaggatgatggatagtatactctgaggaacagccgagcacatanagtacagttgtttagagaagtgatgagatatagcggtgtatctgcgtgatttgtg

SEQ ID NO: 38390 - DNA, 747 bp, Macaca Mulatta
gggggggaaggctgagagcggtctctccaggaaagtagtcgcggaatctcagttagcggtggagaggcggtatgtccggttcaatggcgactgcggaagctagcggtagcgatgggaaagggcaggaagtcgagacctcagtcacctattaccgattggaggaggtggcaaagcgcaactccttgaaggaactgtggcttgtgatccatgggcgagtctacgatgtcacccgcttcctcaacgagcaccctggaggagaagaggttctgctggaacaagctggtgtagatgcaagtgaaagctttgaagatgtaggacactcctctgatgccagagaaatgctaaagcagtactatattggtgatatccatccgagtgaccttaaacctgaaaatggtagtaaggacccttcaaaacatgatacatgcaaaagttgctggtcatactggattttacccatcataggcgctgttctcttaggtttcctgtaccgctactacacatcggaaagcaaatcctcctgaggaggccttgctgaagttggaaagtgcatccattttggggtgaaaactagagacttgcttgggggctgcagaagtgccctcttcttgaatcctgccagttgcattcttcccccttggagccaagacgattggccagacatcccacctcagatctgggaccagtgttctccatctctcagagccttactccccaagtacctgctcactgttctgtgtcaaatga

SEQ ID NO: 38391 - DNA, 1104 bp, Macaca Mulatta
  misc_feature (1)...(1104): n = A,T,C or G
gtggaactgcattgtgacaacccatgggccacctcccatggctggccactcctcctgtgtaatagatgataaaatgattgtctttggtggctctttaggatcccggcaaatgnnnnnnnnnnnnnnnnnnnnnnnnnnnnnnnnnnnnnnnnnnnnnnnnnnnnnnnnnnnnnnnnnnnnnnnnnnnnnnnnnnnnnnnnnnnnnnnnnnnnnnnnnnnnnnnnnnnnnnnnnnnnnnnnnnnnnnnnnnnnnnnnnnnnnnnnnnnnnnnnnnnnnnnnnnnnnnnnnnnnnnnnnnnnnnnnnnnnnnnnnnnnnnnnnnnnnnnnnnnnnnnnnnnnnnnnnnnnnnnnnnnnnnnnnnnnnnnnnnnnnnnnnnnnnnnnnnnnnnnnnnnnnnnnnnnnnnnnnnnnnnnnnnnnnnnnnnnnnnnnnnnnnnnnnnnnnnnnnnnnnnnnnnnnnnnnnnnnnnnnnnnnnnncctccagctctcgttcctgaaacccgagagtaccgctctcagtctccagtaagaagcatggatgaagctccttgtgttaacggccgctggggaacactgagacccagggctcaaaggcagactccttcgggttcccgggaagggagcctttccccagccagaggagatggctctcctatcctcaatggtgggagtttgtctccaggaacggcagctgtgggtggctcttctttggacagtcctgtacaggccatatctccaagtactccatctgctgctgaaggatatgacctaaaaatgggactttctttggccccccgacgaggatcactaccagatcagaaagatctgagattaggatccatagatctgaattgggatctgaaatctgcttccagtagcaatcccatggatggcatggacaataggacagttggaagtatgagacaccctcctgaacagacaaatggtgtgcataccccacctcacgtggccagtgcccttgcaggggccgtctccccaggtgccctgcgtcggagtctggaagccatcaaagcgatgtcctccaaaggcccctcggcctctgcagcactaagtcctcctcttggaattctccaggctctcc

SEQ ID NO: 38392 - DNA, 2491 bp, Macaca Mulatta
  misc_feature (1)...(2491): n = A,T,C or G
ttttataataaagtgctgaatatctcatgtaatttattgaatactgtactgaaagtgaaaaagaatggctatatgatactccaagtaccgtttctactgaatgtgtaacactttcatatcaccaaaaaactttaagtggaaccatcatatgccagggactgtctgtaattcaaaatctttccagacaaggaaggaatcaccaacagcactgctgggctatgggtaggtgggcaactacctactaggtgtaaatctgtcacccaaaaaagtaagttattatagtggctttaagggagaaaatgttcctgtgaatgtgtttaaaatcgcatgggtgtagctacttaaatgaagaaatctggtgagtacttagctatttaaaatttcattctttgcaggcacttactttacaagaagtgttcttatatatagagattcaaattgctataaatatgtacataatagctaacatgcactcagtgcttaccactggcagacactatgctgttatttaataggcaataatcctacgaattagtattattagtatcatgatttttcagagtttacgttttcagaggcactaagagttggaacttcaagacatttagctaataaaaaagtgtggccaggatttgaatccaagggaaccgaatttcggagccggcactcttaaacactatacaatgcagttaaatatatgtagtttaccggccataatacatttttccaaaaaagagatggtttcttaaaaaatttaagttagattcagattagtatagagacttgcaggtcaatgatgcttaaaaactaaactaaaaccctatgccagttgagtgttcatttcctagaatgtttactcacatacacctcatggtggagaggggagtttacaattggccacagagcctgagacctaatatttttcanatcataatatattttacagtactttacaatttacaaagcatgtttacatacattgtatcacatgaaactcannnnnnnnnnnnnnnnnnnnnnnnnnnnnnnnnnnnnnnnnnnnnnnnnnnnnnnnnnnnnnnnnnnnnnnnnnnnnnnnnnnnnnnnnnnnnnnnnnnnnnnnnnnnnnnnnnnnnnnnnnnnnnnnnnnnnnnnnnnnnnnnnnnnnnnnnnnnnnnnnnnnnnnnnnnnnnnnnnnnnnnnnnnnnnnnnnnnnnnnnnnnnnnnnnnnnnnnnnnnnnnnnnnnnnnnnnnnnnnnnnnnnnnnnnnnnnnnnnnnnnnnnnnnnnnnnnnnnnnnnnnnnnnnnnnnnnnnnnnnnnnnnnnnnnacataacaaaataaaaaccagaacatgaaaagttatagtaaggagaatgagaacaagtatggatcataacatccagagttaggaacgaaacggtccaaaaattatgagattaagatcaatgattacatcaagcactcagcatttttgtaattatttaagtttgcaaagtgccttcaaaaatttgttactcttttataatccctaagagatcactgagagacaataatagcctttacatggcagatgaagaacattttgaaagtactatgaaattattatttttgtttaaaagaaaacatcttgtgattctaatcataaccgaaagccccaagttctttctgaatataagcaatgccatttacaaacattcctgctgcacccatcttctacaccccctgttgtcacgaatttgcatacctgcctctgattacaagctggatcgccccaaagtagtcttctcagaaacctgtctacacagtcagcttctttctcttgtgcatcttcaaactctttttgtctttagcatcaacataatatactttctgatatttcccatcttaaacttttatcgttttttcttatctcaagaaaaccctgccttgactcacgctcattcccccagttgtcacaactccatccctcttctcctttagaaagtcaaacttctcaaagtatggagaaaacaatctccatattttaaaatggcaatcaaacttcaacttgctccatactggcttctgatcccctaatgcgctccaaattttctcttgttaggtcaccaaagttaaatgaattctttttaatttctatttgatttggcccctnnnnnnnnnnttgatactttgtctacacctttccttcttgaaatctccctctcttggctcctataacaccatgctctcttttctcctacctttatggccatttctcaatctcctttattggcttcttctcaactattaaatgttataactactcaggactctgggcttttactatatactccatttcctaggcagtctcatacatgccctgggctttaaataccatctatctgatgttatctctaatatagatctgtcttctgagttccagaacttagtaattctattagatgtctcctgggtattgcaatactcaatacgtccatatctgatagagaccttctaaactgtttatcttt

SEQ ID NO: 38393 - DNA, 734 bp, Macaca Mulatta
  misc_feature (1)...(734): n = A,T,C or G
gggggcctttggggttaagactcaaatgtgtgtgtaagtttctggtccatttcagcacctctttcttccacttgcagggctctcagtcatcactcctcagtctcagcttggggtgaccaatctcagtggatgcaccataaagatgcccaatacaaattccctccttgaaggaactctgggtgacacagcgaagggtttcaagaggacaaagaagacacagaagtcaaagagagtaaatctggttcttggtctccaggtttctgaacttttttgtataaaagctggaaatagttactaatatttactaaattctttttgtgctatgcactcaatcttatttaatcatcacaacaaccctgggaaacaaatattcacatcctcattctacaacttaagaaatgagggcctggagcaaatgtcttctccaagatctatagctggtaaagtcaggattcaaactcagctccaactgatttcaaatatggaccctaaaatgtacactgcactgtccccagcccaagcttttgtcttggactccttgttaaaggcttgatcttttgaaaaacatgctttgaggctgagcacggtgnnnnnnnnnnnnnnnnnnnnnnnnnnnnnnnnnnnnnnntggggtggatannnnnnnnnnnnnnnnnnnnnnnnnnnnttgggccaacatgggtgaaacccctgtatctactaaaaaaatacaagtatttagctggaacatggga

SEQ ID NO: 38394 - DNA, 669 bp, Macaca Mulatta
gcaggtgagttggcttcaaatagactgtccttgaactccaagccttttccttgtggctgcagcaacaaccctcctcctgggctctgcctgaattttgtccctgtttccctacagtccccatagacagtggagttacccaaacaccaaagcacctggtcatgggaatgacaaacaagaagtctttgaaatgtgaacaacatatgggacacagggctgtgtactggtacaagcagaaagttaagaagccgccggagatcatgtttatctacaactatgagaaactttctattaatgaaagtgtgcccagtcgcttctcacctgaatgctccaagagctctctcttataccttcacctacgcgccctgcagccagaagactcagccctgtatctctgcgccagcagccaagacacagccttgcagagtcatcgctttcctgtgcagaaaccttcggggcctgccaggaagctgtgggggccacggagggctcgggtgagcatttcctgcaagagccccgacagaagcttcagaacatcacagcacctgctaattcatccatgtggcaactttacatcctgtgcacatatttagagtgtgggttttcttttgcctgagtgtgactctgccctgccaactgatttgaaaaaatgataaacatattcagatctac

SEQ ID NO: 38395 - DNA, 594 bp, Macaca Mulatta
gatgctcataccaatccagaccagcactgctgcctactgcaggtcaccaccctcagtttcatctgtattccgattgtcatgggcatgatatttactctgtttactatcagtgtgagcacggacatgtggcatcatccagtgagactggtgttccaagattcccctgtccatggtgatcggaaactgcgcagtgagcagggtgtgcaagtcatcctggacccagtgcacagcgttcggctctttgactggtggcatcctcagtacccattctccctgagagcatagttactgctgcccatcccttggggcagccccgagtctagtctgttaaaaatcagattccaatttggacaaggcggcaggattgtatgtctggttagtaatgtacatgctcttcaggttccagggctcctgttagggaagggagaaatgttgaatccagaggaagaacacctactatgatttataaacgtattttaatgtaaaaatttgcatttaaaaagagtggccctgttttctgtgttaaagccccatttggtgctattgagtttgttttttattctttcatcgcagtgaaaattgttgatcttgctc

SEQ ID NO: 38396 - DNA, 339 bp, Macaca Mulatta
atgagtcccatattcacctacttcacaatcctttgtctcctggctgcaggttctcccggtgaagaagtcacccagactccaaaacatcttgtcaaaggggaaagacagaaagcaaaattatattgtgccccaataaaaggatacagttactttttttggtaccaacgggtcctgaaaaaagagttcaagttcttgatttccttccagaatgaaaatgtctttgatgaaacagggatgcccaaggaaagattttctgctaagtgccccccaaattcaccctgtagccttgagatccaggctacgaagctgaaggattcagcagcgtatttttgtgccagc

SEQ ID NO: 38397 - DNA, 749 bp, Macaca Mulatta
  misc_feature (1)...(749): n = A,T,C or G
ggatagcacagcgggttgctcattgggcactcctaaattaaaattgcataggttgattttctacccgtcagttctgctaagatcctaaaccaaaatttgatgagaaattaaagcttatattgctttggtgatggctgttgtttttgcagctacttatccctgccttctggtattagagtctttctttctttgttcctctcaggaactcctcctcccacatctgatggagctaccaatcatcaggtctcctctgcctctggggtgtgactcaggctggccaatcaaagttcttcatccagttggactgtgactggccctgggtggttatctgacccaaggaagtccagaatccttttgcagggattattagacatgctaagagaatggttggggaaagcttatctcctgagatgatacactagagcaggagttccccagcccccggggccacatactggtaccactctagggcctgtaacgaacctggctgcctagcaggangtgagcattactgcctaagctctgcctcctgtcagtttagtggtggcgttagcttctcatagaagggtgaaccccattgtgaactgtgcatgcgagggatctaggttttgtgttccttatgaaaatccaatgcctgatgaacctgagtggnacaattttcatcccaaaaaccatccccccaaccccccattcatggaaaaaaattggccttcccacgaaaaccaaggtccctgggttgcccaaaaaaa

SEQ ID NO: 38398 - DNA, 11286 bp, Macaca Mulatta
  misc_feature (1)...(11286): n = A,T,C or G
ggatcctagatattccttagtctgaggaggagcaattaagattcacttgtttagaggctaggannnnnnnnnnnnnnnnnnnnnnnnncnnnnnnnnnnnnnnnnnacaggcannnnnnnnnnnnnnnannnnnnnnnnnnnannnnnnnnnnnnnnnnnnnnnnnnnnnnnnnnnnnnnnnnnnnnttagccgggcatgatggtaannnnnnnnnnnnnnnnnnnnnnnnnnnnnnnnnnnnnnnnnnatgcttgaacctggaaggcgggannnnnnnnnnnnnnnnnnnannnnnnnnnnnnnnnnnnnnnatgacagaacannnnnnnnnnnnnnnnnnnnnnnnnnnnnnnnnnnnnnnnnnnnnnncagattcaaaagattcacttgattaagccttagtgggcttagacaccagtctctgagacattcttcaaggtcaggctctacaaatggaacccaaccagattcccagatatggtcaaagatctatacacacccatctacccatctcacagatcccctgtcttaaagagaccctaatttggattcacctcagtctctgtaatctgtacctgcataccaataaaaatctttctcacccacccttagattgagagaagtcacttattattatgtgaataactggaagatactgatatgttgacaaatctttttctttccttttttattcaacttttattttagcttccaaagaacaagtgcaatatgtgcagctttgctgcatgggtcaacatgaatctttctggtcttttagccgtctcacactttgagcagatataagctttacacaagattatgaaggctgaaaggattccaccaatattattataattagtattaatctgataggttaggggaagtagacctcccgtccaataaaacagatttccagagtttctgacatcataatctaccaaggtcatggatcactttcagagaaaaaacaaaagcaaaaccaaacccaccaagaaacaaaaatnnnnnnnnnnnnnnnnnnnnnnnnnnaccatgaatacttcctgccatgttcagtggccaatatgtcagaaatagcactgagttacagataaagatgtctaaactaaagtgacatcccaactgtcacagtgtgtggcctattagtcaattaaagcagtccctgcctctttagagttgttttccatgcaattacatgtcttatgtcttagaataagattccctgagaactgaacctagcatttatacaagataattaattctaagccatagtacctgccaaagaacattctactatcatctttactgaacacagaagagctacaccaaaaacctgggtcatcagccagcacacacacttatccagtgataaatacacatcatcgggtgcctacatacatacctgaataagaaaaaaaaatacctttgctgagatgaaacacacatgatttatttcaaataggtacagagaagtagatactgaagtaaggattaagtattatattatattacataacattaatctattcctgcactgaaaccgttgctttatatgatttttttttcactacactaatgagaacttaagagataatgacctaaaaccacagagagtattttcaaagataagtatagcacaatgcctactaaatgagactaagacttgtcccatcaaaaatcctggacctatgcctaaaacacgtgtcacaatccccgaacttttcaaaaattggtacatgctttaactttaatctccaggcctcactggagctagagacaagaaggtaaaaaaggctgacaaaagaagtcctggtatcttctatggtgggagaaggaaactagctaaagggaagaataaattagagaaaaattggaatgattgaatcggaacaaggcaaaggctataaaaaaattaagcagcagtatcctcttgggggccccttccccacactatctcaatgcaaatatctgtctgaaacggttcctggctaaactccacccatgggttggccagtcttgccttgaccaatagccttgacaaggcaaccttgaccaatagtcttagagtatcaggtgaggccaggggccggcggctggctagggatgaagaataaaaggaagcaccctccagcagttccacacactcgcttctggaacggctgagattatcaataagctcctagtccagacgccatgggtcatttcacagaggaggacaaggctactatcacaagcctgtggggcaaggtgaatgtggaagatgctggaggagaaaccctgggaaggtaggctctggtgaccaggacaaggaagggaaggaaggaccctgtgcctggcaaaagtccaggccacttcttaggatttgtggcactttctgactgtcaaactgctcttgttcaatctcannnnnnnnnnnnnnnnnnnnnnnnnnnnnnnnnnnnnnnnnnnnnnnnnnnnnnnnnnnnnnnnnnnnnnnnnnnnnnnnnnnnnnnnnnnnnnnnnnnnnnnnnnnnnnnnnnnnnnnnnnnnnnnnnnnnnnnnnnnnnnnnnnnnnnnnnnnnnnnnnnnnnnnnnnnnnnnnnnnnnnnnnnnnnnnnnnnnnnnnnnnnnnnngatcctgagaacttcagggtgagtccaggagtttcagcagtttcagagttcagtctcaaggcaacttagacaactgagtattgatctgaggacagccgaacctacctgctgggtgtgagctatttgaagatactggggttgggagtgaagaaactgcagaggactaactgggctgagaccgaatggtaatgttttagggcctaaggagtgcctctaaaaatctagacggacaattttgacattgacaaaagagaggtggaaatgaggaaaatgacttttctttattagattccggtagaaagaactttcatctttccctcatttttgttatttgttttaaaacatctatctggaggcaggacaagtatggtcattaaaaagatgcaggcagaaggcatatattggcccagtcaaagtggggaactctggtgaccaaacagagtctgaggctattcctatatcagctggacacatataaaatgccgctatcacttcattacaaacttatatcctctaattccagatgggggcaaagtgtgtccaggggtgaggaacaattgaaacatttgggctagagtagattttgaaagccannnnnnnnnnnnnnnnnnnnnnnnnnnnnnnnnnnnnnnnnnngcgcgtgtgtttcttttaacgttttcagcctacagcatacagggtttgtggtggcaagaagacagcaagttttaaattttggccagtgactagtgctgcaaggggaacaactacctgcatttaatggaaggcaaaatctcaggctttgagggaagttaacataggcttgattctgggtggaagctgggtgtgtagtttctggaggccaggctggagctctcagctcactatgggttcatttttgttgtctcctttcatctcannnnnnnnnnnnnnnnnnnnnnnnnnnnnnnnnnnnnnnnnnnnnnnnnnnnnnnnnnnnnnnnnnnnnnnnnnnnnnnnnnnnnnnnnnnnnnnnnnnnnnnnnnnnnnnnnnnnnnnnnnnnnnnnnnnnnnccccctgcccacgatgcagagctttcaaggataggctttattctgcaagcaataaaaataataaatctattctgctaagcgatcacacatgattgtcttcagctctttttttatgtctctttaaatatatgagccacaaagggttttatgttgagggatgtgtgtatgtgtatttgtacatggctgtgtgtgttagtgtcatgtgcatatcctcacttttttgtttacatgagatgtgggttttgatgagcaattaaaagaactagacaataaagaaacttgtacatgggagttatgcaagtgagaataaaaagtgtaggagaaatctggtgggacgaaagacctctgtaggacaggactcctcagaaacagatgttttggaagagatgggggaaggttcagtgaagacctgggggctggattgcagcacagcagcgaggaaggggctcaacgaagacaaagtgttccaaatttaggaagtcaaggtttaggcagggatagccattctattttattaggggcaatactatttctaatggcatctgacttttctcagtccttgtgaggctctatggggaggttgaggtgttagagatcagagcaggaaacagatttttctttccacagtaactgcaatgaagtgatccttactttactaagaaacttttcgttttaagtgttgatgcatgcctaaagaggcgaaattaatcccatgcccttaagtcacagcatttcaaggaagagacctcattgtaagcttctaggggaggtggggacttaggtgaaggaaatgagccagcagaggctcacaagtcagcatcatagtgtcatgcctgagcagcagaccagcactgtcagatgaaaatgtaatgtgaagaatttgtataacattaattgagaaggcagattctctggaattcttatataattgaaagttaatgcatgtttataagcaagtgtttagtttaatgtgatggtgttatgaacctaacgcttgtgtctccaggaaattcacatgctaaatccccaactcccagttggccccatttgtctgggaggctttggaaaagtaattaggtttagatgagctcatgagagcagatcgctctcagagaattattttcctcatcagaagcagagaggtcagccatttctcttccttctggtgaggacacagtgaggagtcagccatctgcaacccaggaagagaaccctgaccaggaatcagcagaaatgtgagaaaaaaatctgttgttgaagccatccggtctatgctattttgttatagcaccttgcactaagtaaggcagatgaagnnnnnnnnnnnnnnnnnnttgggtgttcagtggattagaaaccatgtttatctcaggtttacaaatctcccctggtctcctatgtttcagtataaaatacctactctactactctcatctgtaactcccaagtcgtaagcctgagcccttctctctaactttgatttctcctattttttcttcaatgtactttaggcttgtaatctgtttatatacagtgaaatgtcaagttctttctttatatttctttctttcgtttttctcctcagcctcacagttttctacatgcccttcctattttcaggaacttctttctccaaacatcttctgcctggctccatcataccataaaggatccacttcaaatgctgtcactcactaccattttacaattcgcactttctttctttgnnnnnnnnnnnnnnnnnntaaaacaagtttataaaaaattaaagtaaaggaataaatgaacggctacttcataggcagagtagcccaagggctgctcgttgccgatttttgttgttatttttcaatagtatgctaaacaaggggtagattatttatgccgcccatttttaggccataaaagataacttcctgatgttgccatggcattttttccttttaattttatttcatttcattttaatttccaaggtacatgtgcaggatgtgcaggcttgttacatgggcaaatgtgtacctttctggccttttagccatctttatcaacgaacaggtataatctttacacaggatcatgaagcctgaaaggatttcaccaatttaaatcaacctgatagcttaggggataaactaattgaagatacagctcacctccaataaaccagaattccagatcttctggcatagtctagcaaggtttgagatcatggatcacttgcagagaaaaacaaaaacaaactaaccaaaagcaaaacagaaccaaaaaaccagcagaaatacttcttaccctgttaacggtccaatatgtcagaaacagcactgcgttagaaataaagctgtctaaagtacactgatattcgagttgtcatagtgtgtggactattagccaataaaaacagcccttgcttctctagagttgttttccgtgcacacacatgtcttatgtcttagaataagattccctgagaagtgaacctagcatctatacaagataattaattctaatggagagtacctgccaaagaacattccaccatcatctttactgagcataaaaaagctacaccaaaaccctggtcatcagccagcacacacacttacccagtgataaatacacatcatatgatatatatatacatcctgaatatggaatccaatattttttctaagatgaaacaggcatgatttatttcaaataggtacagataagtacatattgaggtaaggattaggtcttatattacataacactaatctttcactgcactgaaactggcttataggaattattttcactgcactattgagaacttaagagataacagaaaaagccacagagagtattttcaaagataagtatagcacaatgcttactaaatgagactaagacttgtcccatcgaaaatcctggacctatgcctaaaacacgtgtcacaatccccgaacttttcaaaaattggtacatgctttaactttaatctccaggcctcactggagctagagacaagaaggtaaaaaaaaggctgacaaaagaagtcctggtatcttctatggtgggagaaggaaactagctaaagggaagaataaattagagaaaaattggaatgattgaatcggaacaaggcaaaggctataaaaaaattaagcagcagtatcctcttgggggccccttccccacactatctcaatgcaaatatctgtctgaaacggtccctggctaaactccacccatgggttggccagtcttgccttgaccaatagccttgacaaggcaaccttgaccaatagtcttagagtatcaggtgaggccaggggccggcggctggctagggatgaagaataaaaggaagcaccctccagcagttccacacactcgcttctggaacggctgagattatcaataagctcctagtccagacgccatgggtcatttcacagaggaggacaaggctactatcacaagcctgtggggcaaggtgaatgtggaagatgctggaggagaaaccctgggaaggtaggctctggtgaccaggacaaggaagggaaggaaggaccctgtgcctggcaaaagtccaggccacttcttaggatttgtggcactttctgactgtcaaactgctcttgttcaatctcannnnnnnnnnnnnnnnnnnnnnnnnnnnnnnnnnnnnnnnnnnnnnnnnnnnnnnnnnnnnnnnnnnnnnnnnnnnnnnnnnnnnnnnnnnnnnnnnnnnnnnnnnnnnnnnnnnnnnnnnnnnnnnnnnnnnnnnnnnnnnnnnnnnnnnnnnnnnnnnnnnnnnnnnnnnnnnnnnnnnnnnnnnnnnnnnnnnnnnnnnnnnnnngatcctgagaacttcagggtgagtccaggagtttcagcagtttcagagttcagtctcaaggcaacttagacaactgagtattgatctgaggacagccgaacctacctgctgggtgtgagctatttgaagatactggggttgggagtgaagaaactgcagaggactaactgggctgagaccgaatggtaatgttttagggcctaaggagtgcctctaaaaatctagacggacaattttgacattgacaaaagagaggtggaaatgaggaaaatgacttttctttattagattccggtagaaagaactttcaactttccctcatttttgttatttgttttaaaacgtctatctggaggcaggacaagtatggtcattaaaaagatgcaggcagaaggcatatattggcccagtcaaagtggggaactctggtgaccaaacagagtctgaggctattcctatatcagctggacacatataaaatgccactatcacttcattacaaacttatatcctctaattccagatgggggcaaagtgtgtccaggggtgaggatcaattgaaacatttgggctagagtagattttgaaagccannnnnnnnnnnnnnnnnnnnnnnnnnnnnnnncgcgcgcacgcgtgtgtttcttttaatgttttcagcctacaacatacagggtttgtggtggcaagaagacagcaagttttaaattttggccagtgactaatgctgcaaggggaacaactacctgcatttaatggaaggcaaaatctcaggctttgagggaagttaacataggcttgattctgggtggaagctgggtgtgtagtttctggaggccaggctggagctctcagctcactatgggttcatttttgttgtctcctttcatctcannnnnnnnnnnnnnnnnnnnnnnnnnnnnnnnnnnnnnnnnnnnnnnnnnnnnnnnnnnnnnnnnnnnnnnnnnnnnnnnnnnnnnnnnnnnnnnnnnnnnnnnnnnnnnnnnnnnnnnnnnnnnnnnnnnnnnccccctgcccacaatgcagagctttcaaggataggctttattctgcaagcaataaaaataataaatctattctgctaagagatcacacatgattttcttcagctcttttttttacatcttttaaaatatatgagccccaaagggtttatattgagggatgtgtttatgtgtatttctgtatggctatgtgtgtttgtggtgtgcgcatgctccccatttatttttacatgagatgtgaattttgatgagcaaataaaagaacaaagcagtaaagacactgatatacgggagttctgcaagttgggggtaaattgtgcaggagaaagctggtaagaagaaagacctctataggacagactcctcagaaacatgttttggaagagatgggaaaagtttcagtgaagacctgggtgttggattgcagcagagtaggaaggatggttcttaatgaagggaaagtgttccaagctttcggaggtcaaggtttagtcaggtgtagcatttattttgttagggggaatattatttctaatggcacctggcttttcatagcccttgtggatgcctaagaaagtaagattaatcccatgtcctcaagtgtgcagattggtcacagcatttccaggaagagacctcactgtaagcttctgggggaggtgaggacttaggtgtaagaaatgaatcagcagaggctcacaagtcagcatgagcatgttgtgtctgagcaagagaccagtactgtgagatcaaaagtagtgggaagaatttgtacaagattaattggaaggcttactcaatggaatttttgtatagttggatgttagtgcatctgtataagtaagagtttaatgtgatggtgttatggacctaatgtttgtctcctcacaatttacatgctgaatccccaactcccaactgaccttatttgtaggggagacttttgaaaagtaactaggtttagatgagctcataagagcatatccccatcataaaatttatttccttattagaagcagagagacaagccatttgtctttcctcccagtgaggacacagtgagaagtcagctatctgcaatccaggaagagaaccctgaccacaaatcagccttcagaagcgtgagaaaaaattctgttgttgaagccatccagtctttggtattttgtattttgttatagcaccttgcactgagtaaggcagatgaggaaggagaaaaaaataagcttagggtttgagtggactagagaccatgtttatctcaggtttacaaatctcccctggtcccctaagtttcagtataaaatacctactctactattctcatctgtaagacccaaataataagcctgtgcccttctctctaattttgatttctcttatttttacttcaacatgctctactctagccttgcaatgtctttacatacagtgaaatgtcaagttcttnnnnnnnnnnnnnnnnnnnnnnnnnnngtttctcctcagcctcagaatttggcacatgcccttccttctttcaggaacttctttctccaaaagtctctgcctggctccatcatatcataaaggacccacttcaaatgcagtcactaccatttcacaatatgcacttgttttttttaagtcatagcaagtttcttaagagagtaaagaaataaaagaatgactattgtataggcagagcacccccgagggctgctagttgttcatttttatggttatttcttgatgatatgttaaacaagttttggattatttatgccttctttttttaggccatatagggtaacttcctaacattgccatgtcannnnnnnnnnnnnnnnnnnnnnnatttaatttaattttaccttaaattccagggtacatgtgcaggatatgcaggtttgttttataggtaatgtgtgccatggttttannnnnnnnnnnnnnnnnnnnngtaaagttgtttaagtttcttatttactctggatgttaggcctttgtcagaagaatagattgcaaacatttttccatgttctgtagattgtctttcgctctgatggtagtttctttttctgtgaaggagctctttagtttaattagattccattagtcaatttttggttttgctgcaattgcttttcatgttttcatcatgaaatctttgcccatgcctatatcatgaagggtattgccctgatttttttctaggctttttagagtttggggtttttcatttaagtctcaaatccattcggatttaatttttggataaggtataaggaaggggtccagtttcatttttcagcatatggctagctagttctgccccatcatttattaaattgaaaatcctttccccattgcttgcttttgtcaggtttctcaaagaccagatggctgtagatacaatatgcagtttcttcaagtcatataataccacctgaaatctcttattcattcatttatttcagtatgtaagctggtctcctctactcactatagtgagggcaccattagacaaaagaatctgtctgtctagttcatgtaagattctcagaattaagaaaaatggatggcatatgaaacttaatggatgacatatgggacctaatatgtacttgttgaattaatacataaaatgcaacaggaagaagttgacaactgcaatgatgacctgatattgatgatataagagtctatagatcacactagaagcaataaccatggaaaacaactggaaacggggaacagccacaaacatgaaagaatcaatacttcc

SEQ ID NO: 38399 - DNA, 931 bp, Macaca Mulatta
  misc_feature (1)...(931): n = A,T,C or G
gggaggcattgaggcagccagcacaggggtttctgctgaagtggcaggcgcagcttgaggaacccgcagataagttttctctctttgaaagacagagattaatacaactacttaagaaatgtagtcagtagcttactaagattttgcttagcattaggttcttaacgtaatttgaataagattttaagagaaaatatgaagagttaaaagtgtatcgtgagnnnnnnnnnnnnnnnnnngtttctaaaacatgacggaagttgaaacgaatcttcttnnnnnnnnnnnnnnnnnnnnannnnnnnnnnnnnngagaaatgggactccagatcccttgaattaataccagtaaaaagggaaatgctttttaaattaaaatgaaaggggatttaaacagagcttaaaggaggtggtgaacaggctgaagtgagactacaaaaaattttattgggcaatcattagaacactgatatttaaatggtaaggtccattagaacaacattgaatttctaatgacccgccgggtaaaattgcctaccagtccagaaacgcaaggtcgatactaaaaggcattttgcgtagatttaccgaattatataatttttgcaaaaatcatatacggcgcaatttgttagggaatgcaaataacttacgaggtaccaaaacattaggaaaacgttgttactttgacaaaaaaaagtagaatctccgaaagtgcaaaatacaaaaaatactggggatgaatggtttttgaagggtaaattatgggtcacgggcgcagtctgataacaactttattttaaagaccgttgtcactatatcctaatctcagtatttggtaattcgaacgtggaactctcaattagtaggataaaaatctcgagacggaagagcacgtcaacactactcggtttgattttcaaaaagagag

SEQ ID NO: 38400 - DNA, 167 bp, Macaca Mulatta
  misc_feature (1)...(167): n = A,T,C or G
ccagaattagacacattatatttattattatctttgacaaaagtagcactaaaaaagccttcctaagatgccatatgcatcacggctataggaaaataggcataccacttgtcacttccctcaaacaggtgctcccaaaggcaagtcctgcatgtcctgnaggactt

SEQ ID NO: 38401 - DNA, 663 bp, Macaca Mulatta
ctatataagctataaaatacacatttttttaaaaaagtttttttcattcaaagaattggtaattgaccagaggaaggcatgcctcagtaaatggaatgctctgaatgagaagagcccataacagaatgacctatattacaaccgatataaaacctaggtgtaggatattcttcaagcaaatttgtggatggtagatgaagtactttgcggtgctctgttatatattgtgcaatttattttatatagtaaagtgattatgtctaactgtgatcaaacttaactgtttaaagcctctgtcagacattaacgaacttgacagttcataactggtatattataaactaacacatgagctcttagttacaatctcttagtgcttgcaccattttacatagcttcagaccttgtccagaaaaccaaagagctcatcttagcttacaaacactaagaatatatacaggatatagagataagttgtcagattgacaaactaggcacatttttaagaaagttgtgtaatggtgatgctaaagaaatgtctgtacaaaatacgatggcctgggcagagttggttgtctgggtgagaaactaactacttaattccctggatttatcctgttaagcttgagtagaatgaaggcctgctggcactagcgtggtcta

SEQ ID NO: 38402 - DNA, 604 bp, Macaca Mulatta
ataactgcagagttcctgaggcccttgctgtgacagcagagccagccagggttcctggttgcaggcatgctcacagaattggtgggaaaactgacgtcctgctgagataagcagaaatcagctgttggagatggcacccgcctgggaattagacagaccagagtggagcgctgacagggcagcctgcttcagactgagcctgtaggggaggagtggctccttgactgggccaggtggcctctgatcactgtcctcccagaataagtccagtggggctggggtgagaccacaaaaggagggtagggacagtttagaagggatgtggttattagcgcacacagcaccaaccaccctagacaatgagcatctggggaggaatggaggagctaggacagagccgtgaggggtggtgcctcaggagcaggcaagcgagtggacaggaacactggctgggaaggcacagggtgacaggactgaggagtaagagactgcttctacccagaaatctgtttctgggtgatgagacagtctccagcaattggagaaagagccctgggagttgggaaggggccagtccaggctgtccctcagcaagctcctggaa

SEQ ID NO: 38403 - DNA, 801 bp, Macaca Mulatta
ggggagtatattaatgcgggtccccacaaatagaggggatttattgaaaagaagaatggcttgaaagattcaacttcatcttaaaaatcagaaatagactcttgttattaatagctttagaaacgaaaatctaacttctgataaattatttcagaggagtggttcaaacgtgtagtagatagctctgcctggtcatcaattatagtgatgtccttgcatcagctccagaaaatcagaatattcatgagctttccagtctgactcagaccttcaggagccatgaaattttcctgtttggatgagaggaagcgctggcggtcgtttcagcagcttaatgaaaccagaaatagataagcacgatcgaggggtgatgtccactcgtttgttcccatcacgttgtttttaatgtgtgaaagtttttaaaatcatactaaatgtgtgatcctttttagaattcactgggttcgggttcgtggaggaagtgtttttgttttttgtgaatttggttaaacaaaatgactgaggctttgtttttccactctgtctggccaagcaccattgctacactttttttaattccttaaatccctgagcagtggaggctgttccttcagccccgcctctccctttttggaaccggaaagaacagggaggcaggacccccaaggggccccttttccccattgggaggcctcgcctaatatttttctaaacctttaattgggaggggattgtactatggcggcaaaaatatccttttggtgcgaatgggcgaactatgggacaaccacgccgcgcccc

SEQ ID NO: 38404 - DNA, 647 bp, Macaca Mulatta
  misc_feature (1)...(647): n = A,T,C or G
ccttcacttgttagatcccatgaagtacctatgaaattctcagcattgctataagcatnnnnnnnnnnnnnnnnnnnaaactttctgtttaatggaatatgaatccaggatttgctttaatttcactctgttcttcccattttcccttattcttcttgttatctaattttgaaaaaaacctannnnnnnnnnnnnnnnnnnaatccagaaagttgggttttcatgatctgagcttccttgtgtcaccttctctttgtgcaaacttaagccagtcatagatcgtcacccagacatattctccaacccaacactgcaaatctgaacgaatcttttctctttttgtcctacgagtttgtcagagataagaatggattgctgtctacattctacaaccagaccctagactttacaccaggctgtgccacttcctcttcacttcacttagaggatggccccaaaactgaaaaggaaatgaaaccattcaaatataccaagtctgaatttgacttgatttgatgactcagttttccttccagtactctgattntttttatggcaatggcctatatggcacaagaacccaccacttaaagcaaatctgttaaatatttttataagggatgagcaggaaaagcatactccaaaat

SEQ ID NO: 38405 - DNA, 234 bp, Macaca Mulatta
tgcattcctggggaggctgtttttgatatagaattgattattctaatcaaggcacttcagtgctcaaactgttaaatataaataggttagaacagcgtgaaagtgtggctgaaaagaattaaataagaattaaatgcaagcagactttccagagaggagtctaaaataagcacgtggttagcatgcagaaatggcaataaaagaaaccccaggctctgactgatgtggccgctg

SEQ ID NO: 38406 - DNA, 708 bp, Macaca Mulatta
  misc_feature (1)...(708): n = A,T,C or G
gggagtatatttccgacatggtatttataaaacacatttgctctgagaaacccttcggtatctgttcttcaaggcccagccctcgtgctgcctcctttgttgggtagtgtttattttgtaatagttgggacagtgttgtacagtggaaacccattagtctttggagttagcccagacataaagtagactcttaggcctgcaatttactagcagtattctcatgtttggaaatcaggagcaatgtaattgttgagacaatttattttaatgagaataagtcatgcagtaagcatcaatcttagcacatctacatgttgtcttttttgtctccctgaaatcttcttcagctgcttccatgtactgatatcttcttccaaattccttaagagccttcatctgggtcatacattgatatttatttgatacttaatattgatagttatctcttggtgtttgtgtatttctttgtatccataggatcctccattagcacatatattcattcatcaaatatttattgagccacttctgtgtattaggcccagagtaagatgctggaatatgttaatgaacaggagatgtggtcactgtgccctcctaatgcttacatcccagcaggcaagacctatatgaaacaaagtttgaaattactaaatgaaagccaatggcagttgnctattagcaaatgtttgtaagggaactgttnaa

SEQ ID NO: 38407 - DNA, 785 bp, Macaca Mulatta
  misc_feature (1)...(785): n = A,T,C or G
gggggagtgttgccttccatattgattcctgaattgggcctctttttcctagatgacgccactaaggtaaggctgggctaaagcctgtcctgtgccaagcaagttgtgcagtcaactgggggattgaatcccagtgtgatgtggcgaagaggtgttgaaggtccaccaccagtgccagtgaagtttgtgccaagagatctgattttcatctttcccatctaaatggccaagggaaccccagtcaatgtttcccattcacacagagttgtctggccaaggggccaagacactgggtccaaggaggggggtgagaaatatcaaagggagcccattacgtataatcaatacaatttgagtgatggggccagaagtgattggtgaacacaccagtaacattaatggagctgaggcctaatgaatacataatttttccgtggtgatttaaccatgcctaagattggactgcaagacagctgcagttgagtgacatatccgtggtgatacataaagggagtccttccnatggggtggtgtaattgatgctattgttctgtgtcaggnggagttaggggtcctggtgcccatgctccctgatcatgatatatttcanggaggagtttcactccagagtacccaatcgcactgctgggtgggtaaaggaacatatgccccaaatatggtttttgccctctacnacagggggaaaacatacccgcacagggacaactaccgcctaggcatgggccaaagaaacatgggaaagttcagggggttttttttggccc

SEQ ID NO: 38408 - DNA, 633 bp, Macaca Mulatta
cttttctcctctttgaacatggtctagtgacacggtagcaccagttgcaggaaggagccagacgtgttctcagagcactttgttcacacttttcagcaaaaatagctatggttgtaacatatgtattcccttcctctgatttgaaggcaaaaatctacagtgtttcttcacttcttttctgatctggggcatgaaaaagcaagattgaaatttgaactatgagtctcctgcatggcaacaaaatgtgtgtcaccatcaggccaatgggccagcccttgaatgggggtttattactgttgtatctatgttgcatgataaacattcatcaccttcctcctgtagtcctgcctcgtactccccttcccctatgattgaaaagtaaacaaaacccacatttcctatcctggttagaagaaaattaacgttctgacagttgtgatcgcctggagtacttttagacttttagcactcgtttttttacctgtttgtgggtgtgtgtttgtatgtgcatatgtatgagaagggcacatgcatcttctgtatggacaaaggtggggtacctacaggagagcaaaggttaattttgtgcttttagtaaaaacatttaaatacaaagttctttattgggtggaa

SEQ ID NO: 38409 - DNA, 641 bp, Macaca Mulatta
gaggctgaacatttctaaatatttctattcaataagttttttcttttttgagcaacttaagtgaattttgaagattgctccttccagtcttgttccttttcacattttcctgcattatctaataattacctcagtgttagaatttgactgaatgtattaattgatttaaacatcatgtatactaaagtcttaaacatctaagactcagttgcacaaaaaaattaaagtcatctgtactgaaccttggtttcaatttaagatttttcttgcttttcaaaggggtaactgataaagattgaagggtttttttcccagttggtcggaggaatgaagaactattgatgcaagcttttcattgtttcttttctatgatcaggtatctgctttcattttagactgctgcttccaaactaagctagaatcttggttttaatgagaggaggcagagaaagggaggcagatggaagaagagaaacagttaaataaagacatacccagtcactgcatttttggactatactatatctttctagctcaaggaaatagataaactgtagggtcttttttactctttatgtatcagtttacgtgttagtcatagctgttcatagtggttgtctaatttttactttattatatga

SEQ ID NO: 38410 - DNA, 554 bp, Macaca Mulatta
  misc_feature (1)...(554): n = A,T,C or G
gatcattggaggtatcgaccactcgctgtacacaggcagtctctggtatacacccatccggcgggagtggtattatgaggtgatcattgtgcgggtggagatcaatggacaggatctgaaaatggactgcaaggannnnnnnnnnnnnnnnnnnnnnnnnnnnnnnnnnnnnnnnnnnnnnnnnnnnnnnnnnnnnnnnnnnnnnnnnnnnnnnnnnnnnnnnnnnnnnnnnnnnnnnnnnnnnnnnnnnnnnnnnnnnnnnnnnnnnnnnnnnnnnnnnnnnnnnnnnnnnnnnnnnnnnnnnnnnnnnnnnnnnnnnnnnnnnnnnnnnnnnnnnnnnnnnnnnnnnnnnnnnnnnnnnnnnnnnnnnnnnnnnnnnnnnnnnnnnnnnnnnnnnngtggaagatgtggccacgtcccaagacgactgttacaagtttgccatctcacagtcatccacgggcactgttatgggagctgttatcatggagggcttctacgttgtctttgatcgggcccgaaaacgaattggctttgctgtcagcgcttgccat

SEQ ID NO: 38411 - DNA, 371 bp, Macaca Mulatta
  misc_feature (1)...(371): n = A,T,C or G
tctgcctagctaactcaaactatgaacgtacccacagccgtatcctactactgtcccgaggacttcaaaccctactcccattaataaccttttgatggttcacagcaaaccttactaatcttgccctaccccccactatcaacctactaggcgaactcnnnnnnnnnnnnnnnnnnnnnnnnnnnnnnnnnnnnnnnnnnactaacaggactcaacatactaattacagccctctactctctccacatnnnnnnnnnnnnnnnnnnnnnnnnnnnnnnnnnnnnaacataaaaccccccttcacacgagaaaatacgttcgtatttatacacctcgctccaatcattcttctatccctcaaccccaatatc

SEQ ID NO: 38412 - DNA, 257 bp, Macaca Mulatta
tgtcatatagagaattgtggaaactgattttaaccccctttagggggattcaagagacttctgaaaaagaaagtagggaaacgtcagtagcaattctagatatgcttgaggtatttaccaaccagttacagagtttaccagagcacgtggcaaatgtggaactgaagaaatcactggatgaaatacaaagtacactcaaaagcttcaatggtagactagatcaagcagaagaaaaactctcaaaacttaaaatctga

SEQ ID NO: 38413 - DNA, 848 bp, Macaca Mulatta
  misc_feature (1)...(848): n = A,T,C or G
ggatttctttgctcactattagcagactgaaacaaaggtgcnnagcgagcaaagctcaaacacattgctcttcactgcagtaccagttaaagtgcatgaagggtgggccagcagatggcataactaagtgactgtgttttatctatctttaatttccttggccaaatgagagttagtgatatgttcctttatagaccaaattatggtgaaatggtggatgttggttatttttaaatgacatttgagttccatttgctgcaaatttacttagttagattgaccattttctttcatttttccgttgcgcttgctttgccatcacctagatttcttggctcttacactagctatgactacttgaaaaggaacgtcaagtggtaagactggaaattaaatgtgaagctgttccgtaaggtgtccctcactgggtcactggcattatgtgcactttccaaatttaatgtcatcatccaaggctttagtctaaattccttgaaaacaagataaagaagccaatcatgagaactcctccatggaaattgatgaaaatgaccggggatattccaaatgcctaagttttttggggggtggccaataaagctaatggcggctttgggctttccgcattaagggtttaaaatgggaatgttggcaaataatggggtcttcctaaaaaagatttggggggaaattttggggttaaatatttaaacaattgggcaattcttgaaaaaaataacctatactggggcacaatttttaactttaaaagaacccttgtgaaaaaaaaaggcatgtatcgtggttgctccccgccgttcttttttaaccaaaaaaatggacacccn

SEQ ID NO: 38414 - DNA, 668 bp, Macaca Mulatta
  misc_feature (1)...(668): n = A,T,C or G
ggggtggaggttgcactgagccgagatggnnnnnnnnnnnnntnnnnnnnnnnnnnnnnnnnnnnnnnnnnnnnnnnnnnnnnnnnnnnnnnnnnnnngaaagcgctacggacccatccatcacgtcagggctggtgcttctatatgattggaatgacagtgctgtgatgcccccctgggagacaccccttcctcctgctcatgggcctggcttccagtccctgttaaaggaagactgcccctaccaagtgcctctccctcctggggagctggccccttccacttcactcctgagaccacggctggggctaacgaggctgtcattaaccgtgcctcaaacaaaacctacgaccattaaatatttaattgaattatttcactgcagggatattgtggctcatgttgaaagctaatcacctgcttttttgtctggcccttaaaaacacatctctggttaaacatttaaaggtcagagtcgtggcgattgcagtattgtcattgttttctttcctttgtggtttgggtggaggaaaggggagagtanagtgcgtgggaaggacganagtcattgaaagtccttttccgtgaaggatccagggatacaggactggctgccgtttctgcttcctggctgattcaaaagaaccggagggcggaatggtgcgatc

SEQ ID NO: 38415 - DNA, 640 bp, Macaca Mulatta
  misc_feature (1)...(640): n = A,T,C or G
ggcagtgtggctggaggagagcaggcagggggaaggtggagaaaaggaggctggagagaagacaagaaaggggccggtcatcagagctgagtgaggagtttggattccactntaagtgcacaatgttctggtgaatattctggaaagtcactctgggtgttgtgtgaattacagattgtgacagggagagtagaagctgtgagaacagcaggaagaccgtagttggggtcagggcagaaatgatgtgcgtgaagtagcgtgtttgcagtggccatgacgccatgcactcatgagctctagggggcgccactcacatggattatggtacttctactgtctacctggggagagctgcagagtgcttccaagtgtgtcatgaaggtagaccactcaggatttgatgatggattcaatgtgaggggcaaggaagagagagcatctaaaaatgattcctgagttccaagcctgagcaatagggaggagaaggggaaagctggaggagaaggagcaattcatttctgagaaaggagacagaactaaagagttgctttgcaggggacagtgaagtgactattgccaccattattctgcaaatatagtaattggctgtttgctggtacacaaaggaaatgatgatggg

SEQ ID NO: 38416 - DNA, 907 bp, Macaca Mulatta
  misc_feature (1)...(907): n = A,T,C or G
gggaggttattggaatctattttgggaaacttaagtcatttggtattgggagagagtacttcaaggttaatttgtatacatttaattttgttataagaggctatactctgtttgcactctaggaataggaaggttactttcctggcttttgtatttctcaggaaaaaaaagaattggaagaaacttaagaggtctgttaacgccagtacctaaaagtggcatttaacatggcatggaacctatgctttgaataaacacttgagaagaggaattacataatttcttttttgttgtatggatggccttggattatacagagcttaacatttatataaaacaccagtctgagactgatgaagtgaaaccctttttattataaaaatgggaagaatggcgttttattacagtatagttaagaaattggctaacgcagtaaataaaaacttagaaatgcctcaaattttgttgtagaatttgccttttaccaatcatttggatataaaaaaagcaatgcttacatactcaatccaaattaagctttttaatggtatttaaaggaaacctaattcacacaattgatcccnnnnnnnnnnnnnnnnnnncaagaggcttagaaacttttacaaaaattgaaataggattccccactggtcaaacaacattttttaaacaatttttgtttctaagaaaccagatacgtccctcttcctccaaggaacaaaaaatttctatggtatgtggcaaaccccatgcgatggttttctctccaacagatttcgttaataaaaagagtacttttaacattttccctcataataagtcccccttcaccacctacatccaaataaatatttttcaccacacgctgtgtggggcaccccccttccccaaatatagaagaagattt

SEQ ID NO: 38417 - DNA, 772 bp, Macaca Mulatta
ggacactaaataattaatacattattatagaattatacttgtaataaacattacaaacctaaagttatagtatgtttttagaatgtatgcttgaggaatctaaacaggaaagaaaattcttcagttaaaatcattattttgtcatcttttgttgtttctatttgaatagaaaacctcgattccttatctgatgagctgccacaaaccagaggatataatatggacattgtatttatatgtttttctctcaccaatatccagcttagaggagaagaaatctttaatcctttttggttgtatgtttgatttctgagctggaatttttttctaagctagcaaatttcagggtacaaattgagttatttctgccagcatcctggatttgaagcacgagatttcatcactgtgattaaaagagcctttctctgctcacaaagcaagttaaacaaaatcagcaaaatgatagagataaacgtgcttggtccataaagcccaagacaagtgttctattaagccagtgctgttataaagtgagtacagtgagatgtggaaggatagtgtgcatcattttggggaactgtactatatgtaatattcgtggaaaagatgagctgttatttgctccttttatatgcgcttgctcagcaacttaggtagcagaagtcatatattgggattaaatggctcgacgcacttgttctaggggggtcctagtttttatcccttgatcctggtggaaaagttggaattaaaacttaaggtttaaaaaaat

SEQ ID NO: 38418 - DNA, 736 bp, Macaca Mulatta
  misc_feature (1)...(736): n = A,T,C or G
ggattgaatttctgtcaaggttaggccatggatctgagcccagtcagatcgtcactctgttgtaagagggtcttctcagattcaaatgtaggaacttttggattatctaatgctttctgttggccaaactcaccgtgtctgtaattgaagtgcaattcttcattttctgaagatttttatcaagcgtctcctaaccatatctagagtggctcatgctgcaatctagattatttacaccaatgccctaatacattgccatttctcacaattaaatgacatggtcatgattaattgatctcagagtattttctttaatgttttaatatttaatgggattttaacagaaaacaactcgaatattgcctctaatgttgataatgagtttaaagcctctccaagggataacagattttgtccaaatttttttcctcaaaataatttagatcatcacaagtacaacgatatgttttgtcagcccataacttagaagatttttagtgtatttgttaatatctcttctttaaaaaccaacttaatcattgttttcttcaaaatctactttaattcttctgttcctggtgcagttcatctttcagagtaataacacttcaaccgctaaaatcaatttgaatattacagaaatatttttttcataattttatttccatttaaaaaggttgtgtttccttctctctgcggnggggggagcaaatggggtaaattgcagcaccaaaat

SEQ ID NO: 38419 - DNA, 1402 bp, Macaca Mulatta
  misc_feature (1)...(1402): n = A,T,C or G
ggcactggccccagtgtggaagttcaggcccctgacattgatgttcggggcctgggagcaaactgaacgtgcccaagatgaaagtccccaagttctctgtatcatgtgcaaagggagaggaaactgggattgatgtgacactgcctacaggtgaattgtctgtccctggggtctctggggatgtcagcctgcctgatattgctactggtgggctggaaggaaagatgaaaggtactaaagtcaagactcctgaaatgattattcagaaacctaaaatctccatgcaagatgtggatctgagccttgggtctcctaaactgaaaggagatattaaggtttctgctcctggggtgcaaggtgatgttaaaggccctcaagtggcagttaaaggccccagagtgaacatagagaccccaaacctagagggaaccttgacaggccccaggcttggcagtccttctgggaaaaccggaacctgtaggatctctatggcagaagtagacttaaatgtggccacacctaaagtgaaagggggtgtagatgttacactccccaaagtagaagggaaagtcaaagtccctgaagttgatgtcaaagggcccaaagtgggacttcagtgccccagatgtcgaaacacatgggccagaatggaaacctgaaaatgccccagatgaaaatgccccacgtttcgcacctccaggaacccaagggggaaggccagatgtgcatatgactctactcaaggagatgtcagtatttcgggcccaagtcgtgtggaaccccagatgcaacatagagggtctgggggggaagcttaangccgccctgatgttaagctgcctgatatgagtgtcaagacaccaaagatctccatgcctgatgtagatttgcacgtgaaaggtacaaaggtgaagggagagtatgatgtaactgtaccaaagcttgaaggaagaactcaaaaggcccaaaagtgaaacattgatgccccaaaattgtgaatgttcctggccaaatgcctgaatgccaaaaatccatctgcngtcacagccatgatacgcagatgactcgcgnttctggaagcaaccgtcatgatagcgcacncgttcgagtgtnnnnnnnnnnnnnnnnnnnnnnnnnnnnnnnnnnnannnncgtatttnnnnaananannnnnnananaagagannaananaannaaaananaaaaggaaaaacaannnnnnnnnnnnnnnnnnnnnnnnnnnnnnnaaanggaaagaaaannnnnaaaaataannaaaaannnanaaaaacgnnnnnnnnnnnnnnnnnnnntnnnnnnnnnnnnnnnnnnnnnnnnnnnnaaaagacacaggaaaaaaaaagataagagatnataataacacactaaagcaagaaagaa

SEQ ID NO: 38420 - DNA, 664 bp, Macaca Mulatta
  misc_feature (1)...(664): n = A,T,C or G
cattaaaattttgttntaaaataaactttataaaagaaaaaaatacttgtatgttacagagaagctaaagtacttgtaatgctaccagaaagtcatcattttatgatatattttatgcacagccctaatttctcggtgtaatagttctgatactttaagtgatcgtttattttaattaccgtaatttctaatgcactgttttatccttagctttgttgttattatgttttggaatgaaatttggtcagataatatgattacggtgagttctgtaacagctactggtaatatttttgtaaatcacatgaaagcattggagcaactgtcttggaaaatgctctttaaacttcaaaccccagtatgttttggtagtagtggatattacacatatatgctgctcttttcagtgttcttttattgtgctaaagcatcatttttaaaacattaataagatttatttttcttaataggattgttataataggatttatttttctaggacattgtctttaaacacttggatgatttttatatgtcttttaattcttttataattacagtttgtagatttaaaaaacttcatgggcagaaagctgagagataggaaaggatatagatttatttggcatttcacaaggatttcgttttatcccttcttattcgg

SEQ ID NO: 38421 - DNA, 226 bp, Macaca Mulatta
gttctgcgcaggatgcctttggctgtgtggtgggaagggggtgtcttgcagcgtggttcactgcccaggaggacccccaggaccccctgttggtgacatccaggccgctttggtgctgattcctgggctctgacctgagacctctgggttctgagctgtgatgttgctctcgagcagggatctccggggtcttggttcagggccggggcctctgggttccaagcac

SEQ ID NO: 38422 - DNA, 416 bp, Macaca Mulatta
acaccaattatttatgtagttgtatacgttatgcaaaaagtacagagatgtagggctcatcttctaggaaaacagaatgagaattcgtggatcagctctaaagtcggagaccaaaccttgagctctctctaggtgctgtttctcctgaaaagttgacttgtaagtctaacctagtgcattgcctctgatggcctggtgttcttcagataggtaaaaagcaacttgaaaaggggaagagtattgtgttttccgcaaagacaatactttttttgctctttggaaattcttgctcttttggttttgagctctgaaggtgaacaatccagctgattcaaatccccagagtagccctactaataggaaaaccgtgacaaccgcagattttaaaacattactcattttgacaactggggtaa

SEQ ID NO: 38423 - DNA, 658 bp, Macaca Mulatta
  misc_feature (1)...(658): n = A,T,C or G
atatagtttcatcatgngcctgagcggaaagaccgaaagaccctgagacctggagtgatgtctttgagccactaaaccaaccagccttgtagccactcctcctttggactgtttcttttgtgagagactaaacttatttttaagccagttgatttaggatgctctgttactaataactgaagacattctaattggtacagacttaaacctttaggagttacacagttcagaagtggactttcggtaagtcatttattttaagctgttgatatagagatttattttctgtaaattttgacgtaaatagtttgagcattagaaatcaagttgaaacaattaaatgtatgcttccttgaactgtcatatcgttgacttgcaaaattcacctttggaacgtgacacaatgttaggcatacctccttttttctaatacatgggataaattttgtttgagagaatttaatttatgtgattcatctatcactgctacagtgttagctgacaacatatagtatgaggtaaggatctaatttcgttttctctcacatgatgacttgatagctgatcatctgatttatttactgctttaccactgagctgaaatgccatgtttttcactttattaaaaacacacatggctcctgtctttgttacccag

SEQ ID NO: 38424 - DNA, 619 bp, Macaca Mulatta
ggggtcttgcaaaggcagagttccacacaatggatttagggtttctcagtgggtcctttctaaatgcttgttatatcctggtcataatgcatatgggttcactgagtcctctggtctctttccactgggaatttttgtctgagctcccgagtcagagctgggcatagactctggttcctcatgaggaatgctatatttgctctgtaacctgggagacatttgttccctagtcatgcagcacatgatgttatgtttcctgacctaggcaagtgcccatgctcagtacagaaccataagttggtagcagcttctcctttctggccaaatgatgggccctgtccctctgatgagtgcatttcatgttgtgtttccaattttcatcagcaatgttcgtcattccctggtcctttgaaagactgtgtagcccgtggttatggagctgggatgaatctgatgatcatcatcttctccagtaaccagatgccatttttaacttcaatatgctgtctggacatagtgagaactaatggcaataaacgtccagctgcatggtgcacctcttttttatgggggtgctctgctgtctttgtaaaccctctctggcctctgaacatctatt

SEQ ID NO: 38425 - DNA, 145 bp, Macaca Mulatta
  misc_feature (1)...(145): n = A,T,C or G
ggatggcatcgagcccatgtgggaggacagcaggaataagcggggtggccgctggctggtcagcctggccaagcagcagcgccacattgagctggaccggctgtggctggagacgngctgctgtgtctgatcggggagagctttg

SEQ ID NO: 38426 - DNA, 638 bp, Macaca Mulatta
  misc_feature (1)...(638): n = A,T,C or G
ctataaggagtgagtaatgtgaagggtaaaataagcattatgaatacagagacataaaatgccactgtccttccttttcggaaatactctgggaggtattctgatattttttaatctgtcagttttcccagttaatatctctagacctcaaacaactgaaatattataaaaatgcattagtcacaaaagatttattttcttacattgcactaggcttcaagatattttctgccatgccttgcctttagtatcaatattataaaaatttcactgtaattttataactgcctaataacaaactgaaaacagaacttctgagtttcctcatcagaaagggccatagaaaaggccttaggaaagaaagattcacttacttctgcgaacttggcaatctgtaatttaactttaatttgtattttatgcatgaaatttacttgtaaagatgaaattaaatttgcttcccctacaccccaactccaagaagtcacaggaatggactctttctaatagtgcagtgaaatattttttcaaaccatannnnnnnnnnnnnnnnnntatataccttgtaaacaagaggttaagacattttatagcacatttcaaaattattttcttcctcaaatctatcatgtgataac

SEQ ID NO: 38427 - DNA, 230 bp, Macaca Mulatta
tcaaccattgaaatatataatgtaattctcaagaaaaggaaaacactctactccatctcgtcaaatggaaaatcattcaaggatgactacaaaatagatctgtactttgccaaagtcttcaaacggcaaagctggactgatgcactcagcatatgctcttatagtgccaggtgctggacccagagggagcaaggtctacccatttattgagctgctcagtgagctcacaa

SEQ ID NO: 38428 - DNA, 1168 bp, Macaca Mulatta
  misc_feature (1)...(1168): n = A,T,C or G
ggactttttttttaaactttttactaaactaatactagacatttccactctgtcataattatatttttatgacaggaaaataaaaacagttccatgtttttataaatagtctctgcaaagatttcagatgttattggtatcccggtttggcagtatctgaaaaattgagattgcctttaaagtgttcatgctacttttacttaagtaaacctccactgtataagacccaggccggttccaactaataccaaggtttctatgcgcataatagtttacaaagaacttaaagactatggannnnnnnnnnnnnnnnnnnnnnctttaaaatttttaatttttgttcaaagtatctggtttataaagtcaaattcttttattatttcctttctcttttaagttgactgattttgctgattaagcgtaaagtcccaggcacagttgtgatgacgtactgataaaatgggtgcctagtgggttgaggagctccagtgtcaagacttttattaaattgcccttgttttcccaaatgccaatctagccgtatttagatttcattattcaataaaacagattaaaaatcatcccataaatgaatgttgaggttaccaaagtacatcacctgctgaggaaggagaaatcttcctgctttaagggagccctgtcgtctctccttgacacgttgtttcccttggtattagtgggagctctgtttaagatggggaagccttttctgcagtttcttagaaacacctgctttctaaagagagccttttctaggattaggttatgtgtgttttctctaggagattttttatttcagttaccaatttaattttcaagttgacagatgctatgtgaagtctctcatactgagagtagtccattaaagttttgaaagttgcactgcttttcatctttcaggtacctgaaatgaatgacatcaggtgtttggaaggagtaagatcgtaaactttattcattttcttccttgtacaaagtgatgacttctaatgcttatatctcaaggtattttttaaaaaagcaacagtccctaatagagtaaaatttggttttggtccaagttcccaataatatatttaatgtttctgttgttactggtgcctcctgttgcatcagatagagattgcctgcctctttgtagggcacc

SEQ ID NO: 38429 - DNA, 913 bp, Macaca Mulatta
tgctacagtagcagatatgcttcaagatgtgtatcatgtggtcacattgaaaattcagttacacagttgccccaaactagaagacttgcctcccgaacaatggtcgcacaccacagtgaggaatgctctgaaggacttactgaaagatatgaatcagagttcgttggccaaggagtgccccctttcacagagtatgatttcttccattgtgaacagtgcttactatgcaaatgtcagcagcaaaatgtcaagaatttggaaggtggtacaaacatttcaagaagacaaaagatatgatggttgaaatggatagtctttctgagctatcccagcaaggcgccaatcatgtcaattttggacagcaaccagttccagggaacacagccgagcagcctccatcccctgcgcagctctcccatggcagccagccctctgtccggacccctcttccaaacctgcaccctgggctcgtatcaacgcctatcagtcctcagttggtcaaccagcagctggtgatggctcagctgctgaaccagcagtatgcagtgaatagacttttagcccagcagtccttaaaccaacaatacttgaaccaccctccccctgtcagtagatctatgaataagcctttggagcaacaggtttcgaccaacacagaggtgtcttccgaaatctaccagtgggtacgcgatgaactgaaacgagcaggaatctcccaggcagtatttgcacgtgtggcttttaacagaactcagggcttgctttcagaaatcctccgaaaggaagaggaccccaagactgcatcccagtctttgctggtaaaccttcgggctatgcagaatttcttgcagttaccggaagctgaaagagaccgaatataccaggacgaaagggaaaggagcttgaatgctgc

SEQ ID NO: 38430 - DNA, 786 bp, Macaca Mulatta
gggtgacacacaaatgtcccattttcatcctttctatagtaaatatgttctgatataatgtgaaggtttagcagatgcatcagcatttaatcctagaggatctggcataatcttttcccccaagaatagaaattttttctgcttatgaaagtagtacatgcttgtttaaaaacaaatcaatattgacttctgcccgctgtgtagcactacgcccccacctggccatgaccaggggcatgtcctggtccacctacctaaaaatgtttgaagccagcctcctggccatgtgcacaggggctgaagttgtcccacaggtattatgggccaacctggcaatacatgaagttccaccaaagtctgagaactcagaactgagctttggggactgaaagacaacacaaacctcagatttctcagcactggaaacctcaaaatataactgaattccataaataagattttaagtcttaaatatgtatttttaaatgtattaaaagtcaagctgcttgtacttaagcacctaatacaatgcttaggttgtaaaaggagatgctcagtgggtactaactggtatgttgagatttaattatggtttgaccagtatttcttggaaattgcaaaacttatatcatcagcttcttggaatgtattttgaaaagtaaattagtatttgaatatcccatgagcctagaggatttccatttcgttctgggttttatttcttccaaataaaattttaaaaaataatggggaaaggggccatttttaaatttatataaaaattga

SEQ ID NO: 38431 - DNA, 793 bp, Macaca Mulatta
  misc_feature (1)...(793): n = A,T,C or G
ggggacgttcagagcagctggtcacatgagcctgaattttcggttcagttcattagtcagccattttggtcaacaccctgcttactgcgcacggccaatcctatgagaactcagcatcccatctcatctgagcagatcctggaagtgatttctgcagctcannnnnnnnnnnnnnnnnnctacactgaaaatataggtttattttttgttcaggtttttcttttatatttttttctgcacaaaggaggaggatttttcacttattcatatcgaggccagatttttaaagccagctaaggcagcatcggctgtgcaggatttaaagcctatagctctgctgaaaaaaaggtggggggcagggaaaggaagataaaaggagaggaagctgggagaagacaagcatcatcttattttgctatgtggtaggaactgtctataagatagtgtagaattgtttatcttgagcagtttgttcttaaactataaggtnnnnnnnnnnnnnnnnnnnnnnnnnnnctcctccacccttttcctgaaagctttgtttcagagctttgtattgggtatttttggtgaggaggttgtatttatttttgtnnnnnnnnnnnnnnnnnnnnnctgtgtgtgtgttgtggtcccagctgagtcatcatgtctgctctgacgcctccgaccgataatgccaacccccaccactggaaagatcaccacaggcctgccatggagaccattctaccctttgcaaaatttccgaagtgttccatggaatgggaagaaagggcctcttgccctg

SEQ ID NO: 38432 - DNA, 811 bp, Macaca Mulatta
  misc_feature (1)...(811): n = A,T,C or G
ggcacagaaataattactgttgcgaaaagtgctataaatgaaaatgtagtttgttttgaaaatgtataatgtgggcctaagccagtttgggcgggagaatgagtcaggatctttgaagaaaagatatttaaatggagatcaacagcatgagtcagagtttgcatgttaagaaagaagtaagaaagagccttccatatagaaagaattctgagtggttcttgacctgggcttcagtctagcgtcaccacatataagggagtatatggagcacctggacatatcatgcatgactggtgggagtataaagtgataggcctactttagaaaacagtttggtagttaacttgaaatgttaaacatatttttattgtataatatatcagttccaccctagatatttgctcaagaaaaatgaaaacatatgttcacacaaagacttgtacatgaatacctcataatagccttattttgtaaaataacccaaaaactgaatgaatggaataaacaagtggtggtataaccattcaatggaatactacttagcaaccaaaaggggaacaaatactgaatcctgttgacaaccttggctgaaatctcaaaatctttgctggaataaaaaaaaacctaggccacccaaaaaatacaatcactgaatgaattcccacttttaattttgagaattttctacaaacagggctaaaaaccataatttttaaaaagtggaataaaaaaaatttggcatttaaattggntctctgtagttgtgcgacagggtgaaaaaattgaagtaggtcttgggcccaaattcaan

SEQ ID NO: 38433 - DNA, 912 bp, Macaca Mulatta
taagacatgaacatcctctctcctgagaggtcccttttgctttctgtcttctagtcctgctgctttcttccagacctctgaaaaagctgggcaggccctggaacattgctgttttctcattttcaagtgcctttccttcatctctgcagtgccacctgtttctcatgtctctatttgacatctctgctagaacatcacttcctgcagaatctccagtcaggcatcccttccacaagaattaacaccatgttcttgaccttagcagtataattgaaattagacagccactggttaaatcagtcacttcatatgaggtcagggaccaattcctcttttctaccatgtcaccaggaaaaatcataaggtatcacacagaatagaaaaggcatatttgctaaataaatgtgaatgttactaagaacccacccattactatagaagcaattcctgttaattcatggaatgtcacaaatgagctgaattcgttcaccctcatggtgccattaagttataaaccactaagtcatccatatattcccgaactttgcattgactacagtccatttctttggcaggtcgttgaagcagacggcctgccagagacagatttatgtagtttttaatgtgtttttcaaaagttggtcttgatttgggcttagctatccatgaggatctcatgaaaattaaaaacattcaatcacgactactgagctttctagaaattgcaattatagtcatcgctttgaaaacagggcatctttaagagatgaggtattgctatggatacagcttcaagagacagacaattaaatgaaagcataatatgggcatgtggtttaaaactcagtgaacaataactgtgagactattcctcttctgacacaagcagtcttagttcaaaacaaaaacagc

SEQ ID NO: 38434 - DNA, 763 bp, Macaca Mulatta
  misc_feature (1)...(763): n = A,T,C or G
ggggaaaatcctaaagatgactttcttgaagcatgaacagttatatatatagtatacnnnnnnnnnnnnnnnnnnnaattgagtatccaaagatggcatcttgttttaatttgtactttttnnnnnnnnnnnnnnnnnggnnnnnnnnnnnnnntgtgtgttggccattgtcttctttttttaatccacaacctttgcccatttttcatgtgagggattatcttttaactgcttttcctcataagctcagctgtaccattcgatttgttacatgtaaatatgttaaaacttcatttaagtataatgctcatttttgttttcaatatattatggtctgtcaatttttgtcttgtttactacttttggtgatatgttttgaaagtgtcccccactccaagattttataaatattcacattttcttgtaataattgtgatcnnnnnnnnnnnnnnnnnnaactatttaacccatgtggaatatattttcatgttggtgcaaagtagggatataaccttatgttttgttttccttcaatgattggccagccagccaaaagagatggctagtcttcatatgagaaaaaactgtttattaatttactttttacattcagtaatacaattgaaatgagtaaaatatccccatgtggttttccttaagaatagaagtaacttaaaatcctttttttctttcccttttagagttggnnnnnnnnnnnnnnnnnnnnggaaaaaataggtgggttttcctccaaattccccct

SEQ ID NO: 38435 - DNA, 1342 bp, Macaca Mulatta
  misc_feature (1)...(1342): n = A,T,C or G
tccctataaccatctagttccgagtacaaactggagacagaaataaatattaaagaaatcatagcccgaccaggtaaaggcaaagggatgaattcctacttcactaacccttccttatcctgccacctcgccgggggccaggacgtcctccccaacgtcgccctcaattccaccgcctatgatccagtgaggcatttctcgacctatggagcagccgttgcccagaaccggatctactcgactcccttttattcgccacaggagaatgtcgtgttcagttccagccgggggccgtatgactatggatctaattccttttaccaggagaaagacatgctctcaaactgcagacaaaacaccttaggacataacacacagacctcaatcgctcaggattttagttctgagcagggcaggactgcgccccaggaccagaaagccagtatccagatttacccctggatgcagcgaatgaattcgcacagtggnnnnnnnnnnnnnnnnnnnnnnnnnnnnnnnnnnnnnnnnnnnnnnnnnnnnnnnnnnnnnnnnnnnnnnnnnnnnnnnnnnnnnnnnnnnnnnnnnnnnnnnnnnnnnnnnnnnnnnnnnnnnnnnnnnnnnnnnnnnnnnnnnnnnnnnnnnnnnnnnnnnnnnnnnnnnnnnnnnnnnnnnnnnnnnnnnnnnnnnnnnnnnnnnnnnnnnnnnnnnnnnnnnnnnnnnnnnnnnnnnnnnnnnnnnnnnnnnnnnnnnnnnnnnnnnnnnnnnnnnnnnnnnnnnnnnnnnnnnnnnnnnnnnnnnnnnnnnnnnnnnnnnnccctctctccctttctccctcgctcccccccaactctcccctaatcacacactctgtatttatcactggcacaattgatgtgttttgattccctaaaacaaaattagggagccaaacgtggacctgaaagtcagctctggaccccctccctcaccgcacaactctctttcgccacgcgcctcctcctcctcgctcccttgctagctccttcgcggcttgtctgcaggcccctttccccgtccaggccttgggggctcggatcctgaactcagactctacagattgccctccaagtgaggacttggcnnnnnnnnnnnnnnnnnnnnnnnnnnnnnnnnnnnnnnnnnnnnnnnnnnnnnnnnnnnnnctggggcctctgcttcgggcctcagggcccggcttggcagccggggagggccagaggcccaaggagggcgcgccttggctccacaccaacccccagggcctccccacagtccctgcccagcccctaggccccagcaaatgcccagcccagccaaattgtat

SEQ ID NO: 38436 - DNA, 877 bp, Macaca Mulatta
  misc_feature (1)...(877): n = A,T,C or G
agcgctcgttgtatggagggcgtatgagnaagcgacacaccgtattccgggtgactagtatatttggagttggagagtggcggccgcgctccttggcgccgaagtgggggctatcgtgatatttatcccggaccgtccgggagagatggtcaaggatggtgcgattcagggatgtggggcttgtgtggttctcagtgatgcttcatgggcggtcggggccggtaggccggaatttgctttcatggtttgttgttggctgcgttatgccggccggaacctcgtcgctgggaaagggggagtactgggggggcatgggtttgggcggggccatcgggggtcagctgctcaaggtgggttgggacagtagtggtgcggtcgtccccttgaaccaatataagtccgttttcctgtgggatggcttttcattcgttaaggaaccagctgggtttttcttttgggactgggtagaagaggacatttggctgcatggcgctagcagttggacgtttaaagaggagagattttttgttgtctttccaccaaatcagttttccctcatgtgggctgttctttttaccagtaaagtgttgttctgcagaagtagtggtctgatttcgcaaggctgaccgtggacatactcgggaatctctcgtcgactgtcctcaatgctcatgttcttagcgtaccttcaccctagagaaaggcacccacgttcggcggcagatgaagggggccagcccctgcacacctatgggtagttctcgtcaggcgggatgagagactgagaaaagaaataagacacagagacaaagtctagggaaagaacagtgggcccaggggaccggcactcagcatacggaggacctgtactgacccc

SEQ ID NO: 38437 - DNA, 661 bp, Macaca Mulatta
atgctgtgttaatgttaataaatcagagatacagtcttttgcatagtcaaagtgagcataattataaatatgggaaaaacgttgtgaatgtagaaaagactataaaaatttttactaaaatgttaatattcctttctttgagttgttggattgtgagagttttgttcctgtgtttctttctcccctctaataatggtataggaggagacttcgaggttaagggaacaaagaaaccagactttgaagttaggctgacctgaatgcgagtcttggctctgccacttactggaggtgtaaccttggccaagtaattcaactctaagcttccattttgtcatctgtcaaagggagattataatagagcttatttctgtagtgaggagtatatgaataatgcttttgaagagtcttgcatagtacttagcacataagtactaaacattttacatcaatgtattatttttacatgtattatattacatgtattgttacagtattattttataatgagggaaatataaaataattattaatgaaataaatatagcaagaattaccaaggcagtgcaggctaaattagtgctaaatttcctgatttccagacaattctttatcccaccctcaggatctttttccaaaacttgagtttccttactgtcct

SEQ ID NO: 38438 - DNA, 344 bp, Macaca Mulatta
cagcagctaaatggtgtctcgtgttttaaattcttacttttcaataagtacgtgattaagcttgcaacaagtatctagtggaatggaaaaatatgaagctaaatttaaaggcataactcatcctacctgccttcctgccttcagaaaactaccaccgttaactgtatggcatcttctttttgaaatatttatgtgtacatcgacaattagaagagttttccctcagaactaatagcataatttatatgcaggtatatatgttagtcatttaaaaaatacatttctttgaacatttccacatgagtttaggaagctaagtagatctcttcagtggttatctgttt

SEQ ID NO: 38439 - DNA, 285 bp, Macaca Mulatta
acattttgtaattaccgtttttgttgttttgtagcaaccatttgtaaaacattccaaataattccacagccctgaagcagcaacctcatccctttctcacttttggaaggtgacttttcagcttactgcatattgcactctccacagaggacaggaaaaggtataggcctgccttactgagagccaaacagagcccagggaaagactccactaggggaaacctcattgctctgtacaaagtaccagctgaaccacaaaggtgattccaggaggagttagtcaaat

SEQ ID NO: 38440 - DNA, 1082 bp, Macaca Mulatta
  misc_feature (1)...(1082): n = A,T,C or G
ggggtcttccagaacccctggtccgctccgactctcgcgagagccctactggctataaaggcagcgccccgggcggatttggggcgttttgttcttgcctgttttgttcttccgtggtgttgatctgtgagttgtgttaggactgctaataggaagatgtcttcaggaaatgctaaaattgggcaccctgcccccaacttcaaagccacagccgttatgccagatggtcagtttaaagatatcagcctgtctgactacaaaggaaaatatgttgtgttcttcttttatcctcttgacttcacctttgtgtgccctacggagatcattgctttcagtgatagggcagaagaatttaagaaactcaactgccaagtgattggtgcttctgtggattctcacttctgtcatctagcatggatcaacacacctaagaaacaaggaggactgggacccatgaacattcctttggtatcagacccgaagcgcaccattgctcaggattatggggtcttaaaggctgatgaaggcatttcattcaggggcctctttatcattgatgataagggtattcttcggcagatcactgtaaatgacctccctgttggccgctctgtggatgagactttgagactagttcaggccttccagttcactgacaaacatgggggaagtgtgccctgctggctggaaacctggcagtgataccatcaagcctgatgtcccaaagagcaaagaatattttctccaagcagaaatgagcgcctgaggcctgttttaatgcccaggctgccagtgggccagcccttgagaaccaaacccccttccgtattttttttttttttnnnatgagtaaaacacaagacttcagattcagccgaattgtggtctgttacaaggcaggcctttcctacatgggggtggagagaccagcctttcttcctttggtaggaatggcctgaattggtgttgtgggcaagccactgggtttgtatgatgtatcagtagagccacccgtttaatatttttgtagtttgggattaaaacctgaaactggacaaannnnnnnannnanaaaaaaaaac

SEQ ID NO: 38441 - DNA, 837 bp, Macaca Mulatta
  misc_feature (1)...(837): n = A,T,C or G
gggtatctgatttttgtctgttgcttggtttggggagaaaaaaatttattttctttcctgacttttgctgagttgaccaagactttatagtgccttttcttttcactccagnnnnnnnnnnnnnnnnnnnnnnctgacccatatttctaatctactagtagttaccattaaagtgtttataaagctaattaaattcacaattttcagtaaacatagcaaatttagcaagctcaattataatactcctgttccaagaagaccccatttattataaaattattttctcccagagctcttcctagctcttggattttgttgaaaacatccagaatttacttccaaagtattgctaatggttctttacattattagtcatataattcatttactnnnnnnnnnnnnnnnnnntcaaaaccacggaaaataaaactttgtttaatcaagtaaaaattttctgggtttgagtgctcactccccaatggcctgcttattagccctgctgtgcccttttatttgattggtttatcctgacttggcctctattttttttccgggaaaaaagcaagttgttccggtattccctggacccttgggctttgttccataaatgaccttgtccnaaatgattagggggaatttaatggggaaattccccgacttttaatggtggaataaaatgacccccttattatctattcttaaaagtttacctttttcccctttattccctttggattattttattttttaggcctttcctctcagggagtttaataaaaacctccacccttaccacaggggacctttggttcttgacccggtgtcttttggggagcg

SEQ ID NO: 38442 - DNA, 1153 bp, Macaca Mulatta
  misc_feature (1)...(1153): n = A,T,C or G
tttgtggtcacttaagactttaccagacaataacgtgtcatttttgcctttgaggtgtttttctttctacctcgattccagccacagtcctatcctggcagtgagcaaatcccacacgcagttctgagcaggacgctgaggctcaggtgcaacatggggcagccaggaagatgcctgaggcggtgccccgcacacaggaggcaccgggacagactggccgggcggcaggctgcagcaacgttcaagcgtccacttccagacacagcccctccatctcacaggacagagacagggccggctcagcggctggtacacactgnnnnnnnnnnnnnnnnnnnnnnnnnnnnnagttcacctgcagctgcagtacacacataccactttatttggctagctgctgttcagaagacacttcctgaattcaggaaaaatttttttaaagacctgagaacaattcctgtgacttcttagctttgaagtgcatttactttgacattgatgtagcttgtaactacttttggaatttttttcctgtaacacgttgatctcattaagggtatcatgcgttttccaccagaaaatgcagaggnnnnnnnnnnnnnnnnnnnnnnnnnnnnnnnnnnnnnnnnnnnnnnnnnnnnnnnnnnnnaaacatttacatgattaaattcaaagccttatccatctggtggtaagaaataaaatgttaacttattttaaaagatgtatttnnnnnnnnnnnnnnnnnnnnnnnnnnnnnnnnnnnnnnnnnnnnnnnnnnnnnnnnnnnnnnnnnnnnnnnnnnnnnnnnnnnnnnnnnnnnnnnnnnnnnnnnnnnnnnnnnnnnnnnnnnnnnnnnnnnnnnnnnnnnnnnnnnnnnnnnnnnnnnnnnnnnnnnnnnnnnnnnnnnnnnnnnnnnnnngcccgtttgcgaatggccgcagcaggcctgtgggtctggggacagcgccaaggagctggcgttgattcctgagatgctcctgctctgccgtgttctaaggacgtgggagcggagctcttctcagggggaaaaagaaaacggtggcgggggcctccgtgttggcgggtcaagccagataaccaggcttgtactggtttcagcggaagccacgctgtttcctccttccccctc

SEQ ID NO: 38443 - DNA, 795 bp, Macaca Mulatta
  misc_feature (1)...(795): n = A,T,C or G
tctgtctgctgtgcctactgggtgggagccctggttcccatctgggaaagtcctccttgtaggtgccctgcctggcnccgcccatgctcaagggccccaggcacgtgggttgttttctcactgggcttcctgtggccccagaggagcccactgtgtgagtgctgagctccaggtggcgccgggccccaattgtggctccacacagggttgtctgggaggatgggacagtgtctctggccagcactggcagcttctgtgccttgcaccccactctgcccagcatgagcctcatggggggttggtccctgtgcctggaagctgggcggtgtccagggtctgcaggctggggctccggctttgggagttgtttcactgtgcttgtttccagcatgtctcagggtggggttgtgcgtggtttagaggggtctgggacattggatcaggtggcatgtgggtttctgtgcatggaggagcacacagggctgagccaccaggtatcccatgctggaggcttgtggaaggctgtgcccattgtccatgtttccccacctctgttcctcctcagagccctccaggagcatggggtagggccagctcagggctcaagagccagcagggcagagttctgcatgtgtgtgctgggtttcggcactgcatgtgtttgcagtgagagtgacttgctgtcagtcgtggggtgcagcctcctgttcacccactggcttccccctacgcactgaagtgtgagctccatgtttcagggcgtttattaaagagtgagccacaagcagccccttg

SEQ ID NO: 38444 - DNA, 823 bp, Macaca Mulatta
  misc_feature (1)...(823): n = A,T,C or G
gggaacaacacacactggggccttttggtggggagtgaggggagggagagcatcaggacaaataggtaatacatgtggggcttaaaacaagtgatgggttgataggtgcagcaaaccaccatggcacatgtatacctgtgtaacaaacctgcccgttctgcacatgtatcctggaacttaaaggaaaaaaataagtaaataaggtcagttcaccaagaaaacataggaatcccaaatgtgtgtatacctaacaactgagcttcaaaatagttgaaataaagacttacagaaataaaaggaaaaatagacaaatctaaaattatatttggaggctttttactcttttttttttgtaataaatagaactaatagatagaacatcagcaaggatatagaagtgcaccatcaaatggactagatatgattgatacttatcgaacattctatccaacagcagaatacacacttttttcaactgcctatagaacattcaccaagatggaccatattttgagtcataacacanacctgaacaaaatttaaaggaatgcaataattaaatgtatgttctctcactatgctgtaatttcactagaaataataacagaaaaatagcagaaaagtcttcaaactcttagattaaagttaagcaccaacccttataaataatcaatggggtcaaaaagggaagtctcaaggggaaaattttgaaaatatttttggaacctgaaccgaaaaatgaaaaattatggggtaattccaaaattttgttggggaatataagccttaaaagccattgcctttaaaagaagaactttttttc

SEQ ID NO: 38445 - DNA, 310 bp, Macaca Mulatta
atggaaacaagtcatgctcatgaaaacaattgtaaaataaaaggttatggagtagttctgcaacttcttcacagccagctttgtgaagctggggaggatttagggcccattggagtctcatgtgtacagcttcagggctatccctttcagtttgattttaagcagtgcctcacttcatagtttagccagtgaggattcgatttaggtaggttgtgtaaaggaactaatgggacctctcagtgaatcagctgaccagatattaggaaatctttttaatttctatgatttcccttcttatattttgaaatgg

SEQ ID NO: 38446 - DNA, 405 bp, Macaca Mulatta
atgggaaccaggctcctctgttatgtggccttttgtttcctggctgtaggcctcgtggatgtgaaagtaacccagagctcaagatatctaatcaaaaggacaggagagaaagtttttctggaatgtgtccaggatatggaccatgaaagaatgttctggtatcgacaagacccaggtctggggctacggctgatctatttctcatatgatgttaaactgaacgaaaaaggagatattcctgaggggtacagtgtctctagagagaagaaggagcgcttctccctgattctggggtccgccagcaccaaccagacatctatgtacctctgtgccagcagcggacagggaggaaccgcgcagctgttctttggagaaggctctaggttgaccgtgctggaggacctg

SEQ ID NO: 38447 - DNA, 1075 bp, Macaca Mulatta
  misc_feature (1)...(1075): n = A,T,C or G
catgtgcctcagagcccgtcccaagaactagcagtagtcctggactcgaggtctgtcaaaatcagtcaactgaagaacaccatcaaatctttgnnnnnnnnnnnnnnnnnnnnnnnnnnnnnnnnnnnnnnnnnnnnnnnnnnnnnnnnnnnnnnnnnnnnnnnnnnnnnnnnnnnnnnnnnnnnnnnnnnnnnnnnnnnnnnnnnnnnnnnnnnnnnnnnnnnnnnnnnnnnnnnnnnnnnnnnnnnnnnnnnnnnnnnnnnnnnnnnnnnnnnnnnnnnnnnnnnnnnnnnnnnnnnnnnnnnnnnnnnnnnnnnnnnnnnnnnnnnnnnnnnnnnnnnnnnnnnnnnnnnnnnnnnnnnnnnnnnnnnnnnttctcgagcctcagtaaagcacttattgagtggcagttagagcagtccatacaggagnnnnnnnnnnnnnnnnnnnnnnnnnnnagttgaaggagtcgcttaaacaagtccagctagagagagatgaatatgctcaacatataaaaggagagcagtggcagcagaggatgaggaaaatgtcacaggaggtnnnnnnnnnnnnnnnnnnnnnnnnnnnnnnnnnnnnnnnnnnnnnnnnnnnnnnnnnnnnnnnnnnnnnnnnnnnnnnnnnnnnnnnnnnnnnnnnnnnnnnnnnnncccagcagtgccctttgaggtggagctgcagcacctgaggaaggaactagagcttattgtcagcagagctccaggcccaggtggaaaaccatcagcacttaagtctcctggaccaggcacaaaaggagaggcttcagaggcagtaggagaggcttcaggagcagcaagagaggcttcgaaagcaggaggagagaattcagcagctagccgagccacagagcggcgttgaggagctgnnnncgagaacaagagcgcactgcacttggagcagcaagtcgaagagctgcaggagaagctgcgtgaggtggagacagtaacctcaacccagaaggagccagaggcagcggtcccagccccagggactgggggcgagtctnagcggccttatggatctcctggaggag

SEQ ID NO: 38448 - DNA, 813 bp, Macaca Mulatta
  misc_feature (1)...(813): n = A,T,C or G
ggcagattcataatcaggagtgatgggaaattgtttgcacgtacctctaatatcactagcatttaattttaacctaacaaaattctaacacgaagtcttgaacttttgtgttcagaataaatgtgatctctagttgtgatctacttgttttgtttctaaagattttgtttgaacatatattaactataatgaaataaaagccaagaatagcttgaagagggggaaaaaagaacttaggatcaaggtttcaaaatattatggaaaggaaataatcaaatgcaatactttgcttttatgttgaccttctcattctggttcctcaccctccacactgtgtgaaatgttctaaagcctgtggccattggtgacctgccaggcaggaggtcacaattcccaggcagatgcggcagtcctgtgtaccattgatgggattcagtaaaaaaggacaaagcctagatagcctccagaacaattttattgaatataattgttctccagnaggaaagattaatttgaaatctccgtaattttgaatttccaaagtgacttcacattgttgaaaagaacatgaacttttggaatcagacagatagcccggccatggggagggagtttgccatccattataatttatcccaagttaatttagttgtaaactcctgccagaaagggttccttcagtttgttggatttttggagatttttgccggatgaaattggggacaaccatttgaaaaaatggggaggcaaaggttttttatacccccacgaaaaaggttaatcccctgggtcctttccctgcccaaacctatt

SEQ ID NO: 38449 - DNA, 266 bp, Macaca Mulatta
ggtcacacaaggcgctcttctgtctttgattttgagaatcccctattttcacttccagatctgtcagctgccatggaggaataatagaaaagcagaaatgtgtgtacagggcagatttctaaaacttcccttgtgtcgcccatagttgtagttttgggttctggcaggtggaacaccctgaaaactggaatcattctggtgagaatacagttcatactttggcagactccaaaccataataactggcatgaaacttggaacttctt

SEQ ID NO: 38450 - DNA, 851 bp, Macaca Mulatta
  misc_feature (1)...(851): n = A,T,C or G
ggggacacaaacttgccctaggcatcctggttaagtcttcaggtctctcaggcagtggacagggccatagagcttccgaaagattgtgacctttgtctttggctaccagggtaggtagagaaagaccaccaggtgggggcagggttagggatgtctgaactcagcctctctttgggtgaggcttgctgtggctgctgtgggggatgggggtgtnattncnnnnnnnntnnnnttntnttcctggaaggattntggntgnctnntgccggtttttctggttgcgtgggtggtggggacncggccgcggtcccnggcctcgccctgctctcccccggcctgcgggtcctgnggactggtctcgcttccgctgtgttccccgggccccccccgagtcgatttttcgggcgactgggagagcaggactggagaacttggccccagaagccatgagcctccccccttaagggaagccactgggacccgacgggtgtttgcagcggtcttctggggagagcccacagtgggggggattcggttccccctcaaacgggacacgacggaatttctcttcgggcttttggcaggcggaggcttccgggggagtgttatgattggcgacaagcgagttccagtgggtggtgaactccccccgggaggccgtgttactcgaacaactggcagaaccgagcagatgggaaaggagaagaaactaggcaccagccgtgcgggccgaactgcggagatccggggagaagtgctcgcgggacgctgaaaaaacaaaccggccagacaggcggatgaaggaataacgccgcgggggcacggcgagcgactcaaccgcagcgccccac

SEQ ID NO: 38451 - DNA, 674 bp, Macaca Mulatta
  misc_feature (1)...(674): n = A,T,C or G
gggatccatccaaacaggactgcctgttcgcagcgtggattttaaccgaggcacggacaacatcaccgtgaggcagggggacacagccatcctcaggtgcgttgtagaagacaagaactcaaaggtggcctggttgaaccgttctggcatcatttttgctggacatgacaagtggtctctggacccacgggttgagctggagaaacgccattctctggaatacagcctccgaatccagaaggtggatgtctatgatgagggttcctacacttgctcagttcagacacagcatgagcccaagacctcccaagtttacttgatcgtacaagtcccaccaaagatctccaacatctcctcggatgtcactgtgaatgagggcagcaatgtgactctggtctgcatggccaatggccgtcctgaacctgttatcacctggagacaccttacaccaactggaagggaatttgaaggagaagaagaatacctggagatcctcggcatcaccagggagcagtcaggcaaatatgagtgncaagctgccaacgaggtctcctcagcggatgtcaaacaagtcaaggtgactgtgagaactatcctccactatcacagaatccagagcatgaagcaccacagacgaacagctccctcaatgtgagcctcgcatgctgcacgaa

SEQ ID NO: 38452 - DNA, 650 bp, Macaca Mulatta
  misc_feature (1)...(650): n = A,T,C or G
gggggcactggcctgtccgcggccggtggaccatggaggccccaaggtccttcgcccgggagtggagcgcacaatccctccccctggcagtagggggcgttttgaagctgcggctctgtgagctgtggctactgctactaggttctagtttgaacgcgacatttttgccacacgaagaggacgtagactttatcaacgagtacgtgaacctccacaatgagctgcggggcgacgtcattccccgagggtctaacttgcgcttcatgacttgggatgtagctttatcacggactgctagagcatggggaaaaagatgtgtgtttgagcataatatttatttagaagatgtacaaatggtccatcctaaattttatggtattggtgaaaatatgtgggtcggccctgaaaatgaatttactgcaagtattgctatcagaagttggcatgcagagaagaaaatgtacaattttgaaaatggcagttgctctggagactgttctaattatgttcagcttgtttgggacaactcttacaaagttggttgtgctgttactccatgttcaagaattggacatattatacatgcagcaattttcatatgcaactatgcaccangagggaacgctgacagaagacttatgaaccangaa

SEQ ID NO: 38453 - DNA, 1147 bp, Macaca Mulatta
cgggtcttgctgtttctgggccgggtcttgctgtttctggccagcatattctcttttacacgtccgggagccgctgctgagccccacagtcttcgttacaatgtcacggtgctgtcccgggatggatctgtgcagtcagagtttctcgctgagggacatctggatggtcagctcttcgtgcgctatgacagggagacgcgcagggcaaggccccagggacagtgggcagaagcagtcctgggagctaagacctgggacacagagactggggacttgacagagaatgggaaggacctcaggaggaccctgactcatattgagggccagaaaggaggtttgcattccctccaggagattaagatctgtgagatctatgaagacggcagcaccgggggcttctggcatttctactacgatggcgagcgcttcctctccctaaacctggagactcaggaatggacagtggcccagtcctccagagctcagaccttggctatgaatttctggaaggaagataccatgaagaccaacacacactatcgcgctatgcgggcagactgcctgaagaaactacggcgatatcagaaatccagggtggccgtcaggagaacagtgccccccatggtgaacgtcacccacggcgaggcctcagagggcaacatcaccgtgacatgcagggcttccggcttctatcctgggaatatcgcactgacctggcgtcaggatggggtgtctttgagccatgacgcccagcagtgggggggtgtcctgcctgatcggaatggaacctactagacctgggtggccaccaggattcgccaaggagaggagcagaggttcgcctgctacatggaacacagcgggaatcacagcactcaccctgtgccctctgggaaggtgctggtgtttcagagtgaatggctagacattctgtatgttcttgttgctgttgctgttgctgttgttacagcatttgttattattctgtgtgtcatcgttgttgtaagaagaaaacatcagctgcagagggtccagagctcgtgagcctgcggaccctggatcaacacccggttgggacgggagaccacagggatgccacatagctcggatttcagcctctgatgtcagctcctgggtccactggctc

SEQ ID NO: 38454 - DNA, 137 bp, Macaca Mulatta
  misc_feature (1)...(137): n = A,T,C or G
accacagaagcttttgcagtgttgngtgccnnaatggttctcttgtcagaggagttacgtcttacgagatcctctaagcacatttacgaaaggagaggaacttgaccacanaanactgtgtttgatacatttgagca

SEQ ID NO: 38455 - DNA, 778 bp, Macaca Mulatta
  misc_feature (1)...(778): n = A,T,C or G
ggaatctataggctatgggaatcctagtaaattttcatatatttgaaaaaatcttcatgacatttcaataacaataagctttagatcacaaaaataagaagaaaattagaaaattgcaaacacctctaaatattcagcttaattctataatactacagtgctgcttttgttcttcatgagaagaacttaagttttctccctagagcaagggtgtctaatcttttggcttccctgggccacactggagaaagaagaatggtttcacgccacacataaaacacactaacactaatgatagctgattagnnnnnnnnnnnnnnnnnnnnnnnnnnnnntgcaaaaaatcttataatgttttaagaaagtgtaccaatttgtattgggctgcattcaaagccatcctgggccacatgtggcccagtccgtggggcgtgggttgtacaacttgccctagagcatatttttatttatttaaaaagttagggctgggcacgnnnnnnnnnnnnnnnnnnnnnnnnnnnnnnnnnnnnnnnnngcttgaggtcagaagatcgagaccagcnnnnnnnnnnnnnnnnnnnaccctttctctaccaacccaaaaaattagcccggatatggtgggtggtgcatctgtaatccccagccaccctgttgaagcctgagggcaaaaagaaatcccccttgaaccctggggagggcaaaaggcctgccattgaaccccaaaatataaaccccatctggccacttcctagccctgtggggcaaaagaaaaaat

SEQ ID NO: 38456 - DNA, 811 bp, Macaca Mulatta
  misc_feature (1)...(811): n = A,T,C or G
ggattgtggaaaatattccaaaaccatgtctaagcaatgataaaccagtgttctggcagggaaaaaactgatgtttgttgtgttttgtatctgtcttcctgttccaaatcatttatatatacttgatggtctatggaattgacttgcaagtattttcctgggaggcatttttattccaaagacctgtattgcctgccaaaccttcatttaagaaactcattatggatgtcatctgcatcattgcaaactgtttctggtcatctctttaaatagcaagataatatttacagaggtttacattggctcttgaatattacaatattctcatagacaaacattaattggaatggaggtaaggtggtaggaattgcttacttgcggaaatgcaggctcattgttgtgtctagcaggtgctaggtgcattcacacatctcttaagctttaaacaacctattgagccggttcccacttccttgatctattagatcaaagaaaatgaggcttaaaggagttggctcttgccataagtcacactactgatggaatgagaatacaaaccaaaaacactttattcaagtccaggaaatatctgccnttgaaaagggtaacttaaaaattcaaagtatccccaatttgaatatgaaaacagttaataaagatacgtgggtttttattttattattatttatcttgccctcccatattggcaaagattgaagcaattgnaagaaatgacattgttgttcactactggcaagagtgaaaattggtagaaccttttgtaaaagcaatttggcaactatatccaaaa

SEQ ID NO: 38457 - DNA, 646 bp, Macaca Mulatta
ggcaaaggcatctgaatgtgtctgcatccctattagcataatgtgaggaggtggagagactgcccacccccgggtccaccgtgacccctgttcccacactgacctgtgttccctccccagttacccttcctgttccagagagttggggctggatgtctccatctctgtctcaacttcatggtacacagagctgcaacctcttacttccctactaaaaataagaatctgaatagaaatttgttttctcaaatatttgccatgagaagatgatgggttaattaaataagtcaattcctagaacttgagagaggaaataaagacctgagaaccttccagaatctacatgttcgctgttctgagtctgttgcaggtgggagtggagaaggctatgaggagccgagtgtggaggggcctgtgcccagttgctgttcaatccactgtgggctttatgtggtcagtcctcagctgggtgaccttcactgttccattgttcttgtcccttcagtggaaacttgtccagcagaactgtgaccacagagcctcacacatcaccagggcgactcctgcacacagaggctctgtgcattctgtgacaagttttcagacccattcagctcctgccctccttctagggctccccttctgc

SEQ ID NO: 38458 - DNA, 422 bp, Macaca Mulatta
tgatgacatacaagtgtgtagtggttgatgtgccgtttgggggtgctaaagctggtgttaagatcaatcccaagagctatactgatgtgaattggaaaagatcacaaggaggttcaccatggagctagcaaagaagggctttattggtcctggaattgatgtgcctgccccagacatgagcacaggtgagcgggagatgtcctggatcgctgatacctatgccagcaccatagggcactatgatattaatgcacatgcctgtgttactggtaaacccatcagccaagggggcatccatggacgcatctctgctactggccgtggtgtcttccatgggattgaaaacttcatcaatgaagcttcttacatgagcattttaggaatgacaccagggtttggagataaaacatttgttgttcagg

SEQ ID NO: 38459 - DNA, 180 bp, Macaca Mulatta
gtctttctgggtcaatagactgccctggacagtctacaagcctcagcccactgaccatacctcagccccctagtccctggggggcagctttagtctgggcatgtttcctgggtaccagtggggccaggaggtggctctggttcagagccgtcagtgtggctgaataaagcctctgttggg

SEQ ID NO: 38460 - DNA, 596 bp, Macaca Mulatta
  misc_feature (1)...(596): n = A,T,C or G
gggctgctgcatgtttatcttgcctatgctgctgtatcttattccttccactgttcagaagtctaatatgggaagccatatgtcagtggtaaagtgaagcaaattgttctaccaagacctcattcttcatgtcattaagcaataggttgcagcaaacaaggaagagcttcttgctttttattcttccaaccttaattgaacactctatgatgaaaagcccgactgtacaaacacgttgcaagctgcttaaatctgtttaaaatatatggttagagttttctaaggaaatataaatactgtaaaaagttcattttattttatttttcagccttttgtacataaaatgagaaattaaaagtatcttcaggtggatttcacagtcactattgttagtttctgttcctagcacttttaaattgaagcacttcacaaaataagaagcaaggactaggatgcagtgtaggtttctgcttttttattagtactgtaaacttgcacacgtttcaatgtgaaacaaatctcaaactgagttcaatgtttatttgctttcaatagtaatgccttatcattgaaagaggcttanagaaaaaaatcag

SEQ ID NO: 38461 - DNA, 717 bp, Macaca Mulatta
caccccggcgaatgtagatgactgcaccagccacctcagggagctgcctgggctccgtgtctctgagccccaggtggcaggacccaccggcacctcttgcttcctctgtcatatggctcctctgtcaccagccccagtgtgcacagaagaattggaccaggtcactgtatgtagaaatttgtagaaaagcagacttagataaacatctcctttggatatttatttccgcttttggcagcaggtgaacatttatttttaaaacttctatttaaaaaaagagtccaaaaacatcagcactaaggtttgatgtcatgtgaaaagtgtaataatacagttaagatttcattatcattttcactggacctttcctgatgttttagagttcttagtgtggctttttccatttacttaagtgattctttgttactcactaactctgcaaacctgtggaataatgaagtaccttcctggaaagtttagattattttttaaacaaaaacaagggagatacatgtattctcaggtacaaacagagctgagagggctggacggttttctgccgtagcagctgagagggctcccatcatggaaagatttctccaggaaaagtaagaatgtagccagctccccactcaggacgcttcctcatttctcttcacccaaaccaaacagagacagcttccagcatcttcttcagtgttgccatctctaagaagg

SEQ ID NO: 38462 - DNA, 686 bp, Macaca Mulatta
agctcctgggtggcagggttgggggtgtctctgcaccctggaggaccctcacccgtagagaactctgataggctgacactggcctgggagggcccctgggtccatagctggggccccggggagtatctcctcaggccacaaccctccatccagattttgggtccagcaggggccttccaggtgccctgggtgggggtggggaatggcccccaggccccaaggacacaaagccatctggccctgcggtctctctgcaggcccgagatcagaaggtggttggcgacctggaagcggcgcggcgttttggctccaaggccaagtgctacaacatcctggccgcgatgtggacgctggtgccgcccctgctgctcctggggctggtggtgactggtgccatgcacctggcccggctggccaaggactctgccgccttcttcagcaccaaatttgacgatggggactatgactgacaggctgggtcctgatctgggtcctgtcccagccccaggacactgaccccaggctgctgcccctggggctcaatactgactccccggagcccggccctccttctgtggggcctccatccctgccccatcctgaacctggggccctccagccccaacatgggcacctaacgctgacccagtcagaccccagggtcctcaccctaacctgagggttcc

SEQ ID NO: 38463 - DNA, 318 bp, Macaca Mulatta
gtatatctgttgtctaggagacaaatttattctcaggaaattttaagtagtattatgcttcctaaactgaagtattgtttttctctcctctcacccattcttactctattttaccctagtttatctattttatgtgttttaacctattttatcattaacccaaatcccaattttcagtaggcagcagcgtgacccatcagatttccacagcggcaggatgatttgggttgaacttgcagggcttgagcgagtggcagtgggtattaagtcactgaggaaattaattttcatttcaggagctcggacagcagttctgat

SEQ ID NO: 38464 - DNA, 1944 bp, Macaca Mulatta
tgagggcagacgtgtttatttgaagaggagagagctacattgaaatgataaaaaaatttataagtttcactgctgccaagggctgaaagatagtctgaggggaggtggaacagcatgagggaagatggaacagcacgtgtctaagtgctgtgttaacagggagtctcttgtatgtttggaattgtgagttcctcagtgtgatcacagcctccagtaggactaggaagtaagccagtaggttggagaggtgggcaggggtcaagtgaagtggagaattgtgggctaagcaaaggagtgtgttttctctgcagcaggcagtggggaccttagacatttgtaagcaagagagaggcacgttcagattcgtggtgtgaggaagagcgatgctctaagatgcagactcacaccttcagattcctgcggctggtacattggagctgtgaagccggttttgagacagggctgttgtctccctagaagaccccttcaaggcctgacggtggtgctcatggatagaagacaactttcgatctgggctcagcatttggaagttccgtgtacacgctggtatctgttgggggtgtcttgggcctctgagaagggcgagtgatttttccctgtgtgagaacgcggtgatccaactgtgcgtatgtcacctcctgagggtcttgttcttcagagtcctccctgttcactgttctgtcccccgcaggctcttggtccattacagcagcattctttttgttggagcaccagcgatgcaggagaaagaagaagatggtgaagaggatcatggccactgaggtcccaatcagaacatgcaggtgtctggggttactggttttggagcttggttcagtgggtgaaggccaactacgtgaagggtttcctgtaacggaaacggacagtgggtcactcgggtctgaccactcatagggagagtcacggtaagagccgaagcatctgtaggtccctccgtgggtggcagggcccagaaggaagttggcctggaaagttccattgacacttgacactgcagggagcctaagttcattggcctccccctccctggatagatggtacatgtcaaacgaggtctgggagctgcaggacaaggtcacgttctctcctgcctgcactgtggggcccggctgggctgagagagaaggtttctcatatagacctgtgatcacgatgtccagggggtcactgggagctgacaacacatagggggagtgagtggcagaaccgtagcatctgtaggtctctgcaaggtcagacgtcgtggaattgatggaatagttgacctgggaacccccaccatggcgctctccaacaaggtgcaagggctcctcaaacgtcacctcacggtgcagaaagaagtgctcaaacacggtatctgacgaacattgtagggtgaccgtctctcctgatttcaccaggggacctgggagggccaggagggaaggttttctgtggactcctgtgaccatgatcgccagggggtcactgagtgccgaccactcagtgggggagtgcgggtatgaaccccgacatctgtaggtccctgcgtctgccggggtcacagggcccatgaggaagctctcctggaatattctgccggggaagatgggaacgtggcttctgtcgtctttgtacagagtgaagttggtaaagttgtaaagcccacgacgatagtgacaccgaagagtcacgtgtcctccctgaggcaccagagcgctgggccgggcagacagggaggtcttgtcctgaccacccgtgtgtggacaagtcgtctggatcaagaagaacccaacacacgccacgctgacgaccatgagcgacatggtgctgccggtgcagaaaggtggccgcgtcccagctctgctcagcagcgcacaggatgttatctggcgccctgcccatgcagttgacgtgctgacc

SEQ ID NO: 38465 - DNA, 796 bp, Macaca Mulatta
  misc_feature (1)...(796): n = A,T,C or G
aggaagagcagtcccttagaaatccagcagcagcaactccggctgcccacaatcagattcagcacctggtccagatctccacgcccgtctcagctgcgcgtctcctgctgcctctcgggcaccagtgtcattaacgagctggcgaagatgggcgacccgaatctcctcgaagtgttgactgaggaaggnnnnnnnnnnnnnnnnnnnnnnnnnnnnnnnnnnnnnnnnnnnnnnnnnnnnnnnnnnnnnnnnnnnnnnnnnnnnnnnnnnnnnnnnnnnnnnnnnnnnnnnnnnnnnnnnnnnnnnnnnnnnnnnnnnnnnnnnnnnnnnnnnnnnnnnnnnnnnnnnnnnnnnnnnnnnnnnnnnnnnnnnnnnnnnnnnnnnnnnnnnnnnnnnnnnnnnnnnnnnnnnnnnnnnnnnnnnnnnnnnnnnnnnnnnnnnnnnnnnnnnnnnnnnnnnnnnnnnnnnnnnnnnnnnnnnnnnnnnnnnnnnnnnnnnnnnnnnnnnnnggactctgaagatggaagaacttattttgtcaagatccatgccccttgggaggtattagttacctatgctgaagtcttgggaatcaaaaatcctattaaggagagtgatattccccgacctaagcaaactcctatgagctatgtgcttgggcctgtgagcctcccaacgagtgtgaagtatccccatcctgaatactttactgcccaattcagcagacatcggcaggagctcttcctcatcgaagatcaggcaaccttctttccatcctcgtcaagaaacagaattg

SEQ ID NO: 38466 - DNA, 828 bp, Macaca Mulatta
tttacccattttacaatgttccggtgggtccacattttaaaacgtttttaaaacctacaaaagtggaggaaccttaaggattacaaaggatcggattctggcttcaatttaaataccacgataggggcagcccaaatgcacatcataaccattaacttttcaaaaaaaggtttgctagaaactgctcctatatttagtgtaaaaaataaaacaatctccccatttagaaaaatcaagacatcagtcaattagtaaagcctattcttcctcccagcaatttgtactttcttgtattcatttaggagttgtgaattcatgagaaaagaacacattttttacggtataaatatcttccaggaacaacagtttacaagtttaaataaacacaactattttccttcttaaaatgtaaacatccagtaaataaaacatacatgatgttccaggtatagaaatattagtaactcacttatgaaacaggtgcattttggtatatttggtggtaaggtttttgtttgtcttatgtataaaagtacttgcacaaaaaaaacaggctattactatttaaaactctattccttcacccagtttcctcactcaagtagaaactcatgaatttctgtgattttcgctagaggaccaggccacaggaaagagctaaaacatctctaattagagttagggaaaagcgttttcttgagacttgaaggcagtcattcgtccctttgcgcttgaaggcgttcctcagcgaacttctctcctagagtcttcagagtaaagcacaggatctgggctcccggaaggggttacttccagctggaacacccc

SEQ ID NO: 38467 - DNA, 851 bp, Macaca Mulatta
cacgatggatcaacttctcggtgaaccggaaaatggccaaatctttgcagtagagatatattttcttataagatcttgttgtaggcaaataattcataaattatttgtcagagaatctttaaatgctcataatctcaactctttcatttacaacttgtatttccaatagtttatggatcatctctacatagatgtcaaaagtcacctcaagtttagtgtgtccaaaattgaactcacaggtctgtctctgacctcccaacttgctttccttctgtttttcctatgctaatgatccaccataatcaaaataattaacatttatccagtgcctactatgtactattccctgtcttgttttacatttactcatttaaagcccataagaaacattaaaactcatctgccttctgaagaagatacaaccatcctcctttttacaaagtaggaaaccaagtcacagaaaggtgaagtctttaaggctgagtcacagtagttcatcctagtaaatagaaaagccaggattcaactccaggggctgggtgcagaactgcgattcttcactgcttcaccaatcagcagctacccaaggcagacaactttttcatccttggctccttcattctccctgtcaccccagatccctctacatctagtcagagaataggtcctgtcacttccaacttctctatatggctcttctcagccatgtgccctcaatcggtctaattctctaacacaccttccctctatatgctcactccctcagatcgttgctttatcacgtgttacctgggttgctattacataaagagaaatctttctaaaacaaggatcttatcacttcacttcca

SEQ ID NO: 38468 - DNA, 788 bp, Macaca Mulatta
  misc_feature (1)...(788): n = A,T,C or G
ggnnnnnnnnnnnnnnnnnnnnnnnnnnnnnnnnnnnnnnnnnnnnnnnnnnnnnnnnnnnnnnnnnnnnnnnnnnagcannnnnnnnnnnnnnnnnnnnnnnnnnnnnnnnnnnnnnnnnncccgccaccacaccccactaattttatgtatttttaatannnnnnnnnnnnncnnnnnnnnnnnnnnnnnnnnnnnnnnnnctcgcaaactctcgacctcaggtgatccaccttggcctcccgaagtgtcnnnnnnnnnnnnnnnnnnnnntgcacctggcttaatgttagcattcttaatgaagacttaaagtacatgagccatgatttttttggtcaaccaatcagtagttacttatcagtatctactcagtgcaaagcacctttctagggattctggagaaataaagagattataatttagggaaagagataaattaaaaggttaattttaaaaatgataactgcacaattgaaaagatgtcacaagccaagaacaatggcacaaatggtagtgctaaagaagttcttggtcatggtgccacgtgcctgtaaccccagttacttgagaggctgtggcaagagggttgtttgaaccaaggtgttcaagactagcaacatagcaagtnnnnnnnnnnnnnnnnnnnnnnnnnnnnnnnnnnnnnnnnnnnnnatttcaaatccctagctnnnnnnnnnnnnnnnnnnnagaaagtcacttagaactggcattatttctacaaaaagcattaattatggctaaaacttttctttatgcccctcctt

SEQ ID NO: 38469 - DNA, 1247 bp, Macaca Mulatta
gatcagttacgagtcggctttacgtgacaagagagaaaaagcttgctgtggcactttctggactagttgaagaaaaatgtttactacttgaaaaatgcagccttgttcaaaaagagtatgaagcctatgaagtagagtcatctttacaggatgccagctttgagaaagcgacgacagaagcacaaagtctggaggcaacctgtgaaaagctgaacaggttcaattctgaacttcagcatgatatactctgtctagagaaagagttaaaagaagagaaatctaattattctgaacaaaatgaattgatggcagatatttccaaaaggatacagtcgctagaagatgagtcaaaatccctcaaatcacaagtagctgaagccaaaatgacttttaagagatttcaaatgaatgaaggacgactgcagatagaaatacaagatgctttgaaatgaaaattatcaatttcaggaaaaccagaaacagcttttgcaagaagctgaagtatggaaagaacaagggcgtgaacttattaaacagaaaagaacatttgaagactccaaagtacacgcagaacaagttgtaaatgataaagaaaatcacatcaggactctgactgaacgcttgttaaagatgaaagatcagactgctacgcttcgagaagacataacggttgatgataacttggaattagaaatgaacaatgaatcggaagatggtgcttacttagataatcctccaagaggagctttgaagaaactgattcatgctgctacgttatgtgcttctttaaaaaccttagaaggagaaagaaaccaaatttatattcaattatctgaagttgataaaacaaaggaagagcttacagagcatattaaaaatcttcagactgaacaagcatctttgcagtccgaaagcacacattttgaaagtgagaatcagaaacttcaacagaaacttaaagtaatgactgaattgtgtcaagaaaatgaaacgaaactctacaggaaattaatagtagaggaaaaatgccggttagagaaagaagagaaactttctaaagcagatgaaataatcagccatgccactgaagagctgaagacctacagaaagcgagccaaagatctaaagaatttgagaaaactattcctttttatcaaaggaagactatttcccatgaggaaaaagcacgtcataattggttggcagctcgggctgctgaaagaaacctcagcaatttaaggaaagaa

SEQ ID NO: 38470 - DNA, 1708 bp, Macaca Mulatta
  misc_feature (1)...(1708): n = A,T,C or G
gctacactcggatgctgacccaccggagttcagacggcacctaccacacctccaaggggagcccaggaagcacnnggctcacaagctatgtgttccgtgtctttgccctggcctactctacaatgacgacccaagtgcttagcctgtcctctctctgtgacatggccaactggatcatcaccaacaggcaggcggaggacgggcacttcctggaggagggtcccgtggtcatgacatccatgcnnnnnnnnnnnnnnnnnnnnnnnnnnnnnnnnnnnnnnnnnnnnnnnnnnnnnnnnnnnnnnnnnnnnnnnnnnnnnnnnnnnnnnnnnnnnnnnnnnnnnnnnnnnnnnnnnnnnnnnnnnnnnnnnnnnnnnnnnnnnnnnnnnnnnnnnnnnnnnnnnnnnnnnnnnnnnnnnnnnnnnnnnnnnnnnnnnnnnnnnnnnnnnnnnnnnnnnnnnnnnnnnnnnnnnnnnnnnnnnnnnnnnnnnnnnnnnnnnnnnnnnnnnnnnnnnnnnnnnnnnnnnnnnnnnnnnnnnnnnnnnnnnnnnnnnnnnnnnnnnnnnnnnnnnnnnnnnnnnnnnnnnnnnnnnnnnnnnnnnnnnnnnnnnnnnnnnnnnnnnnnnnnnnnnnnnnnnnnnnnnnnnnnnnnnnnnnnnnnnnnnnnnnnnnnnnnnnnnnnnnnnnnnnnnnnnnnnnnnnnnnnnnnnnnnnnnnnnnnnnnnnnnnnnnnnnnnnnnnnnnnnnnnnnnnnnnnnnnnnnnnnnnnnnnnnnnnnnnnnnnnnnnnnnnnnnnnnnnnnnnnnnnnnnnnnnnnnnnnnnnnnnnnnnnnnnnnnnnnnnnnnnnnnnnnnnnnnnnnnnnnnnnnnnnnnnnnnnnnnnnnnnnnnnnnnnnnnnnnnnnnnnnnnnnnnnnnnnnnnnnnnnnnnnnnnnnnnnnnnnnnnnnnnnnnnnnnnnnnnnnnnnnnnnnnnnnnnnnnnnnnnnnnnnnnnnnnnnnnnnnnnnnnnnnnnnnnnnnnnnnnnnnnnnnnnnnnnnnnnnnnnnnnnnnnnnnnnnnnnnnnnnnnnnnnnnnnnnnnnnnnnnnnnnnnnnnnnnnnnnnnnnnnnnnnnnnnnnnnnnnnnnnnnnnnnnnnnnnnnnnnnnnnnnnnnnnnnnnnnnnnnnnnnnnnnnnnnnnnnnnnnnnnnnnnnnnnnnnnnnnnnnnnnnnnnnnnnnnnagctctcccatgagaaaaacacagtgctgggctttcgtgttcacaggatgctgcaggcggagttcctgcaggccgccctggtcactatctacgactactacgagcctnnnnnnnnnnnnnnnnnnnnnnnnnnnnnnnnnnnnnnnnnnnnnnnnnnnnnnnnnnnnnnnnnnnnnnnnnnnnnnnnnnnnnnnnnnnnnnnnnnnnnnnnnnnnnnnnnnnnnnnnnnnnnnnnnnnnnnnnnnnnnnnnnnnnnnnnnnnnnnnnnnnnnnnnnnnnnnnngtgtacaagacaaagctggaatctgtggaggtctctgcctccaacccttacgtctattacaacatgcagctcgaagacatcattaagagtggtanggacctgccacaccccttgccatgaagaaattcatctcccacgccacctgccacgactccctggggttgcaagaacaggaatcgtaccttatcatgggccagacgtcag

SEQ ID NO: 38471 - DNA, 798 bp, Macaca Mulatta
  misc_feature (1)...(798): n = A,T,C or G
gggtgttcctttcaggaaatgcactcttaaatacttcctgactctggccatattgccctttcctttgaaataacttttcaaaaacaaagaaaacctatttttattacctttacatcactgcgtaatgtttgctattagtctacaatgagaagctggcacttttataaaataaaattgacattcaaaagattgccaatgctaatgctttggaaaggctgcacgcattggtgaaatactgggctgtttaaaatattttaccaaattatgaacatttgaagcgttagtactactctgagactgggaagagagcaaaactaggtttcctttcctagcagccatactggatgctcattatactatgaaataattccttttaaaaggaatcatttgaactttaaaatatagttctgaaaatcagtaatgctgttatgacagaatagaaagtcttctggacataacactaaaaatctatttctctctgattctagattcaatgggttaccattttaaaggatactagacaagaagatctctggattattatattgggctcctcatttaattttaagtaatccaaaacaatccaaaatgttgcttattgccacataaacaagcattttcaaacaatgttatagcgtatgtatattgtcaatatcttaaaaattaatgtatttataaatacatnaggaaaaacacggttatgcactaatgtacttnttaagaaatggtataccagatcaagattacctaatgatgcatgagaaaggcttgattgcttttatagttagtaacagaaaa

SEQ ID NO: 38472 - DNA, 93 bp, Macaca Mulatta
tgtgcgaggttagactgtactactggttgttacgggatgagagactacggtttggattcctggggccaaggggtcggcgtcaccgtcgcctca

SEQ ID NO: 38473 - DNA, 759 bp, Macaca Mulatta
ggcactaatggtcgaaaatgtacctccgttatattcttccttaggaagccactatgccagcagagagtgagacctggtagccaggaaatgaggcgtttgactcagagatgacaagagagttcctaggatggaggtgaagggaaacgctaatagatgagaaagtaggtgtagagagaactagacctgggaccggaagagagacttcctggaggagcaagcaaacaaaaacactggtggattcaggagagacatgtacggctgacccctgaacagtgtggagcctaggggtgctgatccccatgcagtcagagatctatacatcacttttgactccccaaagccagaattactaatagcctggtgttaaccagaagccttagtgataaacagtcaattaatgcatattttgtatatgtattaccatattcttacaataaagtaagctaaataaaagaaaatgttattatgttattaagaaaatcatacgaaatagaaaatataagttacaggagactcgcactgtcaattccaccatattcaatgactaagtctagaccatatttaagactaggggagtatacagtaatttgcagacatactataaaactgccacatgtacatttttcatagagtttgcgaatgaaatagtggaaaagtatataggaaaactaagaaaagggcaaattctggggggggctggggtataaggaagtgatttagcccccagggaaaaccaaagttttatcccagaaaggaact

SEQ ID NO: 38474 - DNA, 801 bp, Macaca Mulatta
agaaaagtaagaagaggagacataaatgtgactctccagaatctgatgctgagcgagagaaggatagagggaagaaaaagatcgggaaagtgaaaaagacagaactagacaaagatcagaatcaaaacacaaatcgcctaagaaaaagactggaaaggattctggtaattgggatacttctggcagtgaactgagtgaaggggaattggaaaagcgcagaagaacccttttggagcaactggatgatgatcaataaattataccaaatatatgtttacagtatgatttaaagtctgattcagaccagggactctattttaagttcaactgaagtaacactgggttttaattatatcacaggaaaaaaaaaagtgcatttaagtattgttatcgtggactttataaaagcaaaggaaattgaaaattaacttttgattctgtatcaagaatcatattttcatacagtcataactgtctttctgtgaccctttcacagggcactgtaggatggattaaaggtggcaatttactgataactgcagatgtctctactttgttctaaaatctaagtcatgaggtgatttgatttactttatagaagctggattttgaagatataatgaaaaattttttgataatatagtagtacaaaaaaagcaccagcaactgataaaactgcttttttgtgcactacccaactggttacagccaatgtgatcttttatggcgaaaactcctaaaaaaatagggtgtttttgctggaaaacttgggtagaaccccttaattataggtgggggcca

SEQ ID NO: 38475 - DNA, 660 bp, Macaca Mulatta
tatggggataatacgtaagagaattaataaggaaatatgttatatcttcaatgatgttatggagaataatgtatcttataaatgattattattgccgctgataatcacgatcttaatagctatagagaagaaaagcaaataaagtatcctattttgcaaaaatgaaatatttatttgaaacaaatttcttattgtatgcatatcaaagagcatgagagaatttatagaattttctgagcctctgacttctctctggggttaaaatggaatccctttggtatactttccctttgtctacacctgtctaggcagagccctactcgaactcctctttgccataggggttttcaggactgtcccccgacgcccccgccacttccctcgtggaaatgccctctgctgttagacttgctgtcctaaccctcattaaggacttatcatttactgcagatattggtacgcataggtagtgggtggccgtctgagaacgaccatctggtacttcttttcttgtctcagagctacttcagtcttgtgtgcacaggagatgctcagaagcctgcctttctttcagggagactggccatgagcctgagttaaatggtaacatggaggttcatcatatgctgtatactcaagtgtgtctttggaattctccat

SEQ ID NO: 38476 - DNA, 688 bp, Macaca Mulatta
cgacgccgacctgagcccagcgggccacgaggaggcgaagcgcggcgggcaggcgctgcgagatgctggctatgagtttgacatctgcttcacctcagtacagaagagagcgatccggaccctctggacagtgctagatgccattgatcagatgtggctgccagtggtgaggacttggcgcctcaatgagcggcactatgggggtctaaccggtctcaataaagcagaaactgctgcaaagcatggtgaggcccaggtgaagatctggaggcgctcctatgacgtcccaccacctccgatggagcccgaccaccctttctacagcaatatcagtaaggatcgcaggtatgcagacctcacagaagatcagctaccctcctgtgagagtctgaaggacactattgccagagctctgcccttctggaatgaagaaatagttccccagatcaaggaggggaaacgtgtactgattgcagcccatggcaacagcctccggggcattgtcaagcatctggagggtctctctgaagaggctatcatggagctgaacctgccgactggtattcccattgtctatgaattggacaagaacttgaagcctatcaagcccatgcagttcctgggggatgaagagacggtgcgcaaagccatggaagctgtggccgcccagggcaaggccaagaagtga

SEQ ID NO: 38477 - DNA, 189 bp, Macaca Mulatta
gattttgtaagttctgagcgcaaggtctaagacgtgttaagtaagataaactcttgctgccataaacctgctatcccgcctcaaagtttgaaccaaaatatcaaaatggcaggaaccaatcatagttagccaaatcgcctggtcaaacactagccaatcatatatctgatttgtataataactctatgc

SEQ ID NO: 38478 - DNA, 710 bp, Macaca Mulatta
ttacaggtccatatcactacacggtagctgagttaaatgcagttctccctccctttgaggaaatctaatacacaaatgtccccttacacattaggaagtgatgccccacctcaccccaacctccatgtctcagaaagactatacattttgaaaaggattaactgcaggcctactttgtacatcagtttcccgggtatctttagttttttattcttagaattaaaaacgtctttttaatttgttcattcagtcaacaaatatttgttgagtgctttctctaggagctgcatgccccagataagaattcagacacgagttgcccacatagagcttatatcctaaagggtgtgctgtcacttttcctgcatacacccaatgccagatgtaagttacatgggcagaggcatctgggtagctgatgtgaatctctgtcaaccccttttgtctagcagagacatatgtcctgggcacggaggttctagaagggagaatgtttatagctacgtgtctggggtccggtcatcttgtcctggtgatgctaagggtatcagagatggtaggagaggaactggcctctttgttcaagtcaaagggtgaagattctctctgagaaggaaaagtctgtggcccagccggggacgctcttgtccaaaggaagaagcatacattagcccaagaatagatgttctggccggttctgaggcttgggt

SEQ ID NO: 38479 - DNA, 764 bp, Macaca Mulatta
gggtaagaaaactttgtaaaatagttatgagtcctacccagtagcaacttctggcattcaagcaggattccactatgtaaatatctgtaatgcatttataataagttgtgtagtttgtcctgcatccatactacactatttgctaaagtctcagtgccatctcctaatgagactgacattttaaaagtctgtatggaatatccttgataattcaaggaaataccccacctgcctaagttccaaactgggaaacattcagattatataaatgacatttcaggactttaagtatgaagataatgggaattttattgtttagcttattataatgagagcatttttatttgataattcttaaatttttaattttcaacgaatttcattattttaaaggaatcagtttcaaatcatgattttgatatcattattctaaggagttatctcaaaggcacaaaatatgaattctgcaagaagggtattttttattgtagtttgaatgggttaggaaaagcctcaatttttcactctaagtccttcagtacatttttctttcatcttattacttatgcaagttaaagttctttggtaacagaattctttgcactgtaaaataaaaactcctagatgtaagaagtcatgtaaacggttaaacaagcttacccaagtttagcaaaactttcattgtaaaatcagtcggtactgaaccaaatattaaaatcctttattagtttgtataaaccacaaatttccatttttgacttttc

SEQ ID NO: 38480 - DNA, 1165 bp, Macaca Mulatta
  misc_feature (1)...(1165): n = A,T,C or G
cttacgcgctctcttcatcctttctctcgacaatgtggtctaagtcagagagacaccgagcgggcgtcgcccacaacttttttatgtctgtggcaacgagcacaaccgcagcatgcgaggttatttagatcagggcggnacgacacctcacgcgcactcttgacgcatttccattttgtgaagattctagccctcttctaataatcttactgatctatctcactttgtatttaacttaaaaatctgtcgtataaggtgtgtctttcccaccacacaccgagaagtacctattataaaacgagatcccacacaacaatgggtttttacgttcacaattaatatctcgagtcgtcgatagatgacccataaccccatttagcgtttagcttatagtcatcttaggcatgaggcgcttttccctaacatataaagcttcttgttatttttaaaggcaccccctccgtatgtgtgtattgtttgtggagaatattgctctcttttattttagtccttgtcttgttataataggccctaatattgttgtggcacaccttacagaaaagcaacttgatgggtattattgttccacctccatatggtatcgtgttcctacgctgactgtgtattcatctacccttggatatggaccgctgattctatctgttttctcccttctcttttaatttggggtggatttcttattatgtgaaatcactaatagaggggcagttactatcaccataggtgggcgtcctactttgctcaatgtctgttcccttgctagatttgaattgattttctggatgtataggtaagtgtgtattttaggtcacatttatcctagtgaaagagctgggctttggggtttgccagcactaggggccgaagagtgatagcagtccccttaagccagcgatgttcacatttatttagcacagatttaatgacaaaagcttggagcaaactcaatctgtgggtaataaacattgtcgacccccaagtagagtgaatgatcaaaggttggtttttggagacaggagtaaacaaatttatctgataagtttctttacattccattgttatctgccctttgttctcaggctccagacaagagaatttggctgccttcaaccaaatcctctttcaaagcttttgcaaaaccccc

SEQ ID NO: 38481 - DNA, 922 bp, Macaca Mulatta
  misc_feature (1)...(922): n = A,T,C or G
ggattctagaggccgaggtgacaggatcatttgaggccaggagttcaagacagcctgccagaccttgttnnnnnnnnnnnnnnnnnnnnnnnnnnngttcctgggcctggtggcccatgcctgtattcccagctagtcaggaggctgaggtggtaggatggcttgggccaaaagaggttgaggccacagtgaactgtgattacaccacaggactccagcctgggtgaaagattgagaccctctccgaacaagcaacaaaaaacaaactggggcggaattcgggcttaatttctcaacgagtaaagttatcataagttggacgaaaggtgccaggcacatttccaaaaacaaaggactctccgacattctaatccgattaccgaccttctgtaatccgtccactatgtgacaaccactctgtgggcgccatccgtcggtacgagcggtctcgagatataattttgaaaatcggacgcgtaaagaaaattcaaaaccgtacccgctccggatagacgatcaagtaacaaataacataagacccgtccagcatccctccccnnnnnnnnnnnnnnnnnnnnnctatactaccgncgttcctaatcctccatatccacaaacggtgcgcgacgaagtccaacatacggatcgttagaccccaagaatcccgagtgacctacaatattaataccgcctatacggccgccataaatcaattaattattacctaccacgcacttatccctgtgatgtatgttttattatatacggaacgaatcaaccggaacaaatacggtcattatatggacggatacacctcgggtgtctaaaattataaccaccgatctcagttaccccccacgacttatgcatatggagcagattaccatttacaagaacacgacattgcccgctgacgtgacag

SEQ ID NO: 38482 - DNA, 635 bp, Macaca Mulatta
  misc_feature (1)...(635): n = A,T,C or G
gagcctatgactagatttgcatttttagatcctgcgaggaggcggctacacacgtgcagaagtcatgctggtggcctggactccgaagggagagnnnnnnnnnnnnnnnnnnnnnnnnagatggcaccgaaagtgaagaaggaagttcctgcccctcctaaagccaaagccaaagccaaagctttaaaggccaagaaggcagtgttgaaaggtgtccacagcaacatacagaaaagaagatccgcatgtcattcaccttgaggtggcccaagacactgcgactccggaggcagcccacatatcctcagaagatcacccccaggagaaacaagcttgaccactatgctatcatcaagtttccgctgaccactgagtcggccatgaagaagatagaagaaaacaacatacttgtgttcattgtggatgttaaagccaacaagcaccagattaaacaggctgtgaagaagctctgggacatggatgtggccacagtcaacatcctgattcgacctgataaagagaagaaaacatatgttcgactcgctcctgattatgatgctttggatgttgcaacaaaattgggatcatctaaaccgagtccaactgactaactataagtatatgtatatcttttc

SEQ ID NO: 38483 - DNA, 123 bp, Macaca Mulatta
aagttcatgatgaggaagaacaacatgaggaaggccggtgcaaagacgaggcggtccaggaggagcctcctgagccctgccagcgggacctctggagggatccagtgttccatgaagaggtag

SEQ ID NO: 38484 - DNA, 646 bp, Macaca Mulatta
gggaagcacagtattttaaaatctaaagcagattcctttcttagaaaacaataggaaaaaattataggtggatatctttgctgagatctaacagttagctcatattccaggagaaagaatggcctaagaatcatttcattctatctagccttctgaagctactcacttgatatgcttagcactttgaaactaaccttttttttcttggttcatgacagtttagttccaaacatttactattttctcttgtaactgttagaacagttccttttgacattaagttttgcctacatacgtatttttttaagttgagaccaaatcagtgaagtgttgagcaagtatcatttatgatgtgtgtatattggaacaaatgtaaaagggttacaaagattagaaacagggtcataaaaaatggtttgatttataaatgcattacttttggtgctttatataatggcatatattgaactaaaaattgtatagacagtatgtcagcattttctagtaacttctctgaatccatttaatatctatattgtacagttggaggttacattctcagcaatgcatccgactattaatttaaaaaatgaaaatcttcccggtttcaacaagccaaatgctattgagtcagggaaattttccg

SEQ ID NO: 38485 - DNA, 443 bp, Macaca Mulatta
atgcatttattttctacagagttttgtgacccttttattctctgctccaacattggcatgtttctgttattcttttcagtattatttaatttattccccaaaggagagcggctaagagtattgcccagccacaggctctcaaccaccatcctgagcctcagattctcctcacacagccacagctgtaccacatggcccacgtggtatagttttaattcctctgacatctaattctcacttttgggcaatgtttgtctcatcaagctttacacccaaatattttcagcaaagtgctccaaatgcctttttcagaaatctgaatccacatgaaaacaatgggaacaagaaaaaggtgtaaactttccagaacaggcccagaatttgaaaatgtgataaagaggttattgtgcgcccgaacttttcacacaagaattggaggagag

SEQ ID NO: 38486 - DNA, 699 bp, Macaca Mulatta
gggtactgtgttcttcagctagaggcagcttttaaataatgcaagtgtatttattagcactaaaattaacatctcagtaatcagtattagcatttctgaggaccattattaattctgagaacagaaattggtgccttgcaaggaagaagtttactagctctattaataagcattcaaggttacatctgctagcagagtagtattaggaacctggccttattctcctctgacaatcgcaattttttcttattttctgtaaattggagaagatacacttggcatcgtctatcaaggctaacttgttcatgcatttcccagactacttacggggaattgcagtttaagttgctaaaaagtactaacatggtattaagcttaaataatatgtaatgggactaaatggctcactaagccactgttatttttccttcctctctggcagggcacttgatccattccaaagtcaaaaactggactgaagctaaatttgtacttttcataatatacattctgcttctggcttatcttcttggtacatcaatatattaattgtaaagtttattgtatagtatttaaccgctgaagttcctattttatgttgtgcttatgtgaaccccttggtgaaggtcccttttccttggatgtgtagttatatgatctttttaaatgtacagatatttttgctataaaattggtgct

SEQ ID NO: 38487 - DNA, 495 bp, Macaca Mulatta
  misc_feature (1)...(495): n = A,T,C or G
agaagatgctgccatgaagactgaagagtctttgttccaagtggaagacagcagcaaagggcaggaacacaatgataacaatcaatatttgaaacctccatctcgcccatctccagattcttcagaaagtgactgggaaactttggatcctagtgtcttagaggaccccaacttgaaagaaagggaacagctgggatcagaccagacaaatttgtttccaaaggactctgtcccctcagaaagtcttccaattactgtacaacctcaagctaatacgggacaggtagtcctgataccagggctcatttcaggtttggaagaggatcagtatggcatgcccctggccatcttcacaaagnnnnnnnnnnnnnnnnnnnnnnnnnnnnnnnnnnnnnnnnnnnnnnnnnnnnnnnnnnnnnnnnnnnnnnnnnnnnnnnnnnnnnnnnnnnnnnnnnnnnnnaacagaaacacctcagtgatgccattgtggaagta

SEQ ID NO: 38488 - DNA, 785 bp, Macaca Mulatta
  misc_feature (1)...(785): n = A,T,C or G
actgaactcccggaagctgctctgagcccagagacctcatctgggccaggtgtggtgcctgagcagaatgcgcagacacttacgatgttgcagtccctaagagagtagagtctggaggggaaaccgtgaaaaagacctttcgcaccaccaagaacttccgaatgggcgtgaatccaccgtttcttctctttgtgaaaagaaccaccacagctgctcaaagaacacagtgaactcatcactttggttcatcaaaaaatcatcacccatgcgttattcctgagtgcattttcttacaactttttgactgcttccttttcttctcttaagagttgtgggcttaagaatgggatcgggtcataatggcaacctccaagccctcccaattcttgattaagaacacaggtagacacgaatcccaattgtctattgctatcttatttatatagattcgagaaattacagcatgtaaaaatattgctgagacgcctcagtgattgggtacaagaagcaagagtacagaaattatttttgccaaatttattttgtaaatatgagggtctgtacgtnnnnnnnnnnnnnnnnnnnnngtagatctaggtattttgtactcttcctagataaatttgtagtggttgtatactacactagctgcaattttcacatatttctacttcagaaaggtttatcttatattaggggaaaaagtatttatataaatatataaaatcactctgaaaatcactctcataaaaaaacggagcgcatgtaaattgttatcaaagaaa

SEQ ID NO: 38489 - DNA, 901 bp, Macaca Mulatta
  misc_feature (1)...(901): n = A,T,C or G
tgagacaaattcaacaagaattggctgatactgaaaaaaacaacctgtatcagagcctcactagaggctacaccatgttatgttaatttagatgaaacacgggactcaaagaggaaatcaggtcaaatcagaagtcaagtatgtataaannnnnnnnnnnnnnnnnnnnnnnnnnnnnnnnnnnnnnnnnnnnnnnnnnnnnnnnnnnnnngatcctatagaggcagtggaaattgcatcttcagaagatcgacatgtggatggagagattgaagttcttcaacaggcattatatatgaaaatgatgcaaaataaatgtgaaacactacagatggatcaggagaggctggaagaagaactagtgaacctcaaaagtcacatggaaatgaatatgttagaacgtggtctattggaacaccataaacaggaggttgaagaagagcaaggcaggagataatagaacaattagaaaannnnnnnnnnnnnnnnnnnnnnnnnnnnnnnnnnnnnnnnnnnnnnnnnnnnnnnnnnnnnnnnnnnnnnnnnngtcagatggaacttataattggaaatctggaattccaactctacaaagcaaacacttcacaagcagattatactacagcagaattggaaacatataagaaactgcatctagaagaattaaaagctagagaatctctgtcagannnnnnnnnnnnnntaaagaaattctagcagatgtcagtaccaaacttcttcaagaaaatgagtggagcagatctttatttacttctcatactacaaggccagtcctagagtcaccatgcaatggaaatcttaatgataatttagatctcaacagaatacatatcccaagagaaaccttaatgattcctacttcaagctcattgtcttcaaa

SEQ ID NO: 38490 - DNA, 1851 bp, Macaca Mulatta
  misc_feature (1)...(1851): n = A,T,C or G
gcagtgttttagttcatcacgtatacccatatttaaggacttttaaagtaatttggatttttgactcaaaagatgatatgccccccttggggcacgcgtgagttcttaggaacaccagcgtgtggcatttcctgtgtcctctcacgcatgctcagcatgtcagtgttgtactcattccctggcacggaagaattgttgcacgtctttaatggaagccaaagtccatgatttgatggtttcaagagcctaaaannnnnnnnnnnnnnnnnnnnnnnnnnnnnnnnnnnnnnnnnnnnnnnnnnnnnnnnnnnnnnnnnnnnnnnnnnnnnnnnnnnnnnnnnnnnnnnnnnnnnnnnnnnnnnnnnnnnnnnnnnnnnnnnnnnnnnnnnnnnnnnnnnnnnnnnnnnnnnnnnnnnnnnnnnnnnnnnnnnnnnnnnnnnnnnnnnnnnnnnnnnnnnnnnnnnnnnnnnnnnnnnnnnnnnnnnnnnnnnnnnnnnnnnnnnnnnnnnnnnnnnnnnnnnnnnnnnnnnnnnnnnnnnnnnnnnnnnnnnnnnnnnnnnnnnnnnnnnnnnnnnnnnnnnnnnnnnnnnnnnnnnnnnnnnnnnnnnnnnnnnnnnnnnnnnnnnnnnnnnnnnnnnnnnnnnnnnnnnnnnnnnnnnnnnnnnnnnnnnnnnnnnnnnnnnnnnnnnnnnnnnnnnnnnnnnnnnnnnnnnnnnnnnnnnnnnnnnnnnnnnnnnnnnnnnnnnnnnnnnnnnnnnnnnnnnnnnnnnnnnnnnnnnnnnnnnnnnnnnnnnnnnnnnnnnnnnnnnnnnnnnnnnnnnnnnnnnnnnnnnnnnnnnnnnnnnnnnnnnnnnnnnnnnnnnnnnnnnnnnnnnnnnnnnnnnnnnnnnnnnnnnnnnnnnnnnnnnnnnnnnnnnnnnnnnnnnnnnnnnnnnnnnnnnnnnnnnnnnnnnnnnnnnnnnnnnnnnnnnnnnnnnnnnnnnnnnnnnnnnnnnnnnnnnnnnnnnnnnnnnnnnnnnnnnnnnnnnnnnnnnnnnnnnnnnnnnnnnnnnnnnnnnnnnnnnnnnnnnnnnnnnnnnnnnnnnnnnnnnnnnnnnnnnnnnnnnnnnnnnnnnnnnnnnnnnnnnnnnnnnnnnnnnnnnnnnnnnnnnnnnnnnnnnnnnnnnnnnnnnnnnnnnnnnnnnnnnnnnnnnnnnnnnnnnnnnnnnttttcatgtttgtgcaaagtggggtgaggaactcacaccaaccacagcttggggcatccagagagtggctaatagatgatagaagggagtccaattaaggaaacccaaggtatgtgccagctggtttagcattcaatatggaaatgcactttatatttatttgcacacgtcaagaatactcttggaaaccaggatttagaaaaataaaagatatttcattcctggggacaaagtgacctgcaaatgattggcttttgtacaatgctgtaatcccttaatgtcagactcttaggaaaatgggtgggacatctgtgtgtttgtgttggagtgaatgtgcccataaacctgtgctcctgtgtgcctgtgtgcccatgattatatgcacatgggtgaatgtttgtgtgcccatgattatatgcatacgggtgaatgtttgtgtgcccatgattatatgcacatgggtgaatgtttgtgtgcccgtgattatatgcatatgggtgaatgtttgtgtgcccatgagtatatgcatacggatgaatgtttgtgtacccatggttatatgcatatgggtgaatgtttgtgtgcccgtgattatatgcatgtggtgaaatgttcatgancagcaacagctacactcggagta

SEQ ID NO: 38491 - DNA, 90 bp, Macaca Mulatta
aatctgaaggcgagctggccacttgcctgatgagtagaaactgcctttacctggccagtgtatgcaacttgagaggaaatgacagcttca

SEQ ID NO: 38492 - DNA, 90 bp, Macaca Mulatta
tacagaaatataacttaccatgcatggacagtgtaaaccaatgtaggtatcgactaagtaccaaaccctaatattccctcacctcaactc

SEQ ID NO: 38493 - DNA, 769 bp, Macaca Mulatta
  misc_feature (1)...(769): n = A,T,C or G
ggcttgggggccagtttatggccagattctggggggcttgctcccaacagattgtcattggtggcagggatagatagatcaagggaacagagcccggaaataagctgaagtaaatgtagaagtttaataagaaaggtgacatttcagatcagtaaggaaggagtagatttttccatacctaatgttaggaattttttttgtttttccctgtagagatgggatcttggtatgttatccaggctggtctctaacatccgtccacctagaagacttccacatataagaattacgcaggtttattgtcatcagtagggactattatttaaataatttatggaagacagaaaaatatgcaattataagtaacacgactctgtttttttaagagaaaaatcttccaatatacaacattaaatgaaaaatgaaaaagcaagatacaatgcagtgtttaatattttctcactannnnnnnnnnnnnnnnnnnnnnnnnnnnncatatccacatatatgcaaggaacatcctagaaagaatatacagaagttttcccagtgtagaatgaatgggaccttttgggattgggtcagaaggtctgcattgagagactttttattgcatattgttttgcatgctttctattttttaaccatgtgcatcttatttttatatattttttaaaaaagatggaaaaaaaacttgtgtaagaattaaatggnctagacttaatgggctcacatnctgtgatcccaggctactcaggtgggcctgaac

SEQ ID NO: 38494 - DNA, 766 bp, Macaca Mulatta
aaaacctgcaaatatgaagaatgtgacaaagcctttaacaagtcctcacaccttactagacataagagcattcatactaaagggaaactctatcaatgttgaaaatatggcaaagctttttatcgatcttgaaaacttactgaacacaagcaaattcatactggagagaaactgtacacatatgaagaatgtggcaaagtctttaaccatttctcacacctttctacacataagataattcatactgcagagaaatcctaccaatgtgagaaatgtggtaaagtctttaatcagtcctcacaccttactagataagagaaatcatactggagagaaaccgtaccaatgtgaagaatgtgtcaaagattttaaccaatactgaagccttgcaggacataagaaaattcatatttgtgagaaactctacaaacctaaaagatataacagtgattttgacaacacctcaaacttttctaaacataaaagaaattgtactggtgagcaaatcttagaaatgtgaagaatgtaacaaagtttttaaatggttgttacagttgattatacataagataattcatacaaaaaaaacttgtacaagtgtgaagaatgtggcaaaacttttaaccaatgctcacactttattgcacaggagatcatttgtgcttgaaaaaatctttacaaatataaagaatatgaaaagtcattaatatctgctcacatcctactcaacatcagagagttcagacttaacaaaagtattataaat

SEQ ID NO: 38495 - DNA, 636 bp, Macaca Mulatta
taaggcagctgaagtttgtcagcaatccaatcagaagtgcacagataaggctgaagtatgcctttgggggatccaaggccagtccattttggaagatgagaagcatttcatttccaagactccagttctccaagagagggcaaaagaggagaacagaggtcagcctcatgcagccaaagtgtgtgctgggcagagtgaagaactgccccccaaagctgtagcatcaaaaacagagaatgaaaatctcaaccaaataggacaccaggaaaaaaagacatcctctgaggagaatgtgcgtggctcctataactcaagtaataacttccagcaacctttaatgtcacgagcagaggtgtgcccttgggagtttgagaccccagctcaaccaaatgctggaagaagtgtagctttacctgcttcttctgctctaagtgcaagtaagatagcagggcctcggaaagaagaagtctgggatacttttaaagtgtagcatccccaggaagaagaggaaaaggagggaaccccggattggataaagacagaagatataagaatcaaaaattcccaagaaggatttgtcaatagaggaaaacatgacggatggtgaggtgaagtcagaagtatgggtagaagagg

SEQ ID NO: 38496 - DNA, 207 bp, Macaca Mulatta
tggcctagctatggcttgccatgactccttcctgaagcctgtcctttcctagaagtggaggtgaggaccccttgggcctggccttcaaacccatccccttttcttccaacttttctgtcatcatctccacagcccacgcatcccctgagcccagcacaccaaccacttcatgcaggtcccacctgaggatagtaataaaacaatgtc

SEQ ID NO: 38497 - DNA, 797 bp, Macaca Mulatta
  misc_feature (1)...(797): n = A,T,C or G
gggcatgagaattgcttgaacgcgggaggtggagggagccgagattgcaccactgcactccggcttgagcannnnnnnnnnnnnnannnnnnnnnnnnnnnnnnnnnnnnnnnntataagtactctaaaaattcagctgtattccatatatttaataacatcttatgtgttcttttctgattaaaaaagcaatgtgtgcttattnnnnnnnnnnnnnnnnntnnnnnnnnnnnnnnntctgaaatgaagaaagaatataaaaatcatgttaacgcctgatttaatatatttcttttcagtctttttctgtacgtatatgtctggaattatagtagtaatatgaataaaaaccagatttactgggaattaatgacaaacattcttttaatcttctcagcaatcctgagaagcaaatattagctatactgcgaaagaataattgagtatagatctactgcccctaacgtgctgcctcctnnnnnnnnnnnnnnnnnnnnnnnnnnnnnnnnnnnnnnnnnnnnnnnnnnnnnnnnnnnnnnnnnnnnnnnnnnnnnnnnnnnnnnnnnnnnnnnnnnnnnnnnnnnnnnnnnnnnnnnnnnnnnnnnnnnnnnnnnnnnnnnnnnnnnnnnnnnnnnnnnnnnnnnnnnnnnnnnnnnnnnnnnnnnnnnnnnnnnnnnnnnnnnnnnnnnnnnnnnnnnnnnnnnnnnnnnnnnnnnnnnnnnnnnnnnnnnnnnnnnnnnnnnnnnnnnnnnnnnnnnnnnnnnnnnnnnnnnnnnnnnnnnnnnnnnnnnnnnnnn

SEQ ID NO: 38498 - DNA, 682 bp, Macaca Mulatta
ggtggagaggaggaaaatgggctggttggatgtggtcttggtgccttgcagttactctgcactggttatgcatgtaatcctcttttctagttaaccttttgctagtggattttccatagtctgggtatttgtccttaaatcagttataccacctaaggcaactggatgcaaaatgcattctgtccactcactgtctgggccttccccaccctagtcttggcatattccttcaagaatgtagttaccatctgcttgggaagatgtcagtgcaaatgtgaagaaaatgggcatcagactaggctttggtttaccacaagtggcagctgcctatatcaattacatttattaattttgcttttcatttttctcagttcttctcagcccccctctgttgaaatgttggacttcttgctgtcagaggcaactgtaatattgccttagggacttgtgaagaaaggggaattgctcagcgtagcgttttaactttcagaaccaagcagtctatttactctttaagaagtgtattagtccgactttaagaaatttccaaactcccatcagcttttgatagcatctttgtttttgaaacaacttcaatctgtaattggcattcagaatgcccttggcatgccagtttgtgatggcatttaagacctgtaaaacactttgagcccaactagat

SEQ ID NO: 38499 - DNA, 809 bp, Macaca Mulatta
  misc_feature (1)...(809): n = A,T,C or G
ggaatataattcattagcataaagtagaatagtaaaatatttgagttgttcggaacctcagttaatcctgttttacatttcagacctaaagctggcaatcaggaaaagaagcactttgttttcaatgtggagaagataatacttgattccatttcattgtcattagtgtattaaccagcaggagaggtgatgagccatttttcaaatgaaataccttttatttccatatgatttttttattttagagttcaatagctgtttctataattatcctcaatttccatatgttactgaatctgaaaaactcatctttaaaattcaaacagttccattctatctttcgtaaatgttaaatgtgataaaagtacatattttaaattgttttcagctcttggatatagcagcaataaaaacactaatttgtgggtattcaagaaaacctggagaataaactcatactttaaaagatcnnnnnnnnnnnnnnnnnnnnnnnnnnnnnnnnnnnnnnnnnnnnnnnnnnnnnnnnnnnnnnnnnnnnnnnnnnnnnnnnnnnnnnnnnnnnnnnnnggcgcccccccgnnnnnnnnnnnnnnnnnnnnnnnnnnnnnnnnngtggcgcgggggccccaaagggagaaaaggaaaagggggcctaaaggtgttttcccaaaagaaaacccgggacaagaaaagggtggtgtgggtttnnnnnnnnnnnnnnnnnnnnnngcgggggggaaacaggagnnnnnnnnnnnnnnnnnnnnaagggggggtttctgggagggctctttgcggggaatccaccc

SEQ ID NO: 38500 - DNA, 1496 bp, Macaca Mulatta
  misc_feature (1)...(1496): n = A,T,C or G
aagcctttgatgtgctgggcttcagtgccgaggagaagatggccgtgtataagctgacgggaggtatcatgcactttgggaacatgaagttcaagcagaagcccagagaggagcaagctgaagtggacaccactgaggnnnnnnnnnnnnnnnnnnnnnnnnnnnnnnnnnnnnnnnnnnnnnnnnnnnnnnnnnnnnnnnnnnnnnnnnnnnnnnnnnnnnnnnnnnnnnnnnnnnnnnnnnnnnnnnnnnnnnnnnnnnnnnnnnnnnnnnnnnnnnnnnnnnnnnnnnnnnnnnnnnnnnnnnnnnnnnnnnnnnnnnnnnnnnnnnnnnnnnnnnnnnnnnnnnnnnnnnnnnnnnnnnnnnnnnnnnnnnnnnnnnnnnnnnnnnnnnnnnnnnnnnnnnnnnnnnnnnnnnnnnnnnnnnnnnnnnnnnnnnnnnnnnnnnnnnnnnnnnnnnnnnnnnnnnnnnnnnnnnnnnnnnnnnnnnnnnnnnnnnnnnnnnnnnnnnnnnnnnnnnnnnnnnnnnnnnnnnnnnnnnnnnnnnnnnnnnnnnnnnnnnnnnnnnnnnnnnnnngcccatgggcatcttctccatcttggaggaacagtgtgtcttccccaaagccaccgatgccacgttcaaggcagccctgtatgacaatcacctgggcaagtccagcaacttcctgaagcccaaggggggcaagggcaaggggcccgaggcccacttcgagctcgttcactacgcaggcaccgtgnnnnnnnnnnnnnnnnnnnnnnnnnnnnnnnnnnnnnnnnnnnnnnnnnnnnnnnnnnnnnnnnnnnnnnnnnnnnnnnnnnnnnnnnnnnnnnnnnnnnnnnnnnnnnnnnnnnnnnnnnnnnnnnnnnnnnnnnnnnnnnnnnnnnnnnnnnnnnnnnnnnnnnnnnnnnnnnnnnnnnnnnnnnnnnnnnnnnnnnnnnnnnnnnnnnnnnnnnnnnnnnnnnnnnnnnnnnnnnnnnnnnnnnnnnnnnnnnnnnnnnnnnnnnnnnnnnnnnnnnnnnnnnnnnnnnnnnnnnnnnnnnnnnnnnnnnnnnnnnnnnnnnnnnnnnnnnnnnnnnnnnnnnnnnnnnnnnnnnnnnnnnnnnnnnnnnnnnnnnnnnnnnnnnnnnnnnnnnnnnnnnnnnnnnnnnnnnnnnnnnnnnnnnnnnnnnnnnnnnnnnnnnnnnnnnnnnnnnnnnnnnnnnnnnnnnnnnnnnnnnnnnnnnnnnnnnnnnnnnnnnnnnnnnnnnnnnnnnnnnnnnnnnnnnnnnnnnnnnnnnnnnnnnnnnnnnnnnnnnnnnnnnnnnnnnnnnnnnnnnnnnnnnnnnnnnnnnnnnnnnnnnnnnnnnnnnnnnnnnnnnnnnnnnnnnnnnnnnnnnnnnnnnnnnnnagaatgggcctgaaagtcattcagcggaacgtgcgcaagttcctgcagctccgtttctgggggtggtggaagctgtataacaagg

SEQ ID NO: 38501 - DNA, 303 bp, Macaca Mulatta
gaagtttctgcagcactgacacaaggccagattacaccaacagagctctgtcaaaaacgtctctctcttatcaagaagaccaagtttctaaatgcctacattactgtatcagaagaggaggactttaaacaagctgaagagtcagaaaggagatctaagaatgaacagtcacttggggatttagatggaattcctactgcagtaaaagacaactttagcatatctggcattgagacagcatgtgcatcaaacatgctgaaaggttatataccaccttatagtgctacagtagtacagaagttg

SEQ ID NO: 38502 - DNA, 313 bp, Macaca Mulatta
tttttttttgcataggaaagtttttgataaatagtgttagaattttaatatatgcccaataccatatacgaggttttttgcaaagcgtaaaagtaatcagggaagttactgaaagctcacttgcatcattagcatcctatttattattttgttttgacttatttatttaaaactaatgtttttagtccaataatattttaactaatagttttcagcacttaatagattttaaaaatcaatattttattccagtgattccacattaccatttcgtcctccagcacttacatttttatttcaattaacaccaaag

SEQ ID NO: 38503 - DNA, 468 bp, Macaca Mulatta
  misc_feature (1)...(468): n = A,T,C or G
gtgcccggcaggcccaggccacacagcggctccctgctcctgcggctgtgcgtgtgcgtccttctcctgctggccctgggcctgtactgcggccgggccaagcccgtggcaacggcactggaggacctgcgggcccggctcctcagccttgtcctgcacctgcagcacgcggccctcacctgctggcacagcctcctgcggctctgatgggcaggacgggtggggcttcccggacagctcaagcactccgggggctctgagacagcctgagccctggccctgctgcttggtgaatcnnnnnnnnnnnnnnnnnnnnnnnnnnnnnnnnnnnnnggaaaagcgggaccccatggcgtgagactggacatgggggcacagcgggcggccctgccacactagtcaacacagccctcttgtctcctgtgttgggtccacgtgagaaatatagaaagaggattcgactgctaa

SEQ ID NO: 38504 - DNA, 659 bp, Macaca Mulatta
agatgacacatttctggagtcattatttaagtaaatttgctgccctccacagccttctgattttatttatatgttccagcagatgattaggatctgctcacttcttaggaaagaatcaatgccggcaacacattgtttcagaaacaccaagtgcaaaggattgattgtttcacaacaggtacaaaaccgagagttttctttttgtttagggccatgtttactaccctgaaatgttgtattctttgtctttaatttccaagacttaaaagcagtcttgttaaattgacataaatggtaaacttcaacattgtcataatacagtattaaagtttgataaaggtatatcccagttaactacactgctctttaaattgcaatcatgggcattttaatgtattttaaaataaatttcaaaattctgctaaattcttaatttagcatattgacaaagtaatctggatttataccttttaaaaaccattttgaccagttttctttggttttaatgctttcttaaataaaacactgcatgatttccaagttgcatatttgcatactattttaatttgcaaagcgtttctttaatcaaatatcctgatatctagttgttcattattttcctccagggtgtttaattaactatgttactgtattagcaa

SEQ ID NO: 38505 - DNA, 721 bp, Macaca Mulatta
  misc_feature (1)...(721): n = A,T,C or G
aataatttttcttgacaatgtgcgtaaataatattactacagatagttagttgcatatttttaatacaatagagatgaaattgtactatgctttcaattaacttatttaaatgggagaaaggcaaaaactatcaacagcagaataaagaaagattacatatataaaagtaccaaaaagctgtattgtgtttgcttcattttctcacttttagaaattttgtacctatactatgattttcattaaaatgtagatatttcttatactagcacattcatttacaagaaataaattttgctctaatgactataacacagtataaagtaaaactgagttcatgtagtaatgtgtggagacacgaacaaaactggactaaaaatttttattgattgctttctaattgtggtagaaatacattttaggtttccatttatggagaaagaaaaaaatggcagagggtagaagagtcatgtggaagaaaaaatagaaaatataacttggtacttatgnnnnnnnnnnnnnnnnnngattcaggcaattggccccattcgctctgtctgaccacccttgcctcctttggcttctcagcattttcaccatcctaactactgctggccagtttcatcacagctgccctctgcttcctgctgtagtatgtgtttggccactctcttgttcacatgaatggtacaagacattaactcatgaagtccaaggatactc

SEQ ID NO: 38506 - DNA, 791 bp, Macaca Mulatta
  misc_feature (1)...(791): n = A,T,C or G
ggcctagattgaannnnnnnnnnnnnnnnnnnnnnnaacaaatccttttttgatgagaaagggacatgcatacatgagcaagaaagaaacggcagaaatatttggtagttataatgtaccccctggtcatagtaatttatgttcctgatggaaaattatttcaccatctcccaggaaaccttaaagtctcatctcaatatgacatcaggttcaagctcaagacccagaatctcatcatctaaaccagtttcagttacatatgaggtgcctttactacagtttctctcaatctgaagatgtgttttctttcccatattcacctagacaagttttctttctcatattcacccagcctacaatggtgagtcagggaatatacactcttgtttaaaaaagaggaaaaatgagaggtacatagcagtgaatggttcatagcaattctgaactccaattgggcacgtctaattatgattctgggagcagagaatgtatgtcagttagggcctaattctacctgagagtggttctcagctcttggttcttcccctgtaagatctcgactttgctctgaatcattctttttcatgagaaatggctttttgttttgaagctgaataacctttctcaaaccactttcctgaatttgggggacccctaaaggcccaaaaagaatcctccaatttggaactggtccccgggccctnnnnnnnnnnnnnnnnnnaaaggtaaaattcccttttttaaaaaacaattcttgggtgtgtctccccttttgtgaaattggaaagatc

SEQ ID NO: 38507 - DNA, 660 bp, Macaca Mulatta
gaatttctcggtcgcagaacctctcttttccgagggtcgacattttctccgtgacaacacagttggttgcgccaaaacggatgttgcccttgggaactcctccggctggcgtcactcgcagagtcccggcaccgccatttcgcggagccgagttcttttggtggcggcacagcttgttcctcggtgcctccattttctcggtggcggcagcgctctggtcgctgatctgagggacttggagtcgcagccagttgcgcagagtctggcgttcccgggtggcggcggctttgggcgggggagcccgccgctcgtctgagccaagtggcagaggagctgcgcgggcgccgtctcttcacagcgccgcgagcggcgtcgtaggggttctggcttagcctccagaacccagtcccctggcggcgccgccgctcgcgtctctgtcccaggcctctgcggtttcgcgcgtcgttggcttcttggttctcgcaagtttcgatttcgcggtgcctgcgattgctacctcttgtacaaatcaatagccaaaatgtgatttctcagcctaagcaagtcccggtttagggcaaacaccggtctagccctggctgcgatttcttgatcctagaagtcactgtttagcaaggcagacttaactgtgcgatggta

SEQ ID NO: 38508 - DNA, 682 bp, Macaca Mulatta
  misc_feature (1)...(682): n = A,T,C or G
gggattcatggtgaaatacaggtttaggttggagataaatttggggtcagttactgttcaaaattgtgaaagtagtccccaggaagacaggattaatgactccacagtgctttggataatagattttgaaaagcaattgtgaattggggattccatcattttatttaagatgtgaagagggatttaattatttaatatgccgggtgcaaacttgttaaattcctctttccctgtccctgcttggtggagctgccacgtgtggttcagttctaagttctggcctaatgccactcgatatcattgggaataaatcgctgtccaacagtctgttccacaaacaacagtaattgagttttacagactttattctgattagtggaaatcaaataattgaatggaatccccacgtgttttctcttgcacaaacttattagacttgattagaaaactttggaggaaaagcttgccactaagttttttgtgttgttggtgttttgaaaaaccaccccacaccataaagtgtaaaatttagggggttttttgcccaaaaaaagcttatttagaattttcgtgnnnnnnnnnnnnnnnnnnnnnnccccgccccataagaaaagtttaccttgggggaataatccctcccaaaggggaagattttttataagaaagatttttccacgcattt

SEQ ID NO: 38509 - DNA, 429 bp, Macaca Mulatta
attcaaacacagatgctgtggtgcagacagttgtgaccaagaccgaattggcatttccaagtcagagttagttgccatgttgatggagagctgagcaaagccattttagggtcatttccaaataagcaggacatggaacaggccatgactccctcagagatgcacattcacttggattatctgcctcaaaggactgaaaaggcaaatattcagaacttcagcaatcagaggcactggccttcatgagacaacggaatgattagttgaaacattaaagagcaaacaacagtagtcacttctgctcctctgaaatgaagacggcctcacatatccctttggaaacagtcaagtgtacttctcatgactaaaggttaaagctgtatgactgttggcatttactgaactgactgtgacatttgtaataaataa

SEQ ID NO: 38510 - DNA, 766 bp, Macaca Mulatta
ggagtgctgggattataggtgtgagctatggtgctcggcctgacctgggatttatcattcacttgctttttatctctttttccttatcagtgaaaacgaatactaatagtgcctaccttatggggttgttatgagaattaagggaatatgtgtatgtaaagcatttagaagaatgtgtggcacatggtaaacaccattgtgttttttggtggtagcagcagtagtaatgagcactgtttcatagacctttggtttcggttttatttatgtgtatgtgtatatgtgcattttggattgcaatgtaaaatgtctgaaagccactaatctaggttaattcttttatttgagaaatgagggaaactgatcccagagcttaactgacttgtcataggacatgtacataatggctaaatcaagattattaatagaatcttacttttagattattcttcctacttgtcctcaggaattgctgtcttctctaattctccttctgctatgggtcattgcctttcttccccagcagtgaacagttcttcaattatttctacttgaatttaggtccatttttctctccctcagcgtgaactgatactggtcaaactgtaactgtcataaggtccagctgctcgctgcttgtagaaagaagccatcatcataataagagtgaggtgtgacaaaaagagagtgagattttattatccatgctagcaagggaaagaatgggcaaaattcttactaaaactttccaccctcagcccaggct

SEQ ID NO: 38511 - DNA, 78 bp, Macaca Mulatta
aggccacccttaagtacaatgttctcctacctaagaaggcatctggattttctctttccttggaaatagtaaagaact

SEQ ID NO: 38512 - DNA, 3557 bp, Macaca Mulatta
  misc_feature (1)...(3557): n = A,T,C or G
nagagccccgcctccggttcacacggcccctgcaggatgtggagggccgtgagcacgggattgccgtgctggagtgtaaagtacccaactcccgcatccccacggcctggttccgtgaggaccagcggctgctgccctgccgcaagtatgagcagatcgaagagggcactgtccggcgtctcatcatccacaggctgaaggcagacgatgatggtgtctacctgtgcgagatgcggggccgggtgcgcaccgtggccaacgtcacagtcaaagnnnnnnnnnnnnnnnnnnnnnnnnnnnnnnnnnnnnnnnnnnnnnnnnnnnnnnnnnnnnnnnnnnnnnnnnnnnnnnnnnnnnnnnnnnnnnnnnnnnnnnnnnnnnnnnnnnnnnnnnnnnnnnnnnnnnnnnnnnnnnnnnnnnnnnnnnnnnnnnnnnnnnnnnnnnnnnnnnnnnnnnnnnnnnnnnnnnnnnnnnnnnnnnnnnnnnnnnnnnnnnnnnnnnnnnnnnnnnnnnnnnnnnnnnnnnnnnnnnnnnnnnnnnnnnnnnnnnnnnnnnnnnnnnnnnnnnnnnnnnnnnnnnnnnnnnnnnnnnnnnnnnnnnnnnnnnnnnnnnnnnnnnnnnnnnnnnnnnnnnnnnnnnnnnnnnnnnnnnnnnnnnnnnnnnnnnnnnnnnnnnnnnnnnnnnnnnnnnnnnnnnnnnnnnnnnnnnnnnnnnnnnnnnnnnnnnnnnnnnnnnnnnnnnnnnnnnnnnnnnnnnnnnnnnnnnnnnnnnnnnnnnnnnnnnnnnnnnnnnnnnnnnnnnnnnnnnnnnnnnnnnnnnnnnnnnnnnnnnnnnnnnnnnnnnnnnnnnnnnnnnnnnnnnnnnnnnnnnnnnnnnnnnnnnnnnnnnnnnnnnnnnnnnnnnnnnnnnnnnnnnnnnnnnnnnnnnnnnnnnnnnnnnnnnnnnnnnnnnnnnnnnnnnnnnnnnnnnnnnnnnnnnnnnnnnnnnnnnnnnnnnnnnnnnnnnnnnnnnnnnnnnnnnnnnnnnnnnnnnnnnnnnnnnnnnnnnnnnnnnnnnnnnnnnnnnnnnnnnnnnnnnnnnnnnnnnnnnnnnnnnnnnnnnnnnnnnnnnnnnnnnnnnnnngagagcccggtgcatatcctgagcccccaggacaaggtatcattgaccttcacaacctcagaccgggtggtgctgacctgtgagctctcaagagtagacttcccggcgacctggtacaaggatgggcagaaggtggaggagagcgagttgctggtggtgaagatggatgggcgcaaacaccgtctgatcctgcctgaggccaaagtccaggacagtggcgagtttgagtgcaggacagaaggggtctccgccttcttcggtgtcactgtccaagnnnnnnnnnnnnnnnnnnnnnnnnnnnnnnnnnnnnnnnnnnnnnnnnnnnnnnnnnnnnnnnnnnnnnnnnnnnnnnnnnnnnnnnnnnnnnnnnnnnnnnnnnnnnnnnnnnnnnnnnnnnnnnnnnnnnnnnnnnnnnnnnnnnnnnnnnnnnnnnnnnnnnnnnnnnnnnnnnnnnnnnnnnnnnnnnnnnnnnnnnnnnnnnnnnnnnnnnnnnnnnnnnnnnnnnnnnnnnnnnnnnnnnnnnnnnnnnnnnnnnnnnnnnnnnnnnnnnnnnnnnnnnnnnnnnnnnnnnnnnnnnnnnnnnnnnnnnnnnnnnnnnnnnnnnnnnnnnnnnnnnnnnnnnnnnnnnnnnnnnnnnnnnnnnnnnnnnnnnnnnnnnnnnnnnnnnnnnnnnnnnnnnnnnnnnnnnnnnnnnnnnnnnnnnnnnnnnnnnnnnnnnnnnnnnnnnnnnnnnnnnnnnnnnnnnnnnnnnnnnnnnnnnnnnnnnnnnnnnnnnnnnnnnnnnnnnnnnnnnnnnnnnnnnnnnnnnnnnnnnnnncagaacctccagtacggatcatatatccccgcgatgaggtgaccttgatcgccgtgaccttggagtgtgtggtgctgatgtgtgagctgtctcgggaggatgcccctgtgcgctggtacaaggatggactggaagtggaggagagcgaggccctggtgctggagagggatgggccacgctgccgcctggtgctacctgctgcccagcccgaggacgggggggagtttgtatgcgacgctggagatgactcggccttcttcactgtcactgtcacannnnnnnnnnnnnnnnnnnnnnnnnnnnnnnnnnnnnnnnnnnnnnnnnnnnnnnnnnnnnnnnnnnnnnnnnnnnnnnnnnnnnnnnnnnnnnnnnnnnnnnnnnnnnnnnnnnnnnnnnnnnnnnnnnnnnnnnnnnnnnnnnnnnnnnnnnnnnnnnnnnnnnnnnnnnnnnnnnnnnnnnnnnnnnnnnnnnnnnnnnnnnnnnnnnnnnnnnnnnnnnnnnnnnnnnnnnnnnnnnnnnnnnnnnnnnnnnnnnnnnnnnnnnnnnnnnnnnnnnnnnnnnnnnnnnnnnnnnnnnnnnnnnnnnnnnnnnnnnnnnnnnnnnnnnnnnnnnnnnnnnnnnnnnnnnnnnnnnnnnnnnnnnnnnnnnnnnnnnnnnnnnnnnnnnnnnnnnnnnnnnnnnnnnnnnnnnnnnnnnnnnnnnnnnnnnnnnnnnnnnnnnnnnnnnnnnnnnnnnnnnnnnnnnnnnnnnnnnnnnnnnnnnnnnnnnnnnnnnnnnnnnnnnnnnnnnnnnnnnnnnnnnnnnnnnnnnnnnnnnnnnnnnnnnnnnnnnnnnnnnnnnnnnnnnnnnnnnnnnnnnnnnnnnnnnnnnnnnnnnnnnnnnnnnnnnnnnnnnnnnnnnnnnnnnnnnnnnnnnnnnnnnnnnnnnnnnnnnnnnnnnnnnnnnnnnnnnnnnnnnnnnnnnnnnnnnnnnnnnnnnnnnnnnnnnnnnnnnnnnnnnnnnnnnnnnnnnnnnnnnnnnnnnnnnnnnnnnnnnnnnnnnnnnnnnnnnnnnnnnnnnnnnnnnnnnnnnnnnnnnnnnnnnnnnnnnnnnnnnnnnnnnnnnnnnnnnnnnnnnnnnnnnnnnnnnnnnnnnnnnnnnnnnnnnnnnnnnnnnnnnnnnnnnnnnnnnnnnnnnnnnnnnnnnnnnnnnnnnnnnnnnnnnnnnnnnnnnnnnnnnnnnnnnnnnnnnnnnnnnnnnnnnnnnnnnnnnnnnnnnnnnnnnnnnnnnnnnnnnnnnnnnnnnnnnnntccggctccaggccctcggcacgcgccgccttctccagctgcggcgctgcagcccctcggacgccgggacatacagctgcgcggtggggacgacccgcgccgggccggtccgcctgaccgtgcgcggtgggtatggggtgatgcggaggctgggcactgctttgggcacgagacttgcgaagcggtcttcccccgaccctgctgaccgcgcgtgcttctagaaagggggcgtggagggggcgtggccggtacctgccctccaccccgccccgctcacgccccgggctccgccccagaacgtacggtggcggtgctctccgagctgcggt

SEQ ID NO: 38513 - DNA, 435 bp, Macaca Mulatta
cctgccatgggcaccaggctcctcggctgtgcagccctgtgtctcctggcagcaggctcttttcatgccgaagtcacacagactccaggatatttggtcaaaggaaaaggacagaaaacaaagatggattgtacccccgaaaaaggacatacttatgtttattggtatcaacagaatcagaataaagagtttacatttttgatttcctttcagaatgaacaagttcttcaagaaacggagctgcacaagaagcggttctcatctcaatgccccaagaacctaccttgcagcctggagatcccgtcctcggaaccaggagacaccgcactttatctctgtgccaacaaagctgaacaggcacctaggagtccgcagtattttggcccaggcacccggctgacagtgctcgaggacctgaaaaaagtgttcccaccc

SEQ ID NO: 38514 - DNA, 677 bp, Macaca Mulatta
tggagcattcctgagaaatcctgcttttgagtgtttgacattcctaatttgggagtccttcagctgagttactgttcttttagaagttgagacaggcaagcaaaggacttaattcatgtaaacatggacatcatgatggctatttaaaaaatatttgttctgcaccttctccgctgaggcttgggagtgtgtccatcgtctgttagctgctgcagtttctctactcatggaagtcttgtttggatctgtgctgggggctgagcatttagtgtgagccagtgacccatgaacttgccgctctgtgagggccagagtcagtgccagtcgtgggaatgggcatgaaggcacttccagaaccgtttatgtctctcgtgagccatctgttaagaacgttcttcttggtgtggtttgtaggcctagctgtcactattccgggaaactttcttgagtgctatgcaaatgtgttcacaggagataggggtggtcctgagccttgggctgggcgcctggtcagtgagtgtcctgcccttccccagctgggctccttctggtggcatcatctgactgtgatgaatgaggtctgggaaataatttgcacgtgtcttggggacacgacagtaaccagaggaaatacatcattacagcactggagtgtactataactgtcagagttggcc

SEQ ID NO: 38515 - DNA, 393 bp, Macaca Mulatta
gacttcctcaccactctcttctatcagatccttcaaggcctgcccttggtaattcctctgccttttagtctttatattccctgtagaggagataaatgtttctttatgcacttagtgtactttgcagcgacctctgttccagaaaataacacataattattcattacagtgaattccacaaatagagaaaaagagtaagaagataaagtccattttcttcattggggaactggggaaggactgataaagaatcgacagagtgatacagtaaaataaaatacagagattatatttttatgtttttcacatgtttactcttttcctctcttagcagtttggaaactttgtgaaagtggagatgcagtgtattttacatggttcattgcatctagc

SEQ ID NO: 38516 - DNA, 633 bp, Macaca Mulatta
  misc_feature (1)...(633): n = A,T,C or G
gagaaagtcattgagcttgaccttgcctccacagagaaaatggggtgaaatacaagtgaggggaagggcttttttgtttgtatccgacacccaannnnnnnnnnnnnnnnnnnnnnnnnnnnnnnnnnnnnnnnnnnnnnnnnnnnnnnnnnnnnnnnnnnnnnnnnnnnnnnnnnnnnnnnnnnnnnnnnnnnnnnnnnnnnnnnnnnnnnnnnnnnnnnnnnnnnnnnnnnnnnnnnnnnnnnnnnnnnnnnnnnnnnnnnnnnnnnnnnnnnnnnnnnnnnnnnnnnnnnnnnnnnnnnnnnnnnnnnnnnnnnnnnnnnnnnnnnnnnnnnnnnnnnnnnnnnnnnnnnnnnnnnnnnnnnnnnnnnnnnnnnnnnnnnnnnnnnnnnnnnnnnnnnnnnnnnnnnnnnnnnnnnnntagccgccttaagaacaagatgtggtatggccttctgggaaccaaggaacttttgcagcgctcttacaggaaactggaagaacgagtgcatttggagnagtgtgatggagaaaccatctccttgccaaacctgcaaggcatcgtagtgctcaacattaccagctatgccggaggtatcaacttctggggaagcaacacagcaaccacggtta

SEQ ID NO: 38517 - DNA, 600 bp, Macaca Mulatta
  misc_feature (1)...(600): n = A,T,C or G
ggggggtttgggtcctgggattctggttagtacaaggggaagcctagtgggtctggcgctccgttttcaagacactcggagtccatctttgtctaaggggaaaggtcatggccctgaaaccttctgctcccaatgagccccctaccacaggtgatccagatggctcccctaccacaggtggtccaggtgccccaggtgaggtgcccaaagagccgcaagagcctacacagacaccagaagaactggcgttttacgccccanactacctatgtttgaccatctttgctgtacttctattccctccatttggaatgccagctttgtacttctcttaccagactatgaaggcccacagaaaaagcgaatggaagaagcttacaccactcaggccgaactgttgggtcaatgcatttgcggaatgatcggctaaggctctttaaggttaacccatttaaggagggtaggctacccccagggtccctccccacgacccttcccaaaaactcccgcaatttccctcgagaaaaacccggttaaatttcccaaaatccccccgggattttttaaaaccccaccgaaaccaacctttggttttaattc

SEQ ID NO: 38518 - DNA, 337 bp, Macaca Mulatta
  misc_feature (1)...(337): n = A,T,C or G
ggggactcgtacgcgtaccgtaccgcgctcgttagtattccaggccgccgtacacggcgagtacgggcggggccggccttggctgcgtccgggcgttccagtgcgtagttccgccatacccatctccacgacctcggtcgagcatgttcaccagggcccagatgatgtctaccgtagaaaagcctcagaaagacagtatcagagaaggctggaagatgaatgagactgaacttcagcagtcaataaagtcaatatgnnnnnnnnnnnnnnnnnnnnnnnnnnnnnnnnnnnnnnnnnnnnnnnnnnnnnnnnnnnnnnnnnnnnnnnnnnnnnnnnc

SEQ ID NO: 38519 - DNA, 1924 bp, Macaca Mulatta
  misc_feature (1)...(1924): n = A,T,C or G
gccgacgcctcccgcgaggctcagtggccggctcccaggcctaggcgcccatgacccctacgctgaccgctgcctggacgccgccgccaccaccgcgagctagcgccgccgccaccagggcccaatgccggtcatgcccatcccgaggcgggtgcgctccttccacggcccgcacaccacctgcctgcatgcagcctgcgggcccgtgcgcgcctcccacctggcccgtaccaagtacaacaatttcgacgtgtacatcaagacgcgctggctgtacggcttcatccgcttcctgctctacttcagctgcagcctgttcaccgcggcgctctggggtgctctggccgccctcttctgcctacnnnnnnnnnnnnnnnnnnnnnnnnnnnnnnnnnnnnnnnnnnnnnnnnnnnnnnnnnnnnnnnnnnnnnnnnnnnnnnnnnnnnnnnnnnnnnnnnnnnnnnnnnnnnnnnnnnnnnnnnnnnnnnnnnnnnnnnnnnnnnnnnnnnnnnnnnnnnnnnnnnnnnnnnnnnnnnnnnnnnnnnnnnnnnnnnnnnnnnnnnnnnnnnnnnnnnnnnnnnnnnnnnnnnnnnnnnnnnnnnnnnnnnnnnnnnnnnnnnnnnnnnnnnnnnnnnnnnnnnnnnnnnnnnnnnnnnnnnnnnnnnnnnnnnnnnnnnnnnnnnnnnnnnnnnnnnnnnnnnnnnnnnnnnnnnnnnnnnnnnnnnnnnnnnnnnnnnnnnnnnnnnnnnnnnnnnnnnncaggggcggcgcccacctgcgggtggctcctgttcacacgacttcaggtcatactgcggagtgggccgtctattctgcctctctgtgggcttctctccaggaccacagctgccagggactttagacgtcaccctgggaggcctctggacacagagggctgtgtgcccaggaacaaatccggagggggggccatcctggctgcacagtcccttcctgcgttccctggtctcaggcccagccaacgggacacggaaggctccgcttgctgacacaccacactgccacaaagctgcttactctgccctgggccgcctgagtcctggcactgcccgcgtaccaccctctgtcaccctgaggggctgtgtgggtcctgagtccccagccagccttcagggtctccttagattgtgtagatgcagtctannnnnnnnnnnnnnnnnnnnnnnnnnnnnnnnnnnnnnnnnnnnnnnnnnnnnnnnnnnnnnnnnngggggaaccctgggagccaagggctgactccagcaacactggcctgtctgcctgttctgggagggctgtgaggatgtcctcagatgctgtggatttctggggaggcacttccattcctttctgggttttttttgcagaggagggctttgggcctctttctttgggggaacatcctcaaagaaagcgtgagagatcgaggctgcagtgagctgggatggagacttgcgtgtcccgagtgtccgcagcaggtggcagaggcctcagtgtggcaaccacagccccggagcctgtgtggtaccagcagcatcttagagtccccggtatatgctgagatcctatcccacgctgccctccagtgactggggggcccaaatgatggcacagaggcaggtgggctggaggggcacagatgcctgtgttcagggagggcggccaccatgggccggggtctcatccaggaccccgtgctctgctcctcaacaaacagtcgcggtagcactgtggtggactgcccatggccgtgtggctttgggggcaagtgggagggtgccctgaataatgattacagggacaacaggcagagctgccctaaagcaggacacagggtgcggtactgacaaccctagcgtcaccccaaatccacgtccccacactccgggcatgggtgggacttgtg

SEQ ID NO: 38520 - DNA, 463 bp, Macaca Mulatta
  misc_feature (1)...(463): n = A,T,C or G
cctgcctggtctggccaccagtcccccatttcagctaaccaagccagggctgtggagtaccctgcatggagatgcctggggcccagagcgcaagggttcagcacccccagagcgtcagnnnnnnnnnnnnnnnnnnnnnnnnnnnnnnnnnnnnnnnnnnnnnnnnnnnnnnnnnnnnnnnnnnnnnnnnnnnnnnnnnnnnnnnnnnnnnnnnnnnnnnnnnnnnnnnnnnnnnnnnnnnnnnnnnnnnnnnnnnnnnnnnnnnnnnnnnnnnnnnnnnnnnnnnnnnnnnnnnnnnnnnnnnnnnnnnnnnnnnnnnnnnnnngcgtttcaccagcagcaaccaccgcctgcgtgccttacgccccttcccggccccctggcctccccggcaccaccaccnnnnnnnnnnnnnnnnnnnnnnnnacaccggtctccggggcgtggagccaaacccaggcat

SEQ ID NO: 38521 - DNA, 159 bp, Macaca Mulatta
cttccactccagcttggtcagtgagcagaggggcttgtgtgcttttctgtcgctgcacccatcagtctcatctgcatgtgggcatgagggccggcccattgcacccctgacaggagaggatgctcagcacttcctgaatggcgaatacctgagcgataa

SEQ ID NO: 38522 - DNA, 773 bp, Macaca Mulatta
gggctcaagaactctttcacagtgcaccaagctgtgctcttgacccccacgccatgctataatggattgctgagagtatttccaggggaaggatccacacctgctgtagatagcactgcaataagaattaacacagtgcaaggacacaaggaattgagaaaaatttggagtaccaatgtatagtcctattgattgaaagcagaccaaccaacaaacaaggtttaacagataaatagcaaggttgccaatatagtcagcttttttataaatccaataagtaggctttgtaagcatttacataaaagcctcagtttgaaatctgagattgcatctgacaaatctattgcaagtataaattgtgctaatttcagatgactcttaaacccataaactcagcactacactccttgttaagtaaagcaaatctcttggtcaatattcctttagatgtggtgaatactgagtaattaatcttaacaaagttagtctttgtccacttcaatgaaattagtttctgaagaagtgttaaaagcactggttgtatcacagtgtctattaataaaacttctgagtcaaataaatagagcctgttctgatgatacaagagataaggaaaatgctgacaggttgtatatgtgtcaagttgtcagcatatgtgcagcctatatgcaaacccaaagcaagtctaatcatgccatcctttaaactcagggtccttaacagtactttttagagaaaaacgaaattagattttccggaggaatggtttggaa

SEQ ID NO: 38523 - DNA, 777 bp, Macaca Mulatta
  misc_feature (1)...(777): n = A,T,C or G
ccatagctgggctcaggcatctgtctttcgactttgttgcctggctccagggagattctgggggccctgtgctgtgcctcgagcccaatggacactgggttcaggctggcatcatcagctttgcatcaagctgtgcccaggaggacgctcctgtgctgctgaccaacacagctgctcacagttcctggttgcaggctcgagttcagggggcggctttcctggcccagagcccagagaccccagagatgagtgacgaggacagctgtgtaggtatgagcgggacatgctggcagtgggtagaagccactgtgaagcaaacctcagttaggactagagaactggcacaggcatccacactgccgagcctaattagggggctctttcaccccctgggatgggaacagccccattagggctgagaggcgcaggcactttggaactctacaggtttggagtttaggagagaagaggaatctctgagacctgacttgggtttctggggaagtggcaagcttccagcagggacccagcgagcctgcacagggtagggctcccagtcagaattccggcattaagtgactggcatgcaaattgaatgcaaaataattcctgggacggatattatgtcttgatggtaagagatgcactaatgagccaggaatatgggaagcaggcccagcctggagggtgcaaacgggtggggcgggggagtgacaagtaggggcattcccacgaggctgggaccggggtcccatcagaacgacaaggctaanagct

SEQ ID NO: 38524 - DNA, 87 bp, Macaca Mulatta
ctttgcctgatctctagtttgcttacaagaggagataaagatttcctttattggtttgcaaattgtacatgagtatctactttatct

SEQ ID NO: 38525 - DNA, 1307 bp, Macaca Mulatta
ttgaaggtacatggaggttcaggataaggcttggggtatttttttttcatggctggtgacccaattccggaaaaaatccgcatgaaaaacttttagtctttccaaaaggaaccttgtattggatttaccaaggtagaaaagggaagcctttttaaagcatatgtccttgcttttttctcacttagattacggccatgaaccttctcgacataaattcgcgtactcctagcgtggtcactaccccaaggccccctcttctctcttcactgttagagggctttgtataaacagccattgactccttcaattccactatgtaaagactttcctgctgccttctctataaaacatgagttcctaagcagggtagtcaaggcatttagtgatgtagactttgtctcctacatccaaacctcttacctgctcaggtcacattgcaaggtctgtactcaatgtctcgcctcttttgtgccttagttccagatactctattagactcccactcctcccacggccctagatattatatgcaaatacatatacacatgcatataaatgtcatattatgtatgctgtgaaatgcagcatttttgtgttgtgctgtttcaagatttgccatttaaaaattattgacccatagttttgaatctaattggtaagaggtactgggtgaaggggatgctgtattgtgattacaaggtagaaaatgtgttccatattttttccttactggtctaataatgttacttttctctgtccacttgcctcacatgcaaatggatacctctaaaaatttttaattattactacagcatgctaaggattgacagtttcaattggataaagttttagactgaaagactttccagatgcaaaacaaatgtcagcttcagagtcagggaaggaagcttactcaataaccctttgcactaaaaacttgggtagtgtataggagctaaaatataccatgcagtaaaaataaacatatctatccccaggttctgcagttcattgaccatgaaaatgtgtgtgtgccaccaacactgggtgcctggaagaagacttggctacttgttttgtcaataaaccctacaatatttggttaacttagttgtttatgcctagaattcaccaaataaacattgagtcaattttagcttaagcttgttgaggggctttgaaaggctctgtcttctccctagagactcagaattctcattgctatccatgatagaacctctctcaatgtatgtgatagaaatatagcctgatttagaggaaagctggaatgttattaaagtaaatcc

SEQ ID NO: 38526 - DNA, 796 bp, Macaca Mulatta
ctcaaattcttattagaaatattacctaacttcatttaagagcccatgtcggacataaagccaataagaagccaacagtaaaaacccttacacaaagagtgcagagtgaggaaatagccatttactgttacagtagtctttatttaacttcactttttgtttatctttaggatacgcgttagatgatgaagaaattatagataccttaagaaaatccaaaatgacatcaaatgaaatttcaaagcgcattgaagcaacaaaaaaagctgaaagtgaaatccaagcaatacgtaaaaactatctccccattgcaacccgaggtgccctgctctactttctagtagctggtctcacgcaaatcaactacatgtaccagttctccctagactggtttcatcaggtttttgttttgtcagtagtttccaaaagcaaagaacaagaacatagttttaaaagggagaaagtgtctccaaaagaagttcatgagattataaatatttcaacagaacccaacttggaaaatgagaaaaatctcttagataagcatattaaaagtgcaatagatgtgttgacaaaaagtatttttaaggtgagacattctttagtgtggattttacttgtttatttaatctcactggattaatatgttatattttccctataggtggtttcttcagctctatttaatgaagataaactttgcttctcttttcggctatgtactgcaatcatgcaaaataatgctaatggaaatctaaaacgggatgacattggattcctaccagaagaagaatgg

SEQ ID NO: 38527 - DNA, 601 bp, Macaca Mulatta
tcccgggatggaagagaagaagagactaaggggagctggagcgactacccagaaagagccggtgaatgggcttgtggtgacccccgccccccaccccaccctcccttcccacccgacccccaacccccatccccagttcgagccgccgccttataggccgggccgtcgtcttaggaggagtcgccgccgccgccacctccggcatggagctgatcaccatcctcgagaagaccgtgtctcccgatcggctggagctggaagcggcgcagaagttcctggagcgtgcggccgtggagaacctgcccactttccttgtggaactgtccagagtgctggcaaatccaggaaatagtcaggttgccagagttgcagctggtctacaaatcaagaactctttgacatctaaagatccagatatcaaggcacaatatcagcagaggtggcttgctattgatgctaatgctcgacgagaagtcaagaactatgttttgcagacattgggcacagaaacttaccggcctagttctgcctcacagtgtgtggctggtattgcttgtgcagagatcccagtaaaccagtggccagaactcattcctcagct

SEQ ID NO: 38528 - DNA, 784 bp, Macaca Mulatta
  misc_feature (1)...(784): n = A,T,C or G
ggggaaatttttggctggtaccgtggctcacacctataatnnnnnnnnnnnnnnnnnnnncgactgcaggcgagtgcctccatgcctagctaannnnnnnnnnnnnnnnannnnnnnnnnnnnnnnnnnnnnnnnnnnnnatggtcttgatctcctgaccttgtgatctgcccaccgnnnnnnnnnnnnnnnnnnnnnnnnnnnnnnnnnnntacagcacccggtcaaaaaaaggnnnnnnnnnnnnnnnnnnnnntgctaccaacctaaccacatttctacaactgtttatattttcccctgttccagacacatacatttttgcatagtacgttcattgcagcatgatctacttttcacttaataaattttaaacattttccagccgggcgtggtggcttatgcctgtgagaggccaagtcaggcttattgggtgagtccaggtgtttgagtctagcctaggcaacataacgaaactccatctctacgnnnnnnnnnnnnnnnnnnnnnntgtgctggtgcacacctgtagtcccaactactcaggaggctgaagtgagaggatcgcttgagtccgaaaaggtagaaggttgcantntanaaagaataatgacgcaaaaaagacacggcccttggtgaataatgaggggcccgtagttatgactaatccacacgttacaatttccgcattcggaagcgtttgcgcaggggtcgaaagggcaaaaaacgttttcttatacataagacaacttcgattaaggcacacttcggagtacgaactcgc

SEQ ID NO: 38529 - DNA, 772 bp, Macaca Mulatta
ggatcttttagttaatagttgcagtatttcttttaaatgtttttgttttaaacttaggggtaggagcctttatttgttcagttgtttccaactatttgggatactttcattccctcctatttatgaagtacatgtttatcactaagtgtagtggtttggtttacattaataattttatgtatggtctaaaaatgcagtcactaagagaatatacactgtggttatgttcacagtggttatggatttattggcagtggagtaccatggaggtcactgcaatggtgctaaggctgacagtggaatcttctgtttagggccttaagccgctgagggtcctgatgactcagggaatccatcacagccccgggtctttcaccccagttcactccttttatgtttgacctagattgacccatgcctgccctcttctcaacagctgagtagggaaccagccatctgaatgagctgatcgttgtttatgttcagatgagtaaatgtccagaccactgaaactacagctgcttttctggcagtcttgtctgcggggcaaaaacttaataaaccacaggaaatagactgtcattcttagtttgctgccagggcttattttagattcagagcatactggtacatgggagcggtagtgttgtttgctcttattttcaaccagtgagctgtctggcaccttttgtgctcctggcttttttcaatcatagcactattgcatctcttaactatttcttttgcccaacaaggtaaaattgagtcccat

SEQ ID NO: 38530 - DNA, 181 bp, Macaca Mulatta
  misc_feature (1)...(181): n = A,T,C or G
aacctgggcgactaagcatatctgnnnnnnnnnnnnnnnnnnnnnnnnnnnnnntagtccacagttggagcttattagatacctgtttgagttgagcaagctattgtactgcattatacaatgatgtcctgaaaaaactattgctttttgagtttcttgaatcatctttgcaagtttttct

SEQ ID NO: 38531 - DNA, 338 bp, Macaca Mulatta
  misc_feature (1)...(338): n = A,T,C or G
tgggacaataatgagagagaaaagatgagcccctgggatatggagnnnnnnnnnnnnnnnnnnnnnnnnnnnnnnnnnnnnnnnnnnnnnnnnnnnnnnnnnnnnnnnnnnnnnnnnnnnnnnnnnnnnnnnnnnnnnnnnnnnnnnnnnnnnnnnnnnnnnnnnnnnnnnnnnnnnnnnnnnnnnnnnnnnnnnnnnnnnnnnnnnnnnnnnnnngattttgccagcccttttgctgttccagtggatctcagtgcctaccccttgtattgtactgtagttgcttatccaactgacctcaataccatcaggcggagacttgaaaatcgcttttacag

SEQ ID NO: 38532 - DNA, 799 bp, Macaca Mulatta
  misc_feature (1)...(799): n = A,T,C or G
ggatttatggttaggaatttactacattttggtagtctgttttgaaactaagcacttgtgtctgaaagatgcagataatatctatctatttattacacagtgggctctgtttgctgcagaaaagagtgaaactttcaactgcttagcacacttgccagtgaaatatacctgacagagcagaggttataactttggctctcattacttttaataatggtaagacaacgtgagttttgtttgtttacatgctgtttacaatggcataatttttaaaatatatacaattgagatatttattgcctactattttaaagatgttttatgtgttttcacctttggaatatattgttacatttccttgtacagataatttgggtggctttgttaatgtagctagtaatttttatgactactaagtgaccagttttcggtgccttttattgtgggatgcatgattatgtatttattgtacggaagtcactgatgtgtgtatttttgtactttgctgaaagtaatggttggtcctgatgtacgtgatgatgaaagacatctttcccaaagggcactgccttgagatcgtccttctcaaataaaaagaatgcatttggagaanannnnnnnannnnnnnannannnnnnannannnnnnnnnnnnnnnnnnnnnnnnnnnnnnnnnnnnnnnnnnnnnnnntcggcccccctcggccccctnnnnnnnnnnnnnnaannnnnnnnnnnnnggggcccgggggccccccaaagggaaaaaggaaaagtgggccaaaacctgtgttccccc

SEQ ID NO: 38533 - DNA, 783 bp, Macaca Mulatta
gggtcctctgccctccgaaacgacaactttcctaccatcttggaggcagagcaaaggggggccagggggaaaagtgcacccgctcccgataaagtacaaatttttactcctcatctctgggaaaaagtccacactggcagtctacaccggcgcctgggggagaaagcagggaagaaactgggggtgcatgagaaacgttttcatttgctccagggggaaaaatgtttctgcatcttctgatggaaagaaatcattacaagacacaggttttccggtgattactgtattctgttttctatttctaatttttttcatgttagtgacagtgatattttaatattttttcaggccaataataatctttctccattacagggctaagttctgtggctggtggtcagtttgtaaatttgtaccttaaagagacttaatagtaacttcatttatttgtctagttgctattgtatatataaaatatttacatgttttcataaattgcatatgaaaatttgttacatgttactctccaaaactgagatttgctgtaagacaaattgtaaaaaaaaatgtctttcctctctgtcttcaagcaatggtaataaaacctatggactggccccttataatataaagatttatatataaacccttttgggcccccttcgcccctctaaaaccttttctaaacatttcttttggcccggggggcccgtaaagttaagtgtaccagggcctaaaccgttttccaaggaaaacccgggtccagaacaaaggcttgtgatc

SEQ ID NO: 38534 - DNA, 624 bp, Macaca Mulatta
tgtgactgggctgcagtgaccctgccctccccaaaacgccagcatcaagcgcttacgggacaagtacgaggcagagctctccgagctggagcagtcggagcggaagcttcacgagcgatgctcggagctgaagggccagcttggggaggccgagggtgagaatctgcgtctgcagggccttgtgcggcagaaggagcgggcgctggaggacacacaggccgtgagtgggcaggtatcaggtgggcagtgggcacccccaggcccctcctacatgcatgcagccacttgctggcagccggctcactgcctcttgtgcccacccagatgaacgagcagctttctagcgagcgtagcaacctggcccaggtgatccgccaggagttcgaggaccggctggcagcctctgaggaggagacgcggcaggccaaggccgagctggctgcgctgcaggcccgccagcagctggagctggaggaggtgcaccggaggtgagtgtcgggggctgcagggctggagatggaggcggggcaggggagcaggcagggcctctgcagctccaagccccaggaggctgtggctgaggaaggccaggagatgcagagccagggccctgtaggtagaggc

SEQ ID NO: 38535 - DNA, 285 bp, Macaca Mulatta
taaagaaaaactacagtttcagagcaagaaaacaaagtttgctagtgatgatgcacatgatgaaaatggtgcagctggacctatgaaaagagcaagagaagaaacagacaaagaagaacctgcatccaaacaaccgaaaacagaaaatggtgctggagaccagtaatttagtaaaccaaatttttattcattttaaataggtttaaaattacttttgtttgtgggggcttttaataggaaaaccgaattaggtccacttcaatgtccacctgtgagaaaggaaaa

SEQ ID NO: 38536 - DNA, 657 bp, Macaca Mulatta
  misc_feature (1)...(657): n = A,T,C or G
cattaggagtacacactgtctggtctacaaagaatattaaaacaactaccgccccctncatcttctcactttggttgattaaatccccttataactagctttgcattgagcttctctttttattagactcatggcataagagtgtcatgactaaatttgttgcctgttggtaatttgggggtttgttaatggtgcactaattcctgaatgttaggtacatctggtattcagatgaagtgtgtcatgcattccaagggcaagaaagttccataattcatgaaatgtagaccaacttttaagagcatctgaaagaatgtgaagaagagcttggtacttactgcctcttaaccagtttttcaggatgccacattctaaaacaactcttcgaaaatattgctctgtatacgaagcttggactccttcagaactacttttgttgtaagcataaatgtttaaaggaatttattattaatagtattagctactctttgagtgcttactacgtgccaggcaacgtgttaagcgctttatgtatgtcaacttccttatcattataattgccgtagaagatgggtataccctagaagatgacccttcgtatagctgaggaaactgaggctcaaggtgattaggtaatttgtccagagtcacacagat

SEQ ID NO: 38537 - DNA, 770 bp, Macaca Mulatta
  misc_feature (1)...(770): n = A,T,C or G
gggcctgtcagtgaataatgaaacattttctaaaaatacaccttttcaattaccaaaggaaaagaagacgaggatttacttttagttctgctagtgttgagagtcttggagattttctcacttcacacaaactagtagaaaggttgctttaaggcataatttaatggcaaaagaaactccaaaaataatgaagcaaactgtcttataggaatagtttgataggactcactacttagcttccttcgtcagctcttcttcattggatatatgtggctaagagagttcagaagccctattcctttatttgtctaaaagtaagggaagtaagtcccagttgagaaatgacgccagcgtcatgttgctctcataaaccggtaatgtcttctgtatccactcattcatgtctttaattcttcagaacttgattttataagaagatgtaaaagcatcaaaaggggctaaattgcttttatgcagattaaagctggagaaaagtaaggaagaactggtttttgtcttcctgtagatcctttttagcaagattcatttaaacccaaggaacttttactttttaatctttaaaaaatgggctccaagcaagcactctccctcctctctctctctcatgtttcaagttgtcggggaggttaggatttctaaggctttctggatacttgttttgtttctttgngacagggacagtatgtgttattgaggccaattatcacatctgattggattcctcggcgggggttgatgaaaaaccctgg

SEQ ID NO: 38538 - DNA, 1068 bp, Macaca Mulatta
  misc_feature (1)...(1068): n = A,T,C or G
gggcattgcatccagccaataggctagctgcttatatcacaggcaggttgcgaccctcagtcctggacctctcaaccctcagtactgtcatctccaaggtagcatccaatgccaaggtggctgcatccaggaaaccacgtaccctgttgccttcaacatccaattccaaaatggcatcctcctctggcactgcaacaaatcgccctgggaagaatctgaaggcgtttgtcccagcaaaacggccaattggtaagttagggtgtatgtatagtttggaaagacctatgactttgtggtgggacagcaggtaacaggtatggaggttgtaaaagttagagaaatatgtaatttggcattattcttattcttgatgtctgtcttgcctggacttttttgattgattggggttaacttctaataacctgcaatattagatgaattgaattgttttatagttnnnnnnnnnnnnnnnnnnnnnnnnnnnnnnnnnnaataatactgacctgaaggcaagttttacagttatttttaaggtttttactggtttttattaatgtagaaaagacaggattttaattttgtttctaaaaagggaagatatttannnnnnnnnnnnnnnnnnnnnnnnnnnnnnnnnnnnnnnnnnnnnnnnnnnnnnnnnnnnnnnctattttcctatgagtactggtgtttttggcatcttgctgaactcttcctggtgctgtgtaaatgcttctgttggtatttcttaaacttacgaaaccaaggagctagcaaaagctagtggggtaagtagtataggctttaagtggaaagctcctataaatacaattttggaaatgttgatttattccattcatctcggttctatgaatgaaaatctctcttttccttaacatttaaatgctgaggtctataataatttaccttattgaagcattagtgttttagcattgagagtatctgtagttggtttatggaatttctcttttttgtgtttcaaatctattaggaatgtaaataagaatgtcagttgaaatctctggctgaatggctaaagttgggtga

SEQ ID NO: 38539 - DNA, 1437 bp, Macaca Mulatta
ggggctttttcgcaacgggtttgccgccagaacacaggtgtcgtgaaaactacccctaaaagccaaaatgggaaaggaaaagactcatatcaacattgtcgtcattggacacgtagattcgggcaagtccaccactactggccatctgatctacaaatgcggtggcatcgacaaaagaaccattgaaaaatttgagaaggaggctgctgagatgggaaagggctccttcaagtatgcctgggtcttggataaactgaaagctgagcgggaacgtggtatcaccattgatatctccttgtggaaatttgagaccagcaagtattatgtgactatcattgatgccccaggacacagagacttcatcaaaaacatgattacagggacatctcaggctgactgtgctgtcctgattgttgctgctggtgttggtgaatttgaagctggtatctccaagaatgggcagacccgagagcatgctcttctggcttacacactgggtgtgaaacaactaattgttggtgttaacaaaatggattccactgagccaccctacagccagaagagatacgaggaaattgttaaggaagtcagcacttacattaagaaaattggctacaaccccgacacagtagcatttgtgccaatttctggttggaatggtgacaacatgctggagccaagtgctaacatgccttggttcaagggatggaaggtcacccgtaaggatggcaatgccagtggaaccacgctgcttgaggctctggactgcatcctaccaccaactcgtccaactgacaagcccttgcgcctgcctctccaggatgtctacaaaattggtggtattggtactgttcctgttggccgagtggagactggtgttctcaaacccggtatggtggtcacctttgctccagtcaacgttacaactgaagtaaaatctgtcgaaatgcaccatgaaagctttgagtgaagctctttcctggggacaaatgtggggctttcattgtcaaaaaatgtgtctgtcaaaggaatgttcggtcgtgggcaacgttggcttggtgaacagccaaaacaacccagcaatgggaaacaggatgggtttcaatggtattcgggtaatttagcctgaaaaaattcgctagataaaaagagagtgcctgtgggtagccaatcgggtggatgagactggcataaaacggaattaaaataggcaaggcaaaattagtgcggcacggatttaaaggaaaaataattggataggatcaaatcggggtaaataaaaaatagtgacacatagggttactaaaatatttttagtaaacgccacggtgtggatcagcaagcgataaaaggtacaaaattaaaggctgatcatgggcagcacccgttttaataatatttgccctccatacacaatatttctatacacaaattatt

SEQ ID NO: 38540 - DNA, 858 bp, Macaca Mulatta
ggaccgtgaggaatgagcatgttaattacgtagatgttggtggagcttacgtgggaccaacccaaaacagaatcctacgcttgtctaaggagctgggcatagagacttacaaagtgaatgtctgtgagcgtctcgttcaatatgtcaaggggaaaacatatccatttcggggcgcctttccaccagtatggaatcccattgcatatttggattacaacaatctgtggcggacaatagataacatggggaaggagattccagctgatgcaccctgggaggctcaaaatgctgctgaatgggacaaaatgaccatgaaagagctcattgacaaaatctgctggacaaagactgctaggcggtttgctactctttttgtgaatatcaatgtgacctctgagcctcacgaagtgtctgccctatggttcttgtggtatgtgaagcagtgtgggggcaccactcggatattctctgtcaccaatggcggccaggaacggaagtttgtaggtggatctggtcaagtgagcgaacggataatggacctcctccgagacaaagtgaaactgaaccaacctgtcactcatgttgaccagtcaagtgacaacatcatcatagaaactttgaaaccatgacctttatgagtgcaaatacctaaattaatggcgatccctccgaaccttgaacggccaagaattcccttccagaaccaaaaactttccagccagagaagaaaacccgctcttaattcccgcggtcctttccaaatgggggagccttatccaattttagttggccctcgcatgcgtattttcacaagggggacgggcccctttccctggggagaaaaaaaagacagggggc

SEQ ID NO: 38541 - DNA, 777 bp, Macaca Mulatta
gggacttgtttgaggtaccattttccatcagaaggccagcaaatacagaaggtctcacggagatgtgagaagtctgtatctactgtgctccagatgtctaattgttgctgagatttggatgaagacacccagggcagtgtgaatcttccatctaccttcttcacagctcagtcactaaacacagccatcatttaatttccttcaaaatgcaaatcactgttgaagacagccatcaaatcatggattaacttttgaattcagatgttatttgacttactctttgggataaactctggtaatcccaccatcagtcacaacaaatcgtgctttcactcccttgctggaacagaagacaaaagaaggaaatgttctattgaacatattctaagatacaaagttaggtgttggtgatacaaagagaagtaagtttctaaagtaaaggaagtaaatatatcaatagatgcacaacaatgttttaataatttaaattatgtatgaaatttgttacttgaaagctgtttaaggaagacatctcataagaaaataatgactgaggtgcattttgaacaccgaatatgaattgacagcaatgacacagacagcagggaggtatcacttgtagagaggaaagtatgtataaaggaaagctacccaagaaggctggttgtttggtatagaaaaaaacttaagaaaaaaggaagagaaacagttagaagtaaaagtttcaagtacaagttttctcaattggtcagctaaggaatggatgtgaattccctg

SEQ ID NO: 38542 - DNA, 734 bp, Macaca Mulatta
cttcctctccgtgctggccatcatggacatcctgctgtctactaccactgtgcccaaggccctacccatcttttggctccatgcccataacattgctgttgatgcctgtgtcacccaagtcttctttgtccatatgatgtttgtgggagagtcagctatcctgttagccatggcctttgacccctttgtggccatttgtgccccactgagatatacagcagtgctaccttggcctgttgtgggaaggattgctctggccatcatcaccggaagcttctgcatcatcttcccagtcatattcttgctgaagcggctgcccttctgccgaaccaacattgttcgtcattcctactgtgagcatattggagtggctcgtttagcctgtgctgacatcactgttaacatctggtatggcttctcagtgcccattgtcatggtcatcttggatgtgatcctcatcgctgtgtcttactcactgatcctccgagcagtgttttgtttgccctcccaggaggctcagcactatgccctcagcacttgtggctcccacctctgtgtcatccttatgttttatgttccatccttctttaccttattgacccaccattttgggcataatattcctcaacatgtccatatcttgctggccagtctctatgtgttggtgccaccaatgctgaaccccattgtctatggtgtgaagactaagcagatatgtgagggtgtagcccacc

SEQ ID NO: 38543 - DNA, 781 bp, Macaca Mulatta
  misc_feature (1)...(781): n = A,T,C or G
gggcacaatgtgtacacacagatacacagaacatgacctcctctctgaaggaggctatcatctagagcagaacagtttcctgtggagcttgtgaaaatacacatgaaaggcctgctgtgggagttgctgacttattaggtctaaagtgggtattagtcatctgtgtttttttttaaagctctcttggtattcagatatgcatccctcattgtagagccactagtcagaacagaccaacacaaaaacaaaaattcaaggcaggcacaggtagggagtaactgaaaggaacagtaattgcaaagttgaaacattaaggaaggttttctttagcattttgaactggtcttcatgatgagtttcattttatcagaaatttgaaagttggacacttgagtgtatggcataaagctatggaaatatataatgcatttgtgggataataaaggagttttaattctgtataagcagaattttacagggcaagtagattcttgcttaggcaagctctggaaataaaactttaacagaaagtagcacattcattttggtactctttgtgttagaaaagcatgcttcattgttaatttttgagagattttttaaccccccnnnnnnnnnnnnnnnnnnntgatattatatccttggtgttatgtaaacttttttgtttataggtataattcaattttctcaaaatgcttttttacagcaactgcccagggcagtgcttaatagtccttttgctgtatccatatgattctgaatgccgtagatctgaacagga

SEQ ID NO: 38544 - DNA, 854 bp, Macaca Mulatta
  misc_feature (1)...(854): n = A,T,C or G
taaacggggaggggaaagaggaacccggaaacgggatttcgggtgctggtctctccagagggcggaataggtttccgaaaatttttaaagtgggtgtttcccttcgttggagcttggttaaactaaggttagggaattttcttcccatggaggcgttttaatgtattggaaattgccaaaaaggaaagaaatcttgcttgcctaaggccaaatactctgttgttaacgttttccctgagggagatgagtacccctggaatgaagatctgtgtttctagtgacacttctgaatgttgtgattaatggagagcctggactggagttttgatgctcagggccaagtgcagagtagaggacagaacacggaagcagggagcacacacctccgcagaaatgttctcgtggccttgggttatcttgttacacttacattcttttgccaaagttgttattttggcattattgatttaatttgaaatttcagtagtagtactagatcaggaaagtaatataaatgatatgccttccttgtttttaaatgtaagtgcaatctgaccatacaacaaaatttggaaaatagagaaaaggaaatgaaaaccatttatcctaatacatccattgttaccagttatcttatgtatattttaccaatttataatcgtagggtacaggtcatttttgnnnnnnnnnnnnnnnnnnnnnnnatatacagtaaaatggactctttgtggtgtatccttcttaaaatcttgacaaatgcataccgatgtgtgcctgccaccacagttatgacagaaaacagttccatcgctccaagaattcttcctgctgtcctttgcagtcaaccctgcccc

SEQ ID NO: 38545 - DNA, 1147 bp, Macaca Mulatta
  misc_feature (1)...(1147): n = A,T,C or G
cggttcatgtcaatcgccccaccgtatgtagtgtgctgtgaattcgtcgtttgtatcgcgttgtcccatctctatataacgagttatatcactaatatctaaggggagttttgtgagtattacgtaatacaacaccccgcgcgcccccgcaagtgaagaaccacgcaacgatcagacacacagtattcgttctacttgantcatatgtccggcgcgctttgttacccatatttaacaactaaaaaatcgctccatgcatgacgggtgaatattgatgataacggacctgcggaggggaaatatttattactacattcccgcttgagaagtgcaaaccacactcccccgtgcgtatgcatttcgtgtatacgcccacgctactggatggtctttgtatacggtactcctttatatagatcacgcccttattttatcatcatagtgccggggagatccgcgtgccagcgggcagcggtgancattatcaccaaaatataagtagaacaagaatgttggcgtgtgttatgtataatctaataacacggtgctattatattctattctgtggggcgcctcctaatgtttggctcggccacacaaaccacaanagtattctacgactcaattcatacaaataaatccgcatattaactcgcagggattgtcttctgtactgttatgtcttggagcgctttgtccggttacaccgctggcacttcgccccggctaaacaggagcggaagaggtcgatttattttgagggtttttacactcggccacaaataaacacagaaatagtccagaatgtcacaagtccagggcagaggaccaacatgggcagttttgtttatgagcaaggtgggtctcagaagtgatcggcgatcagagggcgatgaagttctagatccattgagacaagctctagacagtagcatgcagtcccacaacttgtaccagcatccccagcgcctggcattccatgtttctgctcctgtggcctccacgatgcaacaagctagcggtttacttggacctctgcctcatctttcttcttttgcgcttcagcctgcgcattcgcttcttcctccacttggctctcatggcgcagaggtttccagaaaaatggcgctaaggccgagagcccccc

SEQ ID NO: 38546 - DNA, 843 bp, Macaca Mulatta
  misc_feature (1)...(843): n = A,T,C or G
ctatcagtgaacagatagtctttgatctgtactccgttgacacttccttgagtgtaaaaataatttttagagtgtggtactttttgttttataaaaagtatgtatcagtctgaatgcttgtttgcttcataaatcaaagaatttccatactttcgaaatcacattaagtgttttcaaattcaacttcctaggttaaattttacagttgaatgttttctctcaatctttgcctggttcttatttcttgtctaacagaaactaagcatttagaaaggccattaagtagtatacattaaatatttttctgtacagttagaaatatatttcatgtgattttgtgtttaatcatatttgaaaatttactattttcatgtctgaataaaaaattataacaataaattatattctagttttaactgctacggtgactgctaaatattgcattagatgatgctacatattgcctagaatttgatatacaatatctacaataatcttttatttagatattcctttttagacacctgaatttgtttaatttctctacaattcaacatacttttaatttttaagatgtttttaaaaatacaagacactaaaaannnnnnnnnnnnnnnnnnnnnnnnnaactatttgcagatagatttatataaatttaaacatttccttgagcctagttatccagttgcacttttataacaccattgtataggtttgatatactcatagatccttaaacatgtttgagaaattagttgtcataatttttacaaattttattattccacccagttaatcatgtgccatctaaaagttagagggccatatacattaaagtgcctc

SEQ ID NO: 38547 - DNA, 848 bp, Macaca Mulatta
  misc_feature (1)...(848): n = A,T,C or G
acagaaattgaccctcccagaaaccttcgtccatctgctgtaacgcagtctggtggtgtattgacctggacacccccctctgctcagatccatggctacattctgacctaccagttcccagacggcacagttaagnnnnnnnnnnnnnnnnnnnnnnnnnnnnnnnnnnnnnnnnnnnnnnnnnnnnnnnnnnnnnnnnnnnnnnnnnnnnnnnnnnnnnnnnnnnnnnnnnnnnnnnnnnnnnnnnnnnnnnnnnnnnnnnnnnnnnnnnnnnnnnnnnnnnnnnnnnnnnnnnnnnnnnnnnnnnnnnnnnnnnnnnnnnnnnnnnnnnnnnnnnnnnnnnnnnnnnnnnnnnnnnnnnnnnnnnnnnnnnnnnnnnnnnnnnnnnnnnnnnnnnnnnnnnnnnnnnnnnnnnnnnnnnnnnnnnnnnnnnnnnnnnnnnnnnnnnnnnnnnnnnnnnnnnnnnnnnnnnnnnnnnnnnnnnnnnnnnnnnnnnnnnnnnnnnnnnnnnnnnnnnnnnnnnnnnnnnnnnnnnnnnnnnnnnnnnnnnnnnnnnnnnnnnnnnnnnnnnnnnnnnnnnnnnnnnnnnnnnnnnnnnnnnnnnnnnnnnnnnnnnnnnnnnnnnnnnnnnnnnnnnnnnnnnnnnnnnnnnnnnnnnnnnnnnnnnnnnnnnnnnnnnncaggggatgctctttcttaccacaatggatggaagtttacaactttcgacagagacaacgatattgcactcagcaactgtgccctgacacatcatggtggctggtggtataagaactgccacttggccaaccccaatggcagatatggggagaccaagcacagtgagg

SEQ ID NO: 38548 - DNA, 782 bp, Macaca Mulatta
ggatgttcattcttactcatgaaagaagattcctaagattacttacatttaagaagcatagaagaatctgagaagagtgaagccagagtttttataaaatgtatgttcttaagcaacatcatggccactttccaagttttattttactcattaatgagtgtgtatgtgtatgtgtctgtgttttataaaattgtattaggagggcaggttaatgtatccagcaccacagtcaagttagaataaaccttcattaaaacaaggatccctcctgttgctctatcagagatacacactcctcccttccctcctccttccctaatgctgaacactctaatatagtctcgtcttaaaaatttagtctttttgaaaatactgtataaatcatatcatatgtgtataaggaaaataaatctcgggaccctaaaatcactaagcagtgagaaaagtcaaactgagaactatgaaaggcaaacctgcttcccattttattcctaaacaagattgctacaaaggtaagctgtatacctcccctcacaatttgcccacaggaaattcctttgtggacaaaggaccgatagaactcagagtcatccctctgaggctcacctgagacaaatgcatatatgaatacttccctccgcctattggtttatgtaaaaatgccgaattctgggagccgaactaaattgtggtattccgtgggaagactggatcaataactccaaaagaatgccacccctttacctttcttacccaccctttaaacctgggaaactcccaac

SEQ ID NO: 38549 - DNA, 763 bp, Macaca Mulatta
  misc_feature (1)...(763): n = A,T,C or G
ggcaacaacctttgtgaagtggttagaatatggtaaatgaccccaaagtctattgaggtgagcttgagaaaaaaaagagaggagttttggaacaagtgcccatgatgagagaagaaactttttgtgatatttttctgcttgtaagtattatcaaatcaactgtatacatgcactatttccaaccatgatttcagaaagacatgcatgtcagagaagagtgaaatattcatgtcttaacttaagtagactgtttttaaacagctggtccagttttttttcctaacattgtaccatatctatcatctgtcaattactgttaaacattactttgatggcccagctacatttgcagtgatgtgcacgtaaacactgttattaagaagttaaagcttgtatacaattttttactgtgaaataactaaattgggctttaaaaaatcttagtatttattgatcttcattcacatatacagttgacatttaaaattacagatggttattccaatgctgctgaaaccttgnnnnnnnnnnnnnnnnnncttgttggttgaatgtgatgagaggcgctcttgggcagtctctcttctctcccacccctctttcctcctccgagtacccctttctccagcttggcactagccatgtaaaaccccaaggtttttctttaaaagatcaggaagataatcttatccctccatgcccctaaaaaggccaaccccctggggaggcagtggtttgcaattttgccctttttttgtccttt

SEQ ID NO: 38550 - DNA, 421 bp, Macaca Mulatta
catttattctcgaataattgtcactcatttttactgccttcaaaactgggtcaaagttgaagttactgacacactagtaaatgttctaaaaagtggttcaaatcataattgatagacatccttttccattgtagtaattgaagtcattacttaaacatagtctcaagtcttgagttcagccagctttttaattgatatacagaagcttttgtcttatttggcatgactgtatcttttataggaaccagcatctgcattagcaacagaagatacatccttagaaggttcatcattagctgaaagtttgagagctgcagcagaagcggctgtgtcacagactggatttagttatgatgaaaatactggactgtattttgaccacagcactggtttctattatgattctgtaagtatctcagat

SEQ ID NO: 38551 - DNA, 509 bp, Macaca Mulatta
ccatagccccagttcttatctgttttgcccaaggtctcatagctacaagaaggcaatttctaacgaagccctccgtgccttccaaatggattattttggccgccttccacccggacaggatgccaaccgaatggctggaccagtgcacgggagcggctgtcatttgcggagtgcctcattgcgagctaggcgcctcacggcgcagattttccagtaatttgtctgaaatcgatgctggtttgttttccgaaggcaaatcagcagcttatacagacactggggccagcaagccggtggaacaatgggagacagcttgctgagtgtcaggtcttccaagatgagcttaaacttcgggtggtgggcaggctcggtaggtgggaaagtcccgtgtccagatgaatgcagtccatgtttatattgatgaaaggcacgcataccatttggtccagctcagccactcttacaggtgctggctgcgagcattggtgtgtgtgtgcctgcgtgcaacc

SEQ ID NO: 38552 - DNA, 651 bp, Macaca Mulatta
  misc_feature (1)...(651): n = A,T,C or G
ttatgtgcttcanttctgggatattcgattttatnnnnnnnnnnnnnnnnnnnnggagagggggagtttattagttgaatgtgggattttctgaaatgtacctctaagttttctttttctcttgttttccatttttaaccttttgcctttttaaaaaaatttaggatgattttctcagctttatattctacctttctgttggctatctaaattttctgctatatatatttttctgctctatggttttaatttccaagagctagctcattttttttttctggaaaaaatgctgttagaaaaatgaattcattatctctctaatgtcaattatttttaaatttcttctgttccctgaatcaannnnnnnnnnnnnnnnnnnnccccttcccctgtttgtttatacctctgtctctgctcttagaagtgttcttgaaatatctgatgaccattttactgctcatttgtccatacttaacattgaggcactaaaagttgatgatggacgctctagtcttgtcatggtggacttgtaataaggtggttagcttttttgtttactttcctcctgctgcacacatttaagttttatttttctctattctgacagttaccatctttgaaattttaatttttgttcacttcaaacacttc

SEQ ID NO: 38553 - DNA, 442 bp, Macaca Mulatta
gtgaggaaggggtgaggagtggggtctgggatttcttgtctcactgagggtttcaagccccaggtagaagtgtaccctgtctggttactgggaagcaccatccacactcatgggctgacccagcctgggccctgtgtgccagcacctactcttttgtaaagcacctgttacaatgaaggacagatttatcaccttgattatggtgatgggacctgatcccagcattcacaagtcacaagggaaggtccctgctgaggacagacctcaggagggcaattggtccaggacccacacctgctttctgcatgtttcctgatcctgtcctgggtctgcaatcacacatttctggaaacttctctggggtccaagactaggagattcctgtaggaccttatggccctgactcctttctgatatctcacaggacattttcttctcatag

SEQ ID NO: 38554 - DNA, 4213 bp, Macaca Mulatta
  misc_feature (1)...(4213): n = A,T,C or G
aattgctcatcaaaacccacatctcatgtaaacaaaaaagtgaggatatgcacatgacactaacacacacagccatgtacaaatacacatacacacatccctcaacataaaaccctttgtggctcatatatttaaagagacataaaaaaagagctgaagacaatcatgtgtgatcgcttagcagaatagatttattatttttattgcattgcagaataaagcctatccttgaaagctctgcatcgtgggcagggggnnnnnnnnnnnnnnnnnnnnnnnnnnnnnnnnnnnnnnnnnnnnnnnnnnnnnnnnnnnnnnnnnnnnnnnnnnnnnnnnnnnnnnnnnnnnnnnnnnnnnnnnnnnnnnnnnnnnnnnnnnnnnnnnnnnnnntgagatgaaaggagacaacaaaaatgaacccatagtgagctgagagctccagcctggcctccagaaactacacacccagcttccacccagaatcaagcctatgttaacttccctcaaagcctgagattttgccttccattaaatgcaggtagttgttccccttgcagcactagtcactggccaaaatttaaaacttgctgtcttcttgccaccacaaaccctgtatgctgtaggctgaaaacgttaaaagaaacacacgcgcnnnnnnnnnnnnnnnnnnnnnnnnnnnnnnnnnnnnnnnnnnntggctttcaaaatctactctagcccaaatgtttcaattgatcctcacccctggacacactttgcccccatctggaattagaggatataagtttgtaatgaagtgatagcggcattttgtatgtgtccagctgatataggaatagcctcagactctgtttggtcaccagagttccccactttgactgggccaatatatgccttctgcctgcatctttttaatgaccatacttgtcctgcctccagatagatgttttaaaacaaataacaaaaatgagggaaagatgaaagttctttctaccggaatctaataaagaaaagtcattttcctcatttccacctctcttttgtcaatgtcaaaattgtccgtctagatttttagaggcactccttaggccctaaaacattaccattcggtctcagcccagttagtcctctgcagtttcttcactcccaaccccagtatcttcaaatagctcacacccagcaggtaggttcggctgtcctcagatcaatactcagttgtctaagttgccttgagactgaactctgaaactgctgaaactcctggactcaccctgaagttctcaggatcnnnnnnnnnnnnnnnnnnnnnnnnnnnnnnnnnnnnnnnnnnnnnnnnnnnnnnnnnnnnnnnnnnnnnnnnnnnnnnnnnnnnnnnnnnnnnnnnnnnnnnnnnnnnnnnnnnnnnnnnnnnnnnnnnnnnnnnnnnnnnnnnnnnnnnnnnnnnnnnnnnnnnnnnnnnnnnnnnnnnnnnnnnnnnnnnnnnnnnnnnnnnnnnntgagattgaacaagagcagtttgacagtcagaaagtgccacaaatcctaagaagtggcctggacttttgccaggcacagggtccttccttcccttccttgtcctggtcaccagagcctaccttcccagggtttctcctccagcatcttccacattcaccttgccccacaggcttgtgatagtagccttgtcctcctctgtgaaatgacccatggcgtctggactaggagcttattgataatctcagccgttccagaagcgagtgtgtggaactgctggagggtgcttccttttattcttcatccctagccagccgccggcccctggcctcacctgatactctaagactattggtcaaggttgccttgtcaaggctattggtcaaggcaagactggccaacccatgggtggagtttagccatggaccgtttcagacagatatttgcattgagatagtgtggggaaggggcccccaagaggatactgctgcttaatttttttatagcctttgccttgttccgattcaatcattccaatttttctcttaatttatcttccctttagctagtttccttctcccaccatagaagataccgtgacttcttttgtcagcatttgctcatcaaaattcacatctcatgtaaaaataaatggggagcatgcgcacaccacaaacacacatagccatacagaaatacacataaacacatccctcaatataaaccctttggggctcatatattttaaaagatgtaaaaaaaagagctgaagaaaatcatgtgtgatctcttagcagaatagatttattatttttattgcttgcagaataaagcctatccttgaaagctctgcattgtgggcagggggnnnnnnnnnnnnnnnnnnnnnnnnnnnnnnnnnnnnnnnnnnnnnnnnnnnnnnnnnnnnnnnnnnnnnnnnnnnnnnnnnnnnnnnnnnnnnnnnnnnnnnnnnnnnnnnnnnnnnnnnnnnnnnnnnnnnnntgagatgaaaggagacaacaaaaatgaacccatagtgagctgagagctccagcctggcctccagaaactacacacccagcttccacccagaatcaagcctatgttaacttccctcaaagcctgagattttgccttccattaaatgcaggtagttgttccccttgcagcactagtcactggccaaaatttaaaacttgctgtcttcttgccaccacaaaccctgtatgttgtaggctgaaaacattaaaagaaacacacgcgtgcgcgcgnnnnnnnnnnnnnnnnnnnnnnnnnnnnnnnntggctttcaaaatctactctagcccaaatgtttcaattgatcctcacccctggacacactttgcccccatctggaattagaggatataagtttgtaatgaagtgatagtggcattttgtatgtgtccagctgatataggaatagcctcagactctgtttggtcaccagagttccccactttgactgggccaatatatgccttctgcctgcatctttttaatgaccatacttgtcctgcctccagatagacgttttaaaacaaataacaaaaatgagggaaagttgaaagttctttctaccggaatctaataaagaaaagtcattttcctcatttccacctctcttttgtcaatgtcaaaattgtccgtctagatttttcagaggcactccttaggccctaaaacattaccattcggtctcagcccagttagtcctctgcagtttcttcactcccaaccccagtatcttcaaatagctcacacccagcaggtaggttcggctgtcctcagatcaatactcagttgtctaagttgccttgagactgaactctgaaactgctgaaactcctggactcaccctgaagttctcaggatcnnnnnnnnnnnnnnnnnnnnnnnnnnnnnnnnnnnnnnnnnnnnnnnnnnnnnnnnnnnnnnnnnnnnnnnnnnnnnnnnnnnnnnnnnnnnnnnnnnnnnnnnnnnnnnnnnnnnnnnnnnnnnnnnnnnnnnnnnnnnnnnnnnnnnnnnnnnnnnnnnnnnnnnnnnnnnnnnnnnnnnnnnnnnnnnnnnnnnnnnnnnnnnnntgagattgaacaagagcagtttgacagtcagaaagtgccacaaatcctaagaagtggcctggacttttgccaggcacagggtccttccttcccttccttgtcctggtcaccagagcctaccttcccagggtttctcctccagcatcttccacattcaccttgccccacaggcttgtgatagtagccttgtcctcctctgtgaaatgacccatggcgtctggactaggagcttattgataatctcagccgttccagaagcgagtgtgtggaactgctggagggtgcttccttttattcttcatccctagccagccgccggcccctggcctcacctgatactctaagactattggtcaaggttgccttgtcaaggctattggtcaaggcaagactggccaacccatgggtggagtttagccagggaccgtttcagacagatatttgcattgagatagtgtggggaaggggcccccaagaaggatactgctgcttaatttttttaatagcctttgccttgttccgattcaatcattccaatttttctctaatttattcttccctttagctagtttccttctcccaccatagaagataccaggacttcttttgtcagc

SEQ ID NO: 38555 - DNA, 220 bp, Macaca Mulatta
gcaacagatgaaatttagtcttacacccagacagactattcacctaattaaatatgaagggtctgtgaaggtctccatgacaccctgtaaccagctgcaatttgacattagactggacgttctgattacttacactttttgttttagttcttttcctgagctttaattgtacaaatatgtcctaaaacaccaacttattaagaggcttaatgcctgttaa

SEQ ID NO: 38556 - DNA, 780 bp, Macaca Mulatta
  misc_feature (1)...(780): n = A,T,C or G
nnnnnnnnnnnnnnnnnnnnnnnnnnnnnnnnnnnnnnnnnnnnnnacgggcgnnnnnnnnnnnnnnnnnnnnnnnnnnnnnnnnnntaacacgnnnnnnnnnnnnnnnnnnnnnnnnnnnnnnnnnnctagccgggcgaggtggtgggcgcctgtagtcccggctattctnnnnnnnnnnnnnnnnnnnnngcgtaaaaacctgggaggcgnnnnnnnnnnnnnnnnnnnnnncgnnnnnnnnnnnnnnccctgggcgacatagcnnnnnnnnnnnnnnnnnnnnnnnnnnnnnnnnnnnggcccaagaaaatgatacccagtcaagatgttgttcaaatataagaaaaagagatagtctcaacatgaaaaaatccaaggaatttaagacaaagnnnnnnnnnnnnnnnnnnnnnnnnnnnccaataaaatctaatttaataattaatcaatacaaataatcaataatgggaaagtacttctggtggtgagcagtgattccacctgaatatagaactaagactacacaggacctaatgtaaatgctgtaaacctcagcagacagtacaactaccaaaaacaatgggatgaggagagaagataggaagctgagtgttaacttcattttcttcatcttttcgtattaagatgttaaagcaaaactgtccaataataaaaacatgttagctaaaacatataatggattctaccaacttatggttttttcatatcccttttttcttaactttgaaaaacccccgactggagaaataataacct

SEQ ID NO: 38557 - DNA, 755 bp, Macaca Mulatta
  misc_feature (1)...(755): n = A,T,C or G
ggggattttccagccagtgatggataagaaaacttgttaacgaatcaggtataaatattagaaagcaagaaatacaatcagtttacaaaacagataacacaatagtgtatgtagaagaatcaaactgctatactattaaagaatttccaaacttaaaagtactgagtgattttagaaagtaggctgaatgcatactatattttacataccatcaataagcaaatanaaaataaaatataatatgtgaggaacatnnnatgccgaatgtttatgaacgaaatgtttgagaggttgatattggagactacnaataaattgctgctgagacgctgagaagaacctccttaaatggaataatagacactgttcatgttaaagctttgctagtataaagttgtcagtttcctccacaatgatttatacattcaatgcaactgtataaaaatagttgtagtcatatcttgtggaaactgacgaacagattcaaaaataatgaggaaatacaagaaatcaagtgtatctaatgtggctttccggaaaaacaaagctagaaaactgaccatgttcagacatgaacacattaaaaactgtaggtattaacctgcatgatacttggaaaaaaataaatagaattaaagaggcccagaagcccattataaataaatggtaggtttccctggttttatttcggtgggcaattaatgaaaaaaacctgtcctttttttgaataaaacaaaaacctgaaattccaattc

SEQ ID NO: 38558 - DNA, 818 bp, Macaca Mulatta
cacttaaacccaggcagggcacggagactgtgaccttatcctgttatcctgacactccgaacgcaagatacctgtggtggataaatggtcagagcctccctatcagtcccaggttgcagctgtccgaaaacaacaggacccagtcaccctgaatcctgtctatggtccagacaaacccagcgttttgtctccagtcaagtattactactatacaggagaaaacatccacttgtactgcttcgcggactctaacccaccggcagagtattcttggatgattaatgggaagtttctgcaatcaggacaagagctctatatccgcaatattactacagagcatagtgggatctatggttgctctgctcgtaactcagtcactggcagcgaacgttccacatccaagatgataaaagtctctgccatctgattttgacaaacctgacaaaaacaagaaatggggaaaggattccctatttaataaatggtgctgggaaaattggctagccataagtagaaagctgaaactggatcctttccttactccttatacgaaaattaattcaagatggattagagacttaaatgttagacctaataccataaaaaacctagaaagaaaacctaggtaataccattcaggacatcggcatgggcaaggacttcactaaaagcaacagcaacaaaatccaaaattgaccaatgggatctaattaaactaaagagcttctgcacagcaaaagaaactaccatcagcgtgaacaggcaacctacagaatgggagaaaatttttgcaatctactcatctgacaaagggctaa

SEQ ID NO: 38559 - DNA, 777 bp, Macaca Mulatta
  misc_feature (1)...(777): n = A,T,C or G
ggcagcggagcagctcacttttattcaatgctacattaacttttccattaagggtgctgttgtcaagtacagagcctttacacattttgaagttgctgtctggtatttgttcattgatatcatcgctttatttgaatgtttcaagtcattctagagtgaaagccttcatcacggtttaagattgttgtctctttcattttaaatttagttaaatttaattgcactgctgtagtttaagggtctgtaaatgttttcataagcctgaattctctcgtttttttcttacttagagctactgtcacttaaactaaaacataattacagtgttactattattcataaaatccagtgttcagtgacaactcttttttcaacaacaaagagaaatactttggtgtcatgatccccctttattcatttttcttcttttgcttcttttcattaattctataaattataccagctgtctacaattgctcaagagccgaggaatattctctaggaggcaggagtcttanggtgaaactgacaggaggaggaataggatttcccccattctggattagactgtgagatgattagtccagaatgggaggggatggttagactgtggaaagagaaggagatttagagtcgtagagtgttaaggaaaagggggttttgaaagtgtggggctcgtgctgtaaaacaggggaggctgcaaaaaaggttgctgtaaagccttgcctcggggttgaccatgtgggtaccccaatgaagcagaacgggtgaaacttt

SEQ ID NO: 38560 - DNA, 467 bp, Macaca Mulatta
gtattaaaatacatagtggattaggtgcaagctactctaagtatactggaatctctgggtacatgggtcaggcctcttgtaaagaggcagaaagattctgtatcagatttaaaaccagcatgaatcttcacagtattattatgtcgataacttgtgcctctcctgggttcctttcagcctttaaaatatatttactctggtagctactagtggcctaatttagtagtacctaatgttctggtgtccttatctactcatagttgtccccttaaaacaggaaggagaaagctaggagcaaagatggtgtttatgtcatttctttctagagaaattacaaacccatagctaccattccctacttaaacctcacatcagttctataaataggtgtgatgaacaccatcaatctatttgccagagtaacaaagccacttacccaggttcaaccaagagattgtgacaagccg

SEQ ID NO: 38561 - DNA, 642 bp, Macaca Mulatta
  misc_feature (1)...(642): n = A,T,C or G
nnnnnnnnnnnnnnnnnnnnnnnaacgtnnnnnnnnnnnnnnnnnnnnnnnnnnattgcaccactgcactctagcctgggtannnnnnnnnnnnntnnnnnnnnnnnnnnnnnnnnngtggtgaggtgaatatatacaaagtatgaggttgtaaaccaaatgtatatgatgtcagagcataactaatttaaaatatatgtgtaaatatgtaaaataaaaggctagaggaatatatggatagtgagattgtgaatagttttaaagtttatcttttgtagtcttctcttttctgtttgtttttaaaacagtgaacttgcattaatttcttactatgaaaataataagacaattttaatagttaatattggattagaaaagattgtatctgaatatattttgctgcctaatttgcttaactttttcccaactgacagtgtatgtattttaaggtgtatgtatttaagatatgattgaatagggaatgattattagaacagaaaaatacagtattcagaattctaacctaattttctttttcttccatgtactactagagacacagtccagtacagatgaatcggaatttgtctaatgaggagttaacaaaatcaaagccatctgctccaacccaatgagtaagtt

SEQ ID NO: 38562 - DNA, 168 bp, Macaca Mulatta
cctttgtcaccaatttagcaaaggacttgggtctggagcagagggaattctccaggcggggggttaggattgtttccagagggaacaaactacatttgcagctcaatcagaagaccggggatttgttgctcaatgagaaattggaccgcgaggatctgtgtggtcaca

SEQ ID NO: 38563 - DNA, 920 bp, Macaca Mulatta
  misc_feature (1)...(920): n = A,T,C or G
ttacacactccttgggaaaaattactttttttcactgaaaatattccttttgtgattatcttgatctcaaattttgtgaaagaattttactgtacttagttcaaaagagtagaaagaatgatttactattgcagacatatgtagggtaaaataatttatttaaactgactgtgcaacaccatttagagttgatactgacataaatgttattagccaactaatttggaactgtatgtctcaacaatgctggcaagtatcttccctgcttagaataccaagttgtaggggagaaactgtatttattttttaaaagcaatccaatggatttgtttttgttcatattttgaaaacaagttgtaggatttttcttattttagaaggtagaaaatatgtggacctgtgttttaaatcactataatatgtatttataaattgtaacattgaatgatacaacagagctctaatattgatgttctcactttctgatatttaatttttataaatgcttttgtaagtaactaattgtagtattgcttttaaatagttttaaaatctgtctcaaataagttctgcccagacctatttccttaggacagtattctaaagttcagtagtccagtgtgagcttgaaatactcctacatcccttcagtgatttttttacatataccaatacgcaggcaaataattaatataccaaaaacctaatttctgcattgcattaataaaatacttgtttaatttgccttttatctaattcagttgattaggtgaattgaaaatnnnnnnncaaatgtgcatatgatcataattttttcaaaatgttactgggggtcattttttgggggcatgatgcccaaatttatcctttagtcagcccattggcctacctgaatatgtaaatgacaaaatgtttttatt

SEQ ID NO: 38564 - DNA, 780 bp, Macaca Mulatta
  misc_feature (1)...(780): n = A,T,C or G
ggtgtcctataacagttacctttttgcagttaactgaatataattttttaaaatgtgcacctaaagataatgtctaaagtaattagtttctgcaaatagtggtctctattttattactatcctttcatatactattgctgcctggtttattaaaaaaagttaatacaaaagtgtagtctcttttattatcatgtagaaacctaaaattggaatggttgagactgattgttaaaatttttgactgatcataagtaaagttaattttgtgtctttagcatgaactcttttaatatgaaactgaaaatatgcgtaatttagaagttaaacagtaaaatgttttaaattttatttaagtggaaataaagtttttggaaggaataatgcattaaaaaacttgagttttaatgctttttaatactgaacaatttggttatcaataccaccagggagaaagcatctgactttcactttaaaaaaaataatggttggtatacctctttgtcataagcataatggaaagagacccacaattaaaaacaatangtgaaaaacattttatttaagcagcagttgggtcatctattttctgtcatatctattattgagttatcattttatatgaatttatgagacaacagaagcattatactgtttttttgatgcataaagcacaaattgtaaaattttcagtatgtgaatgacttccgcttattgtgatttaagttttgaaacccaggagaacaccgcgaaaaagtaacctttgatgaaaaaggtgaaatg

SEQ ID NO: 38565 - DNA, 1321 bp, Macaca Mulatta
  misc_feature (1)...(1321): n = A,T,C or G
ggatagtccactggcattttagnnnnnnnnnnnnnnnnnnnngaaacacatgtttctaaaaaatgtcatgttacattcctgcatgtcccttttgatagcattagtggatccactggatttcttttttctttttatgacatagcttttagtcttacctgaatttatgtgtgtttttcagatagtagttaataattatattggtgatgtagcagcaattgtgttggcagggtttgcatatattattagtaattagcactaactgttggactgacttgtgtaaactgcgttaaacatgatttaaaagctattaagaatactttgtgttagcactcctaagaacgctaacagagatcatcattagctgtgaagatttgagttgtatatatctgcactgatattcttatcaaaaatttctacattagcttcaggtattcagattaacacttttgaaattgttgtaacttttagctgattaattagaaaaatgtaatatttcaatgaaagttttaaattatcatttatttattcaaatgagaggggaaagctgaaattccttgttaagacacaaggaaaaagaatgaccctactattatcatgcaaaaatgctttgttagcaccttagattaatcgtataatagctatcgtctcttcagcatttgtttaaattttagaaaatctgtataaattactggtgcataacttaaagattattccgcctttggctaattaagtaatttccttgcagcactagagaccgctcagtgctcttactagatgaactcagtaacgcctcgagctgggttgattgaggatgtgtgacaagctcacagagcccgatgcctgctgctatttcacagcaatgagcctttttctttctacactgaagattttcttctttatttaatgtggtttattttgggctcagaaataattgctgtgttgaaaataatcctttgtcagaaaagaaggtagctaccacatcattttgaaaggaccatgagcaactataagcaaagccataagaagtggtttgattgatatattaggggtagctcttgattttgtaacattaagataaggtgactttttccccctgctttntaggttaaaatgaaagagatttctatattttatcactatagatctactatatcatgatgatctgctggactcaggtatgactgaaattaaattacaatccacggtgtaaaggtgcggtctccccgcgccttggggggccaccccgcaaaatgtgtgnnnaaannggggagacccccccgggagaaattatatatttttggatacatttattatttacaca

SEQ ID NO: 38566 - DNA, 446 bp, Macaca Mulatta
  misc_feature (1)...(446): n = A,T,C or G
gggataggagactagatttgtaatgtagaactctccataacacgaatgaaattaatcccgtccaagccagcatggtggcttcatattgagtagtaacagaagtctgaacaattggataaatttgacttccaagacagctaaacttttcaactgcaattttaaaaactacactacactgttatagttaatctgacaaaaatgtcctcaaagagtactttattttatttaaagcatctgtttaattcaacctttaataattttgcaaagaagggtatgtgtgtattttaatatagcctgacctgaatttatatgtttttagctttagtatttaacattttgtaacaaataaaccttttttaaaannnnnnnnnnnnnnnnnnnnnnnnnnnnnnnnnnnnnnnnnnnnnnnnnnnnnnnnnnnnnnnnnnnnnnnnnnnnnnnnnnnn

SEQ ID NO: 38567 - DNA, 368 bp, Macaca Mulatta
aatatggtcgtattttcaaataatttggaagagtcggttcagtgccatcaagtgtgaaatctattttgatatactttctccccgtgtcttcccagggctgcattttgtgatgaaacatgtttagttcttaacttgcaaggtcatctaaaacttaaagtttcataaagtgtggtttcatatgacttggaatgatctgaaaaactattcagtggttacgaaagagcacagcacataaaaaccaaatttgattagttcaagtcagtgtttatgttttgctttgggggtttgtgtatatgtgtgtagtttttatttatattggaatttggtaaactaaatgttcagacaaataaaagtacttgaaatggaaa

SEQ ID NO: 38568 - DNA, 870 bp, Macaca Mulatta
  misc_feature (1)...(870): n = A,T,C or G
ggcactaataccaaactaacacgcactnnnnnnnnnnnnnnnnnnnnnnnnnnnnnnnnnnnnnnnnnnnnnnnnnnnnnnnnnnnnnnnnnnnnnnnnnnnnnnnnnnnnnnnnnnnnnnnnnnnnnnnnnnnnnnnnnnnnnnnnnnnnnnnnnnnnnnnnnnnnnnnnnnnnnnnnnnnnnnnnnnnnnnnnnnnnnnnnnnnnnnnnnnnnnnnnnnnnnnnnnnnnnnnnnnnnnnnnnnnnnnnnnnnnnnnnnnnnnnnnnnnnnnnnnnnnnnnnnnnnnnnnnnnnnnnnnnnnnnnnnnnnnnnnnnnnnnnnnnnnnnnnnnnnnnnnnnnnnnnnnnnnnnnnnnnnnnnnnnnnnnnnnnnnnnnnnnnnnnnnnnnnnnnnnnnnnnnnnnnnnnnnnnnnnnnnnnnnnnnnnnnnnnnnnnnnnnnnnnnnnnnnnnnnnnnnnnnnnnnnnnnnnnnnnnnnnnnnnnnnnnnnnnnnnnnnnnnnnnnnnnnnnnnnnnnnnnnnnnnnnnnnnnnnnnnnnnnnnnnnnnnnnnnnnnnnnnnnnnnnnnnnnnnnnnnnnnnnnnnnnnnnnnnnnnnnnnnnnnnnnnnnnnnnnnnnnnnnnnnnnnnnnnnnnnnnnnnnnnccaaatcggaatcgcaaaaacctcaccggataccctaaacagccagggccattagaaaggcacaaaacaaagccccaatgcttaactttcaacttggttaaacccccaaaccacaggggcattgcccctccaaagggaaaaagggtttaaaaaaataaagttaaaaagaggggaaccctcgggggccaaaaacacctaaaaaacccccccgcgcccctggtttat

SEQ ID NO: 38569 - DNA, 536 bp, Macaca Mulatta
aaacttctacgcaagattaatgatgaggacaaacagaagattctggacaagtgtaatgaaattatcgactggctcgataggaatcagactgccgagaaggaagaatctgaagatcagcagaaagagctggaggaagtctgcaaccccatcatcgccaagctgtgccagagtgcaggagacatgccaggaagaatgcctgggggattccctggtggtggagctcctccctctggtagtgcttcctcagggcccaccatggaagaggttgattaagccaacccaagtatagatgtagcattgctccacacatgtaaaacattgaaggatctaaatttgtagcaaattctgtggtagtttaaaaaagttcagctgctatatagtaagttacggggcattctcaatatttgaatatggaacacacacacaggggaaggaaataacatcgcacttcataaacactgtattgtaagtggaaaatgcaatgtcttaaataaaactatttaaaattggcaccataaaaatatttgaattaataa

SEQ ID NO: 38570 - DNA, 155 bp, Macaca Mulatta
  misc_feature (1)...(155): n = A,T,C or G
tcgggtcctgaaaggcgtcatgcgggtgggcatcctggcgaaaggcctcctcctgcgcggggacaggaacgtgcgcctcgctctgctctgttccaagaagcccacacacagcctgctgcggaggatcgcccagcagctgccccggcagctccagn

SEQ ID NO: 38571 - DNA, 420 bp, Macaca Mulatta
ctttttcaggtcctctaggacggagagtcgagtgccatctccaaaatactggggctgattgtccttccctgtcctgaggtcactggtggcacagaagtaaagagctgtctggttgggggtggcagactctagggacagggagaatttagcctgttcctgtcgagagacactgtatccattggagatctctcctttgtttatatcttggacatcaaaggagtaatagatcaaccgtagccccagtcctgggtcttgtcgataccagtacatttgatcatgacccttagtctgagaacattccagcataatcctctttcctgtctttgcgatcttattccttggggtctgggtaacatcagcatccatggaccctgttcccaggagacaaaaggtcacacagaagaggagcagggaggccat

SEQ ID NO: 38572 - DNA, 160 bp, Macaca Mulatta
cacaccaccaccacctaatactctttatatttctgtatctgtaagacttcagtgggagagtttccttttaactcttttctctgaatttttagaatttactggtggttgtctcagccttaattgaaactttcttctaagacatcccaactcagtgaaagtc

SEQ ID NO: 38573 - DNA, 2256 bp, Macaca Mulatta
  misc_feature (1)...(2256): n = A,T,C or G
gggcaagaccatcgaccggctcatcgccgacacgagcaccatcatcaccgaggcgcgcatctacgtggccaacggggacctgttcggactcatggacgaggaggacgacggcagccgcatccgcgagcacgagctgctctaccgtatcaacgcgcagatgaaggccttccgcaaggagnnnnnnnnnnnnnnnnnnnnnnnnnnnnnnnnnnnnnnnnnnnnnnnnnnnnnnnnnnnnnnnnnnnnnnnnnnnnnnnnnnnnnnnnnnnnnnnnnnnnnnnnnnnnnnnnnnnnnnnnnnnnnnnnnnnnnnnnnnnnnnnnnnnnnnnnnnnnnnnnnnnnnnnnnnnnnnnnnnnnnnnnnnnnnnnnnnnnnnnnnnnnnnnnnnnnnnnnnnnnnnnnnnnnnnnnnnnnnnnnnnnnnnnnnnnnnnnnnnnnnnnnnnnnnnnnnnnnnnnnnnnnnnnnnnnnnnnnnnnnnnnnnnnnnnnnnnnnnnnnnnnnnnnnnnnnnnnnnnnnnnnnnnnnnnnnnnnnnnnnnnnnnnnnnnnnnnnnnnnnnnnnnnnnnnnnnnnnnnnnnnnnnnnnnnnnnnnnnnnnnnnnnnnnnnnnnnnnnnnnnnnnnnnnnnnnnnnnnnnnnnnnnnnnnnnnnnnnnnnnnnnnnnnnnnnnnnnnnnnnnnnnnnnnnnnnnnnnnnnnnnnnnnnnnnnnnnnnnnnnnnnnnnnnnnnnnnnnnnnnnnnnnnnnnnnnnnnnnnnnnnnnnnnnnnnnnnnnnnnnnnnnnnnnnnnnnnnnnnnnnnnnnnnnnnnnnnnnnnnnnnnnnnnnnnnnnnnnnnnnnnnnnnnnnnnnnnnnnnnnnnnnnnnnnnnnnnnnnnnnnnnnnnnnnnnnnnnnnnnnnnnnnnnnnnnnnnnnnnnnnnnnnnnnnnnnnnnnnnnnnnnnnnnnnnnnnnnnnnnnnnnnnnnnnnnnnnnnnnnnnnnnnnnnnnnnnnnnnnnnnnnnnnnnnnnnnnnnnnnnnnnnnnnnnnnnnnnnnnnnnnnnnnnnnnnnnnnnnnnnnnnnnnnnnnnnnnnnnnnnnnnnnnnnnnnnnnnnnnnnnnnnnnnnnnnnnnnnnnnnnnnnnnnnnnnnnnnnnnnnnnnnnnnnnnnnnnnnnnnnnnnnnnnnnnnnnnnnnnnnnnnnnnnnnnnnnnnnnnnnnnnnnnnnnnnnnnnnnnnnnnnnnnnnnnnnnnnnnnnnnnnnnnnnnnnnnnnnnnnnnnnnnnnnnnnnnnnnnnnnnnnnnnnnnnnnnnnnnnnnnnnnnnnnnnnnnnnnnnnnnnnnnnnnnnnnnnnnnnnnnnnnnnnnnnnnnnnnnnnnnnnnnnnnnnnnnnnnnnnnnnnnnnnnnnnnnnnnnnnnnnnnnnnnnnnnnnnnnnnnnnnnnnnnnnnnnnnnnnnnnaaaatgtggaattgatacaatccatttgaaaataaatgaaactccaccagttcctcctccagctttacctctcgaaatattcccagctcagattctgaacaagcctatgaaagatggaaggaaaggttagaccacaacagctgggtgccccatgagggtcaaagtgaaaggaattacaaccctcacttccctttgagacaacatgagatgtctattttgtatccaaatgaagggaaaactttgaaagatggtatcatcttttcctctttggtaccagaagtcaaaatagatagcaagccttcaactaatgaggatgttggacttagcatgtggtcatatgacattgggataggtgcaaaaaggagcccctctacttcatggtttcagaaaacctgctctacccccagtaatccaaaatatgaaatggtgatcccagatcaccctgctaaatctcatcccgatcttcatgtaagtaatgactgtaactcctcagtggcagacagcagtagcccacttagaaacttcagctgtggctttgaaaggactacaaggaacaagaagttggcagcaaagactgatgaatttaacagaactgtatttagaacagatagaaattgtcaggcaatacagcaaaatcaaagctgctcaaaattatcggaggatctcaagccctgtgatacttcatctgctcacacaggtagcatatcacaaaataatgatgtgtctggtatttggaaaaccaatgcccacatgcctgtgcccacggaaaatgtgcctgataatcccaccaagaaatccacaacaggcctagtaagac

SEQ ID NO: 38574 - DNA, 803 bp, Macaca Mulatta
  misc_feature (1)...(803): n = A,T,C or G
gaggcgagagattatctcgannnnnnnnnnnnnnnnnnnnnntggctagaaaaagggcaaaaagcaaaaccggagaaaacaaaacgttgtggttttctcaggaaaagaaaaaccttcatgaccctacggaagagcatgggagatcaggttccgctaagatgctagctgggccaagtctgttttgttcacctgaaagagtcttagcagagaattgttgcatgcccacccaacagccctctcagccactcaaatacctatcttctccagtctacaagtaacatgttcccacccagctttacagttcttgatgtaatttctccacttacagtttaaagttggtttgagtcactggacaggtgttatatagagctacttagctgtggtttaaatatccttctgttaacaatttgcaggcaaattattggccttttctaataaagtgcaacccaccaaagacctcggcaccattgttaccttgaaaccgattatggatcatgcccacaaggatccaagctaccggctgcatcgaggtgaggggtgaagggtctgtgctagatcaaaaggcacaggtggcaatgtggcagagaagtggcttgtggggagacctcgctttaaacaggcttctggaacacgcagggaaaactggttgcccgctttcccctttccctcccatacagccacgctgaaaatggggctattaaaagcgctaaaaaccgctgctaaggttaaaaaaccagggtactcacatcctggaaggcccccaaaaatgggcaaccccgacaacaatggtgaggaccttcgac

SEQ ID NO: 38575 - DNA, 798 bp, Macaca Mulatta
  misc_feature (1)...(798): n = A,T,C or G
gggaaggatatatattcttccagaaagtcattaggaagaaatttgtcctttttatgagaaataaagcaaaagaaatttctagttggttgctgggattcgaaaaatttctgctgggacgagaataatgtgaagcgctacaaacattcttcccatgctggaatggtagaaattatgaaacccgcatagaatttaccataaaatgcagataattcttgagtttttctgtcgggggaaatgtgagtgctaaaaattccacagcctaaaaataaagtttcactggaattggtttaaatagccaatttggatacccctaaaagattggaaattagttaagctggggaaaaatagnnnnnnnnnnnnnnnnnnnnnaacccccggaaaaaccggggggaaaaaaccccgggaaaaaaggccctctttttcccggaaaaaaaagcccttttggaaaattttaggggaaaccggggnnnnnnnnnnnnnnnnnnnnnnnnnnnngggcgtttttccccccctccccccctatttttttttggggccccaaaaaagttttgcggtgggnnnnnnnnnnnnnnnnnnnnccccccctcttttttnnnnnnnnnnnnnnnnnnnnnnaagtttccccnnnnnnnnnnnnnnnnnnnccctccnnnnnnnnnnnnnnnnnnnnnnnnntttttgaggggagaaaaaccccnnnnnnnnnnnnnnnnnnnnnnnnnnnnnnnnggggggccccccnnnnnnnnnnnnnnnnnnnnnncctnnnnnnnnnnnnnnnnnnnnnnnnnnnnnnnn

SEQ ID NO: 38576 - DNA, 217 bp, Macaca Mulatta
gacaggaacttcctggcgcttaaacaagacaataaacaggatttatccaaaatgtgtttattgagatggtttcccactcatcttgattcagagtgcctttagtgctgcttcctcctaaaggaacatcctggaggaaaaagattcagagattagctgacatcagtccaggtattctgcccacctctcccacaaaagaagcagatgcatgatgatccac

SEQ ID NO: 38577 - DNA, 360 bp, Macaca Mulatta
actagcacaatcaagcttatgattgcttagggtatggctaattataaaaaaagtaggccaacttaaattccactgaagacaaaattttaagtgaataaatatataggttgacataaaacttaaatggtcaaagtttaggcaacactggccctataataatgttgagtatgtatgtgatattttttgagggggaaatcagtacctataaatttttatttatctgtggtagctagtagtttcattgtggattatttattttgcatgacatttttccatattcaagttaaaacctttagaatatatggatagcagaggtgcagatagaatctttgtgaaactctaggggtttgatgggaaatc

SEQ ID NO: 38578 - DNA, 117 bp, Macaca Mulatta
ggtggcaggatatcaaacctctgtggtattttagtagctcactataaacaatatccagagataaaaacaaaaggcatgactgcacttccatgcattgtattatttgtttctgagcaa

SEQ ID NO: 38579 - DNA, 433 bp, Macaca Mulatta
  misc_feature (1)...(433): n = A,T,C or G
ttaaaaggaaagaaaagattgagtacatgccatgtgacaggccttcaacaagggaccatctcttgtcataaacaagaggcatattctgaacaagtgaccatgggtttaacttgtacacaggcattatgaaaacgatgtctgcatttcaataaatatttgttatataaatgaacaggactgttcccagagcctgctgcttggaggaaactggggaataaggaactcaaaaacaaggtaagaatgtcagagcagggaagggaagggaaggagggagggagtcgtgnncttgggtcnnaggnnggntgaccgatgctggcngangaanactaaaacttacttttctgggactctaggaattccaacaagtgagaccaacaacagatactttcaaattaaagaaaggcattgttcccaaactttgacccctgtgcac

SEQ ID NO: 38580 - DNA, 805 bp, Macaca Mulatta
  misc_feature (1)...(805): n = A,T,C or G
ggnnnnnnnnnnnnnnnnnnnnnnnnnnnnnnnnnnnnnnnnnnnnnnnnnnnnnnnnnnnnnnnnnnnnnnnnnnnnnnnnnnnnnnnnnnnnnnnnnnnnnnnnnnnnnnnnnnnnnnnnnnnnnnnnnnnnnnnnnnnnnnnnnnnnnnnnnnnnnnnnnnnnnnnnnnnnnnnnnnnnnnnnnnnnnnnnnnnnnnnnnnnnnnnnnnnnnnnnnnnnnnnnnnnnnnnnnnnnnnnnnnnnnnnnnnnnnnnnnnnnnnnnnnnnnnnnnnnnnnnnnnnnnnnnnnnnnnnnnnnnnnnnnnnnnnnnnnnnnnnnnnnnnnnnnnnnnnnnnnnnnnnnnnnnnnnnnnnnnnnnnnnnnnnnnnnnnnnnnnnnnnnnnnnnnnnnnnnnnnnnnnnnnnnnnnnnnnnnnnnnnnnnnnnnnnnnnnnnnnnnnnnnnnnnnnnnnnnnnnnnnnnnnnnnnnnnnnnnnnnnnnnnnnnnnnnnnnnnnnnnnnnnnnnnnnnnnnnnnnnnnnnnnnnnnnnnnnnnnnnnnnnnnnnnnnnnnnnnnnnnnnnnnnnnnnnnnnnnnnnnnnnnnnnnnnnnnnnnnnnnnnnnnnnnnnnnnnnnnnnnatacccctattcattctatagggcctccctttccatccccaccttagttgaggaaggccagttataatttttaaaatcaactctgaccatggaatcctgaagaaaggccctttttggcctttcaaaaaccgttaaaaagttaacttacctataattcgcaaaccaaaccccccctttaacctc

SEQ ID NO: 38581 - DNA, 926 bp, Macaca Mulatta
  misc_feature (1)...(926): n = A,T,C or G
ggaattggtctttcctaaaaatgcaatagatatgctgctagattgttattttgtttgcactttttttgattggcattttaaaatcggtaaactgaagacattgtcgtgttttattaatttaacaaagttgaaagtgactgctctgtacatcatgaccttaacaatgttaatgctggtaagtgaaagttcactgttgtctgtatactaaatttattggtgtttctaacttaaaattaagactgcggattatcccccaccagccttagtccaggggtgtggctctgtccgggtgcagtatgcagtcatgggggaaaccttgcttttcaggtcctgggagaaaaaggagatgttctctaattactgggcttccaataaacaggaaatcccgaactggcgtggccatgtnnnnnnnnnnnnnnnnnnnnnnnnnnnnnnnnatgtcggggccgcactcgggcccctccgaagaaagcttttgctaaaagccattgtcgtttatggggcccccccgggagcccgccaggtaaggatagaaggtgaaaaacagtggggagccagtaaagcactgaatttgccgcctaaagagaaaaattccctgtgggcccagtggaacctaagtgggcctctaggaaagttcccccnnnnnnnnnnnnnnnnnnnnnnnnnnggcgggtgcagacccgaagccgttttctgagaacaaaagctcccagaagtggaaagttccgaagagagcacttaggtggggatcctattccaagcagggagggtcccaagaggaaagcctcgaagaatcagaatttagcgccgcgagccctggcaaatagaatcaagaggaacgggtggaaaaattcaatagaaaaatacgtcgcgaaatggaaaacccagtccagaaccggcatggaaatacctgaaatcaccgaagg

SEQ ID NO: 38582 - DNA, 658 bp, Macaca Mulatta
agtttaccagacacctgagaggtcaagaattttagcaactactggtttaccaataaactttttaacatcagtgtattatcaacgaagaaacctcctagtcactggatcacaatgcgggttgcattgctttgtgagaagaatgaaaaataaatgtccataccaaaccattttaatttttgactctaaccagacttacatgtttcaagacattcacgtgtagtcaacaccctttataaagtatttgtgtgtttagccagactgaacaggtgcagtctttatttcatttgtacatgaaaacttcaacccagaggggaatcttgcagctgcgttttatcctaagtacctaagacctgaccgtgcaatgtccctgtggttgggctctagtacaggtcagcacaacccgcaatacagcaaatttgactctcctaacagtaaaaagcacggcacctgacaggatatcagggcatgcctttattaactttttggtaaaaatgatttataaaattatatacaataaaataaatacacacatgtagaatagatctttggaatgcttcccctggcttctctaagtaaacacagaatactccactgctgacctagctgcagacttctgaaactaaagagaagggccttcttctttaaagaaatgcagtct

SEQ ID NO: 38583 - DNA, 650 bp, Macaca Mulatta
aaagttgttccagatatagcccatggctgggaattggtagtttgtcaagttgctaggataacaatcgctatttactgtgaaaggatatgtgccaggcagctaagggcaggggaaatagtcagtgattactggcttgtctctttgccctgaacaccccggcaaggttcaccagtcttagctcttcctgtacctctcccctaccatcagtcatcatcagttttacccacctcaacaggtgcttacttgggacaggatggtagctgagcctttcggaacagggttggcttggcagccacttgatgtcctagagtacagtataggaaagatctataagtgggttgtgggcccctcacagctctggggtcttggcatagggcttggattagtcagagtgagggggaaagtgtggccagtttcccaacagtggtgggctgcagcatttcctggtagaagatgtgagtgggtgtctcaaatgaggtgtgcatgaacaaaacggccatgtgctccgtgcctccctttctgctgccaggcctattctagctgggttaggtccttctccaggctgggtctcgccaggcagggtaattgggtagcaagttccagaattgattaaacagaatatttggatctgaaataccattttaacattg

SEQ ID NO: 38584 - DNA, 82 bp, Macaca Mulatta
caaatgttaaaagccacatgctcaaaggacacttaacaactcatgaaaatatacatgattaatgttaactgagaaaattggg

SEQ ID NO: 38585 - DNA, 771 bp, Macaca Mulatta
  misc_feature (1)...(771): n = A,T,C or G
gggtcacaaaattaaaactcagcccgnnnnnnnnnnnnnnnnnnnnnnnnnnnnnnnncnnnnnnnnnnnnnncaggcnnnnnnnnnnnnnnnnnannnnnnnnnnnnnnnnnnnnnnnnnnnnnnnnnnnnnnnnncacaaaaatacaaaaagctgggtatgacgtctggtnnnnnnnnnnnnnnnnnnnnncnnnnnnnnnnnnnnnaaatagctnnnnnnnnnnnnnnnnnnnnnntagcgagctgagatcatgccattgtactccagcctggacaacagagccagattaagtctcagaaaaagtaatactcaaaaaattctcaagcataattcaaaagaaaggacttacttttaaaaaattctctagtgtgattcaaaagaaaggactttgttttttttaatgtggccatccgtctagttgttctttttttccagctcagagcagagaatatcactgacatacttgaaatggtggataactatggaaattgtaattggacaaatgtacactttagatttatggactgagccacatataataaggtctctccaggtaattgatccaggagatttaggcctctttcnnnnnnnnnnnnnnnnnnnnnnnggccctgtttttgttttaaaggaataaaaccttaaacacttatgccaaagggaaagtaggcattgacccaaaagggtttattttttaccaaggnnnnnnnnnnnnnnnnnnnnctttggactttttgccaccctgaatctaaaacttggttccccccccc

SEQ ID NO: 38586 - DNA, 820 bp, Macaca Mulatta
gggcagtcgggcgctgagtggtttttcggatcatgtctggtggctccgcggattataacagagaacatggcggcccagagggaatggaccccgatggtgtcatcgagagcaactggaatgagattgttgataactttgatgatatgaatttaaaggagtctcttcttcgtggcatctatgcttacggttttgagaagccttccgctattcagcagagagctattattccctgtattaaagatccaaaaggtaattctggcacttggagactatatgggagcaacttgtcatgcctgcattggtggaacaaatgttcgaaatgaaatgcaaaaactgcaggccgaagcaccacatattgttgttggtacacctgggagagtttttgatatgttaaacagaagatatctttctccaaaatggatcaaaatgtttgttttggatgaagcagatgaaatgttgagccgtgggtttaaggatcaaatctatgagattttcccaaaaactaaacaccagtattcaggttgtgtttgctttctgccacaatgccaactgaatgtgttggaagtgaccaaaaaatttcatgagagatcccatttcgaattctggggaaaaaaggagaaattgacccttgaagggaaaccaacagtttttaaattaacggttgaaaagagaagaaatgggaaatttggataccccttttgtgaacttggtacgaaaaccctgaaccatttaccccaagctgggttaatttttccccaataaaaagggcgcaagggtggaactgggcttgaatttgagaaaaatggcctgcccaaaaaaa

SEQ ID NO: 38587 - DNA, 844 bp, Macaca Mulatta
  misc_feature (1)...(844): n = A,T,C or G
ggtgcaataacatggtgaaactcacaaacactgtgttgaaggaagtaagccagaaacaaaagagtacataccatataccataggatggnnnnnnnnnnnnnnnnnnnnnnnnnacccnnnnnnnnnnnnnnnnnnnnnnnnnnnnnnnnnnnnnnnnnnnnnnnnnggccataaattttaaattatgtgccgttccaaacattataattgttcaactttattattagttattgttgttagtctctgactatggctaatttatgagttaaattttatcataggtatgtatgtataggaaaaaacatagtctatatagggttctgtactacccacattttacacatccactgggggtcttggaactaattctgcctgcataagcggggactaccatactgcagaaaaaatcacaaagtcctccgcttctaaattcaattttcccattacctcactgcgtcactttgggacagtcgctccttctccctggaactcgtctccctcctgcataacaccggactgacgttaatactccccaaggggctgcttcgccccttcattgagttatccgccagccacagcaggccccactctggatgtagcttgccccggccccgtccattttgagcttcctgcgccacttcttctcttccacgtgttgcgcggccacggatgtccttccccctatccccgccgctctcccgaccaacgcagcgcgcccatatcgcctccaccccccgctccgtgcggacttccttacccatggagtcccccctaccgctttccacgcatgcccccgccccaatattgttttgcccgaggcacacacagtcgaaccatgcattac

SEQ ID NO: 38588 - DNA, 620 bp, Macaca Mulatta
cccaggcgcccctgcgcggcggtgccggcgccagttgggacgcggagcagaggagcacggccgggcgccatggccccgtggggcgagcggctggctggagtgcgcggggtgctgctcgatatctcgggcgtgctgtacgacagcggcgcgggcggcggcacggccatcgccggctcggtggaggcggtggccagactgaggggctcccggctgaaggtgaggttctgcaccaatgagtcacagaagtcccgggcagagctggtggggcagcttcggaggctgggatttgacatctctgagggggaggtgaccgccccggcaccggccgcctgccagatcctgaaggagcgaggcctgcgaccatacctgctcatccacgacggagttcgctcagaatttgatcagatcgacacatccaacccaaactgtgtggtaatcgcagacgcaggagaaagcttttcttatcaaaacatgaataacgccttccaggtgctcatggagctggaaaatcctgtgctcatatcactgggaaaagggcgttactacaaggagacctctggcctgatgctggatgttggtccctacatgaaggcgcttgagtatgcctgtggcatcaaagc

SEQ ID NO: 38589 - DNA, 793 bp, Macaca Mulatta
  misc_feature (1)...(793): n = A,T,C or G
gggtgtggtgaataatagagcttgagcactttaaggcaccatagggaccccttcaatgtaatgatgacaatgccgaggtgcagagaagtcaggtaattagcccaagcccctactctaagggcagaccctatcttcctaatttgtcagaagacttcctattatactgcttataaaaagtcctatgaaattggtattgtcattattttacaaataaaatattcttcaatttttgtttctgctatgcatgggttacttagtattttatactttgaatttcaagcatattaaaaaaacaggtatctaggcnnnnnnnnnnnnnnnnnnnnnnnaatctcaacattttgggagtctgaggcaagaggatcacttgaggccaggagttcaaggtatcttttgttgatctctacactgattgtattctctcttttattctatgaaagttaaagatttttttctgatactatatattgtcagtttttttaatactcagtttgtgttttaaaagaaaaacattcggcaactgatgtctgctgttctgtatgtatctatccgtccagatttgaccattatgttgtatgaatctaacagaacctcatcaatgtttaaccggcttttttgaaatcgttactgaaatagctaatattaaaatatccccgggtttgtccggaaaatttcctttaattcccattatacnnnnnnnnnnnnnnnnnngaaatttgaatttgatggttaaaaattggtaatacaggccaagccgccatgggcttcacaacctattattccccaacatttt

SEQ ID NO: 38590 - DNA, 660 bp, Macaca Mulatta
tactttgtgacgtcagaatagtagttctataacttcattgtaagactcacctggagaattcattaaagatgcagattcagggccacgtgttcaattctgttatagtaggtcctgtaataaggcctaggaatggccattttaaacagtacactaggtggttttgatacagatccagggactctaacttagaggaacactaggttagaggtttctcaattagacctgcaaacacctaagcacctggctaaagctacagtgaagatctgtatgaagatatatagttctgcagaatttaaaaaaaagcagaattcaagtcttcggccctcagaagttaaattcgtattccatctaagccaactttgtttttcactaagttagaataatctcctagtattccagtattacacagaacgaagtagtactactaacacatagaagtcattactgtgatataaaaagcaaaatagattcttaattaaaaattagtcacccatattcagtgttgaataagaagtcaaagtttctagcgtaactatcttgagtgcatttaaaatgcttttagagcaataagataagcttctagctcactgcctagaaaaacagaagatacaaattcatagtgtcagaaatgacagaggggatacactacagacactatag

SEQ ID NO: 38591 - DNA, 593 bp, Macaca Mulatta
  misc_feature (1)...(593): n = A,T,C or G
ggggagtccgaggggtggggaagaacatatggacaataaaggatagctctctctacttttccctgggaaatgaagctgaaaaagggaatgaatccattgtctcaggactcatgtggggagcaacgaccaatgcataagtccaaattgtccagggggggtctttacttctnccaacgcggggggcctatttttcgggggctatgagaggggctttgggggggttttccttctttttcagggggggtaactctattttattacgacaatgttattcaaacataaaattatttttcccacctggtgcatataaataaatattactcaggaacactttaatttgtccaaaagagtgattatacaatgtaccttccgggagacattctcttttcttgttctttcaaaaagctattttaattttatatactcccaacatattaaaattttttcttccatttactataactcacaacccagatgatcttctttcctttgttgcttattcactcactgctatcattacttttattaaaaatcttcacacttacatttatttttccctctctagattccataacacctccttttactttttt

SEQ ID NO: 38592 - DNA, 627 bp, Macaca Mulatta
  misc_feature (1)...(627): n = A,T,C or G
ggggacccggagctgtctgaccttcaaatgttcactgcatctttgtttcaccagctcaaggctcaaagcatggagagccagtaactgattggctgagcttacattgtatgccccaggtgggcagtgaggaagccttgaccttcccttctcttccacaggaggagctgggagtaagaaagaggtttcacccgtggggaatcctcccccggacagagaagggagtgctgagaggaggagagtgctgctggcaacaagcaagatcgcacctgccttccacangtggacaggaagagctccacgaaagcgaccaaaaatgacctccccttcaaagccgaagggacaaccgaggcacccaggattgaaaaataaaataacccttttggaccgaaggaaaagaaaagtttaaagaaggtccccttcccccttgggttggtccaatggcccaaacttgttcaggggcacctatagggcccctccctggttgccccccccttgaccnnnnnnnnnnnnnnnnnngaacttccaattgcgggctattttccttaaactttccccaattttttttcacaggaatttttcccggaaaaagtgtttttatttaaaaagagcccccctttaaaggggttt

SEQ ID NO: 38593 - DNA, 161 bp, Macaca Mulatta
ggctagcagccaagagagaccagggtttggggtcgctggatcctggctctgatactgaattgttatgtgaccattctgcgcccgtttccattctctggtggctataggaaggcagatgtggctcctcaccctgcctgtgccatgggctggctgcattactg

SEQ ID NO: 38594 - DNA, 832 bp, Macaca Mulatta
  misc_feature (1)...(832): n = A,T,C or G
ggtagctgtatagaccccagctgcagtgaaatagccgtaaaagggaagggataatcgagtggtggagtaaaatctgcaaacagaaaaagcacagacctgtttttggaacgaggctttgtaagtgtctctcaggcagagttctgggaagacgtgatggggagagcctaggagtaggattccttcctcagatgctctcccttgggaactcccagaggtcaggttccatgtgaaccacatcattcccagagatgtctccccgggagacttatgtgaatttagagaaagtccccagtcctgggaatcagtgaccctggcctttcccttgaatattaagaaggattatcagtactcccatctcccttttacttccatctgagtatgtgtatggtagatgatgagagcttgtgtggtgggaataattttttccagtttagccagtctgggttccaagaaaggtgtgatgtctcatgattccttacccctttcctttccccttctcccttgccttgannggtctctagagcccccaggaaaggggaccattgctgagcatatcttanaaacaaggtcaagggaagtttgttgaaatttccattttggtctccttttgtttttcagaaagggagtgtttttttctctcccgaaatgctagtcagtggtttgggttactattaaggccaggcgcttgggtgaagtgctttggacaattagaaatgtggtgggaaagtgaaatttggtgagaactcctggaaaccaaagccttcaagggaagatccctggcaaccttttttttctcctttcccccctttttcccgggcccctagaaaaaacc

SEQ ID NO: 38595 - DNA, 408 bp, Macaca Mulatta
ttccaccacggccagtattatgggtacctcagcagcagcagccctggggaggtggagccgcccccattctacgtgccagaagtgggcagccccctgagctccgtcatgtcatccccgcccctgcacaccgaggggccctttggccaccctaccatccccgaggagaatggagagaatgcatccaacagcacgctgcccttgactcagacacctacaggagggcgctcccctgagccctggggccggccagaattccccttaaaagggctggagaccccagcaatgatgttcccccaccagctgccaccctgtgatgtgcccgagagtctgcagaaaggggccggcctcccccgaggactgccccccacctccctacaggtgcccgcagcctacccgggcatcctgtct

SEQ ID NO: 38596 - DNA, 475 bp, Macaca Mulatta
  misc_feature (1)...(475): n = A,T,C or G
ggagtggcagccggagtctgagctgtcctgggggaccaagtgggagcttaagatgggcaagacctgaggccctgggcagacgcatcgaagcaggcagaagcaggcatggnnnnnnnnnnnnnnnnnnnnnnnnnnnnnnnnnnnnnnnnnnnnnnnnnnnnnnnnnnnnnnnnnnnnnnnnnnnnnnnnnnnnnnnnnnnnnnnnnnnnnnnnnnnnnnnnnnnnnnnnnnnnnnnnnnnnnnnnnnnnnnnnnnnnnnnnnnnnnnnnnnnnnnnnnnnnnnnnnnnnnnnnnnnnnnnnnnnnnnnnnnnnnnnnnnnnnnnnnnnnnnnnnnnnnnnnnnnnnnnnnnnnnnnnnnnnnnnnnnnnnnnnnnnnnnnnnnnnnnnnnnnnnnnggtaccgatgccgaggagaccattctaaacgccttcaagatgctggacccaggcgaaaaagggaaaatcaacaaggagt

SEQ ID NO: 38597 - DNA, 976 bp, Macaca Mulatta
  misc_feature (1)...(976): n = A,T,C or G
agatgtattggaaagtcttaccacagtttgttaccaagcagttttttttgttgtttgnnnnnnnnnnnnnnnnnnnnnnnnnannnnnnnnnnnnnnnnnnnnnnnnnnnnnnnnnnnnnnnnnnnnnnnnnnnnnnnnnnnnnnnnnnnnnnnnnnnnnnnnnnngcgagtagccaggactacaggcacccaccaccatgcccggctaannnnnnnnnnnnnnnnnngnnnnnnnnnnnnnnntgtgtcaaccagaatggtcttnnnnnnnnnnnnnnnnnnnngcctnnnnnnnnnnnnnnnnnnnnnnnnnnnnnnnnnnnnnnnnnnnnnnnnnggcccagcagtttttgtagaataaaaagagaaaattttaaattttattagcaatctggtttgggttagattactagagtttaagaggctgtcatctcatcaaatagagttaaaagtagggatgttctctgcaaggcttctgatatgattaaataattgattgtaaagtaatcaagccatacttttttgatttgtcgtatctggataacacgttcatggtttgtttaataaatgaaactgcaaaaagtttctatatttctgttacatttctgataaagcattttccagaattcttctctgttcaggcgccagatcttgccagagaattatgtacgtattgagccattaagcttcctagagcgagatagttcctgaaacggttgagacatgtcgcaataaagagccataaaggtcctggtccggacgcgggaaatcggttatcatggcgaacctcaggggattcccggtatttgccctttttttagtcccaaactttggaagagggggggcataccgctgggacaaaggggtcctccttgctctcccccctccctcccccggcaccccccccccccacaccccgaaaaaaataacagaaaaagaaacaagaaaaccaaataagaaaacgaaataacaaaa

SEQ ID NO: 38598 - DNA, 736 bp, Macaca Mulatta
  misc_feature (1)...(736): n = A,T,C or G
gggatattaaacctctttggtctttaattcaaagtgatcagttttgctttgggctaatataaaataagagacctctcgtaaagtttattcttgagccaggcgcannnnnnnnnnnnnnnnnnnnnnncactnnnnnnnnnnnnnnnnnnnnnnnnnnnnnnnnnnnnnnncnnnnnnnnnnnnnnnnnnnntatggcaaaaccttatctctatnnnnnnnnnnnnnnnnnnnnnnnnatggtagcaggtgcctgtaattcctgctactcgannnnnnnnnnnnnnnnnnnnnnnnnnnnnnnnnnnntggagtttgcgagttctcaaagagctaagattgtaccactatactctnnnnnnnnnnnnnnncannnnnnnnnnnnnnnncggacaaactaacaaaccaaacaaatgtttattcttgagcatctgagagctacttctttgactccttattgagttggcatcttttaaacctgcattaatctaccaattgttttggcagcatgctgttgtcttgttctgaaatcgacttaataatcatatttattggagacagtataatctgtaaacataactcactgctaatccctggtaatttaataaaatttttctagatggccgggtactagaataaaggaaccaatcctccgatttcaccggaaacctggtaaataactggacttgggttttcaaatgcatgggtcctttaaaatgaaaggtatggcttaaattg

SEQ ID NO: 38599 - DNA, 485 bp, Macaca Mulatta
  misc_feature (1)...(485): n = A,T,C or G
tctgtggttagcaacttgataacagaaataggacactcagttacaaacattatctcctttagtttttcagaaaatgcatccctgatttcattcatttccagcttgaaagccagccatattatctagtccctaccaaactgctctaggaggtcatttccattttgttggtgatattagacgccagactgcaggaagtcacctttaacttcagcattccagatgaagtttcctgactcagtgcttttgcataaggaactagaacaaaaaagtggtaaggaaaattggagatgctaacatcctcccccatcccaactgcaccttaaaatatgcatgtcaccttcaaggtcttataattgcactgtttgtattatgtatgtacagattataattattgctacatttgannnnnnnnnnnnnnnnnnnnnnnnnnnnnnnnnnnnnnnnnnnnnnnnnnnnnnnnnnnnnnnnnnnnnnnnnnnnnnnnn

SEQ ID NO: 38600 - DNA, 704 bp, Macaca Mulatta
  misc_feature (1)...(704): n = A,T,C or G
tgtgagtttactatccccagnttggcagacatggtaaaatgaggctaagtaactcgcccagggttgctcagcggataagttggcagatccaagacaagggctcagacattttgcttcaagttcagtattttttttatattaccctattcttgactaattgctttagatttaaaatggcagtatcttaaataacccacataagcatggttgaactattcctaggaggtaaagggcaattgcctcagacatctgccatgatctctagggttgctttttagtggaattaaattcagtttgttaatttctacatacagcagcagtccatgacccaagaaattctatttatataagtcctggtgtcttggggtttgactgacctgttttagtttaatactatcaatatatttgggtttcactttatattgtttaggggcttctagggcttaaagatagttcattctactctgttctaaactgtcaacccctaagaaagtggctgattatcagtggttactgcacacagtttatctgtccacctaagatgcacttgggcgtgaaagactgggaaagaatgggtcatgacaaatttttagccaacccaatggtgctggaaatatgaatgcttgcctcaatttggtaattggtctcatcctgaaatagcaagagtattatactactgcttatgtgagcttatctcttcagga

SEQ ID NO: 38601 - DNA, 815 bp, Macaca Mulatta
  misc_feature (1)...(815): n = A,T,C or G
gggatgggattctatctagaggtgatgggagacagtgacagatcatcaggcattagattctcataaggattgtgcaacctagatcccttcaatgaacagttcacaatagggttcactctccaatgagaatttaatgccgccgctgatctgacaggtgccagagctcaggcggtaatacaagaggctggagatatagataaagcttcacttgacttgcctgccacttacctcttcttgtgcagcccagttcctaacaggccacggactgctaccagttggggtagcagttggggacccctgtagtacgatatttataattacatgtgtggttacctaatatttccataatacagcactggtctagactgtaggccattctcctttaaaaagaaccctgcttccttacaattttactgtttagcagccgtgttttctaccccttcttaaaattttcagctaccacacccctgttttgttctaatattaaagatgacatctaacactcaatttttcttttctgttctaagctccatcatcattctgggacatttttaggcccatgtgtaagacacattcaataagttagcttcagtttcttgactattcttgagacatccttttttttctcctctctgtctcatccgaagagccatcccttttaatagcccctgtggggggaatgagtnnnnnnnnnnnnnnnnnnnnnngnnnnnnnnnnnnnnnnnnnnnnnnnnnnnnnnnnnnnnnnnnncgggccgccttcggccctttaaaaaagctttttctagaccatttcgtttggggcgcccggggcc

SEQ ID NO: 38602 - DNA, 631 bp, Macaca Mulatta
cggaaaggaggtgagaaggaaaggcaggtcaggggtgagtcggaagaaaggaggctcagttggccagcccaggaccggggatcagggtgaggcggcgagggctcccccaaactttccaggatgccaggggcgccatggtggccaaaggtttgttggacggcggggcgcacaccgtgcgtcccgctggagacaacctgaggtctctcggagctggtgccccggctgcgcgactgaatcccgaacgcacccccgatttggagctgcacacccaaacggcatcggtaagtcacttgttttgcgcgcctttcttcctcctagaaaaactagtttcaaacaagttggccttctcaggtgcccaaaatgtggttcggaggtgcgcgccaactttcacgttgtgagagcagccgcgctgtagagacactgctgcgatgtgtggaaagtaatcagaatgggattgggcaagaactctggagactgaccaccgggagggaagtcacgcgcgcgcggcgcctaagcagctcagagccgggagcccaggtcccagagctgccagtgaagccgcgggacctccgcgccagtgccccccgctgccgcgcgccagtcttggccgccacagcccgcctcccgccgc

SEQ ID NO: 38603 - DNA, 2843 bp, Macaca Mulatta
  misc_feature (1)...(2843): n = A,T,C or G
gtccaaagcagaaagtgcattgctgcaggaaatccccactcctcggcccaggcgcttacgaagtcccagtaagaaagaactggagaccgaatttggcacagannnnnnnnnnnnnnnnnnnnnnnnnnnnnnnnnnnnnnnnnnnnnnnnnnnnnnnnnnnnnnnnnnnnnnnnnnnnnnnnnnnnnnnnnnnnnnnnnnnnnnnnnnnnnnnnnnnnnnnnnnnnnnnnnnnnnnnnnnnnnnnnnnnnnnnnnnnnnnnnnnnnnnnnnnnnnnnnnnnnnnnnnnnnnnnnnnnnnnnnnnnnnnnnnnnnnnnnnnnnnnnnnnnnnnnnnnnnnnnnnnnnnnnnnnnnnnnnnnnnnnnnnnnnnnnnnnnnnnnnnnnnnnnnnnnnnnnnnnnnnnnnnnnnnnnnnnnnnnnnnnnnnnnnnnnnnnnnnnnnnnnnnnnnnnnnnnnnnnnnnnnnnnnnnnnnnnnnnnnnnnnnnnnnnnnnnnnnnnnnnnnnnnnnnnnnnnnnnnnnnnnnnnnnnnnnnnnnnnnnnnnnnnnnnnnnnnnnnnnnnnnnnnnnnnnnnnnnnnnnnnnnnnnnnnnnnnnnnnnnnnnnnnnnnnnnnnnnnnnnnnnnnnnnnnnnnnnnnnnnnnnnnnnnnnnnnnnnnnnnnnnnnnnnnnnnnnnnnnnnnnnnnnnnnnnnnnnnnnnnnnnnnnnnnnnnnnnnnnnnnnnnnnnnnnnnnnnnnnnnnnnnnnnnnnnnnnnnnnnnnnnnnnnnnnnnnnnnnnnnnnnnnnnnnnnnnnnnnnnnnnnnnnnnnnnnnnnnnnnnnnnnnnnnnnnnnnnnnnnnnnnnnnnnnnnnnnnnnnnnnnnnnnnnnnnnnnnnnnnnnnnnnnnnnnnnnnnnnnnnnnnnnnnnnnnnnnnnnnnnnnnnnnnnnnnnnnnnnnnnnnnnnnnnnnnnnnnnnnnnnnnnnnnnnnnnnnnnnnnnnnnnnnnnnnnnnnnnnnnnnnnnnnnnnnnnnnnnnnnnnnnnnnnnnnnnnnnnnnnnnnnnnnnnnnnnnnnnnnnnnnnnnnnnnnnnnnnnnnnnnnnnnnnnnnnnnnnnnnnnnnnnnnnnnnnnnnnnnnnnnnnnnnngacaaacgagaaaattccgtgatgctgaacaagaaaaagatcgaacattgcttaagaccatcataaaagtttggaaagagatgaaatcccttcgagagttccagagatttacaaatactcccttgaaacttgttttgagaaannnnnnnnnnnnnnnnnnnnnnnnnnnnnnnnnnnnnnnnnnnnnnnnnnnnnnnnnnnnnnnnnnnnnnnnnnnnnnnnnnnnnnnnnnnnnnnnnnnnnnnnnnnnnnnnnnnnnnnnnnnnnnnnnnnnnnnnnnnnnnnnnnnnnnnnnnnnnnnnnnnnnnnnnnnnnnnnnnnnnnnnnnnnnnnnnnnnnnnnnnnnnnnnnnnnnnnnnnnnnnnnnnnnnnnnnnnnnnnnnnnnnnnnnnnnnnnnnnnnnnnnnnnnnnnnnnnnnnnnnnnnnnnnnnnnnnnnnnnnnnnnnnnnnnnnnnnnnnnnnnnnnnnnnnnnnnnnnnnnnnnnnnnnnnnnnnnnnnnnnnnnnnnnnnnnnnnnnnnnnnnnnnnnnnnnnnnnnnnnnnnnnnnnnnnnnnnnnnnnnnnnnnnnnnnnnnnnnnnnnnnnnnnnnnnnnnnnnnnnnnnnnnnnnnnnnnnnnnnnnnnnnnnnnnnnnnnnnnnnnnnnnnnnnnnnnnnnnnnnnnnnnnnnnnnnnnnnnnnnnnnnnnnnnnnnnnnnnnnnnnnnnnnnnnnnnnnnnnnnnnnnnnnnnnnnnnnnnnnnnnnnnnnnnnnnnnnnnnnnnnnnnnnnnnnnnnnnnnnnnnnnnnnnnnnnnnnnnnnnnnnnnnnnnnnnnnnnnnnnnnnnnnnnnnnnnnnnnnnnnnnnnnnnnnnnnnnnnnnnnnnnnnnnnnnnnnnnnnnnnnnnnnnnnnnnnnnnnnnnnnnnnnnnnnnnnnnnnnnnnnnnnnnnnnnnnnnnnnnnnnnnnnnnnnnnnnnnnnnnnnnnnnnnnnnnnnnnnnnnnnnnnnnnnnnnnnnnnnnnnnnnnnnnnnnnnnnnntgctttgaagagagcagatgccatctcttctattggcacatcaggactgacggatatgaaaaagtcgtccaagtgggcagcagagtccaagctcgacccaaatgaccccaacaatgcccctttgatgcagctaatctcggtnnnnnnnnnnnnnnnnnnnnnnnnnnnnnnnnnnnnnnnnnnnnnnnnnnnnnnnnnnnnnnnnnnnnnnnnnnnnnnnnnnnnnnnnnnnnnnnnnnnnnnnnnnnnnnnnnnnnnnnnnnnnnnnnnnnnnnnnnnnnnnnnnnnnnnnnnnnnnnnnnnnnnnnnnnnnnnnnnnnnnnnnnnnnnnnnnnnnnnnnnnnnnnnnnnnnnnnnnnnnnnnnnnnnnnnnnnnnnnnnnnnnnnnnnnnnnnnnnnnnnnnnnnnnnnnnnnnnnnnnnnnnnnnnnnnnnnnnnnnnnnnnnnnnnnnnnnnnnnnnnnnnnnnnnnnnnnnnnnnnnnnnnnnnnnnnnnnnnnnnnnnnnnnnnnnnnnnnnnnnnnnnngcattttgggcctaagccttttcaagctggccgaacaaaagcgaccattgcggccaaggagaaaaggtcggaagaaggtgacagcccaaaacctgtctgatggagacataaagctgctggtgaacattgtccgagcttacgatattccagtgaggaagccggcagtgag

SEQ ID NO: 38604 - DNA, 799 bp, Macaca Mulatta
  misc_feature (1)...(799): n = A,T,C or G
gggggtttgnnnnnnnnnnnnnnnnnnncagctcttttaatataaagattcttgatacaatgaaatctcttatttcaaatgtgagtttttcttattcttcacccacccctccccctgccattgtatttcccatctatttaaaggagtttcaacaatatacattgcatcatatgcagtaggtactgctttttcagaaagacttggaaaacacacctgctatgagtattttgttcagatgtagccatttacctggctctcaagtcgtctttgtggagagggtcttagacaaaaatcttccttgtatttacttggggtaagtgaagtccaaattcgtacagtatactatttcaagatttctgatacnnnnnnnnnnnnnnnnnnnncattatatctcttattaaaacttctcccaactaaggttgtgctgttatttattttctattataagaaaagttttctttaagtagtttcttttaccctctaatctaatttcataccaaatacctggataatagaaatgatttatttcaaccccaaaaatttccaatccatcgtttataataatggccgcagttacttagtagtggaacaaataaagtcaattttccattataatttccacctttgctctttaaaaaaaccacaattaagcatttcaatttaacacttccatcccaaggaattattggaaatgttgaacaatggtgaaattcaaataaacttccccgtttggtttcagctagggatatctgtaggatataatccccgggaaaagcgctttccccctatatttaacccc

SEQ ID NO: 38605 - DNA, 402 bp, Macaca Mulatta
gcggaggggcagtttctgctgcttgctggccaaggtcacctcctgggccgcctggcagccatcgtggctaagcaggtactgctgggccagaaggtggtggtcgtacactgcgagggcattaacatttctggaaatttctacagaaacaagttgaagtacctggctttcctccacaagtggatgaacatcagcccttgccaaagccccacgtcttctggcagagcttgcgaggcgggctgccccacaacagcagccagtcaggccgcctaggaccagccgctaggtgctcggtggcatcccaccgccctgtgacaggaaaaagtggatggtgctttctgttaccctcgaggttgtgcatctgaagcctatgagaaagttcgcctacctggggtgcctggctca

SEQ ID NO: 38606 - DNA, 553 bp, Macaca Mulatta
gccatgggttttgcagacctgaaaagccccactggcctccaggtgctcaatgattacctggaagacaagagctacatcaaggggtatgtgccatcacaaacagatgtggcagtatttgaagcagcgcctcgcccactgcctgccgacttgtgtcatgccctacattggtataatcacatcaagtcttacgaaaaggaaaaggccagcctgccaggagtgaagaaagctttgggcaagtatggtcctgcagatgtggaagacactacaggaagtggagctacacagatagtaaagatgatgatgacattgagctctctggatctgatgaggaggaggaaagtgaagaagcaaagaggctaagggaagaacgtcttgcacaatatgaaacaaagaaagccaaaaaaacctgcacttgtttccaagtctaccatcttactagatgtgaaaccttgggatgatgaggcagatatggagaaattagagggcgtcagaagcattcaagcagacggcttagtccggggctcatctaaactagttccagtggatacagaat

SEQ ID NO: 38607 - DNA, 793 bp, Macaca Mulatta
  misc_feature (1)...(793): n = A,T,C or G
ggggcctttgcagcctccgtacactagcgatggctccctggtgtctcacctttttctctctaactgtctatttctcaatcttttgactctgcaggactttgtcacccccacaacctggtgttgggtctgatcaccccaacagacctgctcactgatttgagtttgaatcttgtggtaaacttctgtggggaagaggcatttctagaggaaagtttcgcattcaataacaagacacttcttgctgctgccatgtgaagaaggacatgtttgcttcccctttcgccatgattgagtttccagaggcctccccacccatgctgaactgtgagtcaattaaacctctttcctgtataaattacccagttttgggtatgtctttgttagaagcatgagaacgggctgatacacatgtatatccctcaatttgcttatccattcatccattgatggacactttgataagttacacatttgaattattgtgaataatgttgtgagtattggggtacagatatctctttaagatcctactttctgttctttcctgtaaagagaggtgcctacaaatatggccaannnnnnnnnnnnnnnnnncacgaaccccccatagtgttttcctacacagaaccatgtttgtttttataattccagccaacagttgcacaaagggtttccccattacctccttaattcctccccaaacccttgtcgcttttccggggttgggcttttaggggtatcgcttctttggctcttgcgaataccgggcccatttttaaatggggtggggaag

SEQ ID NO: 38608 - DNA, 629 bp, Macaca Mulatta
  misc_feature (1)...(629): n = A,T,C or G
tggagtttnnnnnnnnnnnnnnnnnnnnnnnnnnnnnnnnnnnnnnnnnnnnnnnnnnnnnnnnnnnnncagtgcagcctaagtgtagtgtttataaagcgtatgatggtgtacagtagtgtcctaggcctttgtattcattcactggtaactcagcaacttcttgtcctacaaatgccattcatagtaaataccctatacaggtataccatgtatcattatatttttactgtactttttctatgtttggatacacaaataattaccactgtgttacaattacctacagtactcagtacagtaacatgctgtatcagtttatagcctaggtgttagtaggctataccatctatgatgtttgtacaaggacaaaatcgcctaagatgcatttctcagtacatatccccattgttaagtgacacaagactgtgtaggatttttgtttaaatggtaagaaaatgtcatgcacaaatctataacttgtttaacttgttttcgtgtaacaacataatcagggacctgtcccccaatacatagaagtctaacttactctttgaaagctacctaatatttcattgaacataactcattcagtgatttctttattcatggatactgcatccatttct

SEQ ID NO: 38609 - DNA, 878 bp, Macaca Mulatta
gggaatgtaaggtagagactctccctagtcttactgatctcagtaccccacaaatgattaagaatgatatgaaaaccagctgctaaggaacatcttattatttagttgtagcatattcataacaagtgtccttcaaggatgaacatatattctcattctatttgtatttatcaagtaaaacttgtgttgacctttagtgcattatattcagcttttgaaagtattatgtatgtactggaaagaaaagaaatcttagagtcttggacattgtttatttgtgcaacaactagaaaggagcaatgaggtttatttcagttgtatttttccctaagcacaatctgccatagtttatgtatgacagagataattcagaaaagaaaactatatataaaagttgtatataaagtttgtctctgaaatatttctttgaagtttttaacacatttactcatgtttccaaacaaaaacattccaagcatgggactttttttttcatccggtttatcactgacttttttattttcctggtgtagcaggtgagtcccacaatttggctcaacatccgtatccgtacccctctaaagtctgcagaaagggcaacatcttctaccaaacttcgcccgcgctggcgattttccgggaataacgcatgccagctgccttcttaccctcccgtcgcatgcagcacgtatccgctgcccccctttacatgcatttgcgcccgcgagttctccgccttgtcaccttccccctcttgtcgccgcacacgcgcttcttctcttgttgcaaacccccctctcccacgccccacctcctgtccataccaccgccctcccgtcatgtatatggttctcacggggagcccctaacaccgtttc

SEQ ID NO: 38610 - DNA, 525 bp, Macaca Mulatta
agatccaaaactattccctttaagactatatgtcaggactctgagcacgccattatggaggcccagaggaggagccgtcatctgtgtctagcaatgtccatgagaattataagattagtgtgatttgtgaactgggtcatcaggaaatatctacttcgtcaggtaggcaaagaagggtgtctgcaaatggcagaggccagaatatgcatagtgcgctgtgttgagaagagtgaacagttcctggtcacttacttgtatagagggggtgcggcacagaactcaaacctacccccacctcctgacactaaaactgtcagctctcagcaatgccagccgctgcctccagggagtaagaacacctccataccagcccctggcctccctccaccagcagctaccaggtgagaccacctcccagtgactgcccccatatgaccaattgtcaccagttggtgaggtcccaggcagcaggctgaggatggacactgccctttcacctgcctctcactcaagcttggcttcaga

SEQ ID NO: 38611 - DNA, 2664 bp, Macaca Mulatta
  misc_feature (1)...(2664): n = A,T,C or G
acgggagccccccgctgccctggcccagccgcacggaagagggctgaccaggcagtaggccacaggggactcctggcagggcctctcccctgtgcctgacgcgggttcctcctctttctggaatggagagaggtttgttgtttttactcattcaaatgggaagcccgccgcccttctggtggcagtgtgtgtgactgggtgccttctgtttcctgtttgcactctttgctgccttttctgcattcctgacttgtaaaagattccttaaggcttaagggatgccttatttttgatggggcctctggtaggtaccacagccaagaggaccagagatcatggcccttccagtatgggggcgatagagacatcggggacctgggatttttgttttgtgcagaggtctccggcctgctgtcaccatgagacaggggagtggatggttggcctgaagaaagggtcctggaaagttttctacttaaatattttgaaactttttttcccttgttatagagactcaagtgcttttgtaaatgtgtgtagttgctaatagaacttcgccttttgcaaagtggaaagagccggcttttccatgtggggctcgcagaactggaaggggaactacctccaccagcctgtgggtctttnnnnnnnnnnnnnnnnnnnnnnnnnnnnnnnnnnnnnnnnnnnnnnnnnnnnnnnnnnnnnnnnnnnnnnnnnnnnnnnnnnnnnnnnnnnnnnnnnnnnnnnnnnnnnnnnnnnnnnnnnnnnnnnnnnnnnnnnnnnnnnnnnnnnnnnnnnnnnnnnnnnnnnnnnnnnnnnnnnnnnnnnnnnnnnnnnnnnnnnnnnnnnnnnnnnnnnnnnnnnnnnnnnnnnnnnnnnnnnnnnnnnnnnnnnnnnnnnnnnnnnnnnnnnnnnnnnnnnnnnnnnnnnnnnnnnnnnnnnnnnnnnnnnnnnnnnnnnnnnnnnnnnnnnnnnnnnnnnnnnnnnnnnnnnnnnnnnnnnnnnnnnnnnnnnnnnnnnnnnnnnnnnnnnnnnnnnnnnnnnnnnnnnnnnnnnnnnnnnnnnnnnnnnnnnnnnnnnnnnnnnnnnnnnnnnnnnnnnnnnnnnnnnnnnnnnnnnnnnnnnnnnnnnnnnnnnnnnnnnnnnnnnnnnnnnnnnnnnnnnnnnnnnnnnnnnnnnnnnnnnnnnnnnnnnnnnnnnnnnnnnnnnnnnnnnnnnnnnnnnnnnnnnnnnnnnnnnnnnnnnnnnnnnnnnnnnnnnnnnnnnnnnnnnnnnnnnnnnnnnnnnnnnnnnnnnnnnnnnnnnnnnnnnnnnnnnnnnnnnnnnnnnnnnnnnnnnnnnnnnnnnnnnnnnnnnnnnnnnnnnnnnnnnnnnnnnnnnnnnnnnnnnnnnnnnnnnnnnnnnnnnnnnnnnnnnnnnnnnnnnnnnnnnnnnnnnnnnnnnnnnnnnnnnnnnnnnnnnnnnnnnnnnnnnnnnnnnnnnnnnnnnnnnnnnnnnnnnnnnnnnnnnnnnnnnnnnnnnnnnnnnnnnnnnnnnnnnnnnnnnnnnnnnnnnnnnnnnnnnnnnnnnnnnnnnnnnnnnnnnnnnnnnnnnnnnnnnnnnnnnnnnnnnnnnnnnnnnnnnnnnnnnnnnnnnnnnnnnnnnnnnnnnnnnnnnnnnnnnnnnnnnnnnnnnnnnnnnnnnnnnnnnnnnnnnnnnnnnnnnnnnnnnnnnnnnnnnnnnnnnnnnnnnnnnnnnnnnnnnnnnnnnnnnnnnnnnnnnnnnnnnnnnnnnnnnnnnnnnnnnnnnnnnnnnnnnnnnnnnnnnnnnnnnnnnnnnnnnnnnnnnnnnnnnnnnnnnnnnnnnnnnnnnnnnnnnnnnnnnnnnnnnnnnnnnnnnnnnnnnnnnnccgccttgtctggcactgagaagtggccacccttcagggctgcttctgggggccttggttcctggatgtgccatttctttgcccttctgaccctcccacttcttctaagcagagttgggggccagtggtagcgttgctgtcatctctgggaggagggtgaatatacaagtcggtgacagttcggccagcctcccttgggtttgggaagaggcaccgcccttctgtgctgtggatcctgcttgtttgctttggggtcccccaacccttgccaggagcttcacaaatcagagacaggctgtcagcaagagctcagacaggatgtgtgcaagtgcaggtgcgtgagtttaaccctcagctgcaggagctagtgtcagatgttctggggatacctcaggctaagaattttgccgagtttctgggcttgtttttctaatgccaaatgcccctgcgtaagtggcacaaggtgctgattctccnnnnnnnnnnnnnnnnnnnnnnnnnnnnnnactttgagctaggtcttgtgaatttgcctagcactcggacgtgtttaagtaatgttctttacattgaaacgagtcaaccgaagctttgtggtgcaggagctgagggttccccagactcggtgggagccctggttgggccccaaactcccccagcagagtcctcgtcttcctcatttgtgaaataaacgggtgggccacgacgttaataagcccaagaaaactgtgaaggtggtagtccctttccctaattggtgcgcaatanacttgttg

SEQ ID NO: 38612 - DNA, 682 bp, Macaca Mulatta
cattcccattcccacatcgctataaatccttccctcgggccccttcttcagcattcctcgcttctcagcacagcccgagaacccccgatccccgacactttgcttccttttagctcccaggtggatcccggacaggatgctgcaggtggtgcaggaaggcaatcttgccccattcgtcatcaacacagtgaaaaggggtcgaagagaccgagagcgccagaggacgccacgggctccacatccgcttggactccgggaagtaagcctctagacttcaggaatgagcaagtccaaccgtttggtttgagcctattgcttccaagaaaagcgtggaaaaatcctgagacctcctcccctcgcccttcgtccatttcaggggaccgagtgtctccacggaacttcaccagggaggcaaagagtgcactcattattatttgtcttgtcttcgtttcagaggctatacatctgcgaaagccctaatcacagagggaacgactgctcgttcctggcccagaaatgagatgagaaatccaaggccccgtacaggaaggacttttgcaaagtctggactcaactgcctttgcagcccttgaagtctctttaggaagggctgtgggagaacgaggttggtttaggagttggccccagccttgtactacgtagttttgtcatccaaagtgtt

SEQ ID NO: 38613 - DNA, 160 bp, Macaca Mulatta
aggtgtcagagcatctgcggttggcagcctttgagatctatgagagtctcttggccaaggtcaagaagagaggccttgtcttccccttgaagcaccagatcctcaacttgctagtccccctggtgctccacctgagggacgtaaataccgacgtggctct

SEQ ID NO: 38614 - DNA, 651 bp, Macaca Mulatta
tgcttatagacctcatgtgactatggactactatattggacaacattttagaacattttgattatcacaggaagttccttggacagaactgccccagcagacctttgctgatgtggatgtttttctgtattaaatacatccttttaacattcagacacctcccaaatgctaaccttaatagatgggccttcagcatttatgtctctctatcttgatcctgcaactgatgacttgactatgtctgctctgcagaaagcaccactaccagcatgtgtccactcaggaaagctgacactacatatttcaacagaggagatgtgagtacagaggcgttagagaataacccggggatcacaactgtaggatgcagctactagtcctaagggtaagaaaacaaatgggaaaaagtttgggttgccagagccttaaagctccacaaagggtcatcatggcattagtgctcagacccctgaggaggctcaccacctacctgctcatggtaattctgaggggtacagtaacgacagttctagaagtttcgaagcaattgaaggctggcatttactaccattattacagagctgataggactagccatgagagatgaactagatctcgtttcatcttccttccaacttctctctagtactt

SEQ ID NO: 38615 - DNA, 682 bp, Macaca Mulatta
cagcctcttttactaaatcacaaagagtctactccctctccttctgcccatcaaaggacatcaggtcagcctcaccagcatttgcattggaagccccaccacctggtatcatgccaaaaaattacccttccccttcccaacccatgcattgagtgtaccggaggccctccgtgggaggctgaagtcacctttcatcctaattcaaaattcgcagtccgggtgttccaagaggtagttcagcttggaggtcgaattaatggttcttccatcaagccccagaaggtgcccctgcgagtaagtcccttggcttctgaccctggcttctgagatttcccagcatggcttctccacctggctcagccctaagtgtctggcaataggagtgtcttccttatctccacttttgcatggcaatttaagaatggcagaggatgttagaatcctttggatcgctcctcaacttctgattcctatggtacaaacagacttttcactcaaactcactttagggccagcaggtgctgactagcagatgccacccaggagaatgagctcttgtgatcgtccctcagctcctgaagcctgagggccatgtatacaaaaaaagaacaatagcatctgcgatagtggctcccaatcactgagctcgcctgtgccttagagacctgatcctaatccccta

SEQ ID NO: 38616 - DNA, 314 bp, Macaca Mulatta
ggaggtctcccagaaacagcatctcagaagggagaaagatggaggtagaaggcaaggtggtggccagggccaacccagagcatctatgctatccagtccccaaagttcaggagcatttttctacagaaccttccagaattcatgccgaatatcaacaacagaaaggcagcaaagaagacagatccgtgatctgcctgtggcttggctgcccatgggccaggatgcctgctgtgaccatcagggagacgcagggaccaacgtcctttgtgaaggatgcaggcactggctttgcagagccaccctcctagcaactt

SEQ ID NO: 38617 - DNA, 1310 bp, Macaca Mulatta
  misc_feature (1)...(1310): n = A,T,C or G
tttgacttctccgtgacagtgttcgccttcctgggactgctggcgctggccctcaacatggagcccttctatttcatcgtggtcctgcgccccctccagctgttgaggtnnnnnnnnnnnnnnnnnnnnnnnnnnnnnnnnnnnnnnnnnnnnnnnnnnnnnnnnnnnnnnnnnnnnnnnnnnnnnnnnnnnnnnnnnnnnnnnnnnnnnnnnnnnnnnnnnnnnnnnnnnnnnnnnnnnnnnnnnnnnnnnnnnnnnnnnnnnnnnnnnnnnnnnnnnnnnnnnnnnnnnnnnnnnnnnnnnnnnnnnnnnnnnnnnnnnnnnnnnnnnnnnnnnnnnnnnnnnnnnnnnnnnnnnnnnnnnnnnnnnnnnnnnnnnnnnnnnnnnnnnnnnnnnnnnnnnnnnnnnnnnnnnnnnnnnnnnnnnnnnnnnnnnnnnnnnnnnnnnnnnnnnnnnnnnnnnnnnnnnnnnnnnnnnnnnnnnnnnnnnnnnnnnnnnnnnnnnnnnnnnnnnnnnnnnnnnnnnnnnnnnnnnnnnnnnnnnnnnnnnnnnnnnnnnnnnnnnnnnnnnnnnnnnnnnnnnnnnnnnnnnnnnnnnnnnnnnnnnnnnnnnnnnnnnnnnnnnnnnnnnnnnnnnnnnnnnnnnnnnnnnnnnnnnnnnnnnnnnnnnnnnnnnnnnnnnnnnnnnnnnnnnnnnnnnnnnnnnnnnnnnnnnnnnnnnnnnnnnnnnnnnnnnnnnnnnnnnnnnnnnnnnnnnnnnnnnnnnnnnnnnnnnnnnnnnnnnnnnnnnnnnnnnnnnnnnnnnnnnnnnnnnnnnnnnngcatgccagggagcaggagcagcagcgannnnnnnnnnnnnnnnnnnnnnnnnnnnnnnnnnnnnnnnnnnnnnnnnnnnnnnnnnnnnnnnnnttacctagcccagtgcccgaaagctatctcttctatgcaataacacaatagtattactctactgcgatgtacggaactgcggtgtgtgtacacatactcacgtatatgcacatatttatatacaggaagaaagcagacagacaagatggggcttggtttataaccaccttgccctgttttccttaactccagaagccagtttggtgaggggtggggtgtggccaccaggtctgagctcttcctactgtggaaggctccagaagccccttcacaaggaaacccctcacctggatccagtcgactctgcggggcttgccccccacgtgggctggcctccatcggccatgtccaaagccgtcactgctactgcttcaagctcacgtccccccgacctga

SEQ ID NO: 38618 - DNA, 3849 bp, Macaca Mulatta
  misc_feature (1)...(3849): n = A,T,C or G
caaaaacaaacggtgacggcgccgcggcagggtctatctatggccgaggcggtgaagccccagcgccgggccaaggccaaggccagccggactaaaacaaagnnnnnnnnnnnnnnnnnnnnnnnnnnnnnnnnnnnnnnnnnnnnnnnnnnnnnnnnnnnnnnnnnnnnnnnnnnnnnnnnnnnnnnnnnnnnnnnnnnnnnnnnnnnnnnnnnnnnnnnnnnnnnnnnnnnnnnnnnnnnnnnnnnnnnnnnnnnnnnnnnnnnnnnnnnnnnnnnnnnnnnnnnnnnnnnnnnnnnnnnnnnnnnnnnnnnnnnnnnnnnnnnnnnnnnnnnnnnnnnnnnnnnnnnnnnnnnnnnnnnnnnnnnnnnnnnnnnnnnnnnnnnnnnnnnnnnnnnnnnnnnnnnnnnnnnnnnnnnnnnnnnnnnnnnnnnnnnnnnnnnnnnnnnnnnnnnnnnnnnnnnnnnnnnnnnnnnnnnnnnnnnnnnnnnnnnnnnnnnnnnnnnnnnnnnnnnnnnnnnnnnnnnnnnnnnnnnnnnnnnnnnnnnnnnnnnnnnnnnnnnnnnnnnnnnnnnnnnnnnnnnnnnnnnnnnnnnnnnnnnnnnnnnnnnnnnnnnnnnnnnnnnnnnnnnnnnnnnnnnnnnnnnnnnnnnnnnnnnnnnnnnnnnnnnnnnnnnnnnnnnnnnnnnnnnnnnnnnnnnnnnnnnnnnnnnnnnnnnnnnnnnnnnnnnnnnnnnnnnnnnnnnnnnnnnnnnnnnnnnnnnnnnnnnnnnnnnnnnnnnnnnnnnnnnnnnnnnnnnnnnnnnnnnnnnnnnnnnnnnnnnnnnnnnnnnnnnnnnnnnnnnnnnnnnnnnnnnnnnnnnnnnnnnnnnnnnnnnnnnnnnnnnnnnnnnnnnnnnnnnnnnnnnnnnnnnnnnnnnnnnnnnnnnnnnnnnnnnnnnnnnnnnnnnnnnnnnnnnnnnnnnnnnnnnnnnnnnnnnnnnnnnnnnnnnnnnnnnnnnnnnnnnnnnnnnnnnnnnnnnnnnnnnnnnnnnnnnnnnnnnnagggtatctgtgcagatcaagtgaaagtttccagctatcatcgctaccaaagagtagaaatgaatgaaaacgcactggtggagctaaagaagctattcgatgccaaagctgaacacctccaccagaccctggcccttcattcttatacttctgtgctctcaaggttgcaagtggagtcttacatctatgcattgctcagtagttcagctgttctgagatctttagtaattcaccagcaaggcnnnnnnnnnnnnnnnnnnnnnnnnnnnnnnnnnnnnnnnnnnnnnnnnnnnnnnnnnnnnnnnnnnnnnnnnnnnnnnnnnnnnnnnnnnnnnnnnnnnnnnnnnnnnnnnnnnnnnnnnnnnnnnnnnnnnnnnnnnnnnnnnnnnnnnnnnnnnnnnnnnnnnnnnnnnnnnnnnnnnnnnnnnnnnnnnnnnnnnnnnnnnnnnnnnnnnnnnnnnnnnnnnnnnnnnnnnnnnnnnnnnnnnnnnnnnnnnnnnnnnnnnnnnnnnnnnnnnnnnnnnnnnnnnnnnnnnnnnnnnnnnnnnnnnnnnnnnnnnnnnnnnnnnnnnnnnnnnnnnnnnnnnnnnnnnnnnnnnnnnnnnnnnnnnnnnnnnnnnnnnnnnnnnnnnnnnnnnnnnnnnnnnnnnnnnnnnnnnnnnnnnnnnnnnnnnnnnnnnnnnnnnnnnnnnnnnnnnnnnnnnnnnnnnnnnnnnnnnnnnnnnnnnnnnnnnnnnnnnnnnnnnnnnnnnnnnnnnnnnnnnnnnnnnnnnnnnnnnnnnnnnnnnnnnnnnnnnnnnnnnnnnnnnnnnnnnnnnnnnnnnnnnnnnnnnnnnnnnnnnnnnnnnnnnnnnnnnnnnnnnnnnnnnnnnnnnnnnnnnnnnnnnnnnnnnnnnnnnnnnnnnnnnnnnnnnnnnnnnnnnnnnnnnnnnnnnnnnnnnnnnnnnnnnnnnnnnnnnnnnnnnnnnnnnnnnnnnnnnnnnnnnnnnnnnnnnnnnnnnnnnnnnnnnnnnnnnnnnnnnnnnnnnnnnnnnnnnnnnnnnnnnnnnnnnnnnnnnnnnnnnnnnnnnnnnnnnnnnnnnnnnnnnnnnnnnnnnnnnnnnnnnnnnnnnnnnnnnnnnnnnnnnnnnnnnnnnnnnnnnnnnnnnnnnnnnnnnnnnnnnnnnnnnnnnnnnnnnnnnnnnnnnnnnnnnnnnnnnnnnnnnnnnnnnnnnnnnnnnnnnnnnnnnnnnnnnnnnnnnnnnnnnnnnnnnnnnnnnnnnnnnnnnnnnnnnnnnnnnnnnnnnnnnnnnnnnnnnnnnnnnnnnnnnnnnnnnnnnnnnnnnnnnnnnnnnnnnnnnnnnnnnnnnnnnnnnnnnnnnnnnnnnnnnnnnnnnnnnnnnnnnnnnnnnnnnnnnnnnnnnnnnnnnnnnnnnnnnnnnnnnnnnnnnnnnnnnnnnnnnnnnnnnnnnnnnnnnnnnnnnnnnnnnnnnnnnnnnnnnnnnnnnnnnnnnnnnnnnnnnnnnnnnnnnnnnnnnnnnnnnnnnnnnnnnnnnnnnnnnnnnnnnnnnnnnnnnnnnnnnnnnnnnnnnnnnnnnnnnnnnnnnnnnnnnnnnnnnnnnnnnnnnnnnnnnnnnnnnnnnnnnnnnnnnnnnnnnnnnnnnnnnnnnnnnnnnnnnnnnnnnnnnnnnnnnnnnnnnnnnnnnnnnnnnnnnnnnnnnnnnnnnnnnnnnnnnnnnnnnnnnnnnnnnnnnnnnnnnnnnnnnnnnnnnnnnnnnnnnnnnnnnnnnnnnnnnnnnnnnnnnnnnnnnnnnnnnnnnnnnnnnnnnnnnnnnnnnnnnnnnnnnnnnnnnnnnnnnnnnnnnnnnnnnnnnnnnnnnnnnnnnnnnnnnnnnnnnnnnnnnnnnnnnnnnnnnnnnnnnnnnnnnnnnnnnnnnnnnnnnnnnnnnnnnnnnnnnnnnnnnnnnnnnnnnnnnnnnnnnnnnnnnnnnnnnnnnnnnnnnnnnnnnnnnnnnnnnnnnnnnnnnnnnnnnnnnnnnnnnnnnnnnnnnnnnnnnnnnnnnnnnnnnnnnnnnnnnnnnnnnnnnnnnnnnnnnnnnnnnnnnnnnnnnnnnnnnnnnnnnnnnnnnnnnnnnnnnnnnnnnnnnnnnnnnnnnnnnnnnnnnnnnnnnnnnnnnnnnnnnnnnnnnnnnnnnnnnnnnnnnnnnnnnnnnnnnnnnnnnnnnnnnnnnnnnnnnnnnnnnnnnnnnnnnnnnnnnnnnnnnnnnnnnnnnnnnnnnnnnnnnnnnnnnnnnnnnnnnnnnnnnnnnnnnnnnnnnnnnnnnnnnnnnnnnnnnnnnnnnnnnnnnnnnnnnnnnnnnnnnnnnnnnnnnnnnnnnnnnnnnnnnnnnnnnnnnnnnnnnnnnnnnnnnnnnnnnnnnnnnnnnnnnnnnnnnnnnnnnnnnnnnnnnnnnnnnnnnnnnnnnnnnnnnnnnnnnnnnnnnnnnnnnnnnnnnnnnnnnnnnnnnnnnnnnnnnnnnnnnnnnnnnnnnnnnnnnnnnnnnnnnnnnnnnnnnnnnnnnnnnnnnnnnnnnnnnnnnnnnnnnnnnnnnnnnagaatgccttgggttaccattgtgaccggagtctgctctcatctttggtgaactggattgtggcaggcaacatcactccttcctttgtggagggcttggccacacctactcaggnnnnnnnnnnnnnnnnnnnnnnnnnnnnnnnnnnnnnnnnnnnnnnnnnnnnnnnnnnnnnnnnnnnnnnnnnnnnnnnnnnnnnnnnnnnnntgctttcacccctgaccaagctctg

SEQ ID NO: 38619 - DNA, 211 bp, Macaca Mulatta
tgtaactcatgatctccccagagggttcagactgcttgcccgtgcactaacactaccccagattgctctgtttttagtattctaacccttgcctgtatggtctttctgtctcccttcactgttagactgtcacatctcacttttctttactgtgtctttctacctctacttcctttcctgcagactggccaatcagaatgacagagcttat

SEQ ID NO: 38620 - DNA, 788 bp, Macaca Mulatta
  misc_feature (1)...(788): n = A,T,C or G
natggcgcccccggggctcctggtggccggcgcctccttccttgcgttccgagggctgcactgggggctgcggcggctgcccacgccggaattggccgctcgggaccgctggcagtggcggaacctctgcgtctccctggcgcacagcctgctctcgggggccggggcactgctcgnnnnnnnnnnnnnnnnnnnnnnnnnnnnnnnnnnnnnnnnnnnnnnnnnnnnnnnnnnnnnnnnnnnnnnnnnnnnnnnnnnnnnnnnnnnnnnnnnnnnnnnnnnnnnnnnnnnnnnnnnnnnnnnnnnnnnnnnnnnnnnnnnnnnnnnnnnnnnnnnnnnnnnnnnnnnnnnnnnnnnnnnnnnnnnnnnnnnnnnnnnnnnnnnnnnnnnnnnnnnnnnnnnnnnnnnnnnnnnnnnnnnnnnnnnnnnnnnnnnnnnnnnnnnnnnnnnnnnnnnnnnnnnnnnnnnnnnnnnnnnnnnnnnnnnnnnnnnnnnnnnnnnnnnnnnnnnnnnnnnnnnnnnnnnnnnnnnnnnnnnnnnnnnnnnnnnnnnnnnnnnnnnnnnnnnnnnnnnnnnnnnnnnnnnnnnnnnnnnnnnnnnnnnnnnnnnnnnnnnnnnnnnnnnnnnnnnnnnnnnnnnnnnnnnnnnnnnngatccgcattctggtcaatgatgtcctgcggtctcgaccccatccacccagccccgggcacgagaaaaccagggggaccaggacacatcgtgacgatggacctgtcaccagggacaattccactctcagcctgaaa

SEQ ID NO: 38621 - DNA, 579 bp, Macaca Mulatta
  misc_feature (1)...(579): n = A,T,C or G
gcagtctccaggcccccaaggctgggaaccgcacccccactcgcgcctccttgaccctgcgccgcctccccctcctcagtttgacccgcagaccttccacaacgacctggccctggtgcagctgtggacgccggtgagcccgggggggccggcgcgccccgtgtgcctgccccaggagccccaggagccccctgccggcaccgcctgcgccatcgcgggctggggggccctcttcgaagnnnnnnnnnnnnnnnnnnnnnnnnnnnnnnnnnnnnnnnnnnnnnnnnnnnnnnnnnnnnnnnnnnnnnnnnnnnnnnnnnnnnnnnnnnnnnnnnnnnnnnnnnnnnnnnnnnnnnnnnnnnnnnnnnnnnnnnnnnnncagggtgactcgggaggccccctgacctgttctgagcctggcccccgccctagagaagtcctgttcggagtcacctcctggggggacggctgcggggagccagggaagcccggagtctacacccgcgtggccgtgttcaaggactggctccaggaacagatgagctgtgagcactctctttccaatgccccgtccccagt

SEQ ID NO: 38622 - DNA, 315 bp, Macaca Mulatta
ctgcggcgctggagccctgacgcacggagctcgagagcgagaacgggagagaaaggggtagaaatggcggctccgctcagctcccgctgaggagggcgaagccggcggagtgtctgtgctgccgcctgcagcaccgcccccgcttcccgctcgccgcttgctcacgccgacttcccttcctctgcccggctctctcttgtgctcgtctgcgctctgcacgctccggaccggctcgtctctcactgcccggctcggctccgctggccctgactgaccggccggcgggccggccttgctcggctctcccgggcgcgg

SEQ ID NO: 38623 - DNA, 782 bp, Macaca Mulatta
  misc_feature (1)...(782): n = A,T,C or G
agagaacccagggctccgggccccaatcattgggggaaaaccctacatcttcttccttaaaacattttcccataatttttgccccggttttggggggctaggtgccttttttcccagttttttgggaagccagatccaggagaattcactgaattccaggaggccgaggtgccagtaaactaacataaagccattgcattcaaacctggggaaaagggtgagatttcnnnnnnnnnnnnnnnnnnnnntaaattggctaaccatcaagtctgtatctttattgaatttctgtatagttgttttgtagatcactgtcagggtgctactggaatgagttgacactaattttagaatttctgattgattctttgagagaggaaattttcaaatcatgggtctaaatactttattcttctgacaaaaggccttttatgatttcccaagactaatctaggaagaaaaggcagagttcaagccccagttggtgatgtcatgggagcactgaatgatcatgtgaggtgcctccactggtgaggtatatgtaaatgaannnnnnnnnnnnnnnnnnnnnggaggccgggtgcggtggctctnnnnnnnnnnnnnnnnnnnnnnnnnnnnnnnnnnaggtagatcacgacgtcaggagatcaagaccatcctggctaacacagtgaaaccatgtctctactaaaaacacacaaaaaaaattagccaggcacggtgatgggcannnnnnnnnnnnnnnnnnnnnnnnnnnnnnnnnnnnnnnnggcgtgacc

SEQ ID NO: 38624 - DNA, 623 bp, Macaca Mulatta
  misc_feature (1)...(623): n = A,T,C or G
cagcaccatggggaagcgggacaatcgggtggcctatatgaacccaatagcaatggcgagatcaagaggtccagtccagtcttcagggccaacaatacaagattatctgaatcgaccaaggcctacctgggaagaagtaaaagagcaactagaaaagaaaaagaaaggctccaaggctttggctgaatttgaagaaaaaatgaatgagaactggaagaaagaactggaaaaacacagggagaaattattaagtggaagtgagagctcatccaaaaaaagacannnnnnnnnnnnnnnnnnnnnnnnnnctggtaggtattcatcttcttcttcatcaagctctgattcttccagcagttcttctgattccgaagatgaggataagaaacaaggaaaacnnnnnnnnnnnnnnnnnnnccgttcacataaatcgtctgaaagctccatgtcagaaactgaatcagacagtaaggatagnnnnnnnnnnnnnnnnnnntcaaaagatggaactgagaaagaaaaggatattaaaggactcagtaaaaagagaaagatgtattctgaagataaacctttatcatctgagtccttgtcagaatcagagtatattgaggaggtgcgag

SEQ ID NO: 38625 - DNA, 924 bp, Macaca Mulatta
  misc_feature (1)...(924): n = A,T,C or G
gggatctcaaactcctggactcaagagatcctcctgcctcaannnnnnnnnnnnnnnnnnnnnnnnnnnnaagccaccacacctggtacatgctcagtcagccttttaagaggaagtttttgttcctctaaaattgtagttgtgatatttagttttgtgtcctctctttttgatttagcttattacaagcattttctgaggttattggttgaacatataactgccaacctttgaaaaaaacaggctcttctcattatgtgaatataggaaatggaaaaggcaaaaatcctgtttcatgccactggttgataggtacagccatccttagatgcacccttttgcattattataatagtgcaataggctgtaagaaactttgaaaatttgctgctaattaactgataaaaaatgcagatgtttctcatccgtgcatagaaacagaacttaagtttcacattttttccatataccctgggtggccctcagatttctagttttgggattgggtcaaagccctcctaaaaggaaaatttcggataaaaagttaataatttttggaagaaaccaaaaggtccttccccggttggttggttcaaccccctaaggagctttcggaaagttggcaagctggggttggaccaatatctatccccgtattatccccaagggcaaaaacactttcacaaaaccttccacagggggggtttccataagctaagaatcccttccccctggaccctatcgggatacttactatctaaggtttagaacttggggaaaattttcctcggggctactctaggctaaaagtctaccaagaggttttctgtctattggaaggaccccacaaaggcaaaacggcataaaaaaacctcccgtttgggaacaccccgcgggtaagaggcaaatagaagggtatgtgac

SEQ ID NO: 38626 - DNA, 675 bp, Macaca Mulatta
  misc_feature (1)...(675): n = A,T,C or G
gggnnnnnnnnnnnnnnnnnnnnnnnnnnnnnnnnnnnnnnnnnnnnnnnnnnnnnnnnnnnnnnnnnnnnnnnnnnnnnnnnnnnnnnnnnnnnnnnnnnnnnnnnnnnnnnnnnnnnnnnnnnnnnnnnnnnnnnnnnnnnnnnnnnnnnnnnnnnnnnnnnnnnnnnnnnnnnnnnnnnnnnnnnnnnnnnnnnnnnnnnnnnnnnnnnnnnnnnnnnnnnnnnnnnnnnnnnnnnnnnnnnnnnnnnnnnnnnnnnnnnnnnnnnnnnnnnnnnnnnnnnnnnnnnnnnnnnnnnnnnnnnnnnnnnnnnnnnnnnnnnnnnnnnnnnnnnnnnnnnnnnnnnnnnnnnnnnnnnnnnnnnnnnnnnnnnnnnnnnnnnnnnnnnnnnnnnnnnnnnnnnnnnnnnnnnnnnnnnnnnnnnnnnnnnnnnnnnnnnnnnnnnnnnnnnnnnnnnnnnnnnnnnnnnnnnnnnnnnnnnnnnnnnnnnnnnnnnnnnnnnnnnnnnnnnnnnnnnnnnnnnnnnnnnnnnnnnnnnnnnnnnnnnnnnnnnnnnnnnnnnnnnnnnnnnnnnnnnnnnnnnnccttacacaggcttcatggactcagttatattgtatcccttccccttgtcggctatcgccaatatacacacttacatgaacttacttgga

SEQ ID NO: 38627 - DNA, 619 bp, Macaca Mulatta
tcaatcaggagttccagtggctactggaatgtggtgtgcactctcatttgtcaatctgaatgtcttttttcattctaagaatacaagctattaaatatgtttaaagcccatagaaaaggagcatgtatttgtagggaaaataggttattaatagaaaccacaaccaaggtttttattgaggtgcttggaaacctgagacaaattggaccctttttgtgactgaacaatgagcaagtgtaagtgaattcaagtgaattctaacattgattgattgacagataaatattgattgatgcaaagcaaatattgatatttagccgaggaataatactaatattcaacacaaaaatagagtgtagtgatttatgtagtcagtgatttaagtggaaataattgacccttgattttaagtgctttatctttatctcataatattttaaatcagagattaagttagagatgtgggaataagtttcttctataaaaacagtacatcccagtacatcccttaagttaacataggctagcttatttttggctgtgtctagagatgtgaagacttacagacaaatagactccttgtgtttggacagagcttccctttcactaatcctgaatt

SEQ ID NO: 38628 - DNA, 154 bp, Macaca Mulatta
atagggacggccacatcaagatcatggactttgggttcgccgagaagctggtagacaggacttggaccctctgtggaacacctgagtacctggcccccaaagtcattcaaagcgagggccacggaagggccgtggattggtgggccctcggcat

SEQ ID NO: 38629 - DNA, 770 bp, Macaca Mulatta
  misc_feature (1)...(770): n = A,T,C or G
ggacttgctgaaagaggaaaatagattcactgttgcactgtgtgaagtagtctaaaacttggagagcaagatacattctgtttttcctagagaaactagaactgtttaattgtggaaagataatctaactttaatctcctccaaacatagctgttttgcttttgtcaaatttagagaaggttaaaatatcttaataagtttattgaataatgcatatcagccacctgaagtctaaataaaaatgattgtaagatattcagataaatagaagagtgagtcaatgctttggtgggataaaggtaaataaaaccggatcctttttgcagataaaatgctcacctacttgtagcttagtaccttcttccaagaagtctcattggaggactggagtaatctaggtgaacagaactcacaaaatgcaagtactacataccaaagagctgtttctactttatcttattatatttaaaaaggcctgacttcacaagcacgtcttnnnnnnnnnnnnnnnnnnnnnttacattcaccaccaaaaaagcttgcattttgatgcaatgccaaaaaaataacaagaaccactaaaacctgcaatcaatgtggatgggcaaataanaatggnannnnnnnnnnnnnnnnnnnnnnnnnnnnnncccttgtcggcccgcctcgggccctcgagaaagcttttctaagacatttcgttttgggcccgcgggccccctttaggtaaagtggaacaatggggccataagctgtttttcccaaaggac

SEQ ID NO: 38630 - DNA, 1400 bp, Macaca Mulatta
  misc_feature (1)...(1400): n = A,T,C or G
gtctcactctgttacccgggctggagtgcagtggtgtgatctcggctcaccacaacctctnnnnnnnnnnnnnnnnnnnnnnnnnnnnnnnnnnnnnnnnnnnnnnnnnnnnnnnnnnnnnnnnnnnnnnnnnnnnnnnnnnnnnnnnnnnnnnnnnnnnnnnnnnnnnnnnnnnnnnnnnnnnnnnnnnnnnnnnnnnnnnnnnnnnnnnnnnnnnnnnnnnnnnnnnnnnnnnnnnnnnnnnnnnnnnnnnnnnnnnnnnnnnnnnnnnnnnnnnnnnnnnnnnnnnnnnnnnnnnnnnnnnnnnnnnnnnnnnnnnnnnnnnnnnnnnnnnnnnnnnnnnnnnnnnnnnnnnnnnnnnnnnnnnnnnnnnnnnnnnnnnnnnnnnnnnnnnnnnnnnnnnnnnnnnnnnnnnnnnnnnnnnnnnnnnnnnnnnnnnnnnnnnnnnnnnnnnnnnnnnnnnnnnnnnnnnnnnnnnnnnnnnnnnnnnnnnnnnnnnnnnnnnnnnnnnnnnnnnnnnnnnnnnnnnnnnnnnnnnnnnnnnnnnnnnnnnnnnnnnnnnnnnnnnnnnnnnnnnnnnnnnnnnnnnnnnnnnnnnnnnnnnnnnnnnnnnnnnnnnnnnnnnnnnnnnnnnnnnnnnnnnnnnnnnnnnnnnnnnnnnnnnnnnnnnnnnnnnnnnnnnnnnnnnnnnnnnnnnnnnnnnnnnnnnnnnnnnnnnnnnnnnnnnnnnnnnnnnnnnnnnnnnnnnnnnnnnnnnnnnnnnnnnnnnnnnnnnnnnnnnnnnnnnnnnnnnnnnnnnnnnnnnnnnnnnnnnnnnnnnnnnnnnnnnnnnnnnnnnnnnnnnnnnnnnnnnnnnnnnnnnnnnnnnnnnnnnnnnnnnnnnnnnnnnnnnnnnnnnnnnnnnnnnnnnnnnnnnnnnnnnnnnnnnnnnnngggtcctcagcatgttcatgcctatctaatactctgtgcaagtggttttgcagggcatagggcgatgtggaacctatggtatttccagggaaaggagcagtaattttaatccgatttgcaagagggtcagccgggcatcacgcctgtaatatcagcactttgagaggtcgaggtgggtggatcacttgaagtcaggagttcaagaccagcctggccaacatggtgaaaccccatctctactaaaaacacaaatatgagccaggcacgatgacatacaccagtaatctcagctgctcaggaggttgaggcacaagaatcacttgaattcggggggaagaggttgtggtgagccgagatcacaccactgcactccagcccgggtaacagannnnnnnnnnnnnnnnnnnnnnnnnnnnnnnnnnnnnnnnngtggtctgtgactctttaaacatgtttccttgttttct

SEQ ID NO: 38631 - DNA, 780 bp, Macaca Mulatta
  misc_feature (1)...(780): n = A,T,C or G
acgacctagacggggaagagagctatggcaagtacctgcggcgggagtcccaccagatcggggatgcctactccaactcggacaaatccctcactgagctggagagcaagttcaagcagggccaggaacaggacagccggcaggagagcaggctcaacgaggactttctgggaatgctggtccacaccaggtccctgctgaaggagacgctggacatctctgtggggctcagggacaaatacgagctgctggctctcaccattaggagccatgggacccgactgggccggctgaaaaatgattatcttaaagtataggtggaagggtacaaatgctagagagagggaatccaatcagccccgctttggagggtgggggacagaagatggggctacatttcccccatacctactatttttttatatctagatttgcactttgagaacaaatctgaggtcatctttaaaaagagaaaaattggnnnnnnnnnnnnnnnnnnnnnnnnnnnnnnnnnnnacattatttatgtgattgttacagaactgtcacctggaaagaacaattttaagcaatgtcatttctagatggctttctaattctgcagagatacctgtttcagccacatctaaaagagcacagttgtatgtggtggggaatgaaacttccccatcctgcagattatgtggaaatacccaaacataatagtgcgtagctccttttagcctctagccttcactcctgggctccaaaagcgatctgagttgcttgttttcaaatgag

SEQ ID NO: 38632 - DNA, 890 bp, Macaca Mulatta
cgaggcaggggctgggctgagcgagactgtcactgagacaacggttaccgtgacaaccgagcccgagaaccgcagctttaccatcaaacttcggaaacggaaaccagagaaaaaggtggaatggacaagtgacactgtggacaatgagcgcatgcgccgccgctcatcaaaatgctgttgtatttatgaaaaaccccggggcttttggcgacagctccacggaaagtgatgaggaggaagaagagggctgtggtcatacacactgtgtacgtggccaccgcaaaggatggcgtcgtgcaaccctgggaccgacccccaccacgccttcccggcctcctgacccttcccagcccccagcagggccaatgcagcgctaaattcctctttcccccacccttcctgaatgtatccatgtgctttcttctccagtaccctccttctctctcttctgcctgatagagggaagaggaagaggagggtagacagagatcctggaattctgacttgctgctatttcagaacccagactcctgagttcccccagttctcatttttcctcccaatacccacccttctctctcgagggatctaggcaccttggtcccagcctcttccttttgttctcgctgtcaaactgcctgtcctgggatctggttatcttggctgtgcactctcaacttgagtagcaaacaccgaaattgggttttcaacagtcccagctttcactgccagggtcccagtcagattccagaaattctgaccctaactgtgcttgctaatactggtttagagctatcccactaaaatatttaatcctaattcttagtccttgcctgtgggatatggggtcctacaggagacctcagggctcccagcccttctcctgctaa

SEQ ID NO: 38633 - DNA, 714 bp, Macaca Mulatta
ggaagcccattatttatggattggcaaataatgtgcctgcatttgaaggcacattattaataatgtaagttattaacaccagcttgcatgcttccttgtttgctgtgataattttcaggtttcagttatttatgtaacatcttttttgcatggcttattgaaattcttctagaatgtaggcactatgcacatttcttacagtgaaattttttccctgttggggacttagagtcacggtgtgaacatgctaagagcacctgcctcaagacctctcatctctttacagtccaacagagcaataggagataatgcttctaatcattaaatagcttataagtaatctttgaatagcatttaatcttatccagttctttaaaatgttcatacagacagcataatcatattaatgctgaatgagactttgcctcatagagcagctgtttcattaccagcaggtggggatagtttcaaattatccaggccctaattatccatattctctcctgttcctcataaaaagccacttcttagtttggctttggttattttactgttctgtgaaactacttctgctgggtattctagcaaaataagagttaataaaataagctctgcatttgttaacagaactttaaaaatattttagggaaaaaatgttaatccttttaacttatttgatttttaattcaaaaggcctatccattgtttgtttga

SEQ ID NO: 38634 - DNA, 303 bp, Macaca Mulatta
ggcatctctgggaaaggacccggggctggtgaggggcccggaggagcctttgcccgcgtgtcagactccatccctcctctgccaccaccgcagcagccacaggcagaggaggacgaggacgactgggaatcctagggggctccatgacaccttcctcccccagacctagacttgggctgttgctctgacatggatacagccaggacaacccgctgagacctgcttccctgggagcgggtggtgatggaaccagcactgtgcggagaccacctgcaaggagcggaaggctggcctgaggccaca

SEQ ID NO: 38635 - DNA, 600 bp, Macaca Mulatta
  misc_feature (1)...(600): n = A,T,C or G
ggggttggatctgttttctgtgtaaccttttcttttatcaccttattttgggggagtacctgcatgtctaaaaatgtgctcacacttgatttgattgggtatgaaattctatgttagaatcaatatccttcagaattttgaaggtgtggttactttgtcatctaacattgctatagagaagtctgaagtgattttgagtctggatcctttttatatnnnnnnnnnnnnnnnnnnnctgtcaccagtgttccaaaatttcacaatgatgtattaatacctgccttggtgaaggtctgtttccatgccagtcccctttccaagtggactcttgtccttaatgtctgggaaacttttcttgaattctttgtcagtgattttcttccttanggtgcccgtgggttttcctttttatttttttaagaatgaatttcactcctgttacctcagctgggatgcaatggccccctctaactccctgccaacttttccttccgggttaaacaaattcccttgcctaggggtttcctgcttaacctcccaaaaaagggaatacgggcctgcccccccccggtaattttttgttttcacaaaggaggggtn

SEQ ID NO: 38636 - DNA, 929 bp, Macaca Mulatta
cagctagtggagaagcgcctcctatccttgaaggagaaacggcgtgtgagggcagcccctagtcatggcacggcctgtttggactcaagtccttctaagtttgcagctcgccaaggagcagagagagacgcccctgacccccaacaagggatcggcatggaaacctgcccaccccagatggctgcccaggtccctcagggacaggctagagtgtgcaccggcatggccaggtccaaagaccctgctgtgcttttgggatgtcaggattgccccgggctgagggctgcccagccaacctctcctctcgaggaccacagacccacctgccccagcctgggaaccaaggacaccttggatctccctggagcctctcctgttaaggagtcacacaggctggctaaggggtcaagtgaggagagggaactccctggcatggtgtgtgtcgtgggttcccaccacaggctgcggccctggaggctatcccagagccctgtcccttcctcaagccttctcagcccaggagggcggggaccccagggagctcttcagtcgccatctgctcagagaagaggcctcagcccagcaccctctcctgttaccaagtccaagaagcgacttctcttcggaagcccatcccctgctgaaaagatgcccgacccagggcctgggctcagggtctctggggagcaatccctggctccagggctgggtggcccctcacagtctcaaaagagaaggggtggccccttggtctccaggaggaagaaaaaacggcattgtagccagtaggggccgctgcggggcaggctctctggtgccagtccccaagggtggggctctgaactctcggaccctcatggcagcaggtgccccaaagcaaaagctgcttctcccccagtgctgatcttgctggggcttagcttgggagg

SEQ ID NO: 38637 - DNA, 745 bp, Macaca Mulatta
ggataccagaatactttactcttactttaattcctactgcccaagcaaaactagtacctgttattattatgtcatttaacatgatagtatcatgttcatctacaaatcctttactgattctctaagatagaatttctcagttttgaatcctcaaggctcttgccactttcattcccacagagatttctctgacttctattggtagtatttacaggtgtccaaagggactgtgacttgcctttgtacctcttgtaatgtacatgctttactttttaaactatagatatattgaatcaatgcctgtcgtcttgagttgaactttagatcactcatgggcaatgatgagaaccactacacaccttacaatacactttgtttcagcagtaaagtcatgggttacccaagacatctccagactctccagaatatattgtcatggtgttaggaatagtctaacggtgcctaggtctgcagcccactcttgattaagtatgtgatataccatttgaaatgatttaggaaaccaggccaatcactatatttgtaataaatctaagcccccttatgttagaaatccatgtctgtttcaaactcatagctcccaccttaatgtttagcgtataggatccattcaagaacttttttggggaatggagcaaaaaattttttaagggaaaatttaaaaagaggggaatattgaggggaaacaaaagcctgaaatttgaaaaaagaagacttacgttgg

SEQ ID NO: 38638 - DNA, 906 bp, Macaca Mulatta
ggattctttagtgtgttctgatagccatgtgtcactacgcactttttctttgtgtctttatatctcttcctgttgcactttaaagcattttcatagaatgtgattttacctgataaagcatccttacagcatctggtttcacctcctacttctttctattggccctctgggtgccgctgccagatgggcagagtggtcctgtaaggctgcagctgtcttgggcttatcacatgcccaggaacaagcattccagtggctccaggaggggtcagcatgggctgtggacatggcaggaaggcttcatgtgaacctgaggctgccctgggctttgggcagctacgtggtaggaaacctgttcctgaaggcaagccttggcttatcccacgtactgaacttccaggggaccagttggccctctgtttctggaactttagaagtggccggtgagcccagtggacaatgtcctcaacgtcccaccttagggtaggaatgtggccagacagctggccctgagctggcaatgaagagtgagcaagtagggccccaggcacccctcaccatgatggcctgtgtgtgtccgtgtggcctcattctcttaatgaggtgggcatggggtgtctggcagggactggagggcaggaatcaagccccctgtgtactcacaggcactgaaccccatggagaaggggattaagccctggaggccacagatgcagttgctggggctgtgttcggggcagtctctctccaaaggcacaggtggggtttccgggcaggacctgaggagacgggcaggtgctcacaagtgctgtttcccccacatggcaaccagtgaggagaaaaatgcccagtggaggtctgacccgccccagtctggagggccagatgctctctggaaagttggct

SEQ ID NO: 38639 - DNA, 453 bp, Macaca Mulatta
  misc_feature (1)...(453): n = A,T,C or G
ggggacacacagctgggatgggccactttgcctgcacatcactgaccacctcccacctgctttgggttctaccatttgaggagacacctgcataggtcaaaggctgggtggctaagacagctgattgtgctcctgttctctgggcctggcatgagaagacattggtgggactggctgaaagaagggctcatccatcccttgaggaggaacaaatgaatccctggagtctccaatgcccagagactcctctcctggccttagccttgtctgcatttggacatgaactttgatgtaatgtcaaaattctggcaaaaggactagtcctgaaagtaagtctgctgaggtggtgggatcctgggtctaagttacaggctccactctaaaagcagagagagcaagagnnnnnnnnnnnnnnnnnnnnnnnnnnnnnnnnnnnnnnnnnnnnnnnnnnnn

SEQ ID NO: 38640 - DNA, 816 bp, Macaca Mulatta
gggggctgatctgtccgaggaacaaatccattctcatctgctttccacattgtccctcttgtttgaggtcctgttccgaccttcatttctaaaactgttctagagcactttgtctttctcatagttcataacttaccccttcaatctagaattagaattacattatttttactagactgtaagctcctagaagataaggactagggagttaatctctgtattccaccagaaggtacagtgactcacaactagagtctttagatgataacttactgagttgaataacttaatatatttctgttttcattcctaagggaggcatgtctggagatagaccttgaatttaataaatgttaggcactataccattttagtggaggaaattgttgggaaatttggggggatgggtatagaaggggcgaggaattccctggccattttcaggtgcttccattggtctggggtactagccattttcttcctgattgtgccgggtatatccccggcagttttgtttctgtgccgaagaattttatatgaaatttttcatttcttttcccaaacttgtttccttctttccatttatgaacatcatccctggctaaagtccggaatcaatctggctttccattttttgttaattcccaaatattcccgtccttccgcctaagttcccttttcaagttttctccctccaaatctttttcaccgttctggaccttccccccaccctacggaaaattttcaaaaacccccccgaccttctctctttaaccgctcttctgtaacctccccggcccttatttttttaacacc

SEQ ID NO: 38641 - DNA, 799 bp, Macaca Mulatta
  misc_feature (1)...(799): n = A,T,C or G
caacagctacactcggagtaganancaaatgagccaaaagtttagcatcctctcatgnttgtcaacatcgtagttttacgtntactttcttctaatctattaaacataaatatggctccatttgtttagtattaccagaaactctcccaatacggcaatattaccttctgtgtaatccacttgccaacagctgttntctgttgaaatgggactcaagaattttgaatccaaggccaatgctgcctgctctgtttacaatggtttgtgtttcgtgaatacatatcaaatgttgtaatatatttttatgatagaattgatggttaacacagggaaaaagtatatattgtgattctgtccaataaagcctcctgttataaaatctcatgcaccttttgatgacctgatgtaaacacatttttaggtataggttaattgccagaaatgttagtttcatgtaatttcatggtgacactgaagtttctatttcttgtctttcctgtcttccaatattgtactcctttcctcttccatctccaatgccctaggtgctcctgcccacccctgcagccttctgagtagtaggtatttatctttcgggggccatctcttaacttgcccaaaagcacagcagccctccccttcccaaacacccctgaccagggggatgtgtattccccaccctctcaaataccttgcaatttttgccactttggcccggttcctcaggctttgctagatgactaattaacttcttggatctcagaaacagagtaggaggggcctgggagaaggaggacca

SEQ ID NO: 38642 - DNA, 847 bp, Macaca Mulatta
  misc_feature (1)...(847): n = A,T,C or G
gggatacttttcgtgaaagccttcaggtcagagtcacttttctagatcagaatgtcaaaattaactgagagagactaacttaaaatattcagtggaagtagacagaattgtagttttcttttttactttaaatgaagtttgcagtaacatttgagttcccaagaattgtggtttgacaaaaatttgaacagaggaaaaatttaaaagtaagcagaaagtgaactttgaagttaatttaatggtgaatttatatataccaagtaatgaaaatgacacgggaatgtcatttcatgtaatcatatttcaatttgaaaaatcatgagtccatagaaacatcatagaactttgtacataaaatgttaaaatcttgaggctttaaaattaaggacccttttaccattttcataatttctcatgacatatacttctcttaaacctttatcatttcctccttagtaattaatgatataagtagttgcaagcaatgccaaatggatgttccaaggagagaacccctggaaatatctggatatataacagtggggttgcttatagcaaaaacaaacttctaaggtagatttcttaggactgtgaaatgtttttcccttcttaacagttaatggttcttggtatcaagctgcaggttttagcttatattcattcttctgaaatggaattattaacccaatatttcggttttacatttttccattttctttttccatagataaagggtaaaattaatattggttatttggaaagggactacatgcnnnnnnnnnnnnnnnnnnttcattcttttgctttaataaatttctttcctgaaactttttaaacaattttaaaa

SEQ ID NO: 38643 - DNA, 828 bp, Macaca Mulatta
tcaaaaaactttaagaaattaccgggttcttgcatgtttcttgggcctctcccaggggctgcttttattaaaattcgtgaaaatctttctggctttcttctaaaagctttttgcatctgggggaaggttttccttggggctgccagggctgtagaaacttcttcaccggtgggcatgttgctgattctggttttcagggccttcagcagtgggaagctggagataaggctggagtcaagctcttccacatagtagagaagttccaccaggctaatgtcagcccggctcagcttgttgccaacaaggtaatcttgtccatggctctgtaacactttttcgaaggcagggaagtagcgattttttgttttctctttgatcaaggcaatcttggcatctttttcctcaggtcgacataagggcagaagaaggatcatttcattcaaatctgccataccttccgtatacatatcaattagggctctctcctttatgtctttcccgtagaggttgtatttgctggcaatgtagttgagaatggctctggtctgcaccagcttcatcccatcaatctcaaccattggtacttgctggaacatcaaactcccatcatttcttaacttttccaaatcttctgcagattctataaatttctcttcaaactccactccagctgcagccaagagccaccggatgggctccattctgccccgtccattgaagtagtgaagcttgggcttccccgccatggtaacagtctcttggtttctctgattaaagtccagctggtctccgctcagcttctcaaggcccccccctcacgtgtatccc

SEQ ID NO: 38644 - DNA, 623 bp, Macaca Mulatta
  misc_feature (1)...(623): n = A,T,C or G
attggtcacagcacagacatttagaattttttagcannnnnnnnnnnnnnnnnnnnntcttatagtgctctctgggaattgcaccatgtacacttttccaacctatagaaatcatcattattgttaaattatctcaatttttgtatttcttttattgtctattgtgcttttttgtttaaaaatacttttatagttttaaagtattgatcaaagtagtattctcttgaagtcgtagtcaatttaatttgatccagtaagtttttctgaatctcctttttacgttccaataaattctattataattaagtgtacttttaccaattccattgtataagcaaacagacaccttttagaaaaggataagtaatcatcannnnnnnnnnnnnnnnnnnnnnnntttctagactactaaatttggcataagaataatgcttttaaaatgcaaatactttagttttttggtatatacataagatgtgaactttcctattgatatctctttatattaatagagatgtacatttctttctatgctgtggctagagcaaaagttaataatgattatttacacaattgatttaatttcttaggatatgtaccatattggatattatatctgattt

SEQ ID NO: 38645 - DNA, 661 bp, Macaca Mulatta
gcgcgggctctggcaggtcctttctctaggcaggtggcacggctagcacagggcagcctctctttgtgggcgggcgcgaggcccgctagggggttatactggggaacgtgcctgcgcgtgctgggatagttcatttaaagcccccatccctgcaaggtggtggtttctatcaatatgaatcttttcaacctggaccgttttcgctttgagaaaaggagtaagattgaggaagcgcccgaagcaacccctcaaccttcccagcctggcccttcttcaccaatttctcttagtgctgaagaagagaatgctgaaggggaagttagcagggcaaacactcctgattcagatataactgaaaaaacagaagattctagtgttccagaaactccagataatgagagaaaagcaagtatatcatatttcaaaaatcaaagaggaatacagtatattgatttgtcttctgatagtgaagatgtcatttccccaaattgctccaatacagttcaagagaaagcattcagcaaagatacagtgattattgtatctgagccatccgacgatgaagagtcccaaggccttcccaccatggcacatagaaatgatgatattccagaattggaagacctttcggaaattggaagatcttaaagatgctaaactt

SEQ ID NO: 38646 - DNA, 782 bp, Macaca Mulatta
  misc_feature (1)...(782): n = A,T,C or G
catgattcaccactattatgancgatgttcccacactatatcttatcatgcagctaaagctactaaacacaaatcaccaccaaccaccccttacaaaaacccccacccttcagtctcacaatgtccgnnnnnnnnnnnnnnnnnnnnnnnnnnnnnnnnnnnnnnnnnnnnnnnnnnnnnnnnnnnnnnnnnnnnnnnnnnnnnnnnnnnnnnnnnnnnnnnnnnnnnnnnnnnnnnnnnnnnnnnnnnnnnnnnnnnnnnnnnnnnnnnnnnnnnnnnnnnnnnnnnnnnnnnnnnnnnnnnnnnnnnnnnnnnnnnnnnnnnnnnnnnnnnnnnnnnnnnnnnnnnnnnnnnnnnnnnnnnnnnnnnnnnnnnnnnnnnnnnnnnnnnnnnnnnnnnnnnnnnnnnnnnnnnnnnnnnnnnnnnnnnnnnnnnnnnnnnnnnnnnnnnnnnnnnnnnnnnnnnnnnnnnnnnnnnnnnnnnnnnnnnnnnnnnnnnnnnnnnnnnnnnnnnnnnnnnnnnnnnnnnnnnnnnnnnnnnnnnnnnnnnnnnnnnnnnnnnnnnnnnnnnnnnnnnnnnnnnnnnnnnnnnnnnnnnnnnnnnnnnnnnnnnnnnnnnnnnnnnnnnnnnnnnnnnnnnnnnnnnnnnnnnnnnnnnnnnnnnnnnnnnnnnnnnnnnnnnnnnnnnnnccaaactctccataggtcctatagcctctaactccggttttcctactatgtagaattcgagtagccctatcaagctatgtctccctcttatag

SEQ ID NO: 38647 - DNA, 548 bp, Macaca Mulatta
cttggaagtttcttccagggagcgagacccgctggtatgtttacatctgcactcccgtgccctggggaagtgactgggtggaggggatggctcgtggaaatctgccccgcacagccggccccctttgggctgccactgtctagactgttggcctttgacctctccgcctcttgtggcgtctgaacccttttggagagagccggacaaagccccattctccatggcctcggcctctatcctgcggcctctgggagccgtgtgatcctgcggccagtgtgggatgctgatgatggttgaggaagcaggtctctgccaggttgccccatgcagccacccatcctcagcatcctaacttaagggggcgggagaggcctttgtttctataatccaaattaaatttcccttccctgggcacaagtgcctcataagggcccagggctgctggctgggagggaaagtgtccccagttttgcagtgaggaggcaggctgagggctggggttctacttagacccttggcagaatggctggaggggcaggtgctgccca

SEQ ID NO: 38648 - DNA, 136 bp, Macaca Mulatta
ttcatagatagatgtacaatttcatctttttgcttgataagttggtgactcaaattcaatgacacttatcaagaaactttcaagaatggtgatgtattctcggtggctgggctgcttctatgataacccctgtggg

SEQ ID NO: 38649 - DNA, 488 bp, Macaca Mulatta
ttccctcatcccaaacttggggtgctgggaggcagaagagaccccgagcagctgtgtcttgcttggacattagtgtgggaacccaaccaggcagcctttatttgtttcaaaacagaatttagagcatcccagtagctcagaaggatatttttaaagataacccgcttgactagaactgtcctatgttggtttaattgtgtttcttctaccccaggagcaagatggagaagtgttttttggagttacttgagtttaatattcatgtgtctgccagtgtttatgtaaaatattactttgacctgcgtgccttggcaaatgaccatgacgtgtattttctatttcattttcttcacaaagataaagcccggagactgaaggtaaggatgtgaagtcacttagcagagtttaccatcagccacagaagccagcatctgtgacaaaatcatattaagtagcgattaggaaaatgaaagccttaaaattaacag

SEQ ID NO: 38650 - DNA, 639 bp, Macaca Mulatta
aatggggccaagggaagaacagtgattattgagcagagctggggaagtcccaaagtaacaaaagatggtgtgactgttgcaaagtcaattgacttaaaggataaatataaaaacattggagctaaacttgttcaagatgttgccaataacacaaatgaagaggctggggatggcactaccactgctactgtactggcacgctctatagccaaggaaggcttcgagaagattagcaaaggtgctaatcccgtggaaatcaggagaggtgtgatgttagctgttgatgctgtaattgctgaacttaaaaagcagtctaaacctgtgaccacccctgaagaaattgcacaggttgctacaatttctgcgaatggagacaaagaaattggcaatatcatctctgatgcaatgaaaaaggttggaagaaagggtgtcatcacagtaaaggatggaaaaacactgaatgatgaattagaaattatcgaaggcatgaagtttgatcgaggctatatttctccatactttattaatacatcaaaaggtcagaaatgtgaattccaggatgcctatgttctgctgagtgaaaagaaaatttctagtgtccagtccattgtacctgctcttgaaattgccaatgctcac

SEQ ID NO: 38651 - DNA, 734 bp, Macaca Mulatta
  misc_feature (1)...(734): n = A,T,C or G
gggttcttcagtttgtcaagataatgttcagtgcttggcacttaaataacattttttgcaagaactccaaggcacattattgaatgcctttaaccaagtgcattctgggatgtttgcttgactcattatcttgcttttctgcagcattctgtgatttgagtcatctatgaatcctgaataagagttacattctttgattggtaatattatcatttataacaagcctcactaatgagggtatcactttgattgactgatttgttaaagtttttaagcctctcattttcctaatccagaaatcacaacctgattttataaaaagtagagcttcattcatttcataccttagataccatcctagtaaatccagaacatacacaaggttcatgtgagtctgctttcttgacatgatagcattgtttgatgcagtggatatgtcagaatgactaacctaggagtttaaaactcctaagaaactaaaacctgtaagacatttaaaagtctccacaattttaatgtatacaaagctatgttactgtgtaacacattacagttcaaattcactccagaaataaaaggccagtaggattagggactcactggtagtttggagtctcccagcacacatccctcctagtgggatgatctattgacatatctcccagcttttttatttttacttctgtatatcacanttgnagtggatggcccccttcacttttttctctcctggc

SEQ ID NO: 38652 - DNA, 772 bp, Macaca Mulatta
  misc_feature (1)...(772): n = A,T,C or G
gtggctggcagagtcggcacgatggctcctcaccacgggcaggctggaccggggcctgcgcgagctgtggagggtggctgccatcaacagaaagggggcggtgcgggacaccctgacccctgaggtnaggtcttgctttcagccatgagggaggaactgagcatggaccaggctcccgccagcctgggcacactgctccgcacgcccggactgcgcttccggacctgtatctccatgttgtgctggtnnnnnnnnnnnnnnnnnnnnnnnnnnnnnnnnnnnnnnnnnnnnnnnnnnnnnnnnnnnnnnnnnnnnnnnnnnnnnnnnnnnnnnnnnnnnnnnnnnnnnnnnnnnnnnnnnnnnnnnnnnnnnnnnnnnnnnnnnnnnnnnnnnnnnnnnnnnnnnnnnnnnnnnnnnnnnnnnnnnnnnnnnnnnnnnnnnnnnnnnnnnnnnnnnnnnnnnnnnnnnnnnnnnnnnnnnnnnnnnnnnnnnnnnnnnnnnnnnnnnnnnnnnnnnnnnnnnnnnnnnnnnnnnnnnnnnnnnnnnnnnnnnnnnnnnnnnnnnnnnnnnnnnnnnnnnnnnnnnnnnnnnnnnnnnnnnnnnnnnnnnnnnnnnnnnnnnnnnnnnnnnnnnnnnnnnnnnnnnnnnnnnncccctggctgcttcgctggtatacgggacggtgccggtgctgagtggcctggccgcactgcttctgcccgagacccagagcctgccgctgcccgacaccatccaagatgtgcagaaccag

SEQ ID NO: 38653 - DNA, 732 bp, Macaca Mulatta
  misc_feature (1)...(732): n = A,T,C or G
aaggaacgagggcttttggggggaaaaacccnttttggggttggaactgntatgtggctgataattggtctcacaaaatagaagagaaaggaagaaaaaaaggacgagggctggactgtgactgtatgtggctgataattgctatcgacccttccatctgttccgtgtcaagtgtcctgtgtttggtcatcatgtaccatttagggcagggattccctccttcaccagtggggtgaataggaggttatcacaacaccactccctcctctcccacgggaatctagagcagcctttcatgcctttccctttttctcacttatacctaatcttcctgtccttacctcccaaaacactttttatattatgtctctggttatttcatgattcgttgcagacattttcttccatttggagggcaacatgttttctcacacagatcttcgtgccctgtccttttagtgctgctgggcttttcacttccctcagagggttttgttggcataattgcttattgaggaggaatttttagtttcaggagtcagtgaccttcaaggatgtgtctatagatttctcttgggaagagtggattcaagcagattcttctcagaggatgaccatgtatggggaggtgatgctggagaactacaggaacctgttctcaccgggtaaggacttcttataactcaaaacccacctcttcacacctttccctctcaatcctgtgtgacctct

SEQ ID NO: 38654 - DNA, 770 bp, Macaca Mulatta
  misc_feature (1)...(770): n = A,T,C or G
ggggctctttaccaaggacccgccaagatgggccgcgttcgcaccaaaaccgtgaagaaggcggcccgggttatcatagagaagtattacacgcgcctgggcaacgacttccacacgaacaagcgcgtgtgcgaggagatcgccattatccccagcaagaagctccgcaacaagatagcaggctatgtcacccatctgatgaagcggattcagagaggccctgtaagaggtatctccatcaagctgcaggaggaggagagagaaaggagagacaattacgttcccgaggtctcagccctggatcaggagataattgaagtagatcctgacactaaggaaatgctgaagcttttggacttcggcagtctgtccaacctgcaggtcactcagcctacagttgggatgaatttcaaaacgcctcggggacctgtttgaattttttctgcagtgctatattattttcaataaatcggggacaacattnannntcaaatccacacgcatctctatatcgccttggtcggccgcccctcgggccccctccaaaaagccttttctaagacccctttccgttttgtgggccnnnnnnnnnnnnnnnnnnnnnnnnnnnnnnnnnnnnngggaacccagggggtcccaaaacccggggttcccccaaggggaaaaaccccggggggggccatgaacacatgaggcccttggggaaatttcctccccccccccannnnnnnnnnnnnnnnnnnnnnnnnnnnnnnnnnnncggggaccaa

SEQ ID NO: 38655 - DNA, 2317 bp, Macaca Mulatta
  misc_feature (1)...(2317): n = A,T,C or G
gcacacacctagaggcagatattgggggactaacaatggaatcagaactgaagaggatccatggcagttttactcttaaggaaaaaatgaaagnnnnnnnnnnnnnnnnnnnnnnnnnnnnnnnnnnnnnnnnnnnnnnnnnnnnnnnnnnnnnnnnnnnnnnnnnnnnnnnnnnnnnnnnnnnnnnnnnnnnnnnnnnnnnnnnnnnnnnnnnnnnnnnnnnnnnnnnnnnnnnnnnnnnnnnnnnnnnnnnnnnnnnnnnnnnnnnnnnnnnnnnnnnnnnnnnnnnnnnnnnnnnnnnnnnnnnnnnnnnnnnnnnnnnnnnnnnnnnnnnnnnnnnnnnnnnnnnnnnnnnnnnnnnnnnnnnnnnnnnnnnnnnnnnnnnnnnnnnnnnnnnnnnnnnnnnnnnnnnnnnnnnnnnnnnnnnnnnnnnnnnnnnnnnnnnnnnnnnnnnnnnnnnnnnnnnnnnnnnnnnnnnnnnnnnnnnnnnnnnnnnnnnnnnnnnnnnnnnnnnnnnnnnnnnnnnnnnnnnnnnnnnnnnnnnnnnnnnnnnnnnnnnnnnnnnnnnnnnnnnnnnnnnnnnnnnnnnnnnnnnnnnnnnnnnnnnnnnnnnnnnnnnnnnnnnnnnnnnnnnnnnnnnnnnnnnnnnnnnnnnnnnnnnnnnnnnnnnnnnnnnnnnnnnnnnnnnnnnnnnnnnnnnnnnnnnnnnnnnnnnnnnnnnnnnnnnnnnnnnnnnnnnnnnnnnnnnnnnnnnnnnnnnnnnnnnnnnnnnnnnnnnnnnnnnnnnnnnnnnnnnnnnnnnnnnnnnnnnnnnnnnnnnnnnnnnnnnnnnnnnnnnnnnnnnnnnnnnnnnnnnnnnnnnnnnnnnnnnnnnnnnnnnnnnnnnnnnnnnnnnnnnnnnnnnnnnnnnnnnnnnnnnnnnnnnnnnnnnnnnnnnnnnnnnnnnnnnnnnnnnnnnnnnnnnnnnnnnnnnnnnnnnnnnnnnnnnnnnnnnnnnnnnnnnnnnnnnnnnnnnnnnnnnnnnnnnnnnnnnnnnnnnnnnnnnnnnnnnnnnnnnnnnnnnnnnnnnnnnnnnnnnnnnnnnnnnnnnnnnnnnnnnnnnnnnnnnnnnnnnnnnnnnnnnnnnnnnnnnnnnnnnnnnnnnnnnnnnnnnnnnnnnnnnnnnnnnnnnnnnnnnnnnnnnnnnnnnnnnnnnnnnnnnnnnnnnnnnnnnnnnnnnnnnnnnnnnnnnnnnnnnnnnnnnnnnnnnnnnnnnnnnnnnnnnnnnnnnnnnnnnnnnnnnnnnnnnnnnnnnnnnnnnnnnnnnnnnnnnnnnnnnnnnnnnnnnnnnnnnnnnnnnnnnnnnnnnnnnnnnnnnnnnnnnnnnnnnnnnnnnnnnnnnnnnnnnnnnnnnnnnnnnnnnnnnnnnnnnnnnnnnnnnnnnnnnnnnnnnnnnnnnnnnnnnnnnnnnnnnnnnnnnnnnnnnnnnnnnnnnnnnnnnnnnnnnagctgtgctgttttggctgaattataaggctgcctatgacaactggaatgaacaacgaatggctttacataaggatattcatatggctacaaaggaagtagtagatatgctacctggtatccagcaaacatcagcccaggcctttgggactcttttcctccagctcactgtcaatgatctgggaatttgcctacctatcacaaatactgcnnnnnnnnnnnnnnnnnnnnnnnnnnnnnnnnnnnnnnnnnnnnnnnnnnnnnnnnnnnnnnnnnnnnnnnnnnnnnnnnnnnnnnnnnnnnnnnnnnnnnnnnnnnnnnnnnnnnnnnnnnnnnnnnnnnnnnnnnnnnnnnnnnnnnnnnnnnnnnnnnnnnnnnnnnnnnnnnnnnnnnnnnnnnnnnnnnnnnnnnnnnnnnnnnnnnnnnnnnnnnnnnnnnnnnnnnnnnnnnnnnnnnnnnnnnnnnnnnnnnnnnnnnnnnnnnnnnnnnnnnnnnnnnnnnnnnnnnnnnnnnnnnnnnnnnnnnnnnnnnnnnnnnnnnnnnnnnnnnnnnnnnnnnnnnnnnnnnnnnnnnnnnnnnnnnnnnnnnnnnnnnnnnnnnnnnnnnnnnnnnnnnnnnnnnnnnnnnnnnnnnnnnnnnnnnnnnnnnnnnnnnnnnnnnnnnnnnnnnnnnnnnnnnnnnnnnnnnnnnnnnnnnnnnnngaagccatagattatcgaagacaggcagcatctgctagccagccaggagaacttagaggaagaaaaattatgaagcgtatagtggatatcagagaactgaatgaacaggccaaagtaatagatgatctgaa

SEQ ID NO: 38656 - DNA, 790 bp, Macaca Mulatta
  misc_feature (1)...(790): n = A,T,C or G
acttgttctttcaaagagcgcttcagcccgcgaaactgcattccagcgccagtcccagtgctcagcagtacgatgcttccagtgcagtacttttagacaacctccctggagtccggtggctcactcttccactggaaatcaagnagatggaattagacatggcattaagtgacttggaggctgcagattttgcagaactgnnnnnnnnnnnnnnnnnnnnnnnnnnnnnnnnnnnnnnnnnnnnnnnnnnnnnnnnnnnnnnnnnnnnnnnnnnnnnnnnnnnnnnnnnnnnnnnnnnnnnnnnnnnnnnnnnnnnnnnnnnnnnnnnnnnnnnnnnnnnnnnnnnnnnnnnnnnnnnnnnnnnnnnnnnnnnnnnnnnnnnnnnnnnnnnnnnnnnnnnnnnnnnnnnnnnnnnnnnnnnnnnnnnnnnnnnnnnnnnnnnnnnnnnnnnnnnnnnnnnnnnnnnnnnnnnnnnnnnnnnnnngaaacattatatgctatgtgtactattagaagctggaggttgcgcatccaaagctattgggagtcctggaccagactgtatatatgtggatcaggtcaaaacaactcttcaccagctgaatggagtagattctcgcatagatgaacggctagcatcttctccaaccccctgtttgtcttgtgctgattggttccttactggatcacgtgaaaaaacagatagcttgaccacttcccctattctcagtaggctacaaggtacttccaaagtagcaacttctccaacatgcagaagaaccctttttgg

SEQ ID NO: 38657 - DNA, 955 bp, Macaca Mulatta
  misc_feature (1)...(955): n = A,T,C or G
ggggggccctcttttcctttctccgccatcgtggtgtgttcttgcctccacttctcgccatgtcttctcacaagactttcaggattaagcgattcctggccaagaaacaaaagcaaaatcgtcccattccccagtggattcggatgaaaactggaaataaaataaggtacaactccaaaaggagacactggagaagaaccaagctgggtctataaggaattgcacatgagatggcacatatatttgtgctgtctgaaggtcacgatcacattaccgtatcaaactgaaaatgtcaccactctctggagagttcgacgtattttcctctctgaatctattatgaatgcgttggttggctgggttcagtaataaatatgtgaggcctttcattacaatacataatttttttctaacatttntttcttgtcccngnnnnnnnnnnnnntcggaaaagctttctaaaaccattcgttttgtgcgcgcggggccctgtaaggttaagtgaacattggctcattagcttgtttccctaaagaaaatccatgagtcatggacttagtggcttttggaattcctccccacaatataaaataaccccccggggtggcaaacctaaactgttttctgaaaccagatttccaagattggagattttcatgagggtctatttaactgggattttatcccgaccaggcgagtttctcaagtccgtagccttccgatattctataatattactacccccaccactcctatgctcctcattcttatagtggatagtatgatgtgtttcgacaaatatctcccctttagaacgcactatctctggtactctcaatatttgtggatatagccactgttcccactaaaaactgcgtgatgtgttatggtagaaaccctataaaagaagactccactttgggagacaatacatagcacacacattttgtgtcta

SEQ ID NO: 38658 - DNA, 829 bp, Macaca Mulatta
  misc_feature (1)...(829): n = A,T,C or G
ggatgccccagttagatacatcaacatgattcaccactattatgacgatgcttcccacactatatcttatcatgcagctaaagctactaaacacaaatcaccaccaaccaccccttacaaaaacccccacccttcagtctcacaatgtccgnnnnnnnnnnnnnnnnnnnnnnnnnnnnnnnnnnnnnnnnnnnnnnnnnnnnnnnnnnnnnnnnnnnnnnnnnnnnnnnnnnnnnnnnnnnnnnnnnnnnnnnnnnnnnnnnnnnnnnnnnnnnnnnnnnnnnnnnnnnnnnnnnnnnnnnnnnnnnnnnnnnnnnnnnnnnnnnnnnnnnnnnnnnnnnnnnnnnnnnnnnnnnnnnnnnnnnnnnnnnnnnnnnnnnnnnnnnnnnnnnnnnnnnnnnnnnnnnnnnnnnnnnnnnnnnnnnnnnnnnnnnnnnnnnnnnnnnnnnnnnnnnnnnnnnnnnnnnnnnnnnnnnnnnnnnnnnnnnnnnnnnnnnnnnnnnnnnnnnnnnnnnnnnnnnnnnnnnnnnnnnnnnnnnnnnnnnnnnnnnnnnnnnnnnnnnnnnnnnnnnnnnnnnnnnnnnnnnnnnnnnnnnnnnnnnnnnnnnnnnnnnnnnnnnnnnnnnnnnnnnnnnnnnnnnnnnnnnnnnnnnnnnnnnnnnnnnnnnnnnnggctattacacccgggatcggaaacactggtactagcgcttattcaacccacccaaccttcttgcaaaagcttcttacctagccctcttaaacctttcctggggtattacctaacctaatttcctaaaaaaaatttggcaggttagaccccctaaat

SEQ ID NO: 38659 - DNA, 435 bp, Macaca Mulatta
  misc_feature (1)...(435): n = A,T,C or G
atggaaactctcctgggagtgtctttggtgattctatggcttcaactggccagggtgaacagtcaacaaggagaagaggatcctcaggccttgagcatccaggagggtgaaaatgccaccatgaactgcagttacaaaactagtataaacaatttacagtggtatagacaagattcaggtagaagccttgtacagctagttttaatacgttcaaatgaaagagagaaaaatagcggaagactaagagtcactcttgacactttgaagaaaagcagttccttgttgatcacggcttcccgggcagcagacactgcttcttacttctgtgctcttaaccaggcaggaaagcttatcttcggacagggaaccgagttatctgtgaagcccnnnnnnnnnnnnnnnnnnnnnnnnnnnnnccagctgagaggctctaaa

SEQ ID NO: 38660 - DNA, 137 bp, Macaca Mulatta
aggatgggaacggctacatcagcgccgcagagctgcgtcacgtaatgacgaacctgggggagaagctgaccgatgaggaggtggatgagatgatcagagaggctgacatcgacggagatggccaggtcaattatgaa

SEQ ID NO: 38661 - DNA, 750 bp, Macaca Mulatta
  misc_feature (1)...(750): n = A,T,C or G
attgaaaagccaatccacctttaattggtaatttactcatccaatgagccttcagagggataatattatctatcctacctccataaaacaatttggaagaaactgccatggatctttattctaatctgggagtggatgaaccacatctatggattttaacttcttttttgtcttctcttacnggtcactcaataactaatacttcaaaggacctggtcagtttttgtactaggtctcagagcctaacacaatgcctgggataaagatagcataaacaaatattcattgagtgaatgctgactacctgaacaaaaagaatccctttgtggttataaattcaagcctttaataaaacagaattgtccttcaagggccagggttgtagtgtgcctgtgcttgtaggcagatgaacatctgtgtcatcatcagtcctaacagtgacttnnnnnnnnnnnnnnnnnnnnnnnnnnnnnnnnnntgagtctggctcnnnnnnnnnnnnnnnnnnnnnnnnnncgnnnnnnnnnnnnnnnnnnnnnncnnnnnnnnnnnnnncgcnnnnnnnnnnnnnnnnnnnntnnnnnnnnnnnnnncacaggcgcccgccacttcgcccggctagnnnnnnnnnnnnnnnnnnnnnnnnnnnnnnnnnnnnnnnnannnnnnnnnnnnnnnnnnnnnnnnnnncatgatccgcccgtnnnnnnnnnnnnnnnnnnnnnnnnnnnnnnnnnnnnnnnnnnnnnn

SEQ ID NO: 38662 - DNA, 643 bp, Macaca Mulatta
  misc_feature (1)...(643): n = A,T,C or G
gggggcccactcggtggttcaacggtccccgacgggagctcgaggtccgggtgaggaagggggcctgttagtgtgaagcgactgtgggacatcctggtgaagacaggacctaaagccggcagaagatgctgtgatgtagatgcagattggggcgtcatggtcagcgatgccactggcgctcgcgaggttacccagagaccgtgttgaaactgtaacacccactgtgaaggtcggtggctccatttttgaagtcagcaagaccatgaacccactggaaggaaccaactctggacacagtaacagtcgctgccattcatggagcacctgccatgtgccaggtggtgctaagtgctctgcgtgtgccagaatgtgttctatggcaatgaatcaagtgtgacatctgaatgaagcctctcccacacgtgacacacaacaatattctgctcctgtctcaatcctgcaagctgatcgaaactcaaactcctctggattgcctcttgggaaaatctcctgagttactccttgtaattgttcttcagatttttctgttggagttgattgtttatgctttgtcttgacctagaaatctgaacaaagaatgggaattaaagttctctgnnnnnnnnnnnnnnnnnnnnnnnnn

SEQ ID NO: 38663 - DNA, 817 bp, Macaca Mulatta
  misc_feature (1)...(817): n = A,T,C or G
gtaaatctgctctcctcaggcgtatatgatatattaaatgtaatttataggtacttccattttctcttccttcttacttgcctttaagatcttctaaaaaagaaactaaaagttaatatttagttgtttatattatgtaaccttttaactatatataaaatacttttttagtttctttctcactacttttattcaaaagtacttttaacataccagtacgtagtctgtctgatgggagtactaaattggacagtaagcttttgtcttaataaaactgaaatttgtttctcatgatatgaatcttacaggtaagatgtagggtttattgaaaatgtgtgggttaaatactttcaggtacaccaattctttctactaaattgagctttatttgaagttctttggaatctgtggtgaaaaataattttctaatttccaaatacattaagagcattacaatgaatattaatcacctttaaagtcttttagaaaagggcttgtataggtttatggctgcatagaggggctgaatannnnnnnnnnnnnnnnnnnnnnnnnnncttgttcttacagaagatgtacttcagcaaatacgttagctccctagcgcctaagttgtagaatacaaaatacgagcattaatacaacttaattgaccggtggattttcataccccacttatctgtgaatcgatttcggtagatacattatagctaattcttcaacgacacttgataaagttgagaatgagcagaattccgtgatttacccagtgttcgaaatagcataagagtcttgtttattgcaaagagagtaggga

SEQ ID NO: 38664 - DNA, 142 bp, Macaca Mulatta
tggatgtcatccaaactttatatcaagaaactggacaagttaagagcaatcacaaactggaatatcgccttaaaaatcaaactgcacgaagcaagctgaaactgagacaagattatatcttttaattgatctaaagcgttgt

SEQ ID NO: 38665 - DNA, 5209 bp, Macaca Mulatta
  misc_feature (1)...(5209): n = A,T,C or G
accaccgtgcgcctgctgtggctctccatgctgaagatgcccagggagctgatgcggctgtgcctctgccacctcctcacctggttctccgtcatcgccgaggccgtgttctacaccgacttcatgggccaggtcatcttcgaaggcgaccccaaggnnnnnnnnnnnnnnnnnnnnnnnnnnnnnnnnnnnnnnnnnnnnnnnnnnnnnnnnnnnnnnnnnnnnnnnnnnnnnnnnnnnnnnnnnnnnnnnnnnnnnnnnnnnnnnnnnnnnnnnnnnnnnnnnnnnnnnnnnnnnnnnnnnnnnnnnnnnnnnnnnnnnnnnnnnnnnnnnnnnnnnnnnnnnnnnnnnnnnnnnnnnnnnnnnnnnnnnnnnnnnnnnnnnnnnnnnnnnnnnnnnnnnnnnnnnnnnnnnnnnnnnnnnnnnnnnnnnnnnnnnnnnnnnnnnnnnnnnnnnnnnnnnnnnnnnnnnnnnnnnnnnnnnnnnnnnnnnnnnnnnnnnnnnnnnnnnnnnnnnnnnnnnnnnnnnnnnnnnnnnnnnnnnnnnnnnnnnnnnnnnnnnnnnnnnnnnnnnnnnnnnnnnnnnnnnnnnnnnnnnnnnnnnnnnnnnnnnnnnnnnnnnnnnnnnnnnnnnnnnnnnnnnnnnnnnnnnnnnnnnnnnnnnnnnnnnnnnnnnnnnnnnnnnnnnnnnnnnnnnnnnnnnnnnnnnnnnnnnnnnnnnnnnnnnnnnnnnnnnnnnnnnnnnnnnnnnnnnnnnnnnnnnnnnnnnnnnnnnnnnnnnnnnnnnnnnnnnnnnnnnnnnnnnnnnnnnnnnnnnnnnnnnnnnnnnnnnnnnnnnnnnnnnnnnnnnnnnnnnnnnnnnnnnnnnnnnnnnnnnnnnnnnnnnnnnnnnnnnnnnnnnnnnnnnnnnnnnnnnnnnnnnnnnnnnnnnnnnnnnnnnnnnnnnnnnnnnnnnnnnnnnnnnnnnnnnnnnnnnnnnnnnnnnnnnnnnnnnnnnnnnnnnnnnnnnnnnnnnnnnnnnnnnnnnnnnnnnnnnnnnnnnnnnnnnnnnnnnnnnnnnnnnnnnnnnnnnnnnnnnnnnnnnnnnnnnnnnnnnnnnnnnnnnnnnnnnnnnnnnnnnnnnnnnnnnnnnnnnnnnnnnnnnnnnnnnnnnnnnnnnnnnnnnnnnnnnnnnnnnnnnnnnnnnnnnnnnnnnnnnnnnnnnnnnnnnnnnnnnnnnnnnnnnnnnnnnnnnnnnnnnnnnnnnnnnnnnnnnnnnnnnnnnnnnnnnnnnnnnnnnnnnnnnnnnnnnnnnnnnnnnnnnnnnnnnnnnnnnnnnnnnnnnnnnnnnnnnnnnnnnnnnnnnnnnnnnnnnnnnnnnnnnnnnnnnnnnnnnnnnnnnnnnnnnnnnnnnnnnnnnnnnnnnnnnnnnnnnnnnnnnnnnnnnnnnnnnnnnnnnnnnnnnnnnnnnnnnnnnnnnnnnnnnnnnnncttttcctcagcgagtttggcacattgtgccccgggcagccctgtccttgggcagcggccgcacaccaaagctgggaggaggctggtccgggaggcctgggcagaagacagtgattcgcaggggcggctcccagacaccgtgcccagggatgggatgggcaccacctgggggcggagcgtgagccccagacgggctcctgcgtgtgcgcgcgagtgtctgcccccagccacgggacgctgctggtcccgtctgaaggactctcttaggaggccaggttgcccctccagacccctcccaacatcggggaaggaaacgttgactttcactgcactttgatgcgtctctaaaccatttgctggggattcctgagagcagagctcccggtgggccctgcctcccccgccgcaaggctacctcgggcgtgtggatgtgcgagggcctccccgcttgtgaaggggacatgcgtgctggaacctgtcagaactccatgccttcctcgcctgctcacctgttcgacgctggaatcaggacaggtgcaaagggaagcgtacgtctgggacagcgaaggcccgtgtcactggagggttccgcacagtcgttctggtttcagcaaataagcaaaactcgggcaagtactgcagctatttggaaatgttttccaaaccagtctctttagaactaagccnatttgaagcggtcagtgtaagcttactgagatcaggagacggaggccccgcacatcatacggatcaagtcagacaattgtaatnnnnnnnnnnnnnnnnnnnnnnnnnnnnnnnnnnnnnnnnnnnnnnnnnnnnnnnnnnnnnnnnnnnnnnnnnnnnnnnnnnnnnnnnnnnnnnnnnnnnnnnnnnnnnnnnnnnnnnnnnnnnnnnnnnnnnnnnnnnnnnnnnnnnnnnnnnnnnnnnnnnnnnnnnnnnnnnnnnnnnnnnnnnnnnnnnnnnnnnnnnnnnnnnnnnnnnnnnnnnnnnnnnnnnnnnnnnnnnnnnnnnnnnnnnnnnnnnnnnnnnnnnnnnnnnnnnnnnnnnnnnnnnnnnnnnnnnnnnnnnnnnnnnnnnnnnnnnnnnnnnnnnnnnnnnnnnnnnnnnnnnnnnnnnnnnnnnnnnnnnnnnnnnnnnnnnnnnnnnnnnnnnnnnnnnnnnnnnnnnnnnnnnnnnnnnnnnnnnnnnnnnnnnnnnnnnnnnnnnnnnnnnnnnnnnnnnnnnnnnnnnnnnnnnnnnnnnnnnnnnnnnnnnnnnnnnnnnnnnnnnnnnnnnnnnnnnnnnnnnnnnnnnnnnnnnnnnnnnnnnnnnnnnnnnnnnnnnnnnnnnnnnnnnnnnnnnnnnnnnnnnnnnnnnnnnnnnnnnnnnnnnnnnnnnnnnnnnnnnnnnnnnnnnnnnnnnnnnnnnnnnnnnnnnnnnnnnnnnnnnnnnnnnnnnnnnnnnnnnnnnnnnnnnnnnnnnnnnnnnnnnnnnnnnnnnnnnnnnnnnnnnnnnnnnnnnnnnnnnnnnnnnnnnnnnnnnnnnnnnnnnnnnnnnnnnnnnnnnnnnnnnnnnnnnnnnnnnnnnnnnnnnnnnnnnnnnnnnnnnnnnnnnnnnnnnnnnnnnnnnnnnnnnnnnnnnnnnnnnnnnnnnnnnnnnnnnnnnnnnnnnnnnnnnnnnnnnnnnnnnnnnnnnnnnnnnnnnnnnnnnnnnnnnnnnnnnnnnnnnnnnnnnnnnnnnnnnnnnnnnnnnnnnnnnnnnnnnnnnnnnnnnnnnnnnnnnnnnnnnnnnnnnnnnnnnnnnnnnnnnnnnnnnnnnnnnnnnnnnnnnnnnnnnnnnnnnnnnnnnnnnnnnnnnnnnnnnnnnnnnnnnnnnnnnnnnnnnnnnnnnnnnnnnnnnnnnnnnnnnnnnnnnnnnnnnnnnnnnnnnnnnnnnnnnnnnnnnnnnnnnnnnnnnnnnnnnnnnnnnnnnnnnnnnnnnnnnnnnnnnnnnnnnnnnnnnnnnnnnnnnnnnnnnnnnnnnnnnnnnnnnnnnnnnnnnnnnnnnnnnnnnnnnnnnnnnnnnnnnnnnnnnnnnnnnnnnnnnnnnnnnnnnnnnnnnnnnnnnnnnnnnnnnnnnnnnnnnnnnnnnnnnnnnnnnnnnnnnnnnnnnnnnnnnnnnnnnnnnnnnnnnnnnnnnnnnnnnnnnnnnnnnnnnnnnnnnnnnnnnnnnnnnnnnnnnnnnnnnnnnnnnnnnnnnnnnnnnnnnnnnnnnnnnnnnnnnnnnnnnnnnnnnnnnnnnnnnnnnnnnnnnnnnnnnnnnnnnnnnnnnnnnnnnnnnnnnnnnnnnnnnnnnnnnnnnnnnnnnnnnnnnnnnnnnnnnnnnnnnnnnnnnnnnnnnnnnnnnnnnnnnnnnnnnnnnnnnnnnnnnnnnnnnnnnnnnnnnnnnnnnnnnnnnnnnnnnnnnnnnnnnnnnnnnnnnnnnnnnnnnnnnnnnnnnnnnnnnnnnnnnnnnnnnnnnnnnnnnnnnnnnnnnnnnnnnnnnnnnnnnnnnnnnnnnnnnnnnnnnnnnnnnnnnnnnnnnnnnnnnnnnnnnnnnnnnnnnnnnnnnnnnnnnnnnnnnnnnnnnnnnnnnnnnnnnnnnnnnnnnnnnnnnnnnnnnnnnnnnnnnnnnnnnnnnnnnnnnnnnnnnnnnnnnnnnnnnnnnnnnnnnnnnnnnnnnnnnnnnnnnnnnnnnnnnnnnnnnnnnnnnnnnnnnnnnnnnnnnnnnnnnnnnnnnnnnnnnnnnnnnnnnnnnnnnnnnnnnnnnnnnnnnnnnnnnnnnnnnnnnnnnnnnnnnnnnnnnnnnnnnnnnnnnnnnnnnnnnnnnnnnnnnnnnnnnnnnnnnnnnnnnnnnnnnnnnnnnnnnnnnnnnnnnnnnnnnnnnnnnnnnnnnnnnnnnnnnnnnnnnnnnnnnnnnnnnnacctgccactgaacatgccagcgccgtgtgctgtctcttggatacctgtccttgaaaacttcaggcccctgggagaagcactccgtccagtcctgtcccctggggggaggcagggccgctgagccctcctcagatggttagtggcttccagcagctctcaggagtgtttcctgaagaccccaggtgtggaggacttggtctgtgaccatctagaaccccagagctgaacaggaagccgtccttgcagcaacaagaggggtggaaggggtgctgcgggctgccctcggctctcccacctctggggcggtgatgttcaggtgataagtttgaaaaatactcaaagataccaacttttcctttctatggctaatggtttgtgcagccaccagcgatggcggcccctattagagacccagtttgtaaaacaccaaatactgctgctgtccacactagacattaaccgaaaagatggacaccttttcccacgctgtttcgcttctgcctcaactttggtccagctttagccaccacacagcgtgcgagggactgctgctgcggaatcggcctcatctgtccctccgcctcccaccagcacatgccgcttctgagagacaccagctccctgcctccaagcctgctaccacaggcctgtcgtgagggacccccgcttccgagagctcctggggggggttctgcccttcaccgggagaggtgtcagttcagttccgggttaaagaggcccgtgcacacagcatgttggggacccagcctaaagttcttgtcacctcctcatgcaaagccagccatcactctccgg

SEQ ID NO: 38666 - DNA, 231 bp, Macaca Mulatta
tgcactacaaagttaagacagatttttgctaagtgcaggaggccctttattattgctgcagaaaacaaaagcctggctgagttgatgttttacattctcccttactgaaatctacatgacatgatgcttcttgctgggtttttgtacatgtaaacattgtcaagctgtgaaagaaaatggctggaggtgtgctttgtgtgaaaggtgagcaataaagtacctgttaagttc

SEQ ID NO: 38667 - DNA, 561 bp, Macaca Mulatta
ggatgaaataaatcttagagaccacattaaggaaaagcacaatatgcattttctttgcaccccttgttcctgttctttttgtctgaaaaagacgtggaagaacacaaagccaccgagaagcatcttagttcattggttcaaccaaagactttgcaatcatctaacagtgatttggttttacagactttacctttaagtactttagaatcagaaaactcaaaagagtctatggatgactcaggaaaagcatctcaggaagaacctgtgaagtccagggtaagccatggtaatgaagtgaggcattccagtaagcctcagtttcagtgtaagaagtgtttttataagacaagatcttctactgttctcacgagacatataaagcttcggcatggtcaggactatcattttctttgtaaagcttgtaatctttattcattgagcaaagaaggaatggagaaacacattaaaagaagcaagcatcttgaaaatgctaagaaaaataatattggcttaagctttgaagaatgtattgaaagggtatgtataggtgcaaatgataaa

SEQ ID NO: 38668 - DNA, 770 bp, Macaca Mulatta
ggggagcgctttaggccgaggcggcggatctgggaagtggagtcgttggtgttcctgtgtgtgagcctgtggcgcggctctgtgggccggaaccttaaagatagccacaatggctgaaaatggtgataatgaaaagatggctgccctggaggccaaaatctgtcatcaaattgagtattattttggcgacttcaatttgccacgggacaagtttctaaaggaacagataaaactggatgaaggctgggtacctttggagataatgataaaattcaacaggttgaaccgtctaacaacagactttaatgtaattgtggaagcattgagcaaatccaaggcagaactcatggaaatcagtgaagataaaactaaaatcagaaggtctccaagcaaacccctacctgaagtgactgatgagtataaaaatgatgtaaaaaacagatctgtttatattaaaggcttcccaactgatgcaactcttgatgacataaaagaatggttagaagataaaggtcaagtactaaatattcagatgagaagaacattgcataaagcatttaagggatcaatttttgttgtgtttgatagcattgaatctgctaagaagtttgtagagacccctgaccagaagtacaaagaaacagacctgctaatacttttcaaggatgattactttgccaaaaaaaatgaagaaagaaaacaaaacaaagtggaagctaaattaagagctaaacaagagccagaagcaaaacaaaagttgaagaagatgc

SEQ ID NO: 38669 - DNA, 840 bp, Macaca Mulatta
  misc_feature (1)...(840): n = A,T,C or G
ggtgtctgagggggtctatctgggaagcagagatgacatccttgcagatgcaaagaccccagagctcaagggtgggggaaagggctgcagcagtgaccccaaaacccatctggacagggtcctctgtctgctcagggcatgtgggacgcagccgcatggctcctgccttgctgctctgctcagggcatgtgggacacacccgcatggctcctgctgtgctgctctactcagggcatgtggggcgcagctgcatggttcctgccgtgctgcccacctcagacagttccagcaggtctccctacaggttccaacggctcaccctaagcagcccctgcaggccaggctgggacgtangatgagcagaggcctgagagagccccctgctctctgtgccatcagttaggacgacatgtttcaccttccgcttggactgcgggcggggtggggcagggggtgtggatacacagagagctgcctggaaagcccgcctgctccccttcagccaccatcctggaatcctcgagagatctgctggggcctgaaatactcctaggcccatctaagatgcagaaagcaacttcccatnnnnnnnnnnnnnnnnnnnnnnnngagactgtttcattgcctcagctgggaatgcaatgggggcaaaccatggctcactggcacccctgaaacttggggggcttaaagcaaaccctccctggcctcaagccccggtaaaggcgtctggaaaacccccggggcccattttccaattagcgcgtgggcccaggcgttaacattgttaaaaatttctgggggggaaaaaagaacaacggggatccttttgtactaagt

SEQ ID NO: 38670 - DNA, 140 bp, Macaca Mulatta
tgcagcggtctcacgggcccaaattctgcggggcggtggtgggaggagggcttggagccccagcaggttttctgggcttcgttcgcttttctgcaaggtcctggcccaggcgcctgcccctcttggagcagaaaccggag

SEQ ID NO: 38671 - DNA, 739 bp, Macaca Mulatta
  misc_feature (1)...(739): n = A,T,C or G
caatccgtgtacatgctggggttctaatcacttgcagttgaataacaagagctgaggctcacagttgacccacacagcacacgtttgtcctgagaactagttgaacagcttgggaaggtgaggagggcaatgcaatgtgtgatgggttcacccatggagggcctcaaatgccacgccaaggaggcatagagggcctcgaataccaggcttaggggagcagtggaagaaagtggcatgtgtgaccatgcatgtgttcctgcagaacatactgagttcacttgggatcagaaagcctgggaagacaagctgattcaggtaaaagggtaacaagtttgctgaggcctgggaggaggagaaagatgggagtagatggaaaggcatttggtgggctgggcacgtgaggagtttagaagcccctaaaggacatgttctccttctgtcagagaagacttgggagtttcaaagtctatagctgtgtctatccccaggggagaactgagataaccttccatcccaagagccaggtgcccaggaggggagcagggagtgacaccccttctgttagcccccagagccacagccattcctcagacccacagaacattattagcactggatcagggatctatggacttcgtgatctggagatgtaggcnagggaagtgagagagggcaagtcactactcaaggtcacgtagcattcccagagcccaggcaagaagagggatgaaggcctttg

SEQ ID NO: 38672 - DNA, 901 bp, Macaca Mulatta
gggctctcgagtgcgggagagcacctagcggacgctgcccatggaggcgtctagcgagccgccgctggatgctaagtccgaggtcaccaaccagcttgtagattttcagtggaaactgggtatggctgtgagctcagacacttgcagatctcttaagtatccttatgttgcagtgatgctaaaagtggcagatcattcaggccaattaaagaccacagtgctttgaaatgacgattccacagtttcagaatttctacaggcagttcaaggaaattgctgcagttattgtaacggtgtgaagcactgattctttggttgataaattgctaatcattctaaagtcatggtaccttcacctttctgctacaaaaccacattaaggattggaatatttatttgaatgaaaaatgcagcttttagtttttccatttttttaaactgatataaactcccatattctcaaccatataccgtttcctttccatcccaaaccattgttcggcccgccctcgttcgcaccatgaacaccttcaaaaaataatttccttctggactgctcgaggcccaaacttaggttaactgcaaacttgggccttctaccctgctgtcccatgtaaataccctgggactctgcaccttattgttttggcaaactcctccccctttccaccaattaacctccccgggatgtcgttctcccaccgcgtcgccccaattccatccccgtcactgggttcatccttatgaactctttttaccgccgtatattccaccaaaagtattgaaacacctcacgccagatgtttttgactcaccctttgtattctcctatgccctcaagtctagtttacacactgcatatcttatcctgtgtccgctcatagacattcacctcactttt

SEQ ID NO: 38673 - DNA, 6849 bp, Macaca Mulatta
  misc_feature (1)...(6849): n = A,T,C or G
ggtgacggcccctgacgtggaggtgtcccggcccagcatggaggtggaaatccaggccctgggagccaagctggatgatgcccagctggagggggaactgtccctggccgacaaggacgtgaccaccaaacacaccaaattcaaaatgcccaagttcaagatgccatccttcggggtgtcggccccaggcaagtccatcgaggcctcggtggacgtgtctgtgccgaaggtggaggcagatgtgagcctcccctccatgcagggggacctcaagaccactgacctcagcattcagcccccttccgctgacctggaggtccaggctgtccaggtggacgtgacgatcccagaaggccacatgcccgaaggagctggcctcaaagggcacctgcccaaggtggagatgccaagtttgaagatgcccaaagtagacctcaaaggcccccaggtggatatcaagggacccacgctggacctgaaaggccccaaggcggaggtgacggtccccgacgtggaggtgtctcttcccagcatggaggtggaccaccagaccccaggagtcaagctggatggtgtgcgtctgggggaggacctgtccctggnnnnnnnnnnnnnnnnnnnnnnnnnnnnnnnnnnnnnnnnnnnnnnnnnnnnnnnnnnnnnnnnnnnnnnnnnnnnnnnnnnnnnnnnnnnnnnnnnnnnnnnnnnnnnnnnnnnnnnnnnnnnnnnnnnnnnnnnnnnnnnnnnnnnnnnnnnnnnnnnnnnnnnnnnnnnnnnnnnnnnnnnnnnnnnnnnnnnnnnnnnnnnnnnnnnnnnnnnnnnnnnnnnnnnnnnnnnnnnnnnnnnnnnnnnnnnnnnnnnnnnnnnnnnnnnnnnnnnnnnnnnnnnnnnnnnnnnnnnnnnnnnnnnnnnnnnnnnnnnnnnnnnnnnnnnnnnnnnnnnnnnnnnnnnnnnnnnnnnnnnnnnnnnnnnnnnnnnnnnnnnnnnnnnnnnnnnnnnnnnnnnnnnnnnnnnnnnnnnnnnnnnnnnnnnnnnnnnnnnnnnnnnnnnnnnnnnnnnnnnnnnnnnnnnnnnnnnnnnnnnnnnnnnnnnnnnnnnnnnnnnnnnnnnnnnnnnnnnnnnnnnnnnnnnnnnnnnnnnnnnnnnnnnnnnnnnnnnnnnnnnnnnnnnnnnnnnnnnnnnnnnnnnnnnnnnnnnnnnnnnnnnnnnnnnnnnnnnnnnnnnnnnnnnnnnnnnnnnnnnnnnnnnnnnnnnnnnnnnnnnnnnnnnnnnnnnnnnnnnnnnnnnnnnnnnnnnnnnnnnnnnnnnnnnnnnnnnnnnnnnnnnnnnnnnnnnnnnnnnnnnnnnnnnnnnnnnnnnnnnnnnnnnnnnnnnnnnnnnnnnnnnnnnnnnnnnnnnnnnnnnnnnnnnnnnnnnnnnnnnnnnnnnnnnnnnnnnnnnnnnnnnnnnnnnnnnnnnnnnnnnnnnnnnnnnnnnnnnnnnnnnnnnnnnnnnnnnnnnnnnnnnnnnnnnnnnnnnnnnnnnnnnnnnnnnnnnnnnnnnnnnnnnnnnnnnnnnnnnnnnnnnnnnnnnnnnnnnnnnnnnnnnnnnnnnnnnnnnnnnnnnnnnnnnnnnnnnnnnnnnnnnnnnnnnnnnnnnnnnnnnnnnnnnnnnnnnnnnnnnnnnnnnnnnnnnnnnnnnnnnnnnnnnnnnnnnnnnnnnnnnnnnnnnnnnnnnnnnnnnnnnnnnnnnnnnnnnnnnnnnnnnnnnnnnnnnnnnnnnnnnnnnnnnnnnnnnnnnnnnnnnnnnnnnnnnnnnnnnnnnnnnnnnnnnnnnnnnnnnnnnnnnnnnnnnnnnnnnnnnnnnnnnnnnnnnnnnnnnnnnnnnnnnnnnnnnnnnnnnnnnnnnnnnnnnnnnnnnnnnnnnnnnnnnnnnnnnnnnnnnnnnnnnnnnnnnnnnnnnnnnnnnnnnnnnnnnnnnnnnnnnnnnnnnnnnnnnnnnnnnnnnnnnnnnnnnnnnnnnnnnnnnnnnnnnnnnnnnnnnnnnnnnnnnnnnnnnnnnnnnnnnnnnnnnnnnnnnnnnnnnnnnnnnnnnnnnnnnnnnnnnnnnnnnnnnnnnnnnnnnnnnnnnnnnnnnnnnnnnnnnnnnnnnnnnnnnnnnnnnnnnnnnnnnnnnnnnnnnnnnnnnnnnnnnnnnnnnnnnnnnnnnnnnnnnnnnnnnnnnnnnnnnnnnnnnnnnnnnnnnnnnnnnnnnnnnnnnnnnnnnnnnnnnnnnnnnnnnnnnnnnnnnnnnnnnnnnnnnnnnnnnnnnnnnnnnnnnnnnnnnnnnnnnnnnnnnnnnnnnnnnnnnnnnnnnnnnnnnnnnnnnnnnnnnnnnnnnnnnnnnnnnnnnnnnnnnnnnnnnnnnnnnnnnnnnnnnnnnnnnnnnnnnnnnnnnnnnnnnnnnnnnnnnnnnnnnnnnnnnnnnnnnnnnnnnnnnnnnnnnnnnnnnnnnnnnnnnnnnnnnnnnnnnnnnnnnnnnnnnnnnnnnnnnnnnnnnnnnnnnnnnnnnnnnnnnnnnnnnnnnnnnnnnnnnnnnnnnnnnnnnnnnnnnnnnnnnnnnnnnnnnnnnnnnnnnnnnnnnnnnnnnnnnnnnnnnnnnnnnnnnnnnnnnnnnnnnnnnnnnnnnnnnnnnnnnnnnnnnnnnnnnnnnnnnnnnnnnnnnnnnnnnnnnnnnnnnnnnnnnnnnnnnnnnnnnnnnnnnnnnnnnnnnnnnnnnnnnnnnnnnnnnnnnnnnnnnnnnnnnnnnnnnnnnnnnnnnnnnnnnnnnnnnnnnnnnnnnnnnnnnnnnnnnnnnnnnnnnnnnnnnnnnnnnnnnnnnnnnnnnnnnnnnnnnnnnnnnnnnnnnnnnnnnnnnnnnnnnnnnnnnnnnnnnnnnnnnnnnnnnnnnnnnnnnnnnnnnnnnnnnnnnnnnnnnnnnnnnnnnnnnnnnnnnnnnnnnnnnnnnnnnnnnnnnnnnnnnnnnnnnnnnnnnnnnnnnnnnnnnnnnnnnnnnnnnnnnnnnnnnnnnnnnnnnnnnnnnnnnnnnnnnnnnnnnnnnnnnnnnnnnnnnnnnnnnnnnnnnnnnnnnnnnnnnnnnnnnnnnnnnnnnnnnnnnnnnnnnnnnnnnnnnnnnnnnnnnnnnnnnnnnnnnnnnnnnnnnnnnnnnnnnnnnnnnnnnnnnnnnnnnnnnnnnnnnnnnnnnnnnnnnnnnnnnnnnnnnnnnnnnnnnnnnnnnnnnnnnnnnnnnnnnnnnnnnnnnnnnnnnnnnnnnnnnnnnnnnnnnnnnnnnnnnnnnnnnnnnnnnnnnnnnnnnnnnnnnnnnnnnnnnnnnnnnnnnnnnnnnnnnnnnnnnnnnnnnnnnnnnnnnnnnnnnnnnnnnnnnnnnnnnnnnnnnnnnnnnnnnnnnnnnnnnnnnnnnnnnnnnnnnnnnnnnnnnnnnnnnnnnnnnnnnnnnnnnnnnnnnnnnnnnnnnnnnnnnnnnnnnnnnnnnnnnnnnnnnnnnnnnnnnnnnnnnnnnnnnnnnnnnnnnnnnnnnnnnnnnnnnnnnnnnnnnnnnnnnnnnnnnnnnnnnnnnnnnnnnnnnnnnnnnnnnnnnnnnnnnnnnnnnnnnnnnnnnnnnnnnnnnnnnnnnnnnnnnnnnnnnnnnnnnnnnnnnnnnnnnnnnnnnnnnnnnnnnnnnnnnnnnnnnnnnnnnnnnnnnnnnnnnnnnnnnnnnnnnnnnnnnnnnnnnnnnnnnnnnnnnnnnnnnnnnnnnnnnnnnnnnnnnnnnnnnnnnnnnnnnnnnnnnnnnnnnnnnnnnnnnnnnnnnnnnnnnnnnnnnnnnnnnnnnnnnnnnnnnnnnnnnnnnnnnnnnnnnnnnnnnnnnnnnnnnnnnnnnnnnnnnnnnnnnnnnnnnnnnnnnnnnnnnnnnnnnnnnnnnnnnnnnnnnnnnnnnnnnnnnnnnnnnnnnnnnnnnnnnnnnnnnnnnnnnnnnnnnnnnnnnnnnnnnnnnnnnnnnnnnnnnnnnnnnnnnnnnnnnnnnnnnnnnnnnnnnnnnnnnnnnnnnnnnnnnnnnnnnnnnnnnnnnnnnnnnnnnnnnnnnnnnnnnnnnnnnnnnnnnnnnnnnnnnnnnnnnnnnnnnnnnnnnnnnnnnnnnnnnnnnnnnnnnnnnnnnnnnnnnnnnnnnnnnnnnnnnnnnnnnnnnnnnnnnnnnnnnnnnnnnnnnnnnnnnnnnnnnnnnnnnnnnnnnnnnnnnnnnnnnnnnnnnnnnnnnnnnnnnnnnnnnnnnnnnnnnnnnnnnnnnnnnnnnnnnnnnnnnnnnnnnnnnnnnnnnnnnnnnnnnnnnnnnnnnnnnnnnnnnnnnnnnnnnnnnnnnnnnnnnnnnnnnnnnnnnnnnnnnnnnnnnnnnnnnnnnnnnnnnnnnnnnnnnnnnnnnnnnnnnnnnnnnnnnnnnnnnnnnnnnnnnnnnnnnnnnnnnnnnnnnnnnnnnnnnnnnnnnnnnnnnnnnnnnnnnnnnnnnnnnnnnnnnnnnnnnnnnnnnnnnnnnnnnnnnnnnnnnnnnnnnnnnnnnnnnnnnnnnnnnnnnnnnnnnnnnnnnnnnnnnnnnnnnnnnnnnnnnnnnnnnnnnnnnnnnnnnnnnnnnnnnnnnnnnnnnnnnnnnnnnnnnnnnnnnnnnnnnnnnnnnnnnnnnnnnnnnnnnnnnnnnnnnnnnnnnnnnnnnnnnnnnnnnnnnnnnnnnnnnnnnnnnnnnnnnnnnnnnnnnnnnnnnnnnnnnnnnnnnnnnnnnnnnnnnnnnnnnnnnnnnnnnnnnnnnnnnnnnnnnnnnnnnnnnnnnnnnnnnnnnnnnnnnnnnnnnnnnnnnnnnnnnnnnnnnnnnnnnnnnnnnnnnnnnnnnnnnnnnnnnnnnnnnnnnnnnnnnnnnnnnnnnnnnnnnnnnnnnnnnnnnnnnnnnnnnnnnnnnnnnnnnnnnnnnnnnnnnnnnnnnnnnnnnnnnnnnnnnnnnnnnnnnnnnnnnnnnnnnnnnnnnnnnnnnnnnnnnnnnnnnnnnnnnnnnnnnnnnnnnnnnnnnnnnnnnnnnnnnnnnnnnnnnnnnnnnnnnnnnnnnnnnnnnnnnnnnnnnnnnnnnnnnnnnnnnnnnnnnnnnnnnnnnnnnnnnnnnnnnnnnnnnnnnnnnnnnnnnnnnnnnnnnnnnnnnnnnnnnnnnnnnnnnnnnnnnnnnnnnnnnnnnnnnnnnnnnnnnnnnnnnnnnnnnnnnnnnnnnnnnnnnnnnnnnnnnnnnnnnnnnnnnnnnnnnnnnnnnnnnnnnnnnnnnnnnnnnnnnnnnnnnnnnnnnnnnnnnnnnnnnnnnnnnnnnnnnnnnnnnnnnnnnnnnnnnnnnnnnnnnnnnnnnnnnnnnnnnnnnnnnnnnnnnnnnnnnnnnnnnnnnnnnnnnnnnnnnnnnnnnnnnnnnnnnnnnnnnnnnnnnnnnnnnnnnnnnnnnnnnnnnnnnnnnnnnnnnnnnnnnnnnnnnnnnnnnnnnnnnnnnnnnnnnnnnnnnnnnnnnnnnnnnnnnnnnnnnnnnnnnnnnnnnnnnnnnnnnnnnnnnnnnnnnnnnnnnnnnnnnnnnnnnnnnnnnnnnnnnnnnnnnnnnnnnnnnnnnnnnnnnnnnnnnnnnnnnnnnnnnnnnnnnnnnnnnnnnnnnnnnnnnnnnnnnnnnnnnnnnnnnnnnnnnnnnnnnnnnnnnnnnnnnnnnnnnnnnnnnnnnnnnnnnnnnnngtggaaagcccagaggaggaagccacgaccagggactcgcaggaaagctggtttaaaatgcccaaggtccgcatgcccagccttaggcgctcttccagggacagaggcggggctggaaagctggaagtggctcagacacaggcaccggcagcaacaggggatgaagcagcagctagaatcaaagagttccttgtttctgggtcaaacatggaggttagtatgtccctacagctcccagaggcagatggagaagtgacagcttctgagagcaaatcatccacagatgttctaaggtgtgatcttgacagcacaggcttgaagctgcacctttccactgctgggatgaccggggatgagctttccacttctgaggtcaggatccatccaaccaaaggacctctcccttttcagatgcctggcatgaggcttccagaaacccagggtcttccaggagaaatacatgagactcctctttccaagccaggacatgaccttgccagcatggaggataaaacagagacatggtcatcccagcctgaaggtccacttaaactgaaagcttcaagtactgatatgccatcccacgtttctgtggttaatatggatcaactgtgggaagattctgtactaactgtcaaattccccaaattaaaggtaccgaggttctccttccctgcccccagctcagaggatgacgtgttcatccccactgtgagggaagtgcagtgtccagaggcaaatattgacatagccctttgtaaggaaagtccagggctctggggagccagcatcctgaaggcaggtgctggggtccccagggagcagcctgtggagcttaacctgcctttggaagcttccccaatttcaaaggttagagtgcatattcagggtgctcaggttgaaagtcaagaagtcactatacacagcatagtgacaccagagtttgtagatctctcagcacccagggctttttccactcagattgtgcgggaatcagagatccctgcatcagagattcaaacaccttcatatggattttccttattaaaggtganaatcccagagccccgcacgcaggctacagtgtacacaacagtgactcagcactctaggactc

SEQ ID NO: 38674 - DNA, 117 bp, Macaca Mulatta
agggacacttgacgttcatggacgtggccatcgaattctctcaggaggagtggaaatgcctggaccctggacagagggcttgtacagagacgtgatgtggagaactacaggaacctg

SEQ ID NO: 38675 - DNA, 3086 bp, Macaca Mulatta
  misc_feature (1)...(3086): n = A,T,C or G
aggcgcccttgggatgtccaatagggacagctatttttacgctgctattgttgcagtggtcgccgtccatgtggtcctggccctctttgtgtatgtggcctggaacgaaggctcacgacagtggcgtgaaggcaaacaggattaaagtgaacatcaccttttgatagcattaaattcattttttaaaatgataaatgctggagcggggacatctgatttgaataaagttgaaagaacatgttaaagtcaggcttaaggagtcacgtttgagtagtgtaaattttgatccttctaatgtgttggtttgtatattcagttttaactgtatgaatctgatttgcaaatgagaatttggaaaagttaaattagttacaaataaatatgttaattacacaatattctggaaggaattttatcttctttcaacaaaacgtgttttatagtattctgacttacggttgcttttgacttttactcctttggatatattaagaggcacacagtgaagcaaattaaactccactttacgttggaatgctttccttagcatgaaaataccaggtccttggatttgggattttaatttcctatggaaagttgcttaaattgtggacactggaattaatctgaatgtcacnnnnnnnnnnnnnnnnnnnnnnnnnnnnnnnnnnnnnnnnnnnnnnnnnnnnnnnnnnnnnnnnnnnnnnnnnnnnnnnnnnnnnnnnnnnnnnnnnnnnnnnnnnnnnnnnnnnnnnnnnnnnnnnnnnnnnnnnnnnnnnnnnnnnnnnnnnnnnnnnnnnnnnnnnnnnnnnnnnnnnnnnnnnnnnnnnnnnnnnnnnnnnnnnnnnnnnnnnnnnnnnnnnnnnnnnnnnnnnnnnnnnnnnnnnnnnnnnnnnnnnnnnnnnnnnnnnnnnnnnnnnnnnnnnnnnnnnnnnnnnnnnnnnnnnnnnnnnnnnnnnnnnnnnnnnnnnnnnnnnnnnnnnnnnnnnnnnnnnnnnnnnnnnnnnnnnnnnnnnnnnnnnnnnnnnnnnnnnnnnnnnnnnnnnnnnnnnnnnnnnnnnnnnnnnnnnnnnnnnnnnnnnnnnnnnnnnnnnnnnnnnnnnnnnnnnnnnnnnnnnnnnnnnnnnnnnnnnnnnnnnnnnnnnnnnnnnnnnnnnnnnnnnnnnnnnnnnnnnnnnnnnnnnnnnnnnnnnnnnnnnnnnnnnnnnnnnnnnnnnnnnnnnnnnnnnnnnnnnnnnnnnnnnnnnnnnnnnnnnnnnnnnnnnnnnnnnnnnnnnnnnnnnnnnnnnnnnnnnnnnnnnnnnnnnnnnnnnnnnnnnnnnnnnnnnnnnnnnnnnnnnnnnnnnnnnnnnnnnnnnnnnnnnnnnnnnnnnnnnnnnnnnnnnnnnnnnnnnnnnnnnnnnnnnnnnnnnnnnnnnnnnnnnnnnnnnnnnnnnnnnnnnnnnnnnnnnnnnnnnnnnnnnnnnnnnnnnnnnnnnnnnnnnnnnnnnnnnnnnnnnnnnnnnnnnnnnnnnnnnnnnnnnnnnnnnnnnnnnnnnnnnnnnnnnnnnnnnnnnnnnnnnnnnnnnnnnnnnnnnnnnnnnnnnnnnnnnnnnnnnnnnnnnnnnnnnnnnnnnnnnnnnnnnnnnnnnnnnnnnnnnnnnnnnnnnnnnnnnnnnnnnnnnnnnnnnnnnnnnnnnnnnnnnnnnnnnnnnnnnnnnnnnnnnnnnnnnnnnnnnnnnnnnnnnnnnnnnnnnnnnnnnnnnnnnnnnnnnnnnnnnnnnnnnnnnnnnnnnnnnnnnnnnnnnnnnnnnnnnnnnnnnnnnnnnnnnnnnnnnnnnnnnnnnnnnnnnnnnnnnnnnnnnnnnnnnnnnnnnnnnnnnnnnnnnnnnnnnnnnnnnnnnnnnnnnnnnnnnnnnnnnnnnnnnnnnnnnnnnnnnnnnnnnnnnnnnnnnnnnnnnnnnnnnnnnnnnnnnnnnnnnnnnnnnnnnnnnnnnnnnnnnnnnnnnnnnnnnnnnnnnnnnnnnnnnnnnnnnnnnnnnnnnnnnnnnnnnnnnnnnnnnnnnnnnnnnnnnnnnnnnnnnnnnnnnnnnnnnnnnnnnnnnnnnnnnnnnnnnnnnnnnnnnnnnnnnnnnnnnnnnnnnnnnnnnnnnnnnnnnnnnnnnnnnnnnnnnnnnnnnnnnnnnnnnnnnnnnnnnnnnnnnnnnnnnnnnnnnnnnnnnnnnnnnnnnnnnnnnnnnnnnnnnnnnnnnnnnnnnnnnnnnnnnnnnnnnnnnnnnnnnnnnnnnnnnnnnnnnnnnnnnnnnnnnnnnnnnnnnnnnnnnnnnnnnnnnnnnnnnnnnnnnnnnnnnnnnnnnnnnnnnnnnnnnnnnnnnnnnnnnnnnnnnnnnnnnnnnnnnnnnnnnnnnnnnnnnnnnnnnnnnnnnnnnnnnnnnnnnnnnnnnnnnnnnnnnnnnnnnnnnnnnnnnnnnnnnnnnnnnnnnnnnnnnnnnnnnnnnnnnnnnnnnnnnnnnnnnnnnnnnnnnnnnnnnnnnntttcaaaaggtctcactagtttccttttacacaatgtatttacttcaagatatatagaaaggaaagctacagttgagcccttatacatgttttaaggtagaaatatgttccctattgtttgaaaactgattgtaagaataacctcaattatataacttgaaatgccagtccaaactactgatttaacccgatttacggtaacacattacctttctcacctcctgttttgccctggagaatgtattcctttttctcagttgtgttgagaagtgaaaagtctgctgtagaatgcatctgatgtcattagttcttcaaatgggtaccattgtacatataacagtagaatttggtttggggttgttagtgaaaaaaaattgaaacctgccattaaaccccatgtttcatggaaatctaacagaaatacattgtaataattagaacattttcttttctnnnnnnnnnnnnnnnnnnnnagacggagttttgcttttcatgcccaggctgaagtgcaagtgtgcaatctcagctcactgcaacctccacctcctgggttcaagcaattctcctgcctc

SEQ ID NO: 38676 - DNA, 159 bp, Macaca Mulatta
aggtgctgtggccaaggatcctgacctttgtggtacctgcagaatacacagaagctctggagcccctgtttagtatcatcagaatcctgattatggcagaggagaagaagaagcacagtgccaaggagtcaacagcacttgtcatctctacgggagctg

SEQ ID NO: 38677 - DNA, 808 bp, Macaca Mulatta
  misc_feature (1)...(808): n = A,T,C or G
gggtgtcacatctaagacatcattgccaaatccaataccatgaagctttcctcatatgctttcttctaagagttttatgtatagttttagctcttaacgtttagatgcctaaccatgaagtgtcaaaatacatgtcagaaagcgaaagaatggcaaggagaaatagatgaatccactatcatggttagagatttttaacaatcagtaaggacatagttgagttctgcaacaccatcaaccaactggatataatggacgtcaaaagacaccttcattaacaacaacagaacacatactcttctcagggtcacatggaacattcagcaggacagattacaatctgggaaagaaaacaaaccttaacagatgtaaaagaagataaatcacacaatatctgtccccagaccacaatggaaataaactagaaatcaataacagaaagatagctggaaaaatctccaaatactttggagattaaatgccacatttctaaataactcatgggtcagagaaaaaatatgaaaatacattttaaaacaacttgatctaaatgaaaatgaaatacaacttctcaatttgtaggaggtgcagaaaaacgcttgcttcacttctatgtctctatgagcatcacaacaacggatactgannnnnnnnnnnnnnnnnnnnnnnnnnnnnnnnnnnnnnnnnnnnnnnnnnnnnnnnnnnnnnnnnnnnnnnnnnnnnnnnnnnnnnnnnnnnnnnnnnnnnnnnnnnnnnnnnnnnnnnnnnnnnnnnnnnnnnnnnnnnnnnnnnnnnnnnnnnnnnnnnn

SEQ ID NO: 38678 - DNA, 487 bp, Macaca Mulatta
gtgtattttattgttttatataacattttaaatttgtgcatttcatcactctgtgttgaaatgttcttcaataattttttaaaaaatagtttttcaaatagtattaaagattttgaactcgagacagatggccttatagatttggaaaatgagtacttgactgaaatgaaatataaataaaatattttcagaagttctatcgaatttattctataatttcagtctctggttaagtaaaatttactgaatattaataactaggaagacataaagagtaacttattagaagtatgtagttattcataatgggagtcttagttaatatacccttataagtaacacatttcaaataagaactttaaaaaattctagaactataggcacagttttcatttatttaatctaatctggatattctgacaaatttgggctggttggaaaagacagatttaagtaagaaggtttactaagttatttataaagtact

SEQ ID NO: 38679 - DNA, 599 bp, Macaca Mulatta
ggggggggaaccggaaaacagccagttgctttcacactctagggacaccgcccgcccctcgccgtccttaagtgctatttttacatcgaatgccctcgtctgcgagtaggtaaactgaaactaagctcatatcaaaaggagaaaggctggaagacgagaggctacacgttctagaagctccgagcgaggatgaaaattagccagcccacaggtgggctctgcgcggccccgaaagtcgcactctgacgtgaccctttatgcctctcgtttttccttccagtctcacttcagagttctgtattgcagaaatgaaatcggcgcctttccccacccgttcttccaaatacgagcaaaggactctcaaaacgcacgttccagaaactgtgtttgcaaccattcgtccttttttcctgacacacgggcccctgctacccgctaaggttggggtcctggacaccaaccttaactcttatcagttttgcgctctgatagaagggcttagattccagattgacactgggctctcaaagcctgctcctcaatctactgatccggtccagcttaagatccagtagaaagaaaacatagcctgcccggac

SEQ ID NO: 38680 - DNA, 829 bp, Macaca Mulatta
  misc_feature (1)...(829): n = A,T,C or G
ggggctggcgcaaacagaagtgcagcggnnnnnnnnnnnnnnnnnnnnnnnnaagacaagannnnnnnnnnnnnnnnnnnncgttctcaataatgtttattcttaatatgcgattgtggcttttaaggttatatgtacttacaggtgaaataatatgatgtctggagtatgcttngaaattatcagatgggatagagcagtgaaggaggaaagtgatacagggttgggaggaaaacaaattggccatggntataatgtgaagcatagtgatgagtgcagagattaatcatactnatctgcttacatatattctaatttgcagattttgggggggttttggaaaaaaggaactaatcaattttcccaggaaattatggtcccttagtttctgaaaccggaagccttttattttttaattggggtaaaaattggaaaaaagaaaattggaaaaactccaaatccaaaacctggttccttaagggaacctgggtgggagattttttagggggatttattttaggttggggaaaatggnnnnnnnnnnnnnnnnnnnnnnncccatgagggatttggccacacctccgcggggaggcgtggctggggcttttggtggccccgggttttttaaaagttccgccctccggccaaggggtggggtttttcccccaaccgcggttcccccnnnnnnnnnnnnnnnnnnnnnnataaattgaccccttttgggggccgttctttctgtggtcgcggaaaaaataagtctcacccccttctctttccccccccagaatatgancgcaagtgttccatccaccatacccggtttttggaa

SEQ ID NO: 38681 - DNA, 663 bp, Macaca Mulatta
  misc_feature (1)...(663): n = A,T,C or G
gtggtgacatcagctagacatggggtgnccctcaagtttccagggngggcagacgaagaagaccaatgtgccactgttcttccttggggatgaggccgtttgactgttgcatggatcagagcaggctccagtcagaccctggttctgagtgtttttttttttttcgatgactatccagtgagcctccagtgggtgcaaggtgccatacttgctgtgagagagctgagtagagtgttggtttttccgtaactacaggggaaaaaaactcattaggctttccctttgtgtcagtgaaaccaaaagtgcttcttacaacattcgctctgttcatgggttgtctatctaacattgagcagccttggagaggccacagctgagctatggagatgctaaattaactcatggcctcagtcagttcattctttaatttcctcaccaaattattgacttagagcgtaaccaaagacctcattcattcaccccaggtgggttgggggaattggagtttgttggtgaagtctgggggcggggtgtggggagtggagacagagtaaggagacttgagaaagggaaaagcatgaagttctatacctcagccagcagctgccttcgtttggaactgaagtccagccagcagactctctagctccatctcccctgtgc

SEQ ID NO: 38682 - DNA, 122 bp, Macaca Mulatta
tccggacatgtcgggccctcgcgccggcttctaccggcaggagctgaacaagaccgtgtgggaggtgccgcagcggctgcaggggctgcgcccggtgggctcgggcgcctacggctccgtct

SEQ ID NO: 38683 - DNA, 669 bp, Macaca Mulatta
  misc_feature (1)...(669): n = A,T,C or G
gggggccttcggtctccgacttcccagacttcccaggctgcgcaggcgtacttggagccgaagggaactaccaagaaagtaccagaggaaaggaaacgtctaacagacgaggaactggaaggggaataagtgggaaagaagcaaagaggtttgagagagacttgttgccctgggttttgtttgtgtgtttgctttttgagacaagaggctggnnnnnnnnnnnnnnnnnnnnnnnnngggcgggatgtcagctcgtttccgcctcaacctcctgggcttaagcgagtctcctgtctcagcccgcgacgtcgctgggactgtaggcacacaccgccatannnnnnnnnnnnnnnnnngttttgtagagacatttttgccgnnnnnnnnnnnnnnnnnnncaactctcaagctcaacaatccaactgccctgggcctcctcacaggcgtgagccaacgctcctggccctgccctggttttttaggcagtaagttgttgcagaaacacgcgggttttaccatattttgataatacttggtaagggaatgaaccgctcctgatcccataggagcaaattccttgcttaccagcaccatgcctctttctgaaaaagaaattggttctcccgggaacagccattacaaccaaatggtttccctcatccaaacccc

SEQ ID NO: 38684 - DNA, 797 bp, Macaca Mulatta
  misc_feature (1)...(797): n = A,T,C or G
gggtatcaacgtnnnnnnnnnnnnnnnnnnnnnctcatgttcttatgctggataacaaaggacaaaagggcacactaaaggacacccacaaaaacatttaaaagctcagctctacattccaaaagccaaagcaagtcatgtggccaaacacagctccaaacggcagggaagtgcacctctcccagattcatggcaaaggcagggagaaaataaaattatatggacaaataatgcaacgcaccacatagcccagagaaaagacacatgaacatgggcaactgagcccctccggtgaaacggcccggtcacattaccctgcagcaaaacgtctggcctcaagaccccttcannnnnnnnnnnnnnnnnnnnnnnnnnnnnnnnnnnnnnnngagatggagtttaactcttggnnnnnnnnnnnnnnnnnnnnnnnntgaactcggctcaccacaacctccgcctcttgggttcgnnnnnnnnnnnnnnnnnnntctcccaggtagccgggattacagacatctgccaccatnnnnnnnnnnnnnnnnnnnnnnnnnnttagtatgagacaannnnnnnnnnnnnnnntnnnnnnnnnnnnnnnnnnnnnnnnnnnnnnnnnnnacccannnnnnnnnnnnnnnnnnnaggannnnnnnnnnnnnnnnnnnacgcccggtcccccctcaatatattttaaaagtattgaagtctgcaaaagagattttgtttacgtgagttgtaatccaccaatatttagaaacctaaacccaacatggttaaaaattgaatagttcccc

SEQ ID NO: 38685 - DNA, 777 bp, Macaca Mulatta
  misc_feature (1)...(777): n = A,T,C or G
ggatacgtaggaataacagtgaaaaaataaactccatgttgtgatcacttgacttaagaaatgaaatgttatcagtactcgtaaatcccctgaaatgcattcccttccctcccaccagagataactccctgaattttgcactaattatttgtgactgagactgccgcatttgtttgtacaccaacaattatgctcctttgtcctttagtaatacaactctccaagttttaactggatgcccaccttctaaagactatatttcccatgttcccgtgcagttatatatgaacctgtcagcaggttctgatcacagtgatgtgaacagaaacatgtgcaactcctgtgtcatgtccttagaaggattgtgctctattctgtcttcctgttctattgattggaatgtgaacacaacgggaggaactgaggcagtgtcttagagactatgagatggaagtcaggtgttgaggatggaaagcaaaaggattaaagaactagattttgttctctccagctgtatgtggcactttccttgtcatttctcttctaatatgtcctggtaagctttacttacacagttttaaagatttattttttaacaaagtaactggtcacatgttcaaaatccaaaaggtattaacacacagagtagggctggatgcannnnnnnnnnnnnnnnnnnnnnnncctttggggaggccaagtttgggagattgcttgagtccaagagtttgaagaccaaccctgggcaacttttgggagacccctgttctccacaaa

SEQ ID NO: 38686 - DNA, 793 bp, Macaca Mulatta
  misc_feature (1)...(793): n = A,T,C or G
gggtaaggttgttcaaagtatggtttttaaatgcaggcattctgcctcagtgttttaattttacttgtgattgtgcatatcttagtcaagtaggcagtgctggaggtttgactctctaagtgggactgtgggttccaaagttcctttgcttggaaaacccgatattattcttggcaagacttttctgctcagtgatgctgtgaatgaaaggatgttggaagtgtacgattaatgatgagacttcctttcttaaactcctctcctaagatgcannnnnnnnnnnnnnnnnnnnnnnnnngatatatatgaatatcccactttcacacgtcaatatatgtgattcaaaatattctgaaggaaatgaaaatgttgtctcccagcttgaaggagagacaactattcaactatttcatgtccattacaacccatttatttgtacgttctttaaaatttgtgaagcacttgtaaatttatgtcagaatcacaataataatttgatgcacctttataggcataatcacacacatatacatgtctgcatacctagatgcatgnnnnnnnnnnnnnnnnnnnnggcacgtgcaaataatgcaatagcatatggtctaattgtctaaattgatctcaacagggacttcattcatttaccctgaataattattgaaaaattattaccctccctaccaaaaaaagtattgtttttttgagttagggtaattttataaggtagttggnnnnnnnnnnnnnnnnnntggttgcaaatttaattaatannnnnnnnnnnnnnnnnnaa

SEQ ID NO: 38687 - DNA, 784 bp, Macaca Mulatta
  misc_feature (1)...(784): n = A,T,C or G
gggtacttgctctgtctcaaannnnnnnnnnnnnnnnnnnnnnnnnnnnnnnnnnnttggccccaggactatttcctattagtacctccatagcctcgttgggtctccatatttactaggcatgacccactttcatagacctgctcactgtcttccttcatggtcttgtctctgtccattgccaatcccaaaaacgtttatgccagggctctatgctagcctttatgctagagctctagcataaagaactgtgttcaactccaccttgacagaacatgccataatcattcacatctcnnnnnnnnnnnnnnnnnnnnnnnnnnnnnnnnngaaatgagctgtacctccttattcatttaaacctcaatcatccttctggtcctagcacagatgttaccacctgaagaaaagtttccttggtctcccttcatctcttggcttgagttagtgtttcctctctgttttcatagtactttatacctatgtcagttactcactttgtagataactcactgactacttctcccctgataattgtttgtttacgaattgtctcttcctctctggattctgaaattcttggagcagagactttttatccatctttgccccttcagtatttaaaacggggtatgtctcataagcactgtttcataaaatgcttcagtcctccaaaatgattattgcaaatccctgtttcccctcatccttggagtaaagtacatatccacctttgcccctacttttcctccccggagggttaaacattaacttttcaaatcca

SEQ ID NO: 38688 - DNA, 74 bp, Macaca Mulatta
gaatacccatgttatttctctgagtttcagttggtctttccatctatcactgcattatcttgctcattctttca

SEQ ID NO: 38689 - DNA, 448 bp, Macaca Mulatta
tgggaagaccgatagacttccaggatgccttccacggagcggctcgggacaaagttgtgaatgcagcggccaaaagatctgcagtccgttgtgggttgagtagagctccccagtgcgccggcagcatagggaaatgctcaggaaaacgtgacggcaggtgtccactctgaaagcagccacgagtctttgctgaggtcctgccgggtcagatcctatgctggatataacaggggaaggcatgcgtttgaaaggatttctcagccgcagacgcaagccacacgtcgcgctcagtgagagactgacatccaggaacgtggaccgaggtgcagcggtgggtcaaggaggctggacttgagaatgactttcagccgccaggatctggtgaccagctggatggcagggacagaaagaaaggcccagatggggaaaactcagggcttcccgtgtg

SEQ ID NO: 38690 - DNA, 606 bp, Macaca Mulatta
  misc_feature (1)...(606): n = A,T,C or G
ggggaggcagtaattgagtccctgacttggtcttgcaagcctgacgtttccatccgttctcccttgaagtaagagaatacttcaagagtgcgcaggctgcgtctcaggaaggacatgggcgcacccaccttgtcctgcagcctttcttccccttggtggtggggaaggcggtgctgtggacagtgactaactcagaatacgaaccaggcatattggtctccattttgtcaaaaccaacccagtgccctcaggcaagtctcttcacctctccagattttctcacatgtcaaatggcctgngtggagatgccagaccaaaagatgccccaattttaaactgtttctgttctccaagcttggatctcattttaaacttcagcttcagggagtgttttgtttggtttcctggaatacttgtggtaccatagttcaaccacaaacttgaggacctttattttatggcctgccagtctggttccaccccaatccgcttgtcccgcttaaatcccaaaccaggacttgaaaaaggaattaaaaatgggtttaacaaaccgggaaggggcttaaaattttctgaacccctaaaaagggcccctcccaggggagg

SEQ ID NO: 38691 - DNA, 774 bp, Macaca Mulatta
ggaagattttccgtttctttttcctacctttccttttctcgtaactgattagggaaattaaccagaagtcagatacaagggactcaataatctagaaaccagataatcagctcccaaatcatatagctaactatgtatttaaaataacagtctgtcactttagttcctaagtcatatacttgtgtttaattacggtaaataatctttaattggggtttttaaaagacagaattagcgaagtctaatttttataatgaaataagtttttgatgttgctctacttggacaattttagtgaccaaaactacagataaaactgcttaagcataacgttaacatatttagaatggcattcttcaatactagtattttaaattggaattagtacactgtgcattcttagtagtctttatccctagaatcaattctctcagcatcaccaaactgagttggtgaaataagtgctaagattctgggcaataggaagattagtgaatatgatacatggattccagggtgccagggattggctgactaatattaaggaccagctggccagggtcctcagtattctagtatttgagtagtggaggtaaatccaaaggcgactggtcatattttacttctgaatgtgtgctgaagtgtctttttgttaaaaaattcttgatatttagaaacttcaggttacccacattttaaaagtaaaagactttaacctggaccacgggtgggcacaccaccctggtaaatccttaaccactttttggggagggc

SEQ ID NO: 38692 - DNA, 648 bp, Macaca Mulatta
gaggctttttctgcatcaatggtatagctttctttggaatacttacatttctaacaatttccttgtcctgagtcaaataacaattatggacagatctattcttcatcttgaacttctggaattcttggcaaagagaaaatgtagcaatttatgacatttgatctacaggaaacctattatttaggaaagatgagagaacaataaatggaggaaagtatttttctggaccaaatgcagtatttttaagtttttaatctggtcattggtccaagtcagtttcccaaaccttactgcacattagaaatccctggggtgttttaataacagtattaataaatgataaataaaggcaaaggtcttatctcaagtactctgattcaaatttggggtttgtgcctggttgttttgatttttaaagcccttaaataattctaatatgcagcctgatttaaaaccactggtctatgtagcaacatcccatgatattctgatattgcctttaatattttcttaacaaattttcatagttttcttagttgctcacagtgtttgcaatattcttctggcatctctcaaacatctttcatgttaaaataagaaaaatatgcttttcataaagaagagcctccactgtggatatgtaatttc

SEQ ID NO: 38693 - DNA, 586 bp, Macaca Mulatta
taggtggggttgattgactggagcgcaggccttccctgggggttctgatggctgcctttgaccgggtggctgggcggtgacccccgggtgtgctccctcagcgcaggtgaccctagagcaggattctttttggaaatgtatgttgagtggaccttggtggatttggaaatggaactgagggaccggtgacatgtgcttcagaccggtctggggtgcggcacacagctgggcccgggtagggcccggctcggggggggctctgaggccaactcgatgaaaaagtgaacgcacacgcccctgtaggcgtggcctggcgtggcctggtgctatcggcaggcggtctccactccctggactgataattacgtgaagccaagaaagatgattataagaatctttgcctatattaggttgtacttatgtacatatatagcagtgtttcacaagagaaaatggccttaattgccccttattctctctacacgttgtaaataaccatgtgtgtaatacaagttaaagctaaaaaaagaaaagacaaactcgaaaggggggcccggtaccccaaattcgaccatatagtgagtcg

SEQ ID NO: 38694 - DNA, 707 bp, Macaca Mulatta
gaggcaaggacactcagataaatggcagagaaaaaggcgcgctagggaggatccgaagccttcagacttctccttcctctccttccagttggaaggtgggaccaacatggtccctgaaggagaggtccttggggtgcagagaatgggatcactgcaacggggcgttgcgagccccacacaaggcttctggcacccttctcccagctattactgatgagttcaaactaggaggagatgaagacttgtcctttgcaatgtagactccatatctcgcaatccggctggtgtgctaaatccatcttgaagcaaagtctcctctctacatcgcaggacaaaaactccagctgatggagccttcagaaagaagaaataaactcttcctctacaatgtctgatccatccctgggttataggcgtcggcttctttcccagagcaagctcactctctggcaccaagctccgtggggtgagtttttttctagaagagtccagtgggacaggtaaggagtgggaggcagggagtccagttcagggatggagattccaggatgaaaagtgaagggagagtgaccgggccaatgcccaggggttctccctggtttctcagacagctcgtgggccaagactcagggagacattgagacagagcgcttggcacaggagcagcggggtcaggcgaagtcccagagccccagtgtgctctcagg

SEQ ID NO: 38695 - DNA, 399 bp, Macaca Mulatta
atggagactgttctgcaagtactcctagggatattggggttccaagcagcccgggtcactagccaagaactggagcagagtcctcagtccttgatcgtccaagagggaaagaatctcaccataaactgcacatcatcaaagacattatatggcttacactggtacaagcaaaagtacggtgaaggtcttatcttcttgatgatgctacagcaaggtggggaagagaaaagtcatgaaaaaataactgccaagttggatgagaaagagcagcaaagtttcctgcatatcacagcctcccagcccagccatgcaggcatctacctctgcggaggggtcgataacaatgacagagtcatctttggagatggaactcagctggtggtgaagcccaatatccag

SEQ ID NO: 38696 - DNA, 781 bp, Macaca Mulatta
gggagaccagaatatttatgcaactcccttgagtggttatatatttataggggcaggcagtggtcaacagtggcccgaacccttggactccttgctcaaagctgcctcagctcatctgcctgaaattccagttactgtcacgtgcagacccatacaggaacaaaatgtggatctctcgaggtagctaccctgcgcctacagactgtgacaacagggggtgacccaggggaaattgcttcaccaactttaataaaattaattatagaagaatgatagtttccatcagcttgctggcagcacatttctgcaaagcgaagatggcaataacaaaaggaacttcatacaagagaaaagaaagacccacggagctccggagtttctgttggaacaagactcttctgttttgcttatatacagaggggaagccgcatctcttccggcccaggatccattgtcacctgcagagagagaagcgccaagggatcctcagagacaccatgacggcagcgccaaccaaaatccacccagacagccgactttcccggagcgctgttatgtctttttggactgagataactcaagaagaaatgtccctaatcttcgtccatctccaggcttggggaaaaggttgtgaaaaaaacttggctttcaaaggtaatctacggaggtgaggttctgggggaaagtccccagaacctgaagtttctgtaaggcagagaacggaactgttatgcttatgggcaccatcccagcatctaaaaacgtgttctggcacaaaccc

SEQ ID NO: 38697 - DNA, 656 bp, Macaca Mulatta
acgttgcccagcggctcggccggagagggctcgaagtccatctccgggatggcctgcaggggcccggccagcgccttcacgtcctgctcggccgcgcagaactgcgtcggtgccagaaggctctcgggacgctcgtgcttcctgccctccagctcccagtcactgggcttcccgggctgcatgctctccatcaggctttgctgctgttgacttttcttcactgggggcatcagatggctttaagggggaaacagagtacaaaagaggtgtgctgacggcgggttagtgcaggcctctcgcctgcccgcggccctcctggccgccctcccaggcgcctgcgcatgccacgtcccaagctccacaaacttccactaaggcgctcccacgaacccccgtccccaggcggagagtggacaaggcagtccgtcgagcggagacccgaaggtattgtctgagcttctgggaaatggcctgcgggccagggacgggcatcaccccgcgtggaagccctgaccctcctcaccacccgcggtgctccaaggcacaccttcaactctcttctctcccttgcttgccctagcagagtcatccaaaataatggaaactcaacttttgttcgacttgtggatcttcacactcagaaacaaattacgttc

SEQ ID NO: 38698 - DNA, 445 bp, Macaca Mulatta
tgcaaatcatcagtgttgaagagagggatagaccaaaacttaatggaaaaaacttacccaaagaaaaagaccacagagtctacaaaacaattcttgaaaaagtgtcagaagaaagtgatgagtctggaacatcagaccaagaagagcaggattttcagagggccctggaactaagccgccaagaaaccaataaagaagatgaagatctccgcagggctattgaactaagtatgcaaggtagttccagaaacacatcgcaagatcttccaaagacatcatgtggaactcctgcttcggaagagccaaagaaaataaaagactatttgaaaagcatcagcaggaacagaagcagcagcaacaacagtcagatccgccaggtcacggttcatatctacacgaaaggccaacaacaagttcgagagcgattgagagtgatctcagtgat

SEQ ID NO: 38699 - DNA, 807 bp, Macaca Mulatta
ggggaccggcccgcggagctgcagcagtccttcgcgccctcctcgccctccccaccgacatcatgctccagttcctgcttggatttacattgggcaacgtggttggaatgtatctggctcagaactatgacataccaaacctggctaaaaaacttgaagaaattaaaaaggacttggatgccaagaagaaaccccctagtgcatgagactgcctccagcactgccttcgggatacactgattctactgctcttgagggcctcctttaccatctgaaccaaaagcttttgttttcgactccagcctcagcacttctcttctttgctagaccctgtgttttttgctttagagcaagcaaaatggggccccaatttgagaactaccctacatttccaacatactcacctcttcccatattccctttccaactgcatgggaggttctaagactggaattatggtgctagattagtaaacatgacttttaatgagtagcgtcttctttattgtttgcgatttttactaccttttgtcaagagaaaaacagatgagttttgtatagctggtcagatacaaataatagtgacttcacagtttagcaattataatgggtactttttaaacatttggtactaaattatgttgctacaaagtaattaaaattaatatctagagctagtttttggttgattattcattttattttgtactgctgttaggcagctctgtagttgctaattttaacaatgagtcaatttgctgttcatttacctaagaaatgattctgagaaatcctgtcaggaattggg

SEQ ID NO: 38700 - DNA, 734 bp, Macaca Mulatta
  misc_feature (1)...(734): n = A,T,C or G
cctgaagaagtatgtctgattttttttctcatactccaaaagctagtccctactctttaataaaaatcgtgggtaactttttgtttttcactagcgaacttccatgatatttcctttctatgtagtgtgattaatgcaatacatattatagttatctatacacagtgtaagatttaacaaactgaaatgatccacctcatatgtgagtccgtccaaaagatgttactgctctgggtgggccattgttctatatcggttatactaactttcatttaaaatatttattctaaaatgcctctgagaaacagtaaaaaataaaaacaacaagttgtctaaaatgcaacagcttttatagtaaatgtacatttataaataaaatactcaaannnnnnnnnnnnnnnnnnnnnnnnnnnnnnnnnnnnnnnnnnnnnnnnnnnnnnnnnnnnnnnnnnnnnnnnnnnnnnnnnnnnnnnnnnnnnnnnnnnnnnnnnnnnnnnnnnnnnnnnnnnnnnnnnnnnnnnnnnnnnnnnnnnnnnnnnnnnnnnnnnnnnnnnnnnnnnnnnnnnnnnnnnnnnnnnnnnnnnnnnnnnnnnnnnnnnnnnnnnnnnnnnnnnnnnnnnnnnnnnnnnnnnnnnnnnnnnnnnnnnnnnnnnnnnnnnnnnnnnnnnnnnnnnnnnnnnnnnnnnnnnnnnnnnnnnnnnnnnnnnnnnnnnnnnnnnnnnnnnnnnnnnnnn

SEQ ID NO: 38701 - DNA, 588 bp, Macaca Mulatta
  misc_feature (1)...(588): n = A,T,C or G
tcacactangaactccccccatagtgctctaaatatagcttagtaaaggcacctactttgctctaagcatacttaaagttaaaacaaaagtatgtataccaagagtgtgatatttttaatagttggagtctgttttgctaattttagtgtgcaagtcagcacaaggggcatagtgagcctgtggaagctttcctcaggtgagtgagtttcacaatcaaaattaggtgcctgtttcttaaaattagattctgctgcaggtttacatactagattttcagcctgcatgaattagtagggatattctttttttacttgcataattgtaattgatttaaacatgtatgccagaattcacaggcccatactaactgtccttaatttctttcctacagcagtactgctatatgccagtcctgtctgcattcttaagggtgcagttcaacacatcctctctagattatggtgaaaaagtattccaaaggaagtcttatcagagctagtgtcagaaagaatgacactaccaattgggcctgatcttcagcataggaaattgtcttagaatttcattattttttcctaaattgtgat

SEQ ID NO: 38702 - DNA, 654 bp, Macaca Mulatta
  misc_feature (1)...(654): n = A,T,C or G
tgacagtaattaaggaccaaagctgtagnttatacactctgaaatgtgtatgtttgaactataaaacatcagcttcaattctactgatgggtagtttacttctgtcttgtaacagccagtgtgttctgtgtcatagaacactgtattattgtgtacctggggactcgttgaagaaaatggagtgaaaggtacaaacttatgcaatatttcctcactagagatcattctctgagaccataagtagaggattgtttgctccatgggcaaatatatatgattatttttgtattaaagtactgaaataacctgtatcatatactataccatttaatttctaccatataatttctcttctattgaaataattttgataaatgatttgaatgatgtctgccttttggttttttcacaaattgcagaatcagggcatccagctacttttctctgcctggagatatagagagaaatatggagatagataaatgggcaaagacagagagaaagagaaagagagacagagatccatacatatgctttttaaagcagataaaagagagcactgaacaagaggctaaagaacaaattattatttccatcatttgattggctgctgctaacttttcagaaaagattaatcatcatcagaaaacattt

SEQ ID NO: 38703 - DNA, 788 bp, Macaca Mulatta
  misc_feature (1)...(788): n = A,T,C or G
ggctcaccgtcagtttttactcaagtgactaatccgtgtttgctgaaaaggcatagaaaatcatcagccaccctgacctctcctttgtctcatgtatttatttcttttatataggtggccatgaatatatccatatttgtgtgtaggattatgtccatgtatttatagtttcatagtcaatcctaatatccctactaagtttggaggcaagtagtatgccagtttttaagtagaaggtgtttgttattaaagtgagagagtatggtttgccagtggtcaggatattaatgagtgactgggaaaagcaagcttataccaacttctatacacaagcaaacttgcaggtctctgctttattaatcatatgttacttctaattctttcagagccatttgccaaatcttagtagtacaggaaagtatacatgttaaggtgattgaaatattaaaggcagaatgtctttgaagttacaaagaccagatttaaatatcacttaacttagatgagtgaatttactcatagtcacttaaactctttaaatgtgaatttcttcatcttttgaaagaaggaaacaataagtgctattcaagactggaacataaaaataagctgaatcaacgtatttaggagcacgaccgctcatgatcagtcgtaagaatannnnnnnnnnnnnnnnnnnnnnnnnnnnnnnnnnnnnnnnnnnnnnnnnnnnnnnnnnnnnnnnnnnnnnnnnnnnnnnnnnnnnnnnnnnnnnnnnnnnnnnnnnnnnnnnnnnnnnnnnnnnnnnn

SEQ ID NO: 38704 - DNA, 279 bp, Macaca Mulatta
  misc_feature (1)...(279): n = A,T,C or G
cggcagcagctgcaggcccagcnnnnnnnnaggcggctcacagtctccatcgtgccgtccgccgctgtgccacgctctggaaacagaaagtgctgggccgggacgggaagcctcagcccctggcagccgtcgcacccagcaggaaggtgacgtttgaggatccccttctcaactgcattgccgctggggctggggatgccaccgtggggaccaagaggccacaggctcctctgcttcagggagctctgggccgcctggctgctgaggagccccacgccc

SEQ ID NO: 38705 - DNA, 649 bp, Macaca Mulatta
gggggaggagagggcagctgggatacctctgcgagtctccctcagcactacaagagccgcggaaaacgcaaactgctctcatgggtgacctccccagtaagctgcgcccctgcggtgccttctccctgcttgctgtgttccgcagtctggtccgcatcacgccgctgccctgagtcgagcctgtcctcggcctgttcaccaaccggttaaaccaggatccagagtctacacgttctaggtttggtgtcacccctgagagcagtgtcccatgcagtgggctcagtgctgctctccggggagccttcctttagtgtcctggcgcctctatcacaagaagccagcgctgtctattggcaacaagattctttgccattcagaaacaagattcctcctccaggacacgaatggacttgactgtctttacctggtgaactgtcatccgggatcccccacccccacatttttgaccattacaaaatgagctgagagccctaggagagtgccaggaaggactagctaaagaggaggacggtaagagaagcggcccctcatacagtgggagtgtgccattatcatttaggcttccggacatcactggagttctcactttcctcattgtaattttcagcctctgggcgggaatctcata

SEQ ID NO: 38706 - DNA, 1294 bp, Macaca Mulatta
gggctttttcgcaacgggtttgccgcgaggaacacaggtgtcgtgaaaactacccctaaaagccaaaatgggaaaggaaaagactcatatcaacattgtcgtcattggacacgtagattcgggcaagtccaccactactggccatctgatctacaaatgcggtggcatcgacaaaagaaccattgaaaaatttgaaaaggaggctgctgagatgggaaagggctccttcaagtatgcctgggtcttggataaactgaaagctgagcgggaacgtggtatcaccattgatatctccttgtggaaatttgagaccagcaagtattatgtgactatcattgatgccccaggacacagagacttcatcaaaaacatgattacagggacatctcaggctgactgtgctgtcctgattgttgctgctggtgttggtgaatttgaagctggtatctccaagaatgggcagacccgagagcatgctcttctggcttacacactgggtgtgaaacaactaattgttggtgttaacaaaatggattccactgagccaccctacagccagaagagatacgaggaaattgttaaggaagtcagcacttacattaagaaaattggctacaaccccgacacagtagcatttgtgccaatttctggttggaatggtgacaacatgctggagccaagtgctaacatgccttggttcaagggatggaaggtcacccgtaaggatggcaatgccagtggaaccacgctgcttgaggctctggactgcatcctaccaccaactcgtccaactgacaagccctttgcgcctgcctctccaggatgtctacaaaattggtggtattggtactgttcctgttggccgaagtggagactggtgttctcaaacccgggtatggttggtcaacctttgctcccgttcaacgttttcaacttgaagttaaaatcctggtcgaaaatgccacccatggaacccttttgaatgaaagttccttccttggggggacattgttggggctttcattggtccaagaaatgttgtttttttcaagcgattgtttctttcttttggacaacttctggcccggttggaaccccaacaacccgcccccaccacatgggaaagccaactttgggctttccctttggtcaaggcggacatctattccctttcactcctcccaatgccccaccatttacaccgccttctcccctatcggctccctctcgcccgcccgcgatattgtctccacccccgcgcgtagaccactcttgcgatcgtccaccgcttttc

SEQ ID NO: 38707 - DNA, 564 bp, Macaca Mulatta
gtgcccagaacgtcacgtccttgtcagacgctccgtatcttctcctctcctgccagacttcactgtaggaaggcggccattcttccaggtgcgtgctacttccaacaccggggaaagcaagcttcagaaatgaacggtgtcaaagagggaggacccaccagcagggctaccggcagccagacaaccgcagccccagcattccccagccaccatgactgacagcccaggctccagaaatgcgcggcttcaaccttaggagtaaaaaccctcccaatccaactattattttcaacaatgggattgaggaatgaggtgttctaaccctgcctctcccgacagcacagatcatcagatcccagttcttataggattggggagtggggtggggtggggtggttcctaaccctgcccgccttcatagaaaagaacttggatatgatgacctgtgctagattagcactttgcttctgccatatgcagtcatcctcagcaccaggaaaagtcagaatcgttgactgatgacaacaataccaaaacacgccgttctgcggctctggtaactgg

SEQ ID NO: 38708 - DNA, 922 bp, Macaca Mulatta
  misc_feature (1)...(922): n = A,T,C or G
ggcagacccccgtctctcctccacaccgggtcctggcgggcnnnnnnnnnnnnnnnnnnnnnnnnnnnnnnnnnnnnnnnnnnnnnnnnnnnnnnnnnnnnnnnnnatgctgcagctgacgtgggtttgctgggtcacccgatgctgactggagtattatttttcatgaattaatttctnnnnnnnnnnnnnnnnnnnnnnnnnnnnnnnnnnnnnnnnnnnnnnnnnnnnnnnnnnnnnnnnnnnnnnnnnnnnnnnnngcccctccacattgcctcacccctttcacgcagagttctagcaggaggttctcaggggtccaggaatccgtgcaagtgacaaggcagggccgtggacggggaggtcacaagtcccggagcccacagtctcctccactgcacgcgtgtcttcctcccccgcagcctgccgccatccagttcccaccctgcagagagcagggcctcacagcaacaccaggcccaggnccaggcccagactctgcccgagacgctccctccaggggccaggctgtctctgggtctcccagcttcccaggttccggtggtgaccgggaccgggccagggtgccttgccgagggtgggcgcggagggagcagctgctgccacagccagagcagaggaggtcttggcagaggtccgctgggaggaaacggccctcctgtcctgcgttcctccgacacggttgacacttgctttttgggtgcaggcctgtctggccatttccgctgtggcgctgaagggtcttgctcagagatgcccagagagcagccctgtggcccattcctccgcgctgggggctgccacccgtcgcccttttgtccagcgtctgcagctgggagcgacacgcggtgactgacggccgtggctttgacgcccgtgtgtaaataggctgcggctacgg

SEQ ID NO: 38709 - DNA, 701 bp, Macaca Mulatta
acatcataatgtacaaacctacccataactgagaagcacagagcgttaaagcctccactgtgtggagaaactacattaggttaactagctattgagtaccttcaaagcactcaactgacaggttgtacaaactggaaattaaaatacttatgacatttttaccttttatataaccaataatctaccacagaataatagtatttttaaaactattaacaagcaatatgttaaataatgtattatatctgtttctgaccaagtctgtacaatattgctggggggccctctcccctcagtgtcactgttcactttggagggttactttaggaagaggacaagtgctaccacaggggggaaaaatgcagaagaggagaggatgcatcagaatgagactagaaatgttatgagaatgttttctcttagtgtcttttaaatattaggttagtgggaaagtgattgtggtttctgccatttaaaaaccacaatcactttcacactaatagctcatgaataagacctgtcagtgtcctttagtccacagtgttgagaaatccatgttaccaatatagaagccaaactctaagccaaaatcacataaagagaagaaaaagtacaacttctggtaattcctctttgagaggcatgacaacagagctcagggatcgtcttgcttgcctttctacagaagagttctggctgcc

SEQ ID NO: 38710 - DNA, 160 bp, Macaca Mulatta
tcagcctgcatatgcccatgacacagtagtggaaactaagcaagaaagattggctcagggaaaaccagtgggacaggatgttccttatgcagccatgggaggattaactggtttcagctcgctggcggaaggctacatgcggttagatgacagtgggatt

SEQ ID NO: 38711 - DNA, 883 bp, Macaca Mulatta
  misc_feature (1)...(883): n = A,T,C or G
ggtgatgaacatctttgagcagaagacatttttacatgattctgattatttcctgaggttatatgatcagactcagaactttgaggtcataggacataaacatatttaaaattcttgctacaccttaaaaacgttctttccaaaaatgttccagtctacatcacagtaatagttctgagaagctcagatatgatagatcttgaaggggaaaccaaaggcacgtggggttttccctgtccatagagaatgacataatctcctggtgtctctgccaaaagcaattctctgttgggtggactgtgaagcgtgactgctttttaagccaacaaaaggctgtctaaaaatgggattttacacactttttttttcaagtgagtgggagccagttggctgtagatctgagcttataggaaagtttgaactgaactnnnnnnnnnnnnnnnnnnnggaaattcccttgggattttcgttttacatataaaaccttctgcaaatagaattggaacgcatttaccactctagaaaagattttctaaaccaggggttcaaatccctgaccttggcatggatgggtcttttaattgttgaaactttcaccctcttaaaactggagtttacccttacctgtaacaacatgagggccttaaaaaccaaatccctctcctaaagtggttggtcctcaaagttttttggaaaaaggagtagtcctttttgggcacaaattcctctcttggcctcagggatgagacatatgaatttttgacccgttggttacctcgggaactgaataacaatagaaaatttgtttttaaaacttaacaagacagnnaggggagtagacgctntcaagtactggacagttaatactacgactaggtaggag

SEQ ID NO: 38712 - DNA, 98 bp, Macaca Mulatta
aggcacagccaggtgacaactctactagaatcccaatcccgacagaactctacatacaagctgtcatttttgaccacatttccagaaggaagacttaa

SEQ ID NO: 38713 - DNA, 2691 bp, Macaca Mulatta
  misc_feature (1)...(2691): n = A,T,C or G
gggagatatgcaaaccgaaatacttaaataagacctcagtacgtcctggcctgaagaactgtggggatgttaattgtattggacggattcatacatacctcgaattgataggagcaatcaattttggatgtnnnnnnnnnnnnnnnnnnnnnnnnnnnnnnnnnnnnnnnnnnnnnnnnnnnnnnnnnnnnnnnnnnnnnnnnnnnnnnnnnnnnnnnnnnnnnnnnnnnnnnngcgtacaaggagacgtagggtccgagacccatggggaaactggtgtgacgcaaaggacttagaaggacaaacgtttgannnnnnnnnnnnnnnnnnnnnnnnnnnnnnnnnnnnnnnnnnnnnnnnnnnnnnnnnnnnnnnnnnnnnnnnnnnnnnnnnnnnnnnnnnnnnnnnnnnnnnnnnnnnnnnnnnnnnnnnnnnnnnnnnnnnnnnnnnnnnnnnnnnnnnnnnnnnnnnnnnnnnnnnnnnnnnnnnnnnnnnnnnnnnnnnnnnnnnnnnnnnnnnnnnnnnnnnnnnnnnnnnnnnnnnnnnnnnnnnnnnnnnnnnnnnnnnnnnnnnnnnnnnnnnnnnnnnnnnnnnnnnnnnnnnnnnnnnnnnnnnnnnnnnnnnnnnnnnnnnnnnnnnnnnnnnnnnnnnnnnnnnnnnnnnnnnnnnnnnnnnnnnnnnnnnnnnnnnnnnnnnnnnnnnnnnnnnnnnnnnnnnnnnnnnnnnnnnnnnnnnnnnnnnnnnnnnnnnnnnnnnnnnnnnnnnnnnnnnnnnnnnnnnnnnnnnnnnnnnnnnnnnnnnnnnnnnnnnnnnnnnnnnnnnnnnnnnnnnnnnnnnnnnnnnnnnnnnnnnnnnnnnnnnnnnnnnnnnnnnnnnnnnnnnnnnnnnnnnnnnnnnnnnnnnnnnnnnnnnnnnnnnnnnnnnnnnnnnnnnnnnnnnnnnnnnnnnnnnnnnnnnnnnnnnnnnnnnnnnnnnnnnnnnnnnnnnnnnnnnnnnnnnnnnnnnnnnnnnnnnnnnnnnnnnnnnnnnnnnnnnnnnnnnnnnnnnnnnnnnnnnnnnnnnnnnnnnnnnnnnnnnnnnnnnnnnnnnnnnnnnnnnnnnnnnnnnnnnnnnnnnnnnnnnnnnnnnnnnnnnnnnnnnnnnnnnnnnnnnnnnnnnnnnnnnnnnnnnnnnnnnnnnnnnnnnnnnnnnnnnnnnnnnnnnnnnnnnnnnnnnnnnnnnnnnnnnnnnnnnnnnnnnnnnnnnnnnnnnnnnnnnnnnnnnnnnnnnnnnnnnnnnnnnnnnnnnnnnnnnnnnnnnnnnnnnnnnnnnnnnnnnnnnnnnnnnnnnnnnnnnnnnnnnnnnnnnnnnnnnnnnnnnnnnnnnnnnnnnnnnnnnnnnnnnnnnnnnnnnnnnnnnnnnnnnnnnnnnnnnnnnnnnnnnnnnnnnnnnnnnnnnnnnnnnnnnnnnnnnnnnnnnnnnnnnnnnnnnnnnnnnnnnnnnnnnnnnnnnnnnnnnnnnnnnnnnnnnnnnnnnnnnnnnnnnnnnnnnnnnnnnnnnnnnnnnnnnnnnnnnnnnnnnnnnnnnnnnnnnnnnnnnnnnnnnnnnnnnnnnnnnnnnnnnnnnnnnnnnnnnnnnnnnnnnnnnnnnnnnnnnnnnnnnnnnnnnnnnnnnnnnnnnnnnnnnnnnnnnnnnnnnnnnnnnnnnnnnnnnnnnnnnnnnnnnnnnnnnnnnnnnnnnnnnnnnnnnnnnnnnnnnnnnnnnnnnnnnnnnnnnnnnnnnnnnnnnnnnnnnnnnnnnnnnnnnnnnnnnnnnnnnnnnnnnnnnnnnnnnnnnnnnnnnnnnnnnnnnnnnnnnnnnnnnnnnnnnnnnnnnnnnnnnnnnnnnnnnnnnnnnnnnnnnnnttttaactaattttacacacataaaataattagcttcaattgtgtgtccacttacataagtaggtttgataaaacctcatttaactggaacataggtaatcataactctcaaactgtttttttctactacctactattaggagaaagaggcaaatgataataaagctggaataaatcagagatttaatttttagaacaagcctttcaggacatactacatattcagcccagtttcatatgctttctgaatctataatggaggtcagggaacttttttaatgtaaagggccagtttgtaagtaatgttggcttttcaggctgcatgtgatctctacaagacattcttctttgnnnnnnnnnnnnnnnnnnnnnnnnnnnnnnnnnnnnnncagccctttaaaactataaaaaccattgttaactcacaggtctcataaaacataggttgctggctattattctccaactcctgatctagaaaattttaaacattagaattttgttttacatttgttaagccttacatcatctttaaatgacaccaaaactcagaattgtgatctgcatttaagcccattttaaaataaaataagcagtcatgctgcctcatttattgaaattcaatagatttcagtttatttcttagtagtcagagaattgatttatacctattcaccaagcattcttactaatgtttccttatatctaaaccagattcattctatatttttgctttgtttgtaatcagtagccaatgaagaataaggagtagtggaagaagcagtgagccaggtttaggtgacctggt

SEQ ID NO: 38714 - DNA, 2432 bp, Macaca Mulatta
  misc_feature (1)...(2432): n = A,T,C or G
aagcctttgatgtgctgggcttcagtgccgaggagaagatggccgtgtataagctgacgggaggtatcatgcactttgggaacatgaagttcaagcagaagcccagagaggagcaagctgaagtggacaccactgaggnnnnnnnnnnnnnnnnnnnnnnnnnnnnnnnnnnnnnnnnnnnnnnnnnnnnnnnnnnnnnnnnnnnnnnnnnnnnnnnnnnnnnnnnnnnnnnnnnnnnnnnnnnnnnnnnnnnnnnnnnnnnnnnnnnnnnnnnnnnnnnnnnnnnnnnnnnnnnnnnnnnnnnnnnnnnnnnnnnnnnnnnnnnnnnnnnnnnnnnnnnnnnnnnnnnnnnnnnnnnnnnnnnnnnnnnnnnnnnnnnnnnnnnnnnnnnnnnnnnnnnnnnnnnnnnnnnnnnnnnnnnnnnnnnnnnnnnnnnnnnnnnnnnnnnnnnnnnnnnnnnnnnnnnnnnnnnnnnnnnnnnnnnnnnnnnnnnnnnnnnnnnnnnnnnnnnnnnnnnnnnnnnnnnnnnnnnnnnnnnnnnnnnnnnnnnnnnnnnnnnnnnnnnnnnnnnnnnnngcccatgggcatcttctccatcttggaggaacagtgtgtcttccccaaagccaccgatgccacgttcaaggcagccctgtatgacaatcacctgggcaagtccagcaacttcctgaagcccaaggggggcaagggcaaggggcccgaggcccacttcgagctcgttcactacgcaggcaccgtgnnnnnnnnnnnnnnnnnnnnnnnnnnnnnnnnnnnnnnnnnnnnnnnnnnnnnnnnnnnnnnnnnnnnnnnnnnnnnnnnnnnnnnnnnnnnnnnnnnnnnnnnnnnnnnnnnnnnnnnnnnnnnnnnnnnnnnnnnnnnnnnnnnnnnnnnnnnnnnnnnnnnnnnnnnnnnnnnnnnnnnnnnnnnnnnnnnnnnnnnnnnnnnnnnnnnnnnnnnnnnnnnnnnnnnnnnnnnnnnnnnnnnnnnnnnnnnnnnnnnnnnnnnnnnnnnnnnnnnnnnnnnnnnnnnnnnnnnnnnnnnnnnnnnnnnnnnnnnnnnnnnnnnnnnnnnnnnnnnnnnnnnnnnnnnnnnnnnnnnnnnnnnnnnnnnnnnnnnnnnnnnnnnnnnnnnnnnnnnnnnnnnnnnnnnnnnnnnnnnnnnnnnnnnnnnnnnnnnnnnnnnnnnnnnnnnnnnnnnnnnnnnnnnnnnnnnnnnnnnnnnnnnnnnnnnnnnnnnnnnnnnnnnnnnnnnnnnnnnnnnnnnnnnnnnnnnnnnnnnnnnnnnnnnnnnnnnnnnnnnnnnnnnnnnnnnnnnnnnnnnnnnnnnnnnnnnnnnnnnnnnnnnnnnnnnnnnnnnnnnnnnnnnnnnnnnnnnnagaatgggcctgaaagtcattcagcggaacgtgcgcaagttcctgcagctccgtttctgggggtggtggaagctgtataacaaggnnnnnnnnnnnnnnnnnnnnnnnnnnnnnnnnnnnnnnnnnnnnnnnnnnnnnnnnnnnnnnnnnnnnnnnnnnnnnnnnnnnnnnnnnnnnnnnnnnnnnnnnnnnnnnnnnnnnnnnnnnnnnnnnnnnnnnnnnnnnnnnnnnnnnnnnnnnnnnnnnnnnnnnnnnnnnnnnnnnnnnnnnnnnnnnnnnnnnnnnnnnnnnnnnnnnnnnnnnnnnnnnnnnnnnnnnnnnnnnnnnnnnnnnnnnnnnnnnnnnnnnnnnnnnnnnnnnnnnnnnnnnnnnnnnnnnnnnnnnnnnnnnnnnnnnnnnnnnnnnnnnnnnnnnnnnnnnnnnnnnnnnnnnnnnnnnnnnnnnnnnnnnnnnnnnnnnnnnnnnnnnnnnnnnnnnnnnnnnnnnnnnnnnnnnnnnnnnnnnnnnnnnnnnnnnnnnnnnnnnnnnnnnnnnnnnnnnnnnnnnnnnnnnnnnnnnnnnnnnnnnnnnnnnnnnnnnnnnnnnnnnnnnnnnnnnnnnnnnnnnnnnnnnnnnnnnnnnnnnnnnnnnnnnnnnnnnnnnnnnnnnnnnnnnnnnnnnnnnnnnnnnnnnnnnnnnnnnnnnnnnnnnnnnnnnnnnnnnnnnnnnnnnnnnnnnnnnnnnnnnnnnnnnnnnnnnnnnnnnnnnnnnnnnnnnnnnnnnnnnnnnnnnnnnnnnnnnnnnnnnnnnnnnnnnnnnnnnnnnnnnnnnnnnnnnnnnnnnnagggatttggaaataaactctgtcaactcgaaatatgaggatgagcagtctctgaattccacgctgcaaaggaaactgaaggagcaccaggnnnnnnnnnnnnnnnnnnnnnnnnnnnnnnnnnnnnnnnnnnnnnnnnnnnnnnaggtggagaaacaacgcagtgacctgtcccgggatctcgaagacctcagtgacaggctggaggaagcg

SEQ ID NO: 38715 - DNA, 221 bp, Macaca Mulatta
gctccccatcttcagatctgaaaatgctgtagtagatggcccattcctggtagaaaaacagaagacattacccaaactacctaaatctgctccaagcattaggctttcccctgtggctgtgtgtgctggccagactcttcagttccaactcagattggacctcccatcaggatcaaagctaacggaaggagtacccagttgctggtttctaagagctgaag

SEQ ID NO: 38716 - DNA, 781 bp, Macaca Mulatta
gggggatacccgctgtcccaagccagcatcacagattggtgagtctgagattcattggtgggagagtagtacttggaaccctgatagaagagaatttctttggccagtgtcaaagcatagttgccagatgcccagtgtagttactgtgacatgagtgacataatctccttcttttccactgagactctgctaaccccattcttgcaatgcataccaagaggaagggccagttcctgggtggctgatttactttattagacgggaggacaaaggggccagaattgttatcttcatgatttgtgcctgaaacttgcctgtgactcatgtccagaaagggcaggaagctggtggataaatggttatgaggctcaaggatgaggacactgctgccttagcagggtttgggaaatcaaataaaggtgctcccaggatttagagtgatgtcatttgagaaaccgcttcttctggactcttttgagtttttgtccagacccttttctcttctttgcaggctgcagtgcgcctggctaccttcctacctcactgggctggcatcctcagcaaagtgaaatcttttgtcctttggtgaatgacaaatgggacaagtctccccttgtgggatccccaggagtacaagggtgtggtccctggaacttcaccctgttacatttccccagggggggcacagtggggctggggggtccctcccccccaccagtggttcccctttcgccggggcccttctcttcaaagggaaaaaacgagcctcactctggggtgt

SEQ ID NO: 38717 - DNA, 756 bp, Macaca Mulatta
ggaggcaagtagtgtagtgatggtataatactttcttgttttaaaaccaaagtggataaaaccccagtgatttattctcttgactggctcattatagattttctgtagcatggtagctggcacgatgcattcagtgatacatgtttttcttcaaccctgaatttccttctcaactgaaagcaaagaaactatatgtaaaagaggtaggaaaggaatggttccctttttgtccaggggaccaattctcttgcctggaagggtaaatgcgttggcacatgtagtggcaagtggcatgtggcatcaatagcaccaatatcagggttggccaaaggactctccaatttccctcaatccacgttttcctgccctactccaacctggctccagaacagaccccgttaacatcactgtcacacagatcactaggtgcaacaggaatgctccatttctctaattacttcatccaataatagcatgtaaccctggtgatcacagcttccttcttgaagcacgttcttccctttgttctccatgacaccaccttcttccgggtttccttctatttctacagtcttccatccaaactctaagtgttggaagttcctcaaaaggttaatcctaaactccttttctcctgaacttctctggaagtctcttccctatttgtcaacattctacaaattggatgtggattaaaaatttttcagctatgaaggccagggcggggttggccccatgccctatatccctagcccc

SEQ ID NO: 38718 - DNA, 787 bp, Macaca Mulatta
  misc_feature (1)...(787): n = A,T,C or G
ggatgctaaatttgacaccatggtaaatactactgttgagcttaaagttgtctcagaatccagcatattaattaaaagttactgctttctaatcctttattcatatttttatagcttttaaaaattactattctttagattttgaaatgcttaaaactacagagacataatattcaaatatgtgcgatcaaccatctaaaataaataaatgctgatctttgtcatttttgcatcagctattttaaagtaattaaaatattataaatacctttgttctgcttctagtccaacttatacctttattaaaatttggtgtgtgtatccatccaatctctgttttcagagattgttttattatgtgctttaagtccacataaatgatctcacactgaatgtgtcactgtaggattttttcttcaaaattatatttttgaactttatgtatatatatatttctttaattttaaccattttatgaattctaaagtttatgtatttccccatcttaatatattatttccaatttttcaattacaagcaatgtaatctcaaatgtgcacttctgtgtgattttcttctgtatatgtgcagtattttgtctaggatatacctagaagtggacttgctgttatagagtgtgtgctttttcagctttaccagatattgctaaattgctgtctgaagcaaatgtagcagttcacactngctgtctagaatttttctcatatcattattaagattttgaaattgtcccgacccctgtggattttttactccttaatgatgg

SEQ ID NO: 38719 - DNA, 788 bp, Macaca Mulatta
  misc_feature (1)...(788): n = A,T,C or G
gggattctgtgggggtgtataacaagcctgaaggacattgtaatcatttcttacagggtgaaaatttagaaagattgtgtatgagagcctatatagttgttttatccattatcatctttgattaagacttaaaaaaaatgctatttccagttaatgcatttggccctattgaattttcagggaccagaaaacattaaagaaaaagttctgcatcttgtaatggtaaccaattaagcttgagattgttctgaaagtatcagttgctttaaaactgttgtaagtgcagttggcaagatctccaagctgaaacttccatgttaaaattttgcctgtaagaatttgcacatgaatgttaatggaaaacaaaataaaacttaagatagcccaaaacaaaagccacaaacagttcatcatttggtgcttagtctttgtaagggctctctattgtatgacttaccccagctaccattaagtgacaaatcaccttaaaaaatgttcatttgattcataacaagggaagaatgggtctatgattttattgcaactcttagcccaaaataaattgttttagccttctgggccagcacttgattaaaaaggtaaataagtgaagtggctaatccctaaaatggttttatcctcanacccataactatcatagaatttctttaggtaaaaaacaaattcttaacctagtgggtaattctaccttgttattccgaaaaactgtattttaaaaattttaccatattccattttttggatttcccgggccatattttttttgg

SEQ ID NO: 38720 - DNA, 908 bp, Macaca Mulatta
ggtccatttgtgaagttaagttgatgagggcaaggtttttgtttgtttaatttgtatatgtctaaagatatttggaaatttttacaggatttaaacatatatgcaaatttgtatataaaaatagcatggccatcatcatttgaatgcttgtaaatgaaaggattatcttttttgagatctatatataaatagaaatagaaaatccagctggactgattaggattcttttttaattcatttgtgtataacatttttattacaattacacatcagttttgacacagtcatagcaacattaatattttcccatgatgcagatcctttttgtaatgggcttgttctttgagatctctgtaaagaaccctgtgaactagaaaacataactcacagagatacttttttaaaaaatttatttactggcactgaaagttccagttgggatgaagcatttcgtctcactacataacacctctttgactgcacttcagtgaattgttcttatgtgcactgtgtagcaacttacattataacaaagcagataagggctgtaagctgctgcttatgttgaaaagtggttcttcagatttcctctcataaaatccagtttgaagataatttttttatactttatcactgaacccaagtgttttatttaaatgtcgacggtacttctaagaacgttgccctgtcatcgtgggtcttttggtcttggataactaaactgcctttccagagaaccaaatgtcagagttactagaccaaatagtggttaaaacctccaaaggaagtaatgtagtaatcttattcataatgggattaatgtattttagacattcgttttaaacactacctcagttaatatagagtataaaatctgtggtttaatccctcaaaagttaacagtgatt

SEQ ID NO: 38721 - DNA, 501 bp, Macaca Mulatta
aggctatgactgtaatgctgggctccattggatattctgttgtggtgcagacagtcactgtgggaatgtcttcaaagtgagcagttacagaattagtttactttgaattttgttgtctgaatagctcctgctttgttttttaaattaaattttttgtttttactaccacgggctggcctaactaacagaaaatggatgatcaacctctggttttaccataatgcaatgtgccacagaaagtttgggggaggtttttaatgtaattgcactctggttaattggctcgtaccaagtcctgccttatgatttgtggaaagcttcaaggagttccactgatgcaaaagggtcttttcctagcttcccggtctgatcagtgctatcagatggacagataagcgtgaatgttttataccgaaaatggaaatgatacatttctcttgttatgtgttttcataaaatgtagcattttttttcttatggaaaaaagtttcaggtgtctcc

SEQ ID NO: 38722 - DNA, 1052 bp, Macaca Mulatta
  misc_feature (1)...(1052): n = A,T,C or G
cttgtgcaaataactttattaccataagcatgtgaatactcatgaatagtttcccaattctggggcactcagattcggagcaaaagcaaatgtttcaatttttgtttacaaaagtatactttaccaaattgctgtaaagtataaatagcttaaaagagaaagttcatatatctggagaatgaaacattcaaggaatcagcacattttcaaataaaaaattgtgaaaatattatccttttgattatttagtccaataaatttgannnnnnnnnnnnnnnnnncttgaatttcatgaaggtagcatcctgttcattaaaattttgaaagttctcagtgatatgatcttgaagttatcagaaacttgtattcaagagtcgttgtcagagtcttttccatatatctccttgaaaaaaaagcaattttggactgtagctgattgtaaatacttcgaggaagaacgaaagcaactgcctgccagtcttcctgaaatacagaaatgacatcacggctgctatatcggattaaggccagaaatacgccctgttgctgaaggaggagagactttgatcgtcttgagtgtggaactttcgctgccagtggctgagttacgagcggagcaaccatagagcccgctatgctttgtagtaatttcgcggatagagagctcttgtcctgattgcagaacttcccattaatcgtccaagaatactctgccggtgggttagagttcgcgaagcagtacaagtagagtttttctcctgaacggtaataggggtatgaagtgaaaatgctggggatgtgtggaccatcagggactatgatcctcttgattatgagatttgttccaccagtgactgagttatgcatgatacagacatagacccctctatatgttttagtgatttggaggataataaacacttgtgctgtttgctggaacttcctgtcaatcagccaagaatgctctgtcagtgggtgagagtctgtgaggctaggagagcttggggagttccactggatggtaataggtgtaatgaagaagtatgtggggg

SEQ ID NO: 38723 - DNA, 776 bp, Macaca Mulatta
  misc_feature (1)...(776): n = A,T,C or G
ggggacctaaattagtacttgacccttaagaggtgttggctgggtgcgnnnnnnnnnnnnnnccnnnnnnnnnnnnnnnnnnnnagaagtgggcggatcannnnnnnnnnnnnnnnnnnnnnnnnnnnnnnnnnnagtgaaacccccgtccctactaaaaatataaaaattagacgggtgtggtggcatgcacctgttnnnnnnnnnnnnnnnnnnannnnnnnnnnnnnnnnnnnnnnnnnnnnnnnnnnnnnnnnnnnnnnnntcaaaattannnnnnnnnnnnnnnnnnnnnnnnnnnnnnncnnnnnnnnnnnnnnnnnnnnnnnnnnnnnggtgtttaccaagggttggttcatttagtgaattaagtgagttaaccaccattaacaatggttaaggacacctgggcactggctggatttgactccaagctctaccgattacttgtgtgactttgtgcaagttaatcaacatctcagcttgttttctcatctgtcaaatggggatgatactagcatgtacctcccangactgtagtgaacttttaattaagataattattgaatgtaataggtagtttattgattaatcaattaaatttacataagtcattgtgggcgccaatgagcccagggggctcagtaaggtgttaaccattcatcaagaggtggctaatttgaaaaacttgtggggtgggaatgaaaaaagttgaaaacttcaggaaccccccgaaattattgaagaaagaagccggtttaaccccccccattggc

SEQ ID NO: 38724 - DNA, 466 bp, Macaca Mulatta
gcagcacaggcgaggacattctctccatccctcactcaccagctgtccctgctttccagcggtcagggtgagcccctgccactcccggcagccctctgtcatctccgacgcatctgccgccgaaggcgaccggtcgtccacacctagcgacatcaactcccctcgacaccggacgcactccctctgcaacgtaaggccagcagcagcggggcctgggcccctgggccctgcccggaaaccacaagggtgggggtggcggggtgaagccatactcgctgtttcctctcgtccacccagggagcactctggcgaatgcatttcctgttctgttctttccttttgcaagaagcgatggatgtggggagaaaaaggaatgaggcccgtttgctccttgtgtccgggagggtgaggagaatccagaggaagtgggcctgggtcggccgcaggcgcagcctggaactctgcc

SEQ ID NO: 38725 - DNA, 644 bp, Macaca Mulatta
gaggcacaaatggccaagctcccccaggtccaccctgagagaggccaaagggagaagagtggatagtcctttgtgagagggagatccagctcttgttgggggacctcacaggccccagattctacctttaaagccctgatgactgacagggcagtcactgcacacgcactccccacccatcacatgcttgggagctcagttctgggcccccgagagcagggtggtggcattccctggagtccttgggatggatacaggtcaaaggtcaggggccactctgcacccccaagacacacccccgtgtgtttcctgaacagggcagtaaagaaggcgacacacggcacactggggaactctgtcctgaaatccacacaattttagcctcctgggaagcctgtgatgggacagtcggaggaagagccttcttctgtcctctggagaaggcaggaggaaagcaaagtccatttccagaggcccagaggctgtcctctgaggtccccactctcccccagggctgcccctccagctgagccctgcccctctcacagtccaaagggcccccttcaatactgaaggggcaaagaacaggttgatttgcagaaggcggcccagtgcaccaccacccagcgctgccctcatggctt

SEQ ID NO: 38726 - DNA, 390 bp, Macaca Mulatta
cttatctgttttggaaaagcgtatatcttgaatttcttcaggctttccaccagaggctgacccttattagtaggtggctgaattcagactatgtcaagcagagcaaattgtgctgtgatgagaagacaggacacaaataagataatttgtgattgactgcccagctgtacccatggttaccagacagcccagcccatgttgcatgtgtatgtgtgagcatcacaatggcttgtctaggacgtgtgtatcatcagttgggccttgaagggtggtggagtttcttcatgtgaggagggaatgattggaatgggcattggctcccgtttggtttcgcggtgaagttggcaggttctgctgttgatactgtgagtttttctacagccttagggt

SEQ ID NO: 38727 - DNA, 826 bp, Macaca Mulatta
  misc_feature (1)...(826): n = A,T,C or G
gggtctcaccttttcttagaggaacttatctaggtacagcatgtagtatcagcagtgacacagacattttcttatttaaccaatgaccactcaaggattgcttagtttaggttcaattaagctaccagcagaaggcactgattgtgaaatttcacggcgttaccctgctaagtggaaaggtagcattaagagggataaaggtttcgttatgatgtggagtctcattccttttgtcttggaaaagccatgtacagtatttaaacgtcaactnttctgggcctgnnnnnnnnnnnnnnnnnnnnnnnnnnnnnnnnnnnnnnnnnnnnnnnngggcggatcacaaggtcaggagatcgagaccacgnnnnnnnnnnnnnnnnnnnnnnnnnnnngaaaattagccgggcgcggttgtgggcnnnnnnnnnnnnnnnnnnnnnnnnnnnnnnnnnnnnnnnnnnnnnnnnnnnnnnnnnnnnnnnnnnnnnnnnnnnnnnnnnnnnnnnnnnnnnnnnnnnnnnnnnnnnnnnnnnnnnnnnnnnnnncttcnaaggtcccggttacagcccaacgaaaaatgacggcacggaacttcaacttccgggttgcactttgaatacctctggagatggcatcagggagtttggaaaacaggcattgaacccactgccccaaaccacagcaatgcccgtaaatagagcttcggaaaattttcggtggggattcattaaacccttgaaggtaaacggaaaacccccggttctacccaggcctgggtaaaaatcctttttccatggaaaggtatttttgggagggtgacattaac

SEQ ID NO: 38728 - DNA, 317 bp, Macaca Mulatta
caacgttgctcgatatcttatagtcatcactgatggtaaatcttcagacccggtggctgaggctgcagagggattgagagaaaatggagttataatttatgccattggagtaagagaagctaacattgatgagcttaaggaaatagctaaagacaagatattttttgtgtatgagtttgatttactgaaggacatccaaaaagaagtggtacaggacatctgctcttcagagggtaagactttttcttcttcaatctcctttcccacctctccaagaatatgtacctgatctatttaaataagcttcattcttttat

SEQ ID NO: 38729 - DNA, 794 bp, Macaca Mulatta
  misc_feature (1)...(794): n = A,T,C or G
ggcgcctttctgtggctctagacctaagtagacacacatgcagnnnnnnnnnnnnnnnnnnnnnntacaatgcctttataggacatttcccctttcagctttttcctctattcctttctccactctcagtctgtagcaaagactctcactccaggttctcctagtgagagaaagatcttttactaagactccatccagctgatcaaggaagaaagtgaaaattagaaaaaaaagtagaccaagaccaaccaaggttccttagtgccttctttcttctcccactgcccactgcagacacagtaaacctctacctttttcccccactaaaacaacagaaaaaggtcttgggaaaactggcacagcccctgacaaggtagatatcatcatctcccattttacaggtgaagcaactgaagtccttggaaggaaaatgatttcccaaatatgatacaagcagcaacaggtgaaccaggatgtagattttgtgctgcctanaacagtattctccctatttcccccactgtaggtttctaactagatactcaagtgttctcagttcatcatagtctgcacagtcagaaagacactaccatttccctaatttttatttacttcaaatgccatttttaatttcacaacatcaaannnnaaannannaaaanannnaaaancccttggtcggcccgccttcggccccttgaaaaacctttctaaaacattccgtttgggggcgcggggccccattaagggtaagtgaaacaatggtccatagcctgtttttccaagggaaaacc

SEQ ID NO: 38730 - DNA, 696 bp, Macaca Mulatta
  misc_feature (1)...(696): n = A,T,C or G
cagcctagagtttccatatttgaaagtttagaaaattctatcctcatttctccttctttgaatggcacaaataaatacactacataaatttttctggtttgaaaggctctaggcgataactttattaattcaacctgaaaatatcaagccattaaattttgtctgggtagaataaatccctgtggcctcttttaaagcaatgtaggtctctgttgcccatggggcatatctgtgtcccaatccacaagagataggaccaacaaacaatgagtgtgcaacctctttctccttggaaagaagaaagtgtgcacgaagtaggggagggtgcgcagaccctgccttgcccctcctattacccccttctctgtcatttttttcctaactccatttcataggcaggctcagaatacctgagtctgaaaatatcaggataacaattgtgaattgtgacaatcactacaatgtcccatatctgannnnnnnnnnnnnnnnnnnctatttatccactgacactattgcacattagagctgcatagtcctccaattctagggaagaataaaaacttttggtttatcctaagattcttctccaaggtcataaacaagaaattcccctccacaaccaagagatgtgcattttagtaacatcagatgtattctcctctttatcaaatacttactcttccgaaatcttag

SEQ ID NO: 38731 - DNA, 424 bp, Macaca Mulatta
  misc_feature (1)...(424): n = A,T,C or G
cgtctagacacagcaacaagcatgttcttactgctcaaggagggaagatccagagacgtgcagcgcagctacgggaaggtccaggcggagttccccatgggccctgtgaccacagcccacagagggtcataccgatgttttggctcctataacaactatgcctggtctttccccagtgagccagtgaagctcctggtcacaggnnnnnncttgggacacctgccttttaaccagagagacgggactccagaaagnagaccttgccctctgggaccacactgcccagaatctccttcggatgggcctggccttcctagtcctggtggctctagtgtgtctcctggttgaagattggctcagcaggaagaggactagagagcaagccagcagagcttccacttgggaaggcaggagaaggttgaac

SEQ ID NO: 38732 - DNA, 797 bp, Macaca Mulatta
  misc_feature (1)...(797): n = A,T,C or G
ggtgtcatgaagtactcattcatctcttgccaacttatttttttaatcttagaactttgtcacaagtttatatgaacttttcatatgatatgaatgtactgtgaaaagtaaaccatgataccacatcaatttcttctcctctgtttttagctatatttgagaaatctattgttttagtaacattttatgttttgtatatttccttctaatttttttttaattcttcagagaagatgtattcatcacccctacagagaactggcaaatattcacatttatttacacttgtttccctaagattcattttgaaatttgaatccacctgaaattgaattttgtaaattgtttctctgaactgaatttttttcatttgattttaaagtgcctttgtatattaaatagagcaaataaccagatcttnnnnnnnnnnnnnnnnnnnnnnnnnnnnnnnnntgtcggccgcctcggcccctcgaaaagctttctanactgttcgtttggcgggcggtcaaaaaatttaatagaccttggttttagctgccgccccacgaaagccagggcaagaaggacaaatggggttcccagcaatatcgtggcccccgactgacacctggaaaannnnnnnnnnnnnnnnnnncgcaggcgccaaacgcacattatttggaaccaatccccaaaggggacctcgcgaggcccataaatggagatttatccccccgggacttccacactcaatcctcaataactaaatttaccccccccgcccgggtccccttcctgagaagggaaggcgtgta

SEQ ID NO: 38733 - DNA, 768 bp, Macaca Mulatta
  misc_feature (1)...(768): n = A,T,C or G
acacttttccagattggattcagagaagattttatcccagaatattattccatgattgtgggcaagaaccaccnttaaatcattttgggagcaaagtagtgtatgtataatgaataaaaatcaaggctaattataaatatttacctttgtctcctactctaacaatatgccttattacttgtactctctacctagctatgataaaattcagtgttcaccagtgaaaaatgtgtcaccttgagagagttatgtgcctggctcagccatcactttagtaatttataaatagataatggtaaaagtaactgtgttatagagtggttgtaaggatcagtacaatagtatatataaaatgcactccttaaacatagttgctgtcatcaagatcatctctactgctgtagaagctactgtgactgatattattgctgctgttttttcacttttctcataattccctgatttgggcgttttgcatctacattttcctacctatgtgtcaccaccaaatattagtcttaaactgtaagttcctttagggaattaatccatgtactttgtacattaattccagccagttagttggaattataggaatgtcttttgacaatgatgaaaatgacaatattgttttaataatgtttttacacttcagagtttgatttcatagttaaagaatatacttttacagataaccagagaacatttcttaaaagacaagaaaataagtgtcacatatttgataccagtgactgacactcaaactcc

SEQ ID NO: 38734 - DNA, 1096 bp, Macaca Mulatta
  misc_feature (1)...(1096): n = A,T,C or G
ggggatggatgggaagaaaggcagacaagggtggaggtttggggatctcagagtgtggaggaggcaggatgaaatcaaacaagggtagaatcttatctgggagttcacaaaagtagtaatttatatcctttagcatgcctcctttatccttatcaggacctctgcagctggatgaatctctatttttccagtcagtttgaatcttaagcatcaatattatatttgaaacataaaagtgaaattgcctttctgtgacatctttttaactgattactgggggcttaggcaaccagctcctgaatgtctgtttacccttaataaagatcaggattgcacctaactatcctcactaaatagaatagaccttgtagccatctttcataagcaacctgaaggcaaagttggaaccgaatttcacctggaacattgcctgaatttaccccctgggagcgccagaaaaaaaaaactgggatttcccctttagaatgaatggtaccaaagttctaagacatggcaaaataacatttcaaaaattaagccgtttacacccgttagatggcgtctatgttggaaggattccatagcgaccccaaacccagcgcgtgaggaaagctggaaaaactaggagttgatggtgtcttatggaaaaaacacagaagttcctcggggagcagaaaaaacacccttgtccgctataaanatatttgtataacaagcccgtatgtgggtaagtagagatatccatgagtacagtaattactaatcaactctanttatcatcccccaatatagattcatggttgttgttacataaaactcagagaagcggtaaacgataaagaaatagggggcggcgaaagtatggagcccactttgtaaatagaaatgcactcccgacctatatttttgggaagttataacnctgccgaaaaagaaaaaccaataagcataataacacagtctagacacaaccgcgaatgtcgatttttttgagagaaggggacaggagggggcgggaaaatcatttttccaatacccacaagaagtatataaatgtgtcgtaaccgtgggcaaaactggtgtggtatgtactgaa

SEQ ID NO: 38735 - DNA, 609 bp, Macaca Mulatta
  misc_feature (1)...(609): n = A,T,C or G
ggcgatggttggggcctaacctgccgactccgcccaccgggcccttgttctccctgtgaccagcccagcnnnnnnnnnnacgcttgagaaagtggcgaaggagccctacgggggcctcggttggactctgcttcttcggtccctcagcctcggccagcgacggtctcctggcccctggtccgggtcaccttagggggcaggaggaggtgtggtcagtgtgggagtctggaggggccatgcacttccggagaagaccaccgactcgtggctttggtggaggggcgcaggcagatttagttaggctctcccccatccctgacacactggagtcggggcgggagtggggcttgtgaccactccggagagctctgggggcccctgctctgggactccgcacggatagtcactgtctcagagtgcattctccaggggccactctcgtgggggcactgtaggggtcccagggcaggtgggcagcctttctccggggcggcgtgagagccggagagcannnnnnnnnnnnnnnncggctaggggtcacgtctgcgctgaagcagctgcggaaggagagagaaaccgagagaaccggttcccccgccttgacagcgg

SEQ ID NO: 38736 - DNA, 1292 bp, Macaca Mulatta
  misc_feature (1)...(1292): n = A,T,C or G
ggactacagccaattttagtctatcttgtgcccaatacaacaaggatttttaatagaaacaacccacacctcacctgctaggactcagtgttcacaacaggaaggaccatgttgtatactacttgaccagcagcttttttaaagatatttttaagtgcagagttagcctctattcctgtatgtatttgatcattttcagcacctggaacctcatctatcaggtctagaaggaatacagcagatcgaaagctgtgtccatttctcttcttcagtagtacagaaataagtccgattcaccagtacacacagaactgtaccagttcagcctggcaaaagaacagtttctactgtacttaaaatttaccaccgactcaaattgcctcacagaattatttgatataggaggctagttgtcttgcttcacatcagcaggacagttggactctcagactcatgaccactgagtttacttgtattgaaactgtggtttcatctgaagtatgctattggacttgattattatctcattcaaatggattacagacttactgaggacaggacaaacttatctctcatggtgtttttttagaatacttttataaccaaggaagaaaccatgccagctgttaccattcaacttcttaagcagagattaagctttttcatatgtgttcttatcctagacattttcatatctgttcttatcccggacatcagtagtttttaaattgcccagcatccgttccatctcattgtaacaactccctgatgtttcttaaaaccacctcttcctattttcagtctgtggtttggacagtctgacccaaccttgagctttgtgggtggacgtgtaattcagacctcatcaatcagcaaatccatctgaactgtggaggagaagctctctttactgaggtgctttagctttgtaggatgaaaacctcaaaccaacagagcctgccatgtagagaatgaagccagtgcaggggaaagtagagccaaaatatggagagacttgaatcctgatgacaacgtttgtgcccctggatccaaccgtgcctgaagctagtatatcccctggacttttcagttatgtgaaccaataaatacccttttttgcttaagttacttttgagttgggtttctattacttgaaattgaatccagactgataacatctaccaactttgaaacttgacagatccaagtatttattaaactagaggtcatggtccctgaaattactttccaaagtggaagacaaatgaacangaactgagagatatttagaa

SEQ ID NO: 38737 - DNA, 743 bp, Macaca Mulatta
  misc_feature (1)...(743): n = A,T,C or G
ggggggctgctgtggtctgctgccaccaggcctgaagtatgagccattggcagcaagcaaccccactgcctctagtagcaggaccactgcacaattaaaagtacccttaggaaaggctaccctgcttatagccatgactagggccaaagtgtgcacttcccaacctcctgttcatggctgctgccactaaaagccacaccaccctccctaagaacagcacagctactgctgttcccaccaggaatcctgagtaaaggcctgcttagcctggttccatcttcccctacatgacgtaagggacaccataagtggcnnnnnnnnnnnnnnnnnnnnnnnnnnnnngaggcggagtacnnnnnnnnnnnnnnnnnnnnnnnnnnnnnnnnnnnnnnnnnnnnnnnnnnnnnnnnnnntatttcatggaataatagctgaaaacttcccaagtctagcaggagatttacacatccagataataggaagcttagagattcccaaacagattaaattcagaaaagtcttctttgtggcacattatggtcaaactgtcagaaatcaaaagtcaaagagagaattctaaaaatagcaagacagaagtgactagtcacttataagggaaacctcatcagactaacagcatattctcagcagaaatcttacattccaggaagagaatgggggtggatacaattcaaaagtattgnnnnnnnnnnnnnnnnnnnngtccggcaaaaaaaaaaaaa

SEQ ID NO: 38738 - DNA, 788 bp, Macaca Mulatta
  misc_feature (1)...(788): n = A,T,C or G
gggcaacagagtgagactgtatttccnnnnnnnnnnnnnnnnnnnnntaccatccctggttgacccctctccttaaacccttcttaaggttgcttgctttgtttctaatttccttcatggtatctctaggcaggttataagaacaatttcacaaggattttaagggtttattgagggtggaactatgagaaaattggtttgtgttggatcagttctttagaggtaggtcttatatataactgcattgaagtgtacattttaatcctatgaatgggtacacttgagtttatgccttataattggtaacaaaccgggaagtgacagcaacatcctcatcattgtcatggaattcagaagggcttttttggtgcagatttctctaagcatctagaagagcaaaggccaccgaatagcaaccgctactggggaacaactcttctgcagaactttcccaatagcatatttcccctttaccgttctgccttcaagataggtttggtttgtatgagctgtcttctcatcagcattagcattattacagtcattttgcactcagatttcttttctttgatctgttttctaattttagcttcactatatggtatatgtaactttatatatgcatacagtacgtgtatgtatgtgtgtgtttatatacttagtgtaactttttttgccctcaaaagctttttttagatgctgggccaactcgcaaagttacagttttgagcatagtctgatatccacagaactatgcccttacattttcagctntggggatttgccct

SEQ ID NO: 38739 - DNA, 846 bp, Macaca Mulatta
tgcatcatgtactaaagttttgaagcccgtgcaacccaaagccttagtctgtattctttcttctttaaatattaaactgaaggagggtgaaggcctccacttccctaaaatgaggcaccatagttgggataatgatattcagtttatatgcaaatataaacggaatatctttgattattatgagcccctgattaagcaaattgtaattaatcctcccctgaatgtactagtaccagagtttgagaggcgtaactgggttaaaattcattttaataggagcaaccaaaactccagtgcaggagataatgatgctgatggacaaggctctgcttcagcacctttaatggcagtgccggcaagatacggatttaattcacgtcagggaaccagtgacccttctctgtttctggaagaatcaaagattctgcatgctcatgaggttccaaagaaaagaaatttccagctaacatttttaaatcgtgatgttgtcaaaatctctccaaaatcagttagaaataagtttttggaaagtaaaagtaaaaagaaaattcatggaaagaaggtgacaaccagtagtaataagttaggttgtcccaaaaaggtttataaaccaattattctccagcaaaaacccagaaaagcttcagagaaacagtcaatttggattcggaccaaaccaagtgatataattagaaagtatatttcaaaatactctgtttttttacgtcatagatatcagtccaggagggcttttcttggaatgtatctgaaaaagaaaaaatctgttgtcagtaggctaaaggagggaaaagagcagctaaagtgcttttgaattcctcagttcca

SEQ ID NO: 38740 - DNA, 95 bp, Macaca Mulatta
tccaggatcctacgcaccaaaccagtggagtccatgctagagggaactggggccaccacggcacatggaactaagctagcccaggtgctcaccac

SEQ ID NO: 38741 - DNA, 461 bp, Macaca Mulatta
  misc_feature (1)...(461): n = A,T,C or G
nnnnnnnnnnnnnnnnnnnnnnnnnnnnnnnnncnngtatataaattagacttgtaggatgtgaaatgtcaggagtgctgaatttactggctagattgttaaaccctaaattaaatcccaggagactagctgggggatctcctgactgttctgtttatgtaaatggatatttcagataccagactctgacagagacaatttcagtgactgaaaagtttatggaaggcttgttagtaaacttagtatcatttttcaggaaggaaaatccctaatgatttggaacaggactgaaaaagaattaactctaaagggtatataagctttaaatgttaagttgattagaggtcaggtgtgtgtttcctacctctcttgggatagccatgggagggaacctccaggccagctgcccagtggtttttgctgagagagcagcctggatcagcattctggacggtagttcc

SEQ ID NO: 38742 - DNA, 569 bp, Macaca Mulatta
ggaaaggattgatgcctgggctcagctgaactctattcctggccagttcacaggaagtagaggagtacaggttttgacacaagaacagttggccaatactggtgcccaagcctggattaaaaaggatcagttcttaagagcagccccggtaactggaggaatgggagccgttttgatgagaaaaatgggctggagagaaggagaaggattaggaaaaaacaaagaaggcaataaggaacccattctagttgattttaagacagaccgaaaaggtcttgttgcagtaggagaaagagcacaaaagaggtctgggaacttctctgctgcaatgaaagatctgtcaggcaaacatcctgtgtctgctttgatggaaatctgtaataagagaaggtggcaaccacctgaatttctgttggtccatgatagtggccctgatcatcgcaaacattttctttttagggtattgagaaatggaagcccttaccagcccaattgtatgtatttcttgaataggtattgataaatggaagcgcttaccagcccagctttgccagccctaataagaagca

SEQ ID NO: 38743 - DNA, 774 bp, Macaca Mulatta
  misc_feature (1)...(774): n = A,T,C or G
gggacatgagcacatgaagttctttgtgacaaacagagccggttgtatttaacttaataacttgaattatattggtgtataacttttcagaaaaggccgttttgctttggggactgaaaagccagagttgtagtttcaatgtcaatttatttcatcaacactagaaactaatatattaaataaagatgccagaaaaatgtatttcacattacaatatagctttagcgctttcttaggaatgagtagattcatgacacaagattatctgatctagtaatatattctgttcctatatttaatgtgttttagaagcaactaccatttaaggataataaagttgtttcttttggcttcttagttaaatagcttatggcttttattttggaagaacataattacactgtgtatcagccagtgaatgtgtaaaaataagtttacatacttgggaagaagactatctatgtctgtttcttttaaattacacagcatcagaatttgtcttggtgcaaaaagaaattaaccaccgaggagtgcattaatgtccacagtgagcccttggtaatgacttaanggtttttgttatgttatgtccaaaatactttttaaatatgtttcattgtaaattaatcagaataaaatcattcttggtattcccctgccagtcagnatgaatttatgggatcattggccactgcatataccgaaatccgggttaggtttgaacttccaacctccaatttaacttttcctttccggcccggacatagttttaaa

SEQ ID NO: 38744 - DNA, 122 bp, Macaca Mulatta
agttaaaagaatattggcagaggaagggccctggcgttccagcaggagctaacaggaaaaagaaaatcaatggcagtagccctgacaccgccgcttctggtggttaccgctcatctggggat

SEQ ID NO: 38745 - DNA, 383 bp, Macaca Mulatta
ggctcttaacgagttaggccagcacttgaattgtcctgactgctgctagtggcgagaaaagtggtttagctctctgttcacagcacacgctcacatatgggaacatagctctctgttcacaacacacgctcacatacgagaacatagctctctgttcacagcacacgctcacatacgggaacatagctctctgttcacagcacacgctcacatatgggaacatagctctctgttcacaacacacgctcacatacgggaacatagctctctgttcacagcacacgcttacatacgggaacatagctctctgttcacaacacacgctcacatacgagaacatagctctctgttcacagcacacgcttacatacgggaacatagct

SEQ ID NO: 38746 - DNA, 233 bp, Macaca Mulatta
gcaggattcattgtcggaaggaaatgcaaactggtatgggatatctgttctggctccttcggagacatctatctggcgaccagcatcactaacggtgaagaagtggcagtgaagctagaatctcacaatgccaggcatccccagttgctgtacgagagcaggctctataagattcttcaaggtggggttggcatccgccacataacggtggtatggtcaagaaaaagactata

SEQ ID NO: 38747 - DNA, 723 bp, Macaca Mulatta
  misc_feature (1)...(723): n = A,T,C or G
aggtaattttaactagttcaaagcaaattgacaaatcctctatgtacaagttnttagaaccatggcttggcctgggacttcttacaannnnnnnnnnnnnnnnnnnnnnnnnnnnnnnnnnnnnnnnnnnnnnnnnnnnnnnnnnnnnnnnnnnnnnnnnnnnnnnnnnnnnnnnnnnnnnnnnnnnnnnnnnnnnnnnnnnnnnnnnnnnnnnnnnnnnnnnnnnnnnnnnnnnnnnnnnnnnnnnnnnnnnnnnnnnnnnnnnnnnnnnnnnnnnnnnnnnnnnnnnnnnnnnnnnnnnnnnnnnnnnnnnnnnnnnnnnnnnnnnnnnnnnnnnnnnnnnnnnnnnnnnnnnnnnnnnnnnnnnnnnnnnnnnnnnnnnnnnnnnnnnnnnnnnnnnnnnnnnnnnnnnnnnnnnnnnnnnnnnnnnnnnnnnnnnnnnnnnnnnnnnnnnnnnnnnnnnnnnnnnnnnnnnnnnnnnnnnnnnnnnnnnnnnnnnnnnnnnnnnnnnnnnnnnnnnnnnnnnnnnnnnnnnnnnnnnnnnnnnnnnnnnnnnnnnnnnnnnnnnnnnnnnnnnnnnnnnnnnnnnnnnnnnnnnnnnnnnnnnnnngccccctccaaaaataaacgcagggcctttcttgacttgcttttaagtgtgactgacgacgaagggaacaggctaagtcatgaagatattcgagaagaagttgacaccttcat

SEQ ID NO: 38748 - DNA, 628 bp, Macaca Mulatta
cgcgtaggcaccatgactcctgtgaggacgcagcactccctggcaggtcagacctatgccgtgcccctcatccagcccgacctgcggcgagaggaggccgtccagcagatggcggatgccctgcagcacctgcagaaggtctccggagacatcttcagccggatctcccagcgggtagagcagagccggaaccaggtgcaggccattggagagaaggtctccttggcccaggccaagattgagaagatcaagggcagcaagaaggccatcaaggtgttctccagtgccaagtaccctgctccagagcgcctgcaggaatatggctccatcttcacaggcgcccaggaccctggcccgcagagacgcccccgccacaggatccagagcaagcaccgccccctggacgagcgagccctgcaggagaagctgaagtactttcctgtgtgtgtgagcgccaagctggagcctgaggacgacgccgaagagggacttgggggtcttcccagcaacatcagctctgtcagctccttgctgctcttcaacaccaccgagaacctgtacaagaagtacgtcttcctggaccccctggctggtgctgtaacaaagacccatgtgatgctgggggcgg

SEQ ID NO: 38749 - DNA, 595 bp, Macaca Mulatta
gggggggtacctggctacgaggggtgccccccctcctagcgggtttggactggcgcgcccggctctgcccataccatggagtattttgaagcagaaacaaaatcttccctaagctcggagcaaaagcctttttggtctacatggaggaaaaacgactgcgagctctagttcatggagcctgggctgcccctgctaatagtcaggccattgctcatcctgttactactgctaagatccatctctaccaaaattctggccaagtttgtataatcaaacagcatcctatcactgacagagagtttgtgtttcaacgaacctcaacacgtagttacttatagctcccgagctagactgcttgtcttacccccgtctgtatgatatcacccagtcacccatacgttgatctagggtctgcttgtttcctgattccgtgtattaaaatcttcttgattggaattggaacattttgtaaaagttccatgagaatgggactgtatcaacgagaataattatctccttccacttttgtagtagagaaatttcttcattttcaaatctataggtatattctccggattctttgttctaaatctaa

SEQ ID NO: 38750 - DNA, 534 bp, Macaca Mulatta
agtatagccggaggttccatatggggagctgatctcgctatttagcaacgtctgtttggctcacattcatcagatcgactctatgagctagcagccagtgtgaggggagcaccagcagacagagcatatgtttggtggtcattagaccacggcgcagttggtgggcaaacattcggcctccacgacacatgtttccaaaagcaccctggccagagcggtgagtcccaccacctcgaactctgggaattcgagccacagctctgccagtaccccaagactcagcactggtctgatgacctgctaattcactgacagcgtagggctgtctgttgtttttgcgcaggttggtgtgaacaaagttcacaatatctggtcgaataggagccttgaatacagcaggcaaagtgacatttttgccagatgactcccccttttcggagtacaccgatatcagtgggcgagcacacgccatggcggagagaggagaaaaccacgttcctctcaccccggatgctgctacaggaaaaaaagccc

SEQ ID NO: 38751 - DNA, 769 bp, Macaca Mulatta
  misc_feature (1)...(769): n = A,T,C or G
ggnnnnnnnnnnnnnnnnnnnnnnnnnnnnnnnnnnnnnnnnnnnnnnnnnnnnnnnnnnnnnnnnnnnnnnnnnnnnnnnnnnnnnnnnnnnnnnnnnnnnnnnnnnnnnnnnnnnnnnnnnnnnnnnnnnnnnnnnnnnnnnnnnnnnnnnnnnnnnnnnnnnnnnnnnnnnnnnnnnnnnnnnnnnnnnnnnnnnnnnnnnnnnnnnnnnnnnnnnnnnnnnnnnnnnnnnnnnnnnnnnnnnnnnnnnnnnnnnnnnnnnnnnnnnnnnnnnnnnnnnnnnnnnnnnnnnnnnnnnnnnnnnnnnnnnnnnnnnnnnnnnnnnnnnnnnnnnnnnnnnnnnnnnnnnnnnnnnnnnnnnnnnnnnnnnnnnnnnnnnnnnnnnnnnnnnnnnnnnnnnnnnnnnnnnnnnnnnnnnnnnnnnnnnnnnnnnnnnnnnnnnnnnnnnnnnnnnnnnnnnnnnnnnnnnnnnnnnnnnnnnnnnnnnnnnnnnnnnnnnnnnnnnnnnnnnnnnnnnnnnnnnnnnnnnnnnnnnnnnnnnnnnnnnnnnnnnnnnnnnnnnnnnnnnnnnnnnnnnnnnnnnnnnnnnnnnnnnnnnnnnnnnnnnnnnnnnnnnnnnnnnnnnnnnnnnnnnnnnnnnnnnnnnnnnnnnnnnnnnnnnnnnnnnnnnnnnnnnnnnnnnnnnnnnngattaatccggatgccctacaactacaatgaaataaccctattcatcttataggggcttcctttcattctcaccttac

SEQ ID NO: 38752 - DNA, 703 bp, Macaca Mulatta
  misc_feature (1)...(703): n = A,T,C or G
cgaggctgcagtgagccatgattgccactgcactgcagccagggcaaaagaagnnnnnnnnnnnnnnnnnnnnnnnnnnnntgcttttcagaaatgctttttcacttaaaaatgtattttagacactttcgcctattagtaatatagatttcttttttttaatggctgcactttttatttacccacttctttattcatagattaagttttcagctgctttttaaaaaaattgaacaaacaatactggaattaatactttgtggaaatatctttgtatatttgcatgaatgcatctgtagaatacatctttgcagatgaaattgcttagtcaaaagaatggaaacaacagacatcagagcctacttgaaggtggaaaaagggaagagggtgaggatggaaaaactacctgtcgggtactatacttattacttaggtgatgaagtaatttatacaccaaacccccatgacacacaatttacctgtgtaacagacctgcacgtgtacccctgaacgtaaaatnnnnnnnnnnnnnnnnnnnnnnnnnnnnnngaactcactaaaatgtttgatatgctactaaactgcagtagggtgcgtgagccaatatatactcctaccaatagtatcttttagagaacttttacattgtagatgctgccccagaaaagttaatgtttgcgaacttaaacattgctaaatgctt

SEQ ID NO: 38753 - DNA, 819 bp, Macaca Mulatta
ctccacaagcaccaagagtcgggctgctcagggggcccctgctgaccctagaggctcccacttcctctccatacctgacaccccaccccgcgccaaccaacaacctccccaagctccagaaggaaggaggtcaccatgtcctcatgccacagaattccctcttgagcgcccccatttctggatgcatcagtcgcacgagactttgatgaaaaccattttctggttctgtttcctctgcctggatccctcagtggactctgaaagaggaccttccgtggccatgtctgtggatggctggcgggagggcagctggcagccccagctcggaggcattcttgaactggcttttctgcatgtgtttgtgtattcagaactgtttggatgcagctgtttcagctacaggacaagagctgacagactgactgggaagtatccaccccagtcaggggaccctccccactgcctcctcgaaggaggcctcaggccaccctccaccaggtgtgactatgcaataatccacccccaggttcagccacggggccttccaaggcggtgactgacaccaggacatgtctagagcctgagatgccctgagcccggacagctatttcagcttcctgtttggcgcggttggcacctgtttcccaggcaatttaacaatgtctcaaaagggactgtgagtaatggttgtcacgtgtcggtggcctaagtggggtgttctggtctgcccgatgtatctcccaaaactcttttgggagcccaacaggtaggcctgggaggaagatgtttacatttttaaaggtacataggtacttatat

SEQ ID NO: 38754 - DNA, 180 bp, Macaca Mulatta
atggttctcagtgagtcaccaaaggcctttggcttcaactcactaatggctggaacaagtgccagtcttggtcaaccatccaggattttcatcacagcaaatcaaaatctccaatttttcaaactaattgtaggtaggagagagaggataactccagactgtcttataaaatgatctaga

SEQ ID NO: 38755 - DNA, 799 bp, Macaca Mulatta
  misc_feature (1)...(799): n = A,T,C or G
ggaaagagaaagaagctttctgagaaacttctttgtgttctgtgaaatcatctcacagagtaacagctttcctctcaagaagcctttcgctaagacagttcttgtggaattggcaaagtgatgtttggaagcccatagagggctaaggtgaaaaaggaaatatcctcagatgaaacctggaaagaagttttctgagaaactgctctgtgatatgtgacctccattcacagagttacatctgtatttcgtggatctctttgctagccttatttctgtggaatctgagaacagatatttcggatccctttgaagtctatagggctaaaggaaatatcctccgataacaaagagaaagaagctttctgagaaacttctttgttttctgtgaaatcatctcacggagttacagctttcccctgaagaagcctttcgctaagacagttcttgtggaattggcaaagtgatatttggaagcccttagagggctatggtgaaaaaggatatatcctcagatgaaatctggaaagaagctttctgagaaactgttctgtgatgtgtgacttccactcacagagttacatctgtatttcctggatctctttgctagccttattcctgtgaaatctgagaacagatatttcggatccctttgaagactattgnggccaaagaaatatcctccgataacaaagagaaagaagctttctgagaaaacttcttttgtgttctgtgaagtcatctcacagagttacaggctttcccctcaaagaagcttttcgctaagacggttcttggttaa

SEQ ID NO: 38756 - DNA, 436 bp, Macaca Mulatta
  misc_feature (1)...(436): n = A,T,C or G
gggtaacttgatatgctaaaaaatctgacctgtcacttcacttcactctgaccagtaattgcagattgtcttcaccatcctaacccatgactgcattaggattttatgacttaccaacttgaaaatatgtggcattggtagagtatcccactttactcctcactgtccaattgtgtaaagattaagatacatactaatgttgatgatgcttttacacctcaacttgctattttaaaaggttatatgaacccctcccacttttaaggatattcccttttactgattttcctagctaaaattatatagccatctttctaaatattttatttaaatctgatctaggacttgccttattttatcatttttctttaataaactccaataaactttgtttattcacnnnnnnnnnnnnnnnnnnnnnnnnnnnnnncatgtc

SEQ ID NO: 38757 - DNA, 644 bp, Macaca Mulatta
  misc_feature (1)...(644): n = A,T,C or G
ggggcatttttttctctctcctaacttaatcccgaattggataatttctcttcatctccactgtctgtcacttctgtgccatcactgtcatctctagaccactctgctcttgagagattgatggaatcattatgcaaactaaaacagaaagaatgttttatctatcaaattgtatttctttgtcaatagtgttgggcacagcaggttcatttactgcaggtaagggtgtaaattgctagaaacttgctgaatggcagtttggtaatatcaaacaaaaagcttaagtttgtgtccttaaatgccttacttcaatactcaagacatatggcctcaagaaaaaattatagaagcatgccaagattttgttaacaaagatataatcattgcagggtagaatttagaaatttaagaagatctttcaggcgcctgcaacaagaaaggagtcaaaacagatgtacagtcttaattagtaaaattctcttcctgcccggggatcacacctctaggactgtgagtgacacatttccattgtttataaattatccagcataagtaagatattttgttagagcagcctgaacgaaactagacactcntagcagggaactcacaaaaatatttggtatgaaaaccatatggcgtgg

SEQ ID NO: 38758 - DNA, 793 bp, Macaca Mulatta
  misc_feature (1)...(793): n = A,T,C or G
gggcttctctcgccaggcgtcctcgtggaagtgacatcgtctttaaaccctgcgtggcaatccctgacgcaccgccgtgatgcccagggaagacagggcgacctggaagtccaactacttccttaagatcatccaactattggatgattatccgaaatgtttcatcgtgggagcggacaatgtgggctccaagcagatgcagcagatccgcatgtcgcttcgagggaaggccgtggtgctgatgggcaagaacaccatgatgcgcaaggccatccgagggcacctggaanacaacccagctctggagaaactgctgcctcatatccggggggaatgtggggctttgtgttcaccaaagaggatctcactgagatcagggacatgttgctggccagtaaggtggcagctgctgcccgtgttggtggcaattgctccatgtgaagtcacttgtggcagccgaaaacacttggactcggggcccgaaaaaaccttcctttttccaggcttttgggggttcacccctaaaatctcccggggcccccattgaagtcccgggagtgatggggcacctggattcaaaactggggaacaaaaaaggggaagccgaccggagggcccgccgtggggaggnatgggtacaaaggtctccccccgtcgccctttgggggccggagccaccgcaagaggggggtttttagaaaagggaggaaggcgtccaggaagtcgcgagaaagggctgttgcccaccaggcggggggaaaggctctcgggttgacgcgcgtgtccgctgaaa

SEQ ID NO: 38759 - DNA, 714 bp, Macaca Mulatta
  misc_feature (1)...(714): n = A,T,C or G
catatatgcagaacccatgattcatctcccttaggccctgagcaacttcatgaggagtcagaattattctagaaatgagatagctctgtgtcaacttcccccagttgtttttgaagataatacacatctttctactatgaaggaggagggaccaggcataggatttactttcattcacttttttactcgttcattaatttactcatttcttaagtgtactttggcaggggctgacaaaatatagagttgtgctgttcagtatagtaaccatagttgctaggcaatggggctactgagcactggaaatgtggctagtctagtctgaatcaagatcagctgtaagcataaaaatacacattgaatttcaaagattcattacccccaacaaggattgtagaatattttgttaataactttgttgattacatgttaaatgataatattttagatatactgagctaaatatattaaaatctatgacnnnnnnnnnnnnnnnnnnnnnnnnnnnnnggagtctagnnnnnnnnnnnnnnnnnnnnnnnnnnnnnnnnnnnnnnnnnnnnnnnnnnnnnnnnnnnnnnnnnnnnnnnnnnnnnnnntnnnnnnnnnnnnnnncnnnnnnnnnnnnnnnnngcccggcaccatgnnnnnnnnnnnnnnnnnnnnnnnnnnnntacggagtttcactgtgtttaccaggatggtctcgatctt

SEQ ID NO: 38760 - DNA, 794 bp, Macaca Mulatta
  misc_feature (1)...(794): n = A,T,C or G
ggggaggcggaggttgcagtgagtcgagattgtgnnnnnnnnnnnnnannnnnnnnnnnnnnnaagaccnnnnnnnnnnnnnnnnnnnnnnnnnnnngnnnnnnnnnnnnnnnnnnnnnnntatctgctagtgtattcataaaaccagtgaggaaaaacaaccttacagaagtcaaataaatagttaaaatctctcatttgtaaatagaatacaagggattcaaaacctgacgtattttatctgagaatcctaaagcccaggccctttccacaagtgaatgaatgaatgaataaataaataaatgaatattataaaaattatgtggtcatgtttattttgttccactttgacacaggaacacgtaaaaaaactaccattgactttcttcacagaattagaaaaaaactagtttaaatttcatctgaaaccaaaaaagagccaccatagccaagacattcctaagcaaaaagaacaaagctggaggcatcatgctacctgacttcaaactatactacaaggctacagaaaccagaacagcatggtactggtaccaaaacagacatacagactaatggaacagaacagagtcctgagaaaatatgccacacatctacaactatctgatctttgaccaacctgacaaaaacagaaatggggaaaggattccctatttaataagtgatgttgggaaaactgggtagccatatgcagaaaactgaaaactgaaaccccctcccttacaaccttattcaccttcaggatgggattaaggactttaaacctaaggaccctc

SEQ ID NO: 38761 - DNA, 1148 bp, Macaca Mulatta
agcctggcgtgtgttgggttcttcttggtccagagggcctgtccatacacgggtggtcaggacaagacctccctgtctgcccagcccagcgctctggtgcctcagggaggacacgtaactcttcggtgttactatcgtcgtgggtttaacaactttaccaacttcactctgtacaaagatgacagaagccacgttcccgtcttccacagcagaatattccaccagagcttcctcatgggccctgtgaccccggcacacgcagggacctacagatgtcggggttcatacccgcactcccccactgagtggtcggcactcagtgaccccctggcgatcagggtcacagggacctacagatgctacggttctgtgactcactctccctatgtgttgtcagctcccagtgacaccctggacatcgtgatcacaggtctatatgagaaaccttctctctcagcccagccgggacccacggttcacgcaggagagaacgtgatcttgtcctgcagctcccggcgctcctttgacatgtaccatctatccagggagggggagactcgtgaacttagtctctctgcagtgccaagcgtcaatggaacattccaggccgacttccctctgggccctgccacccacggaggaacctacagatgcttcggttctttccgtaccgcaccctacaagtggtcacacccgagtgacccactacccgtttctgtcacaggaaacccttcacgtagttggccttcacccactgaaccaagctccaaaaccagtatccccagacacctgcatgttctgattgggacctcagtggtcatgatcctcttcaccatcttcttctttctcctgcatcgctggtgctccaacaaaaagaatgctgctgtaaaagaccaagagcctgcgggggacagaacagtgaacagggaggactctgaagaacaagaccctgaggaggtgacatacgcacagttggatcaccgcgttctcacacagggaaaaaccactcgcccttctcagaggcgcaagacacccccaacagataccagcatgtacatggagcttccaaatgcagaatccagatcgaaagttgtctcctgcccatgagcaccaccgtcaggccttgaaggggtcttctagggagacaa

SEQ ID NO: 38762 - DNA, 803 bp, Macaca Mulatta
ggctagcagtatacaagattaacaagctttcttctcccttattctctcccaaggtttgctcagttatgcctaagagcctccatctccacctaaactcagaaggcccatgtgtttacatctgtctagacgttccccagagtcatactgcctattgacttctgcttttgagtattaccaaggaaacttgaagtgagaaactgaacaggtgatttacaacttgatcttcttccaatgttcacattttagtggtgtaattcagatactttaggggtattttggatgcctttcactctttatcacctgtcttctattttactacctaaaagtatcctctttaaattgttattataatcacctctcttttggactattattatacaatagcctcctcattggtctcccagcatcccatggcctcttttaacttgctgtctgatttttatagttttatatcttacatttaagtctttaatccatcttgagttaatttttttatatggtgataggtaaatgtccagctttgttcttttgcatatgactagccaattatcccagtaccatctattgaaaagggagtcctttccccattgcttattttcctcaactttgtccaagatcagatgggttgtaagggggggaactttagaagaaaatcttgaaaaatacccttcctggaacttgatcttgggcaagaacttatgacctaaatactccaaaagcaattaccacccaaaaataaaaattgaacaagaaggggaccctatttaaaccaaaaaaacctttctaaaaaaggcaaaagaaaa

SEQ ID NO: 38763 - DNA, 666 bp, Macaca Mulatta
  misc_feature (1)...(666): n = A,T,C or G
gggtctaggttactctttggtaatatctatgagtaaagattatgcttgacaaaaataatttaataaatgttttagatactttactagtatgtccaaattanattttccccattanaagttagcatttgggcttctacttnatacattataaacattgactttgcaattntattatgtactggaaagatgcaaaacctatttcctttagacttttactagtttttataagccttactnttttactgggtctaaatgagggtttggcttaaatggggattctgctatggtcagaaataaaatatttctaaaattgggctggggatttggggggccccggcacttaaccccggggggggtttttgggatttttaaggggaaaacgggggctttcccccttgtttaccacggttggggttcaaaaacacttttgggccgggtgtggggaaaaaacccccttttcctctaaaaaaaccccccatttttcccccannnnnnnnnnnnnnnnnnnnnnngtatacccccctatttctcccgggggggttttttgccccgaggaaaaattcccccnnnnnnnnnnnnnnnnnnnnnnnnntgtttctcgngncggcgggggcagaaccgagcccccccccccacgacgaccccgccggaggggggggcggggat

SEQ ID NO: 38764 - DNA, 816 bp, Macaca Mulatta
ggtctgtgcctttgcattctcaccagttttatgtttctgtctgtacctacttgaaggcaaaaccttcaaagacacagatatataaatataaaattggtatcactggccctaaatgagtcgaagaaaatacttgtttagctatcaagctcttcattcagactatggtttatggtgaccaacattgctagagtgattaatggccaaaatctctctgtactaggcaaacaaaggtacaggtgactttcttgctgaactgggacccagtagagcttggggccagttggtcatgtttgttgcatgttcattttgcacagatgctcaatcctccttggagcaatcagtagggaacagtagagggggctaatatccagtgaacccttaaaaatacagtaggttactcaaggaaagaaagtgacttcagtcctatttttctaactctaccaaataaagtacaaaggccaggtgaaatgggggaaccatgagatgggctaacccagatgtatatgcggctctgtggttatgaggtgtgttgtatctttcttgacttttattggaaaggtaagtatttatgaattcttgtcaggagaaactccacccagatcctcgattggagtaagattatatgccaacttctgacagggggtgcatgtcaagtgtgaacctgtgccaaggcctgcaccttggtcttggccccccatcagaatgtgaattaacttctctaacggacatccctccattcaacattcaaccctcccttgtaaaaaacttcccccttccctttccctaggctccctgtgcttgaaaagggaacccaac

SEQ ID NO: 38765 - DNA, 246 bp, Macaca Mulatta
taagcaggtgttgctaggaattcacttatatacaagaaaactatttttgtatacatacttgcatatgtatgtacgtatgggtagaaatgatacatgataaatgttagtagttaatcgaggaggaaaagagatttagggaaggaagcagtaaatgagaacttttattctatttactcctgcacgtttaaatattgtttacagtgagtatatcaacatgtaagtgttaaaagacaataagctactagt

SEQ ID NO: 38766 - DNA, 654 bp, Macaca Mulatta
  misc_feature (1)...(654): n = A,T,C or G
ttgtgatatttgacangacatccttgcatttaagatgacacttttaaaaataaattctctcctaatgatgacttgagccctgccactcaatgggagaatcagcagaacctgtaggatcttatttggaattgacattctctattgtaattttgttcctgtttatttttaaattttctttttgtttcactggaaaggaaagatgatgctcagttttaaaagttaaaagtgtacaagttgctttgttacaataaaactaaatgtgtacacaaaggatttgatgcttttctctcagcataggtatgcttactatgaccttccaggtttgacttgtataacatcactgtcaaactttgtcaccctaacttcgtattttttgatacgcactttgcaggatgacctcagggctatgtggattgagtaatgggattgaatcaatgtattaatatctccatagctgggaaacgtgggttcaatttaccattggtttctgaaagtgtcacatcatttgggataccagattgctcagtacttttcctgggtatattgtgcccttgatttttatctccaagtggcagtttttaaaattggccttttacctggatataaagtaatagtgcctgccaccagcatccaacagacctggtgctctaatgc

SEQ ID NO: 38767 - DNA, 95 bp, Macaca Mulatta
atgcagggagacagggcacagtgagatcgtgaacgtccacagcaaacacagtgagtcatccatttgtgtggtttgttataaaataattacagctg

SEQ ID NO: 38768 - DNA, 638 bp, Macaca Mulatta
ctggttttcaaatgtggatcacatcacggcatacctccgccacgcgtttaacctgaaaactcccctttcagtaattaaatacactttattcacgggtcattatgatgtgatttatgacatatgtgtaattgtcagaattactgtgggtaattaaaatatgaagtgaatgctgccagaggctttagtccctctcaatgtcctcattaaaaatcaggagctgaccaaattataaatagactggtttgcacaagttcccagcaaaacctaattatgaaacttatccttattctatcagaactcactccattagtcatgcaaattctgaaaatgattaagttattttatgtgccggaattgtggaattaataataaagaggtgggtagcagtaattagccattactatgaaacttcattatctcaggtcattctgggtcaaagttgcatgtcttcccaaccccacatccaacacactgaagatgcatccctacctttaagagagtttaatacatgatttaatggttttagtgaatttatgataactttttaaaatgaaagctaagctaggagaaggaagaggatttatgaactctgtatgaggtagtattttgcaactgattggacacagatatttggcaat

SEQ ID NO: 38769 - DNA, 612 bp, Macaca Mulatta
tggctaaccactggacatctgcccacatagtgaaaacatgcaccaattttacctattaccatggtagtatcatctgccaaaatttcaaggcattcatttgattctttgaacaactcttcaccatggtgtgtacatgaattttcatatgtgttacttgactagaagtataaatggtttactataaatatccaaaaaccttaagatttgctcataggaaatgaatattatgatgaatcctgggctctagagtcagacttgcttggatttaaattcttgctccaacacttactgtttttgtaaccttgaacaattttacttaatctctctgtgtctcagtttcgtcatctgtaaattagggatgataatactgcctacctcacaggatttttatgaggattaaataaatgtaaggttcttagaacactgtctgtcccagaatagggagcaataaatagaagactgtattattattctgttaccttggagtgtaaatactgcatttaagtgaatgaaaaatttgctttgaccagataaggaaataatagctattatttatcaagtgccaactgtatgctaggtactgtacttagataatctgtgtataatagtgtt

SEQ ID NO: 38770 - DNA, 720 bp, Macaca Mulatta
  misc_feature (1)...(720): n = A,T,C or G
gggaaaccaagcaagaagcagttcttgaagaagactacaatgaaaatgctaaaaatggagaagccaaaattacagaggcaccagcttctgaaaaagaaattgtggaagtaaaagaagaaaatattgaagatgccacagaaaagggaggagaaaagaaagaagcagtggcagcagaagtaaaaaatgaaaaagaagatcagaaagaagatgaagaagataaaaacaaagaagagaaaggggaagctggaaaagaagacaaggatgaaaaagggaaagaagatggaaaagaggataacaatggaaatgagaaaggaaaagatggaaaagaggaagatgcaaaagagaaagaagatggaaaaaaaaggtgaagacggaaaaggaaatggagaagatggaaaagagaaaggagaaggtgaaaaagaggaagaagatagaaaagaaacaggagatggaaaaacgaatgaagatggaaaagagaagggagataaaaaggaggagaaagatgtaaaagtcaaagaagatgannaagagagagaagatggaaaagaagatgaaggtggaaatgaggaagaagctggnnnnnnnnnnnnnnntnnnnnnnnnnnnnnnnnnnnnnnnnnnnnnnnnnncgagatcaaaagaagaagatggganaaatagaggaagccacagagtattgtttaaaaactggccctatatagttttcataattttggtaaa

SEQ ID NO: 38771 - DNA, 383 bp, Macaca Mulatta
  misc_feature (1)...(383): n = A,T,C or G
tctggtgagcacagggtgacttctgtctacccagcgggtcctcagtgcatacggggagctgtgacactcgtggaccacattcctgcatttctgtnnnnnnnnnnnnnnnnnnnnnnnnnnnnnnnnnnnnnnnnnnnnnnnnnnnnnnnnnnnnnnnnnnnnnnnnnnnnnnnnnnnnnnnnnnnnnnnnnnnnnnnnnnnnnnnnnnnnnnnnnnnnnnnnnnnnnnnnnnnnnnnnnnnnnnnnccaggtgcacctcctggcccagacctacagggcccaggtaaaaaaggatggggcccagctgatgaacatggcactggccctgcatgtcccaccacccacatcgtggagcactgtgactctgtgtctttctgcctctc

SEQ ID NO: 38772 - DNA, 764 bp, Macaca Mulatta
  misc_feature (1)...(764): n = A,T,C or G
ggtatttaatcctataaattttgagaactactagtatcataaaggttattagactccattctttgttagagaaatttaacgaatgcttactaaatatcagacctagaccccaaaatcataactctgacaactcctaataatttcatatgctagaggaacttaaaaccaataggtctaagactcttttctttccacctctcccaaactgcttttaccttttatttgcgtatttctggacctcgtattattagtagttattgctcagaagtcctcattctctttagtggaaaattgtttttataaaacataatcagaactttgtcagtatatagaacttggaatgatttannnnnnnnnnnnnnnnnnttatgagatcatgctggtatttccatttcatattactatcctactatcctagagtcttagcatttctattttataattatatctctgtttttatacattatgaattatggtttctaataatatttatatacctgtaattacttatttactttattctcaacatatacagaacattttcaaaataataatacccatattgtaactggtaataagtctcctgaatgcatttgtaagttttttatttgcctttggaatacattccattaagtatgaaaacccaaatcagtgttctaaaagcactcgtgcctttttaccatgtgacgacccctganaagttgccatctatgaatcgaaaacagggccctccaccagacatcaaaatcttgctggagccctgc

SEQ ID NO: 38773 - DNA, 800 bp, Macaca Mulatta
  misc_feature (1)...(800): n = A,T,C or G
gggcaggcacagtgctcaagcactgtagtctcagaactttgggagggtgagttgggaggatcacttgagttcaggagtttaagaccagcgtggacaatacagtgaaaccctgcctctgcaaaaagtacaaaagtttatctgggcatggtggcacatgtnnnnnnnnnnnnnnnnnnnagaggctcaggttggaggacagacagcttgagctcgtgagatggaggttgcagttgagccatgatcgcatgatcacagcactgcactccagcctgcgcaacagagccaggccggnnnnnnnnnnnnnnnnnnnnnnnnnnnnnccagactgcttgtattcaagtaccagctttcacatttgatacctatgtgacctttgaccttaggaggttaccttatctccaggtgccttagtttcataatctgtaagatgtggataaaaatagtttttgttgtggtagtttcatgagaattaaatgtgttaacaaatgtaaatacttataatagtgcctagcatataggaaaccctatgcagaccctagatacaccattctgtgtccatgcctgcatttgtttccttttttgttttcctggccaacaaactgacaaatggttttttccccactttcccccttttccccaaagtttcaaaactccccaggtccatttgggtattctcccgggtttccttttccctttcttaaaaaacccaaacctaacatccatgctatggcctggcacttcccgaaaaaaacggggcatttcggggggggggtaaaggaagttctcttcccgaagaaccg

SEQ ID NO: 38774 - DNA, 943 bp, Macaca Mulatta
  misc_feature (1)...(943): n = A,T,C or G
acagggatagcggcagagctggcagcggacggtccttgccttggcctacggcaggcgccccccgggggcgggaagctnnnnnnnnnnnnnnnnnnnnncacagcatggaaccacaggttactctaaatgtgacttttaaaaatgaaattcaaagctttctggtttctgatccagaaaatacaacttgggctgatattgaggctatggtgagtgttactttattttgtttctccttggtttaagcgtggttattttttccaaaggtagctatttttagtagtgttgtttcatagctgtaaagtctgtcatagttaccatttctgggccttttggaaaattgcttttgataggagttcagtattcatatatgagatgtgccccaataaagggaaccaacaaataagtttccttttgaacattttagaaagggaaggtaaaattgtttttagtgagataggatttagaaaaccttttaattttagaaacagtatgaggaatgaattgctgtgggctccaccccaaccaggtcccaaggaaatgttctcttgcgtgagtgaggatataacttgtgttttgcnnaggatataacttgtgttttgcaagaacctatcgattgtttttattgctgggtcagaggttgagtatctcaaagttgagcaggaaaaactttcatacctgcttagacagcagttcatctgttctgtttttttgctaaggcttttcctcctgttggtttgccctttgtactcttctgtttttgatcagtttgcagtggtgaatgttttacttcctgtgttgatgtgtttctctactgaaagagtttttccctttggtaaaactctacgtttacctggttatatatctgatggtaactaaaaagggaaagaaatggtagatcttgaaagatgatctaaagtagttgtctgccttccagcaaatacct

SEQ ID NO: 38775 - DNA, 699 bp, Macaca Mulatta
  misc_feature (1)...(699): n = A,T,C or G
agaggggcgggtgaatcactgaggtcaggngttcaagaccagcctggacagcatggtggnnnnnnnnnnnnnnnnnnnctacaaaaaagttaacgaagcatggtggcgcacgcctgtcnnnnnnnnnnnnnnnnnnnnnnnnnnnnnnnnnnnnnnnnnntctgaaaggtggagattgcagttaggcaggatcnnnnnnnnnnnnnnnnnnnnnnnnnnnnnagggagactctgnnnnnnnnnnnnnnnnnnnnnnnnnnngcttggaagaaatttgctcccaattgactgcaatttaatagccatttccaggcaatggtgggtgataaaaagtgttgtcatagggatgtcctctaggggaaaggttgctagatttagcaaataaaaatgcaggatgcctgattaaattcaaatgtcagagaaacaacaaatgatttttttagtataagtatatcccaggctgtatttaggatatgctaaaaaagtattcactgtttctctgacatttgagtttaactaggcttcctacatatatgttttgcagacagggtctcgnnnnnnnnnnnnnnnnnnnnnntaatgaggtgatgtgccaccacgtctggctaattaannnnnnnnnnnnnnnnnncgcactnnnnnnnnnnnnnnnnnnnnnnnnnnnnnnnnnngaggggggggccggtacccaattcggcc

SEQ ID NO: 38776 - DNA, 139 bp, Macaca Mulatta
ccggcccgagcccagggtccctgcttgggccgcagaaagcacttaaccaggccccaagccttccagggaaaccaaggcctcgaccagacaatcttgagggaaggaaaagccagactttgggtttgttttttgggggaat

SEQ ID NO: 38777 - DNA, 800 bp, Macaca Mulatta
  misc_feature (1)...(800): n = A,T,C or G
tggaaagcacaccgtgggatatgcgtttgtccactcaactgttttatcacaaaatgtcgtaaacacgggagatgaaagctgaactctcgacacccagctacaaacccacaatggccctaaaaatctggggtatcattggtgtgggctgccatggaggaattttnnnnnnnnnnnnnnnnnnnnnnngttgctctgtttacaaatcaggagagcccccgtttttatatgctaggaaggtccttgcgatagaccgaagaggtgtgaaaacgggagagtggaaggcccgagccctgtctctcaggaccacggcagcctggcccgaacacagttctgcttcccgtccagagcaaggtttcctggcagattcctgccagactctgaacggagctccccatgaccctataaaaggggctgtttgtccccctcccaccctcctgagctcttcctccctcccattgagggcacgtggccactggtaccacatgttggagcggccgcccccgagcccgggaatgccctaacaacacccacgccggtgttgctgggagctgacattcaagaaaagtgcattaaaaattccttgaggaggcatatactttcgagagccgtccatgaaaagtgcattcacagagaacgtgctcctttgtagtaagaggaaagaacaggtttcccagttccccagaatgtcagggtcacaatgaggaacgggtgggcgcttagggtcaagactggtgtgtgcttggaccggaagcttctctccaagtgacctccccagcatccctcctgtgccagggctcata

SEQ ID NO: 38778 - DNA, 782 bp, Macaca Mulatta
ccgggtatggcttaatatgctttcggagttcatttctcaaaattaaaatctggtcacatgagcttcagtttgtcttctggtttaaaaaataaaaaggtttctcttaacagtatttccagtgacaatgcaaggtaagtatatcaaaggaaatcaacaactgtgcttgggggctttttgttatgggatattgatttctttttcttgttttttttccataacattgtctgctgcaatttaaataaaaaattacgacattttaagatatttcgtagacagaccaaacaaaaatatgtttttattttaaagtgaatgtttttctcttcagctgatctaaaaatgaaagcaaaatatctaatgtagaaatattttgataatatttttacagtgagctttcccatgtttttatgtcttaattttctttgctgcgtttatgtaggttgcacaagaacttttactcacttgtaattgtgcctcaaactttttgaaagtctaccttctaaattgcccccgatgatctagattctacatgttaccattggtttattcttgtgctttctgtatttaaaactttggctgtactaagcaaaatgcaaaggtataatttagccaaaaatagtttacagaacaattctgaagattatgaatttcttttggtttaaccaaacctggaccaatttcttttcataaagggaaatgatactggtttaacaaatggtaaaaaaaagccctgtgaaattcaagccttcaaagtggtggtttggtttgaaaataaaacttagagg

SEQ ID NO: 38779 - DNA, 792 bp, Macaca Mulatta
  misc_feature (1)...(792): n = A,T,C or G
attcaccttgtaggtatccaggttatctcaggagggtttaagggcaggaggagatcggtttggggccccagggaaaggaaaagctgccagtgaggcctaggattgtaatcactgccattccattcttgggcaaccggaggtgagatccctgccttataaaaaaataaaagactttcttcaaaagggggacttggacaaggttagccagttaacaatcccaaggtagaaagggggggtagttcaaaatagcgaaaggtggtaataactgattagactccagatagatatggtttgaatcaactgaatggtcaaggatgaccacagaggattttggcttaagcaaccaaaagggtgggtacaattgagatgataccattttagaacattgtatgttaaatgcctgtctgacatccaagtggggatatcaagttggcacttagacaaaccttgatctcccaaagaaaggtacaggctagaaatataaaaatctccattaatttaaaaccaagaacttagggagagtatagtagaaacgtctaaggaccaagccctannnnnnnnnnnnnnnnnnnnnnnnnnnnnnnnnnnnnnnnnnnacaccgtcacccctgctggagtgcaatggcccaacctcaggtcaccgcaacctccgcctcccaggttcacgcgactctcctgccccagtatcccgagcagctgggaccacaagcgcccacaatcccagccactggggaagccgagacacaagcatcgctcgaacctgggagatggaggccgcagtgagccaagacc

SEQ ID NO: 38780 - DNA, 1070 bp, Macaca Mulatta
ctactacgacagattggtggcatccaacaactacaatcactacaagaccctcttcaaattgtggtggcttcttattcagtgccagtgggacattctccagcccatcctaccctgcatactaccccaacaatgctaagtgtgtttgggaaatagaagtgaattctggttatcgcataaacctgggcttcagtaatctgcagctggaggcacactataactgcagttttgattatgttgaaatctttgatggatcattaaatagcagtcacctgctggggaaaatctgtaatgataccaggcaaatatttacatcttcttacaaccgaatgaccattcactttcgaagtgacatcagtttccaaaacaccgactttttggcttggtataactctttcccaagcgatgccaccttgaggttggtcaatttaagctcatcctacggtctatgtgctgggcgtgttgaaatttaccatggtggcacctggggggcagtttgtgatgactcctggaccattcacgaagctgaggtggtctgcagacagctggggtgtggacgtgcagtttcagcccttggaaacgcctattttggcgctggctctggccccatcaccctggacgacgtagagtgctcagggtcggaatccactctctggcagtgccggaaccgaggctggttctcccacaactgtcgtcacaacgaagatgctggtgtcatctgctcaggaaacccactatcgacacctgctccttttctcaacgccacccctccaaacacaaattattcctgtggaggcttcctgtcccaaccatcaggggacttttccagcccattctatcccaggaactatccgaacaatgccaagtgtgcgtgggacattgaggtccaaaacaaccaccgtgtgacggtggtcttcagagatgtccagcttgaaggtggctgcaactatgattacgttgaagttttcgatggcccctaccacagttctcctcttattgctcgagtttgtgatggggccagaggctccttcacttcctcctccaacttcatgtccattcgcttcgtcagtgac

SEQ ID NO: 38781 - DNA, 849 bp, Macaca Mulatta
  misc_feature (1)...(849): n = A,T,C or G
gggaggcattgaggcagccagcgcaggggtttctgctgaagtggcaggcgcagcttgaggaacccgcagataagttttctctctttgaaagacagagattaatacaactacttaagaaatgtagtcagtagcttactaagattttgcttagcattaggttcttaacgtaatttgaataagattttaagagaaaatatgaagagttaaaagtgtagcgtgagnnnnnnnnnnnnnnnnnngtttctaaaacatgacggaggttgagacgaagcttcttcaagaagtaaaaaaatgtatttaaaagaaaattgagagaagggacgccagagccctgaattaataccagtagaagggcagtgcttttagattaaaatgaaggtgatttaaacagagcttaaacgttgtttgaaaagttgtaggtgatttaaaataatttgaaggcgatcattttgaaatgagatttaaatcgaaaggtcattaaaagacctttgaactccatgacgcaagggaagagttgcgttctttttaaagccctaatttaatctttaacgcgttttgcctaaacgcgcagacgaaaaaattaggaaagattttaattgggaagtgggtagggatgtaaacaatctgggggaaaattagaaatttgaatttgggaaaaacgaaaaaaccggaattttaccggggaagggcctaagaaaaggaattatagtaaagatatggggggaaaatttgtaagaataaaaaaccttccccttttttggaaggaacccaaagggattaaaattttttaggccccccggaaaaaagtcttaggggaaggccttccnnnnnnnnnnnnnnnnnnnnttt

SEQ ID NO: 38782 - DNA, 774 bp, Macaca Mulatta
gggttgtgtatgcatacatcacatgtaatgcattataattttctggagtaatacataggaaatagcaatacctacctgtgagcaaagggctgaatatgtatcatttcacttcatgtatttctatcattttgaatttgtacagaaaacatgaattacttcaaacaaattttaataaaaattaaatttaaaaggtagaaaactatatcactgtaatactatttatgtatttcctttctgtgtgtggtagtaggcccacctgtgtaatgagcatgtaaaatagataggatcactgcccttgaagagcttgtcctctaaaaatctctttttcatggatataagatattaatgttattatttttgtgatggtaacatgataatttgctagaagtcaaatggttggaatttagtcgtttctgacttcagtaaacaaatgctgatttcactgaaatttatcgtgtacaagttggataatcccaaagtgggtgttacttgtctgagaaaggaatttgatgaattaaaattagtaccattaatccagactttaaaaaactccatattttttttttatcaaacataatagaacttgtttgcaccattgtatcttttatagtagacacagaaataagttttaggagaatttgttatttatgatgggtcataagtatcatataaagttaaaaagatcccatgtaaatattttcaatttttgagttgatttgatgtaatgtaaactgaagaattttaaaataccttgctaatttcacacaatattaa

SEQ ID NO: 38783 - DNA, 1477 bp, Macaca Mulatta
  misc_feature (1)...(1477): n = A,T,C or G
gggaaactgagcgggtgcgctttcaccctgtggagttttgttcttttgctctttgcaataagtcttgttgctactcactgtttgggtccagactccctttataagctgtaaccctcaccgcgaaggtctgcaaacttcactcctggagccagcaagaccacaaacccactgggaagaaagaacaactctagacgcgctgtctttaagagctgtaacacaccatgaaggtctgtagcttcactcctgatattgagaccacgaacccaccagaaggaagaagctccagacacatctgaaagtctgaaggaacaaactccagacacaccatctttaagaactgtaacaccacgagagcccgcggcttcattcttgaaatcagtgagaccaagaacccacccattccggacacatcaccaccagctaattggtctcccacagcctggagggacgaaaaaatggagcacagaaatctacgtcgtacttctgccaaatgccacatgagagcactggcaggatacagagaaaccggcaaccacagcgaggaactgtaacggccaacagtcctcgcgcttgcaggcctgggccaacagcacaacatgtagtcgcttcttctcagtccagcaattaaaatgaccatggcagccagggtttcattaggttactttcaaaaaccacgtttgctggaaaaaatgttgatagtttaatctgcatatacagacatctatcaagagggagatgtcttatgggataaagagtccatcacggaacatctgggcacaccaggacaggcaacgacaagtcattcttctgtatactggaacttgagaatcagtaatattcatgttcacaacaattcacataacagtataagggatgatctaaaattatctctaacttggtaatactagattttatctcaatgttcttcactaccaaagcaaagcatgatattaaatctagaagagctcagttctaataacttttagaataaggacgcagcttaaacacatccgattaccctaacacgtcacacactgcgcgactcttcccacggagggcttccctccatctcaccgcctgcgtacctctgacagagctttctgatacgtcctgcaagtcttcctgccaataaaggatcacggcttgttcagtgaatggaaacatctaaatattccattagttgtccagtttttggatatttaagcaacatagttttaataattgctataaattcttcataggtcaatannnnnnnnnnnnnnnnnnttaagtgatagcttttctatttggctaaaatcctagactagaaaacatgtgtttcaaggactaaatagaaaataaaaacagaaataaaacaagttatttccaggggaaattcatacgatttttttcaaaaacaaagtataaacaatgttttcctaggtgacaaaactcaaatatgataaacaaccctgacagttgtttattgtatgtatcc

SEQ ID NO: 38784 - DNA, 878 bp, Macaca Mulatta
agggaccatctctttcatcgcctgcactgctcagtgctttctctacatgggctttatgggggctgaattcttcctgctggggctcatggcctatgaccgctacgtggctgtctgcaacccactgcactatcctgtcctcatcagccagcgggtctgctgcatgatcctggccagctcttggttcggcggggctttggacagttttctcctcacccccatcaccatgagtctcccgttctgtgcctctcaccaaatcaatcactttttctgtgaggcacccaccatgctgaggctggcctgtggggacaaaaccgcctatgaaacagtgatgtatgtgtgctgtgttgcaatgctgctgatccccttctcagtggtgactgcatcctacaccaggattctcatcacagtgcaccagatgacatcggctgaagggaggaagaaggcctttgccacctgctcctcacacatgactgtggtgacattattctacggggctgccttgtatacgtatatgctcccccaatcctaccacaccccaatcaaagataagctcttctctgccttttacaccatcctcacccccttattaaaccctctcatctacagtctgaggaacagggatgtgatgggttccttgaagagagttgtggcaagaggttaagggacctgtggtgtgaggaggaaagaattctgatcgtctaaaacctccacatcctgttcaggcatatatgggcctgcatcaaggataccatggataatgctgacaggaactgacaataccagctgtgctaaagggtgtatccaacagtacttccatccaaaatgtgaagatgctgtaacagtcacacacaaataatgccagagttctagaaacacca

SEQ ID NO: 38785 - DNA, 658 bp, Macaca Mulatta
  misc_feature (1)...(658): n = A,T,C or G
aaccacagaaccacaagtgcggtgcaaatttctccaggaggacagcaagaagtctctggtttttaaatggttaatctccgcaggtcactaccagccaccgagaccaacagagtcagtgagtgctctctaaccacagtctatgcagtaatagtaggtccttcaaatatttgctcattctctttttgttttgtttctttgcttttcacatgttaccagctacataatttcttgacagaaaaaaataaatataaagtctatgtattccaggcatactgtaaaactaaaacaaggtttgggtatggtttgtattttcagtttaaggctgcaagcagtatttacaacagagggtacaagttctatctgaaaaaaaaaggagggactatggcatcaaacagcctcttcagcacagtgacaccatgtcagcaaaacttcttttggggtaagtgttaccatttttaaaatcctgtaagatatgaacctgttaaacataaaggtgtgattctttgataaactgctagcttttccaaatagtatattaaagatcctaataatgctatcttattgcattaagaattgaaaaatgaaatttcagtatatatttgcatttggtatctgtaacgtatctaatttccaanagtaatgacgtgaaatagacaaa

SEQ ID NO: 38786 - DNA, 717 bp, Macaca Mulatta
  misc_feature (1)...(717): n = A,T,C or G
agatgtttccagaagctcacttacctcatgtgaatgtgccattttctttccttgttgtagagaaaatccccttcactttttggaacagtaatgacagcttctagtacagccatttacagtttcatatgagaaaaattgaaaagaataactataaaattgttaaaatatccaacaatggataatgatggccagaagatttaacacataaagtaattctcaatgtaaagctattcagctcttccaggttgaatgccctggaacccatcctgaccttccacatcatcttcaaaaagcagtttctctgttccccgtgattctcctataaggtaactctctagtcctccatttagcacatattaaatcctccaaagattaagtaccatatgattattttagttttacaaaaaaagttgaatggcattttattttcatggcctataagcaggtacattagtagggcagtgataggaaaaacaaattagnnnnnnnnnnnnnnnnnnnnnnnnnnnnnnnnnnnnnnnnnnnnnnnnnnnnnnnnnnnnnnnnnnnnnnnnnnnnnnnnnnnnnnnnnnnnnnnnnnnnnnnnnnnnnnnnnnnnnnnnnnnnnnnnnnnnnnnnnnnnnnnnnnnnnnnnnnnnnnnnnnnnnnnnnnnnnnnnnnnnnnnnnnnnnnnnnnnnnnnnnnnnnnnnnnnnnnnnnnnnnnnnnnnnnnnnnnn

SEQ ID NO: 38787 - DNA, 289 bp, Macaca Mulatta
tactggggtgggcttttaatttcctcccctcgctggaaaatatgagtctttcagacaagaccttaaatgatttctgtctgctctgagcggacgttaaaatgggcccccgtccccgatccgcaccctccttcctcagggcacttactaagggaggggtctccctctccatctccccaatggcctccctgcctccaaccctgcctgccgccccctgcccgccccacatctcctggccacgtgagacacaaacctatttatttctaggcctggagaaaggagatcggactgg

SEQ ID NO: 38788 - DNA, 1450 bp, Macaca Mulatta
  misc_feature (1)...(1450): n = A,T,C or G
ggggcggccgccatgttcactgtgtgtctttgtcttttgtgtgttctttcattctccaccacccccggcacggaccccaacaagtggcgcagcgagcagggtcagcacggggctcgtaaggaaatttggctacctgttaaccttatgcgactgtggggggcatcacctcttgagacttatatttggacttctctccagtgaaccctccgtgccgttggacttataattgcctcggtgatgagccttgttgccatcgtctccactgcggccgtagcagggcttgctcttcatcaaagcatacaaaatgctgaatttgtgcagcaatggcacgagcaatctcaccggttatggcttcaacaacaaaacattgattctcaacttgctgaaagattggacaacatggaacaagccttgacatggcttggagatcagctcactgtcctcagtactcggataacattacaatgtgattggaactccactcaattttgtgtaacgcctgtgctttttaacatctctcaaaattggaccgtaatccaaaaattattaataggccataaaaatattagtttggacatccaagagctcactcagaacatttccgaagcatttcgacaacaattacatgtgttgtccggaactgtaacccttcaggagctgggtcagcgccttgctgcctttaacccatggacccagatgaagacatggatttctacaatctctggaagtatattgctttgggcacttggattgggtctacttcttttggtgattcgatgctccctccgtcacctccaaaaacaaaagaaaacacaggaacaaatatgggctacctttttaggattgaggcaaaaacgaaggggggaaatgcaggggcctttgaaaacagtatgctgagaatagatagggctcaaggacagtatctccaattgaacttttaatgaactcccgtaggcgccaagaaggcgggcagataagaaagagcatagaaacaaggtactgagtagaaggttacatctgggaaaagaaagtttgttttgcattgcattctttctgctgacgtggggtttatggagtataaataaagtgaggcggaggctctgagtgcggcccccatgttctctgtttgtttttgtcttttgtgtcctttccttccccaccaacccccggcataacccccaaaagtccctgactcctggcgttgttcccaggggaaactgtattaaccttcttcaaagggggagattaaaagggcgttaaaatttacaagggcgtccatgggaaaatgggttttaatgtnnnnnnnnnnnnnnnnnntcctttccggggggctggggtaaaccttaacctcttaaacccaacttttnnnnnnnnnnnnnnnnnnnnnnnnnnnnnnctcccctggggaaagccaaaaaaacgggggacccaccttaaaactctttttttt

SEQ ID NO: 38789 - DNA, 810 bp, Macaca Mulatta
  misc_feature (1)...(810): n = A,T,C or G
gggtgaaaggtttattttgaaacaagctaggccaacttgtacattggaggaaggattggatgatggattagaccatgctagctgctccatcatagactatccttactaagcagaagaccttaatagtgcctaaaagtttaattttgaaattggttttttccctaacttttctttgttaaatttatttttattatcttttttaaccttagaagtaatcagagtttgacagctctttagtaactgttaataaaagaatattgcatcacaggataagcaatagattgtgtgggaaataataacacaagagtaaagatgctgaaggactctttcagaatccaaagtgacagttttgaaggttctggcacagtaggaaaggatcacaacccatataaatggctaatgttgaatttctctgaacactatcacatgtggggcatcaatttgcaaaactctcaattgaggcctctttcctaagattaccacattgataacctttttctctctcttctttaccctccgtccaagtctactattccaagtttnaacattgttcagaaagttgtcagcccttgttagttagaaaaactccctttagagccctcccaactagcataagaaattccttaaacccctcaaagcattatcctctgtttttaaataagaaactaaattcccgagcggtttaccagggtactttagaaattaagttattggggtaaatcccctaangaaggatattggaactgccaccaaaacccaaagcctttagaaaaggaaattgatttggnnnnnnnnnnnnnnnnnnnnnnn

SEQ ID NO: 38790 - DNA, 401 bp, Macaca Mulatta
  misc_feature (1)...(401): n = A,T,C or G
cctggccctggcgctggggctgctgggccccctgcccatgttgctggccctgctcctgctccggggacccagaggctgccccccgatgcccccaaagcccctggncccccagggggaggcagtttccggacccccatccaagaggagcaggctgacgcgcactccgccctggccaagatctgacccgggcccaccaaggtggacgctgggccccgccaggctggagcccggaggtctgctgggcgagcagggcaggcgccggccgcccgccccgccacgctcctgggccactctgcgccgttctaggtgccgctggctgcctccggctctctgcttacgtatgccatgcatacctcctgcctcgccgggccacaataaaaccttggcagacgggagtctcc

SEQ ID NO: 38791 - DNA, 654 bp, Macaca Mulatta
  misc_feature (1)...(654): n = A,T,C or G
tctcatctctttgcagatgctgcattcacagcagttccttccttcgcgcctgtaaaacagtggcaacagtaactcttctcctgcctgcccatcaactttgtgaacagcgcggggcactggggtggggcttgggaactataaggcaccatatgaaaatatgaaaaggagagattggccgggcgcagtggctccnnnnnnnnnnnnnnnnnnnnnnnnnnnnnnnnaggagcnnnnnnnnnnnnnnannnnnnnnnnnnnnnnnnnnnnnnnnggggaaacccgnnnnnnnnnnnnnnnnnnnnnnaagctgggcgtggtgagcnnnnnnnnnnnnnnnnnnnnnnnnnnnnnnnnnnnnnnnnnnnnnnnnnnnnnnnnnnnnnnnnnnnnnnnnnnnnnnnnnnnnnnnnnnnnnnnnnnnnnnnnnnnnnnnnnnnnnnnnnnnnnnnnnnnnnnnnnnnnnnnnnnnnnnnnnnnnnnnnnnnnnnnnnnnnnnnnnnnnnnnnnnnnnnnnnnnnnnnnnnnnnnnnnnnnnnnnnnnnnnnnnnnnnnnnnnnnnnnnnnnnnnnnnnnnnnnnnnnnnnnnnnnnnnnnnnnnnnnnnnnnnnnnnnnnnnnnnnnnnnnnnnnnnnnnnnnnnnnnnnnnnnnnnnnn

SEQ ID NO: 38792 - DNA, 84 bp, Macaca Mulatta
tgtgcgagagagctagtcagcgtgacagtcacactaactggttctgatgtctggggcccagaggagctcgtgcgtcaccgtctc

SEQ ID NO: 38793 - DNA, 202 bp, Macaca Mulatta
agcccgtggcagtggcacgatgctctaccccgcctgggctctggcctctcctccgtcctccctctggctgtgtatcccctgtttctccggggcttagatgcttcctgggctggctggatgtcttccagaaggatcacttcccagtccatcagggagacacttcctggagatccctgtcatgattgtttctctctgcaaacct

SEQ ID NO: 38794 - DNA, 4120 bp, Macaca Mulatta
  misc_feature (1)...(4120): n = A,T,C or G
gatcccaaggaagaaaaagaggaagaagacgattctgccctccctcaggaagtttccattgctgcatctagacctagccggggctggcgtagtagtaggacatctgtttctcgccatcgtgatacagagaacacccgaagctctcggtccaagactggttcattgcaactcatttgcaagtcagaaccaaatacagaccaacttgattatgnnnttagtagtgaagaggaagaggaggaggaagaagagatgttaatcagtgaagaggagataccattcaaagatgacccaagagatgagacctacaaaccccacttagaaaggcatgtctcagattttactccagacatnnnnnnnnnnnnnnnnnnnnnnnnnnnnnnnnnnnnnnnnnnnnnnnnnnnnnnnnnnnnnnnnnnnnnnnnnnnnnnnnnnnnnnnnnnnnnnnnnnnnnnnnnnnnnnnnnnnnnnnnnnnnnnnnnnnnnngagaggaagaagacgaaaagatgacaaaagtccacgtttacccaaaaggannnnnnnnnnnnnnnnnnnnnnnnnnnnnnnnnnnnnnnnnnnnnnnnnnnnnnnnnnnnnnnnnnnnnnnnnnnnnnnnnnnnnnnnnnnnnnnnnnnnnnnnnnnnnnnnnnnnnnnnnnnnnnnnnnnnnnnnnnnnnnnnnnnnnnnnnnnnnnnnnnnnnnnnnnnnnnnnnnnnnnnnnnnnnnnnnnnnnnnnnnnnnnnnnnnnnnnnnnnnnnnnnnnnnnnnnnnnnnnnnnnnnnnnnnnnnnnnnnnnnnnnnnnnnnnnnnnnnnnnnnnnnnnnnnnnnnatgtgagatctgtggatttacttgtcgacaaaaggcatctcttaattggcacatgaagaaacatgatgcagactccttctaccagttttcttgcaatatctgtggcaaaaaatttgagaagaaggacagcgtggtggcacacaaggcaaaaagccaccctgaggtgctgattgcagaagctctggctgccaatgcaggcgccctcatcaccagcacagatatcttgggcactaacccagagtccctgacgcagccttcagatggtcagggtcttcctcttcttcctgagcccttgggaaactcaacctctggagagtgcctactgctagaagctgaaggaatgtcaaagtcatactgcagtgggacagaacgggtgagcctgatggctgatgggaagatctttgtgggaannnnnnnnnnnnnnnnnnnnnnnnnnnnnnnnnnnnnnnnnnnnnnnnnnnnnnnnnnnnnnnnnnnnnnnnnnnnnnnnnnnnnnnnnnnnnnnnnnnnnnnnnnnnnnnnnnnnnnnnnnnnnnnnnnnnnnnnnnnnnnnnnnnnnnnnnnnnnnnnnnnnnnnnnnnnnnnnnnnnnnnnnnnnnnnnnnnnnnnnnnnnnnnnnnnnnnnnnnnnnnnnnnnnnnnnnnnnnnnnnnnnnnnnnnnnnnnnnnnnnnnnnnnnnnnnnnnnnnnnnnnnnnnnnnnnnnnnnnnnnnnnnnnnnnnnnnnnnnnnnnnnnnnnnnnnnnnnnnnnnnnnnnnnnnnnnnnnnnnnnnnnnnnnnnnnnnnnnnnnnnnnnnnnnnnnnnnnnnnnnnnnnnnnnnnnnnnnnnnnnnnnnnnnnnnnnnnnnnnnnnnnnnnnnnnnnnnnnnnnnnnnnnnnnnnnnnnnnnnnnnnnnnnnnnnnnnnnnnnnnnnnnnnnnnnnnnnnnnnnnnnnnnnnnnnnnnnnnnnnnnnnnnnnnnnnnnnnnnnnnnnnnnnnnnnnnnnnnnnnnnnnnnnnnnnnnnnnnnnnnnnnnnnnnnnnnnnnnnnnnnnnnnnnnnnnnnnnnnnnnnnnnnnnnnnnnnnnnnnnnnnnnnnnnnnnnnnnnnnnnnnnnnnnnnnnnnnnnnnnnnnnnnnnnnnnnnnnnnnnnnnnnnnnnnnnnnnnnnnnnnnnnnnnnnnnnnnnnnnnnnnnnnnnnnnnnnnnnnnnnnnnnnnnnnnnnnnnnnnnnnnnnnnnnnnnnnnnnnnnnnnnnnnnnnnnnnnnnnnnnnnnnnnnnnnnnnnnnnnnnnnnnnnnnnnnnnnnnnnnnnnnnnnnnnnnnnnnnnnnnnnnnnnnnnnnnnnnnnnnnnnnnnnnnnnnnnnnnnnnnnnnnnnnnnnnnnnnnnnnnnnnnnnnnnnnnnnnnnnnnnnnnnnnnnnnnnnnnnnnnnnnnnnnnnnnnnnnnnnnnnnnnnnnnnnnnnnnnnnnnnnnnnnnnnnnnnnnnnnnnnnnnnnnnnnnnnnnnnnnnnnnnnnnnnnnnnnnnnnnnnnnnnnnnnnnnnnnnnnnnnnnnnnnnnnnnnnnnnnnnnnnnnnnnnnnnnnnnnnnnnnnnnnnnnnnnnnnnnnnnnnnnnnnnnnnnnnnnnnnnnnnnnnnnnnnnnnnnnnnnnnnnnnnnnnnnnnnnnnnnnnnnnnnnnnnnnnnnnnnnnnnnnnnnnnnnnnnnnnnnnnnnnnnnnnnnnnnnnnnnnnnnnnnnnnnnnnnnnnnnnnnnnnnnnnnnnnnnnnnnnnnnnnnnnnnnnnnnnnnnnnnnnnnnnnnnnnnnnnnnnnnnnnnnnnnnnnnnnnnnnnnnnnnnnnnnnnnnnnnnnnnnnnnnnatcagttcattccagctccctgttagtgaaggacactgctgttagtgaaggaacaaagtctatgagtcctaaaattttaagtcaaattaaactctctttcccctttagtaacacttcagaagaggaaaaacttcaatagccaaagttaataatcctatataataattgctttgactttcacctaaaattctgggaatcacaatttcctagggatagagattgtgttggggcatggactgcttattgctgttcactggagagaagaggtagtgtttttgtacaaggtcatatcgccaaaagccccaaatcctgttttggctcatcttcaggtaaagagtaattcctatcatgtgtgcctcaaaagctagaatcgaaggcttacgctattcattgtttattgtcagaaatgcgtgatggctattgcaaagaatgacgttttgctgnnnnnnnnnnnnnnnnnnnnnnnnnnnnnnnnnnnnnnnnnnnnnnnnnnnnnnnnnnnnnnnnnnnnnnnnnnnnnnnnnnnnnnnnnnnnnnnnnnnnnnnnnnnnnnnnnnnnnnnnnnnnnnnnnnnnnnnnnnnnnnnnnnnnnnnnnnnnnnnnnnnnnnnnnnnnnnnnnnnnnnnnnnnnnnnnnnnnnnnnnnnnnnnnnnnnnnnnnnnnnnnnnnnnnnnnnnnnnnnnnnngatagaaaatggcataaagatagaaggaatgtagaatatgctttcctgccaacatggtttggagttgactttggtatattgagtagatttgaaaatacaagattgattggatgaatctacaaaaaagttgtcctgctctcaggtcccttttatactttctgactagctatcatctatattccacacttagctttttcgtcacacttatcctttgtttccataaatttcatttgcagtggttagtcatcagatattttagcctcctacacaaaagcaaactgcatttttaaaaatctttctgagatgggagaaagtgtattctccnnnnnnnnnnnnnnnnnnnnnnnnnnnnnnnnnngttagttttactaattagaaacttgctgtactttttcttttagggatcaacggccctcttcatagctatcatttgcctacaataaattattgtagcagtttgcaataccaaaatattttttatggactttatatttttcctttcgataaagggatgctgcatagtaaagagttggtataattaaactatctcagccctttccctgctttcctttctgctccatatgcctcattgtccttccagggagctcttttaatcttaaagttctacatttcatactcttagtcaaattctgttacctttttaataactcttcccactgcatatttccatcttgaattggtggttctaaattctgaaactgtagttgagatacaactattgaataatctgggagatgtgcatccc

SEQ ID NO: 38795 - DNA, 189 bp, Macaca Mulatta
gagaaggcttacaaatgtgaagaatgtggaaaatcttattaactgtttctcaaaccttactagacataagataattcatactggagagcaaccctacatatgggaagaatgtggcaaagcctttaactggtcctcaatccttattacacataaggcaattcatactgcagagaaaccctacaaatgtga

SEQ ID NO: 38796 - DNA, 454 bp, Macaca Mulatta
  misc_feature (1)...(454): n = A,T,C or G
ttgaggtatagtacataactgcttcttaagattggagcagtacggccgggtgcggtggctcaagnnnnnnnnnnnnnnnnnnnnnnnnnnnnnnacgggtgnnnnnnnnnnnnnnnnnnnnnnnnnnnnnnnnnntnnnnnnnnnnnnnnnnnnnnnnnnnnnnnnnnnnnnnnnnctagccgggcgaggtggcgggcnnnnnnnnnnnnnnnnnnnnnnnnnnnnnnnnnnnnnnnnnngcgtaaacccgggaggtgnnnnnnnnnnnnnnnnnnnnnncggccactgcaccnnnnnnnnnnnnnnnnnnnnnnnnnnnnnnnnnnnnnnnnnnnnnnnnnnnnnnnnnnntggagtagtgtttatctgaaagctaanaacatactgtgggcattgccaaggacctaaggccttccaatctgtcttgtaaagcgtgtagtctctaaanaaaaa

SEQ ID NO: 38797 - DNA, 787 bp, Macaca Mulatta
  misc_feature (1)...(787): n = A,T,C or G
ggaannnnnnnnnnnnnnnnnnnnnnnnnnnnnnnngcacnnnnnnnnnnnnnnnnnnnnnnnnnnnagctcaggcaaatctgcccgcctcagcctttcaaagggctagaattataggcgtgagccactgtgcccggcctgtttatattaccattatatcccttttaaactcttggttgagtcaagagactctagaataatctttctattttcttggctggtcacatcttttgaactcctttgaaccttttcttgggggaagagaacagtaaaattacaaatcagtttgtatctgggcaggaataattatcctgtgagaccaaagttctgcctggaactttttagccggaggagcaggttcaaagaactgcacttgtctcctatttcagctttggccgctcttagaaaaatcatctgctcggtaagaaagtaatactccgccttttgcaaaagtgatttcttctacttccataccttccttgttgaaaacaaatcttggccgggcccggnnnnnnnnnnnnnnnnnnnnnnncnnnnnnnnnnnnnnaaccggcggatcacaaggccaggacatcgagaccctcctgggcaaccccggtgaaaccccctctccaccccagaatcccaaatccaaacccagccccggccaaggtggcgggccccccgaaagacccttccccccccgcgaaggcttaaacccccccgaaatgtcgcttatacccggggaaggccaactcttgatagcaaatcggccacctgcgccacttcccacctccaaccccgcggc

SEQ ID NO: 38798 - DNA, 747 bp, Macaca Mulatta
  misc_feature (1)...(747): n = A,T,C or G
ggtctttggtagatacctaggagtgaaattaatgggtcatgcagtaactatgtttaactgtgtgaggaattgctagtctgttttccacatagattggaccattttacagtcccaccagcaagagcaaaagcattccagcttctccacatccttgcaaacagttgttattgtctgtcttttttattgtagctgttctagcagatgtaaagtagtatctcattatggttttgacttgcattcccctgactactaatgatggcttttcatcattaagctcagtgagcacttgaaaaggtgtggagcatccttccatgtgcctgttggccatttgtatatattttatttggagaaatgtcttatgtatgtccttgagttattttttanattggattgtctttttattgaattttgagagttctttatatattctgcatacaagtcctttattaaatatatgattntgcaatattttttcccatttggtggattttcttttcacatcctttgatgttggcaaactcagattttcattttcacttttctggggtttgaaagtgctccagatgggcatagccctatgaatgcagctaactgggaaaaatggccctgcctgaagccctaaaaacatatggccgtccttttgaaaagagggtttcccgattttaaaaaaacatcctttgaaaaggtccaattatatatataaataccttcggaaaccttggacctttnnnnnnnnnnnnnnnnnnn

SEQ ID NO: 38799 - DNA, 776 bp, Macaca Mulatta
  misc_feature (1)...(776): n = A,T,C or G
gggggtgtagcggagctgtggcggggcttactggaatcgtggcggtattttgctaaattaagactaggtcatttatgtagtgaaaggcctagtaaaaaggttacttctttgtaatctcagagaaaggaaaacctttctaaatatggcccaagatccagaagccataaaagaaaagactggtaaacttaaatacttgaaatgtaaacaaagaaatctgcattgccaaaagcaccatttgaaacgtatacttgcaactcttattccaaaaggctaatttccctaacatataaaggacttcttccatcaataagaaatgaatcaaagaccctatagaaaaataggtgaagaatatggacagacaattcatacaaaaaggaagcgcaaatagattttaagcatacaaagatattttcaacctcatttttaataaaaatgttaattgaaactactctgacaaagtttcccactcatcaacatggcaaaaaattaaaacatatgataacgcttagtttttaagaggttaaatgaacagacacacttaccctttgctggttcaaatataaattattgcagtctcaatggaaaacaattttgtcaacatttcagaagcacacacctttcccctgactctgaaacttttaaccaagatatacttgtacccccctaaaaaatagagatccttaactgttaaaggctcatttgaattttttggcatgtgntaacacctcataaaacccccccaccatgaattcaaaaatgttagaaaataaccttct

SEQ ID NO: 38800 - DNA, 758 bp, Macaca Mulatta
  misc_feature (1)...(758): n = A,T,C or G
ggcaacagagcaaaagaaaagatgagatactctgaatttcccaccttaagagataggttgaattcctgagcttcaaagatgagatgctaaaaaaaactaagcagaaagcctctgaaaaatcagccaagttttcagcagtcttaggttaaggaggcaattggagttcagtaccttatcaaaaaggggaataagtaaacatcctaggctgttagttggcaccactggaggaacacatcttaggagggagaacttagaggtagaatgagccttacaaaaatctgtccttgaggctgggtgggnnnnnnnnnnnnnnnnnnntcggcactttgggaagccaaggtgggaggatcacttgtggccgggaaattggagacannnnnnnnnnnnnnnnnnnnnnnnnnnnnnnnnnnnnngnnnnnnnnnnnnnnnnnncgtggtgtggtgcatgccttnnnnnnnnnnnnnnnnnnnnannnnnnnnnnnnnnnnnnnnnnnnnnnnnnnncggaannnnnnnnnnnnnnnnnnngcaccactgtactctagcccgggtggcaaagtgagtgagactccgcctnnnnnnnnnnnnnnnnnnggtcctttgagtcgcctaagtccctgaatcctgaagggggtaacctgccttgcccaaaggatagggggggaaccccttggctgggaagaaagataatttggttagacccccccgaaaaatttttttccccagatagccaggtattagaaaatttttttttttt

SEQ ID NO: 38801 - DNA, 841 bp, Macaca Mulatta
gggttataaactaataaaatcttagctgcctgaaccaggagagcttgttctcattagtaactgacacaaagagttttgctgattgtccacatagtttctgattcccagaaaaaaaagagcagtgaatgctataaaggcccataagttatgggatgtgagtaggaagcccaaaacttatgggaattatgtaggaaagaacccatcatgagatacatggatgatgtttcagattctcagcagattaacaaagtctctagaggtatttatccaatatgatgtttctagggcataggaaaagctttttaaaccatcgaccagcctctggaaaaagatgtatgataagggaaagaaagttaggcaaaaagaaaaagaatctgtgactcctttaaggaacaagagctactttgcttaaaaccgacgtgtattttcctcagtaccgtgccctgagtgggtaggagagggagttattacaacctcattcctgctcccaccagagcacctgcactaaaaactgttttgtcttttggaattctgggtatgatcttgtttaacaagatattttgactacaaaagtataatttttttttaactatctgcctgaatcattcacttccttgagcatggaggcaatggaaactcttctttactacaagtcaatagtttgcttcattacaagaagatttttcctccagaaattgatgaaagtgtcaaagcattggttgttttccctccaaggccttcattttaaacttccaaaggtactttcctttcctacccttaaaattggcaaaaagttgaaaaagtccaaaacttttccattttggcgatacccttctaaata

SEQ ID NO: 38802 - DNA, 959 bp, Macaca Mulatta
  misc_feature (1)...(959): n = A,T,C or G
ggggtatttagtttgactaatttgtgcagtttccagcccttctacttgttcttgcctataagagaatcactaatactcaaaagctggattaccgaagagaaattttatctttaaatataatccatccacaattatggtatnnnnnnnnnnnnnnnnnnnnnatcactatgaaataagtcgcagctctttgctgatattgcaaaatccttgctaggcatctacatcatattagtttttttaaaaatacctctgtaacaagacctaaaagtaacccaactattaagcagtgcttttttttcaccgaaaacacacaacctaaagatttatctgtcataaaactgcatggttccagagctttatttctgtgtagagttgctatttgttagtgatggaaacaaattattttgttgctatgtcttttgtgtctagcagttgagagaatgatatgaccatcatttcactggattatgggaatgaatgcccttttcaaaataagtttctttttattattgttgctgctttaacagaaaatgagccatttgtccccatgctccgaaattacaagcatttaaattaaaaaactttgaaggattttcctaaatatattcttttttaaagggctaactttgtgcattcatataacaagaatttggaataatgtgaaaaatggaggcacataatttgggtggaaaatcgcaattaaaaatacatataagaaaattattagccctgtgtaacatatttaaataattaccagaatatttcatgagtaccaactcttcccatagtatttttactccaaaatgcaatagctcattccctcaactgcagacactttgattttttttcaagttatagtgctgtagtgcttgtttatgtttaaaagtgcacattatgcagctcattttagtatgctacttccatgtttattttttgttcttttaataaaatgcgtaaac

SEQ ID NO: 38803 - DNA, 2521 bp, Macaca Mulatta
  misc_feature (1)...(2521): n = A,T,C or G
ggacagccgaggagaagctggctgacttagagggggtggctgtgaagtttgggaannnnnnnnnnnnnnnnnnnnnnnnnnnnnnnnnnnnnnnnnnnnnnnnnnnnnnnnnnnnnnnnnnnnnnnnnnnnnnnnnnnnnnnnnnnnnnnnnnnnnnnnnnnnnnnnnnnnnnnnnnnnnnnnnnnnnnnnnnnnnnnnnnnnnnnnnnnnnnnnnnnnnnnnnnnnnnnnnnnnnnnnnnnnnnnnnnnnnnnnnnnnnnnnnnnnnnnnnnnnnnnnnnnnnnnnnnnnnnnnnnnnnnnnnnnnnnnnnnnnnnnnnnnnnnnnnnnnnnnnnnnnnnnnnnnnnnnnnnnnnnnnnnnnnnnnnnnnnnnnnnnnnnnnnnnnnnnnnnnnnnnnnnnnnnnnnnnnnnnnnnnnnnnnnnnnnnnnnnnnnnnnnnnnnnnnnnnnnnnnnnnnnnnnnnnnnnnnnnnnnnnnnnnnnnnnnnnnnnnnnnnnnnnnnnnnnnnnnnnnnnnnnnnnnnnnnnnnnnnnnnnnnnnnnnnnnnnnnnnnnnnnnnnnnnnnnnnnnnnnnnnnnnnnnnnnnnnnnnnnnnnnnnnnnnnnnnnnnnnnnnnnnnnnnnnnnnnnnnnnnnnnnnnnnnnnnnnnnnnnnnnnnnnnnnnnnnnnnnnnnnnnnnnnnnnnnnnnnnnnnnnnnnnnnnnnnnnnnnnnnnnnnnnnnnnnnnnnnnnnnnnnnnnnnnnnnnnnnnnnnnnnnnnnnnnnnnnnnnnnnnnnnnnnnnnnnnnnnnnnnnnnnnnnnnnnnnnnnnnnnnnnnnnnnnnnnnnnnnnnnnnnnnnnnnnnnnnnnnnnnnnnnnnnnnnnnnnnnnnnnnnnnnnnnnnnnnnnnnnnnnnnnnnnnnnnnnnnnnnnnnnnnnnnnnnnnnnnnnnnnnnnnnnnnnnnnnnnnnnnnnnnnnnnnnnnnnnnnnnnnnnnnnnnnnnnnnnnnnnnnnnnnnnnnnnnnnnnnnnnnnnnnnnnnnnnnnnnnnnnnnnnnnnnnnnnnnnnnnnnnnnnnnnnnnnnnnnnnnnnnnnnnnnnnnnnnnnnnnnnnnnnnnnnnnnnnnnnnnnnnnnnnnnnnnnnnnnnnnnnnnnnnnnnnnnnnnnnnnnnnnnnnnnnnnnnnnnnnnnnnnnnnnnnnnnnnnnnnnnnnnnnnnnnnnnnnnnnnnnnnnnnnnnnnnnnnnnnnnnnnnnnnnnnnnnnnnnnnnnnnnnnnnnnnnnnnnnnnnnnnnnnnnnnnnnnnnnnnnnnnnnnnnnnnnnnnnnnnnnnnnnnnnnnnnnnnnnnnnnnnnnnnnnnnnnnnnnnnnnnnnnnnnnnnnnnnnnnnnnnnnnnnnnnnnnnnnnnnnnnnnnnnnnnnnnnnnnnnnnnnnnnnnnnnnnnnnnnnnnnnnnnnnnnnnnnnnnnnnnnnnnnnnnnnnnnnnnnnnnnnnnnnnnnnnnnnnnnnnnnnnnnnnnnnnnnnnnnnnnnnnnnnnnnnnnnnnnnnnnnnnnnnnnnnnnnnnnnnnnnnnnnnnnnnnnnnnnnnnnnnnnnnnnnnnnnnnnnnnnnnnnnnnnnnnnnnnnnnnnnnnnnnnnnnnnnnnnnnnnnnnnnnnnnnnnnnnnnnnnnnnnnnnnnnnnnnnnnnnnnnnnnnnnnnnnnnnnnnnnnnnnnnnnnnnnnnnnnnnnnnnnnnnnnnnnnnnnnnnnnnnnnnnnnnnnnnnnnnnnnnnnnnnnnnnnnnnnnnnnnnnnnnnnnnnnnnnnnnnnnnnnnnnnnnnnnnnnnnnnnnnnnnnnnnnnnnnnnnnnnnnnnnnnnnnnnnnnnnnnnnnnnnnnnnnnnnnnnnnnnnnnnnnnnnnnnnnnnnnnnnnnnnnnnnnnnnnnnnnnnnnnnnnnnnnnnnnnnnnnnnnnnnnnnnnnnnnnnnnnnnnnnnnnnnnnnnnnnnnnnnnnnnnnnnnnnnnnnnnnnnnnnnnnnnnnnnnnnnnnnnnnnnnnnnnnnnnnnnnnnnnnnnnnnnnnnnnnnnnnnnnnnnnnnnnnnnnnnnnnnnnnnnnnnnnnnnnnnnnnnnnnnnnnnnnnnnnnnnnnnnnnnnnnnnnnnnnnnnnnnnnnnnnnnnnnnnnnnnnnactaccgcacgcacatcggggagaagccctacgagtgcgccnnnnnnnnnnnnncctgtccacgctgctggagcaccggcacannnnnnnnnnnnnnnnnnnnnnnnnnnnnnnnnnnnnnnnnnnnnnnnnnnnnncctgtccacgctgctggagcaccggcacacacacatcagcgagaagcccttccagtgtgcgcagtgcgacaagcgcttcacgcgcctggccaacctgaccgtgcaccagagggtgcactcgggcgagcgcgccttccagtgcgcccagtgcggcaggcgatttgcgcagaagcccggcttcctgcgccatctgtgcggccactcgcaggagaagcgctatccttgtagcc

SEQ ID NO: 38804 - DNA, 946 bp, Macaca Mulatta
gacgagggatgtgctattcataagcttgttaagttatgagttagtcataaaaatattccaggcagtttttgaccttcattctacatttctgggcatttgtaacatggtattctactggtatatatttttaaagtttgcatttagattatgataaagaaatttcaagtgtatttcttctaataaagtattaagacagtgtttcagaatatcaaggcacacctccttagttttaggttagaactctacaaacaattttgtgaatgttcaaagtattttgagttaaggctagttcatactttgaaatttttgcagcaaattgctgtgtctaagttgattaatcacacaatacatacttttcctgcattttctttcagtgacatttgagaattgggtgacattttaaaatgtgctttataccatttagcttttgcaaacaagttctaaagttttggagcaaaagtggtgtggtcaagagttgaagtctcatatatctttagtagcactcccatgaattatttccatgacaataacaagtgtgtgttccatatctgattggggcactggttagactgcattaatagctaatgaagagtgttatttgattagaattcaaacttttaaaattttgaaatgtttaagaatgtattagaaaatgcatgctttatgttgaaaaaatacattgctttaacattcctcattctttaagaaatttatgttaattttgcctgggcaccaacttcatcagaaacattttgtggaagttacattttccctcttgttaatttatccacggtcagtattgattgatcttgaaacctggtcccttcatttctatcccatgaccgcagtttttaaaaggcgaaatgggcacaaacagttcctaaatccaagacgtgtctcaaagggtggtgacacttcttaaccaaaggcaggtagtgtctcacaa

SEQ ID NO: 38805 - DNA, 781 bp, Macaca Mulatta
  misc_feature (1)...(781): n = A,T,C or G
atcagctgtctggagagaatgacaggcagaacatgacccctgggctcgactctgaaagctgaataagtgtcactatgcatgtaagggtgaagcacattttagccagtggagcagcacaggctaaggcataggtgttgggctaaaggagcaccggcactgcattcttggaggttacctgtgtgtgcctgcaggggcacaacgtaggtggagaaggatgggtagctgatgaggacagagaagcaggttaggaccctcaggaaaatcccaagaccctctgaacaatactacattatatatatataatactacattatatatatatataattttcttacttttaattgagacagtgtctcactttgttcagcccaggctggaatgcagtggtacaatcttgggtcacctgcaggctcaagctcctggggtcaagcaatcctcccatctcagccctctgactacctgggactacaggcacgtgccactacacctggttcattttttacaccttgnnnnnnnnnnnnnnnnnnnnnnnnnnnnnnnnnnnnnnnnnnnnnnnnnnnnnnnnnnnnnnnnnnnnnnnnnnnnnnnnnnnnnnnnnnnnnnnnnnnnnnnnnnnnnnnnnnnnnnnnnnnnnnnnnnnnnnnnnnnnnnnnnnnnnnnnnnnnnnnnnnnnnnnnnnnnnnnnnnnnnnnnnnnnnnnagtctggttttggaactcctggcctcaagcgatccatccgnnnnnnnnnnnnnnnnnnnnnnnnnnnnnnnnnnnnnnnnn

SEQ ID NO: 38806 - DNA, 764 bp, Macaca Mulatta
  misc_feature (1)...(764): n = A,T,C or G
gggtttggaaatgctgagaagtcagaattgcaattactcagtgtaggataaatattagctataaatataattatgtataaatataatgaatataaatattagttataaaaagtataagactcttccaactcgtaatgtttctaagtctactaaaaaattaaagagttttaatagcttaggagttggtagggtaaaaggaaaaaccacaaacaatgatgttggaatgcaagaaatataattcgatagcgcagaggtgagcaaaaaggtttgttgggccaaattcagcaaaattcaatgcagaaaatacttactgtctggcccattaaagaaaatgtttgctgatccctctatgtcatgaaaagataaacttgaatttgatttgtatggcaaaaagtagaggtatgaagtaaaatgtatagtccattttcacactgccagaaagatactacctgagactgtacagtttgtaagaaaggaggtttaattgactcacagttccacagggctgtggaggcctcangaaacttacagtcatggcaaaaggtgaaaggcaaagcaaggcacaaccctttacacggcggcaggccagagaggaagcgaaaggggaaattgcttccctgagaaactcctcacttgacatcattgagacgaagcatgggggaaaaccgcccccccataatttcaatcccccttcccaccagggttcccttcccccgaattatgggggattacaaattccgaggaagaaaattttgaattggggg

SEQ ID NO: 38807 - DNA, 736 bp, Macaca Mulatta
  misc_feature (1)...(736): n = A,T,C or G
gggtatttttaatagagacagagtttcgnnnnnnnnnnnnnnnnnnnnnnnnnnnnnnngccttatgtgatccgccccccttagcctcccaaagtgccgggattataggtgtgagccactgcacccggcctgtagtagcttaaaattttctttgagaaaattccttattttaaaaataacccttgtataaatacaagtgattatgacaaatgatgtaaaaatggcattcatgatgtctgaaacaagcctaaatagaattcaagattaaactaaatgattttcactgggcacattcaaggttttacattctatgattgaaaaaaaatttgttttgaaaactttatttcatattctttcctgtaggattttgctacagataactttgggaatgaataaagtggaatggtaacttttcagtggttcagaattgaattagacttcttgtgattgtgatgtttggtttccattcaaatatatgaagtgagatgtcatatcctgaatatagtttctcttccccaattactgataccatgtctgtcagccagtaaagattaagaacagagtttctctaaattcctctcattattccactaaagcacattaaaataattttggggaaaccagacatcacagatttttccatgaaagtcctaaaatctttaaagtcagaataagtatcttagttactggacgtattcaagtttttttcctcccttgggtgataatgtcatttgca

SEQ ID NO: 38808 - DNA, 333 bp, Macaca Mulatta
atatccaaagggtgccatttacttccaaatgtatttttttctgtttggtagtctcggggctcaaaaatatacactgccatacaactaagaaagaatcaatttagggaagatggtcatatgtccttccatgtggctattaataaattagccagtaagaaaaaacagatgactccttgttctcaccctagtccttatttcaagaccataaattttcgttaagagatgtttcaacacaaaaccagatgtgttaatcccctgaaaaatttgttttttaaagaaaaaagaattcaaggagcacaactgttgactatgaatgatttattcttcatctac

SEQ ID NO: 38809 - DNA, 489 bp, Macaca Mulatta
aatatgcactgaataatacagaatgttggagtggctcaacgctttcatgtgtcactattgcaaacctcttgctgttgccttttccctgcttctttttacctggtaaacttatattctgattttagattgtattctctactttaaaagcagaacctgaaattttgggaaaagaaagagagaaagggagagaagaagagaggtggagatatttattgtcttggttggggtcagaagtaatgtttgccaggtattgttctaattgctttgtaaccattagtactgtccctagtcattggcaagaggagcctgataagttatgtttatttataaaaacacgttgatgtagatatgtccatgaggaattgttaaataaaaaaatatatagaattggaaaaaaaacgttgatacgtctgctatttgggatttgatgtttagggctggtacagtacaatctgtgactctagacatttttttcatcattaatactat

SEQ ID NO: 38810 - DNA, 796 bp, Macaca Mulatta
  misc_feature (1)...(796): n = A,T,C or G
ggtatcttatcttctaaaatacaactgtattataattgaaatgacagcccaaaattggatggtttaccaaaaccaatgaaaggggtttcacacatcagtttatttctgttttgaagagcacatgctatataataattgctagtagcaattgcagtaaaacaggtgataagttattttctatgaaaagatccagtcctagagcaggattcttcgatcattcatggcagagtgaaaaaggtttgtatggttcttgtccagataactcagttcttaaaattcttcaaatgatcataaaccattatcctttaaaggtttatttgaagatgctgttaaagtacataattttgtgtacaggtagattcccccctcattaatagtgccttaattaatacagactggtgttagctataacaaaactccagtaaggccaaagaatccgaagttcnnnnnnnnnnnnnnnnnnnnnnnnnnnnnagggtcagattttcccttctaatatcattggagataatgttgcgttgatttattcataaagtattttaactgtaggaactctagaagataatggttagggaannnnnnnnnnnnnnnnnnnntggttggcgtaagttgtattttgaaattcacttattttaaaattgaagaggattgtaatcatggaaacagatgtttgtgtctacctgccccacattttcttaaatatttcatatgcagataatgaagaaccaacctgatggctggccctgtaagtctgccggcctaatttgggatttggttttgcctcccggttaaggta

SEQ ID NO: 38811 - DNA, 1019 bp, Macaca Mulatta
gggaagcagtggtatttgttttaaagaaacgtttctttgggagggcagtttctgtctggactttgaggtggacttagttatccctacagttcttttaactctcagcttttaataaaagatgaaatcagatattgatgcagttgggtcacaattctttaggatgcttctaccccagggctgcttcctgttcctagtcatggttttccagtttagtagtggagtttcttgaggctaacttagagaaatttctcactgaaaactttaagagttattgatacttacttgttttttcagttaatcatttacatcacctttcctactctctggaatttaaatttatttctctaggctggtcctggaagttgataaccttttggcaaagcttagatttaggagaaggcttatgagtccctgtccagagggtctgtagattctctttgcttatgactctctgcctgcagccctggcagaccatactgtatgtcatggatacccagtggaaatattactgagatgaaacacatttcccagggtatttaaactctcactctgccacctttctaagggtgggaggctggcagagagatgctgcaatgcttgataatcatttggccacactgaaatttccaaagggagctcttgccggtgcttaaaaccaaaacacctggacacttagaaaattccatgaatctagcacaaaatatccattcttgcccaagtgtatccccctttctctccagcttaatctttttttttaaagcccaggccaagggtacttttaactggaaaccagggggaggagggaagaacactagtcagggagctaagagagcaggttgcctgggtaaacccatccctgctcccacccgggtgccctgtatcctgaatttgctgaattgccctgggcgcccaatggccctttcccttcaccctggcaaaatgggaggcccaattctcttttcccaccctgggggggagggagaaacccctcggcctaattcccgggggggtaaaacttt

SEQ ID NO: 38812 - DNA, 807 bp, Macaca Mulatta
  misc_feature (1)...(807): n = A,T,C or G
ggggtcattcccaaatctgtgtgtgaaaaatggcaggtctagtttgggcattgtgattgcattgcagattactaagagaaggtaatggtgggtataccggtagtgctcttttgttcttgcttcgtttttttgcacctgaacttcgttagatttcataatgcttttttggcattttaataagaggaccctgaggtgggagttgtgggagaccgggagaaggggacagcttggcactggtcacgtgggaaatgcaggttgaagggaaattctctggggctttggggagttttgtgcggtgggtgagccaagaaaatactaattaataatagtaagtgttggttaagttgttgcttggaagtgaaaagttgcttagaaaggttagaactttaagtgnnnnnnnnnnnnnnnnnnnnnnnncaattgttttcctttgctgcaaggtggggaagactgaaaaagtgtaaccgaaaacagatgacacagagtcacccgttttcctagaacccacagggaggggtgtatgatgccatctcacaggcagggcaagtgtctttaccaaccttcctcccggtgacccaggcagcctgttttagagggttgtttttgtttgggggtgtggggtggtatcaagtgaaattaatcactagaaaagatgagttgtccagactttgtagaccccagcagaatcagcatccctttcgctggccccctaaccaacttggggtgggccaatcctgaaaactgttgaaagtggtgaattttttcagggagctggggaaatccttagaaaaaacctttgtaaaatgc

SEQ ID NO: 38813 - DNA, 629 bp, Macaca Mulatta
cgcacgccacgagggcgtatgggtgctgggcctctgctgcgtcctgctgaccttcgggtcggtcagagctgacgacgaagttgatgtggatggtacagtagaagaggatctgggtaaaagtagagaaggctcaaggacggatgatgaagtagtacagagagaggaagaagctattcagttggatggattaaatgcatcgcaaataagagaacttagagagaagtcggaaaagtttgcctttcatgctgaagttaacagaatgatgaaacttatcatcaattcattgtataaaaataaagagattttcctgagagaactgatttcaaatgcttccgacgctttagataagatacggctaatatcactgactgatgaaaatgctctttctggaaatgaggaactaacagttaaaattaagtgtgataaggagaagaacctgctgcatgtcacagacaccggtgtaggaatgaccagagaagagttggttaagaaccttggtaccatagccaaatctggaacaagcgagtttttaaacaagatgacggaagcacaggaagatggccagtcaacttctgaattgatttggccagtttggtgtcggttactattccgccttccttgtagcagat

SEQ ID NO: 38814 - DNA, 1804 bp, Macaca Mulatta
ccggcagcaccatgtcgctcatggtcgtcagcctggcgtgtgttgggttcttcttggtccagagggcctgtccacacacgggtggtcaggacaagaccttcctatctgcccggcctagcgctgtggtgcctcagggaggacacgtgacttttcagtgttactatcgtcgaggacttaacaactttaccaacttcactctgtacaaagacgacagaagccacgttcccatcttccacagcagaatattccagcagagcttcctcatgggccctgtgaccccggcacacgcagggacctacagatgtcggggctcatacccgcactcccccactgagtggtcggcactcagtgaccccctggcgatcatggtcacaggagtccacagaaaaccttccctcctggccctcccaggtcccctggtgaaatcaggagagacggtcaccctacaatgttcctcagataccgtgtttgggcacttctttctgcacagtgaggtgacctttgagaagcccttgcaccttgttggagagctccatggtgggggttcccaggccaactattccatcaattccacgacgtctgaccttgcagggacctacagatgctacggttctgtcactcactccccctatgtgttgtcagctcccagtgaccccctggacatcgtgatcacaggtctatatgagaaaccttctctctcagcccagccgggccccacggttcaggcaggagagaacgtgaccttgtcctgcagctcccagatctcgtttgacatgtaccatctatccagggagggggaggcccgtgaacttagtctctctgcagtgccaagcgtcaatggaacattccaggccgacttccctctgggccctgccacccacggaggaacctacagatgcttcggttctttccgtaccgcaccctacaagtggtcagacccgagtgacccactgcccgtttctgtcacaggaaacccttcacgtagttggccttcacccactgaaccaagctgcaaaaccagtatcaccagacacctgcctattgtgattaggtactcggtggccaccatcatcttcaccatcctcctcttctttctccttcgtcgttggtgctccgacaaaaagagactctgaagaacaagaccctcaggaggtgacatacgcacagttggatcactgcgttttcacacggggaaaaatcactcgcccttctcagaggcccaagagacccccaacagataccagcgtgtacatagagcttccagatgctgagcccagatcgttgtctccagcccaggagcaccacagacaggcctggagggggtcttctagggagaccacagccctttctcaaaaccagcttcacagctccaatgtaccagcagctggtatctgaaatctcgactctgcatcttagagcattgctcttcctcacaccacaaatctgctggctctgtcttgcttaccaatgtctgcggttcccactgcctgctggagagaaaacgcactcctttgcttatcctacaattctccatttcacttgacccctgcccacttctccaaactaactggcttgcttcctagtcctacttgaggctgcagtcacactgaggagctcacaattccaaacatacaagaggctccgtcttaacatggcacttagactcgtgctgttccaccttccctcatgctgttccacttcccctcagacgatttttcagtcttctgtcatcagtaaaccttataaaaatttgttgtgatttctatgttgctctctcgtcttcaaataaacgtgactgtccaat

SEQ ID NO: 38815 - DNA, 880 bp, Macaca Mulatta
  misc_feature (1)...(880): n = A,T,C or G
gttccccacccagcggtggtttccctnnnnnnnnnnnnnnnnnnattttctgccccggggggtaaaaggttcttccacaatttcttccaattttttttttaggaaattgggtaaggtttttttttacaccgccaatccacccgggaaaagtttggttggcccttttttccaaattggggccaaggttttgggccaggttttggcctcctgggatttctatttacaaaaatttctttaagcccaggttttccatttaaaccattgtgaaaaaatgaaaggccttgccctttttgttcttccaaattggtaaaacagggtgtaaaagcttttaaaaacaattaatctcacaaacttcaaactggtaattggcgaaattctccttttccaatcccacaatgttttcgttcaacacaaatctgggggtagcagtaaaacgttcatcccgtgtgttagggctatagatacataccacatgctctcataatacattctactgtgatgatgtattcatgttttaagcaattttccataatttcattgaggctttaagaaaaagggcaacactatgtctatttttaacattgaaagaaatcataaatataccgaggttcaatggcactactgacagaactgctgctgaacgtggaaagagcgcagtgcaccagctgtaagaagtcactttcaggtaaagtataattttactttcccccagtaataccaattgtaagagaaattgcatactgtagcagtttggctagtcagttctcctaactttccggcctttccaattttattcaggcttttcaaaaatcagtgagccatcagatttactttcttcccaaagaaattcaaatacgaacacttgaaataaataggttcc

SEQ ID NO: 38816 - DNA, 855 bp, Macaca Mulatta
  misc_feature (1)...(855): n = A,T,C or G
gggagtgcctcagctctaagagccgtggaacggggggtagggaaggtttgccatctggagctcagcaactggctcagcaatgttttttccatttcattagcactaaacaagtctcttgctctcaggaatttgtcagaaaaagaagaaaatcacctgagactccacgtaccagattataaactcttctcataggtttgaattgcttactcacatgtcataaattaaccacagcttcatttgaccaccaggtctaaagtctgttgacagtttcagcatgactgaatcgctcatatgnnnnnnnnnnnnnnnnnnnnnnnnnnnnnnnnnnnnnnnttcagaaaatggcttggttctctttagagttggtgtaaacatgccctggtataaatgattttcacttaatggtacaacaaaaatattgctttcctaaatgtatgtgttagtaaaattcaaaatacacaatttagaaaattttcttttcttcaaaaatcttaaaccccaaattttgatattttctaaaaaaattgcacctggtaagttcaatggggataaaacatggctaaaagaacttttaactggggattctttaaaaaccgaaataaaaaaatatttaaataaaaacttttgnnnnnnnnnnnnnnnnnnnatttatttcaaaaaaatatttccccttaaggtttcacaaccaacttgggcccaaaaagaattaatgtggccccttttttaggggtacccctttttctcccctaaaaaaacaccgnnnnnnnnnnnnnnnnnnntattaaaaacggtgaagaaaattttttcccacctcatttttttaaagaaacaattccnnnnnnnnnnnnnnnnnnn

SEQ ID NO: 38817 - DNA, 2342 bp, Macaca Mulatta
  misc_feature (1)...(2342): n = A,T,C or G
atgagcccagatagaaatatcaaatgcagagcctatctggtttcacagagacaaccatttgtgatttgctgttctgtgagagtgtggattctttccatcaactgctgatttcatcttcaggaagcaagtccataacatgacatatctggattttgtgctaagaaccttaaattggaagcattcttaattatccatctaaatttacaagaagattatttcaaaacagtgctttctttcccttggtttcatcatttattttaaaccaaattccttcagtatctgataacagcatcatctacctcagtcattaggatttcttaataaaaaagagattgtatttttgacttggttattaagataattgaaattagcccttcatttgaaatttgacatcagctttgctgttctaaatttaaaatgagttgcttcatcagtaccacacttccagtttctataccaagccagtctcctcagttttcccattaggatggacatgttctgttcagcatgccatttctataatgcttcatgcagagaattcggtcatagtattaaagagaagatacagtgaggtcacaatgtctccagagctaaaagttagtgaacaagaaagtaagtctaaattgatgaaagaatgaggagttttcttatcttctgcatattccttggaagtcaggacaagatgaaaaacatccaaaagaagtgaaattggtgacagaatgagaggagcagagcattccagtgtagtanatganatgtttgaatgactttgccagatcagagcaagtaatacttctgtatctgannnnnnnnnnnnnnnnnataaggctaatgcaattgcattccagataggggttaatgtcagatttccgtggctggaagctgtgcttttggcatatcacagtgttgtgtcagtactacaaggtaaagcatcnnnnnnnnnnnnnnnnnnnnnnnnnnnnnnnnnnnnnnnnnnnnnnnnnnnnnnnnnnnnnnnnnnnnnnnnnnnnnnnnnnnnnnnnnnnnnnnnnnnnnnnnnnnnnnnnnnnnnnnnnnnnnnnnnnnnnnnnnnnnnnnnnnnnnnnnnnnnnnnnnnnnnnnnnnnnnnnnnnnnnnnnnnnnnnnnnnnnnnnnnnnnnnnnnnnnnnnnnnnnnnnnnnnnnnnnnnnnnnnnnnnnnnnnnnnnnnnnnnnnnnnnnnnnnnnnnnnnnnnnnnnnnnnnnnnnnnnnnnnnnnnnnnnnnnnnnnnnnnnnnnnnnnnnnnnnnnnnnnnnnnnnnnnnnnnnnnnnnnnnnnnnnnnnnnnnnnnnnnnnnnnnnnnnnnnnnnnnnnnnnnnnnnnnnnnnnnnnnnnnnnnnnnnnnnnnnnnnnnnnnnnnnnnnnnnnnnnnnnnnnnnnnnnnnnnnnnnnnnnnnnnnnnnnnnnnnnnnnnnnnnnnnnnnnnnnnnnnnnnnnnnnnnnnnnnnnnnnnnnnnnnnnnnnnnnnnnnnnnnnnnnnnnnnnnnnnnnnnnnnnnnnnnnnnnnnnnnnnnnnnnnnnnnnnnnnnnnnnnnnnnnnnnnnnnnnnnnnnnnnnnnnnnnnnnnnnnnnnnnnnnnnnnnnnnnnnnnnnnnnnnnnnnnnnnnnnnnnnnagatattgccaacatgttagctctttctgatgctgatgaatttcaaacatgatcagacgcccttgatgtgggtttgtcaagaacatacaagaacacgaaaagttgccaggctcactcatcccaagaaaaaagaagcatgaaaagcatcagcaatcagtgactgatgataatgctgcattaatgggaatggttttatttctaaatcagattatttctacctaaaatcttttattggtttgtttctaaagcaattgactcactaagtttgtgaactataaaggaacacatcatgattgaatcctgtgttaagcagaaagtaaaaccagagccaggcacagtggctcgtgcctgtaatcccagctatttacgaagctgaggcaggaggatcgtgtgaagccaagagttcacgactagcctgagcaacatagagagaccctgcctctaaaaaattttcttttaattagcaaggtatggggccatgagcaaattgcttgggcccatcagtttgaggctgtggtgagatgtgatcacaccactgcgttccagcctatctgacagggcaagacctcctctctaaaaaataaagagaaagcagagtacacctggactgtgagatatgactaaagttctgtgtgatacgtgtgccttatttagctcaagacatttctagagcacatataaaaactgacttgtcatccaggctgtgtctc

SEQ ID NO: 38818 - DNA, 859 bp, Macaca Mulatta
gggaatgaagataatataaaacccaaacttctctgtattcgtgtactttcacaaacaaaggcttacaattccacatgaaagtccacatgaggtaagtgtgcattcatgagcatgtgtgcactccaggcaaaccaacagaagataaacagcaaggaaaagcagttgttttgtgaaaaataatcatctgttagctgtaaatctgaaatattggcaaatctgaattcttgtttctcaaaatgaggcttctgaaattttcacataactgccaaactcgtatttgtaatttgttaatatgccctaaagatcatctttctcttttgtagacatttagtgtatacagtccacataaatacatatactgattacctacagacaataaggagacttcagaaagaatcaaaagcaatagtgatggtggaatttttaaataatattcagctggggggaaatagactgagtttgtgtgatttcaagttatttagagttactattttaatgtaaacgtaagaaaggcttatgactattatcaccctctatagaatattaagactaaaacctaaaaactattaccctatgggggcctgtttttttcttttggggattaaaataaaagccttttcctaccattatcccccaaaatacttcctaaaaggcgtaaaaggaaaacctttttcccaagttaaaaaaatttcctaaaaatttaaaaatccagggccctggggcatgggtgggcctccacgccccggtaaatcccaaccacttttggggaaggccccaaaccgggaaaggaattaacctggagggccaaggaatttccagaaacaattcaaaaatggggtgaaaacttcctcccctccgc

SEQ ID NO: 38819 - DNA, 792 bp, Macaca Mulatta
  misc_feature (1)...(792): n = A,T,C or G
ggtcttggctcactgcggcctccatctcccaggttcgagcgatgcttgtgtctcggcttccccagtggctgggattgtgggcgcttgtggtcccagctgctcgggatactggggcaggagagtcgcgtgaacctgggaggcggaggttgcggtgacctgaggttgggccattgcactccagcaggggtgacggtgtnnnnnnnnnnnnnnnnnnnnnnnnnnnnnnnnnnnnnnnnnnntagggcttggtccttagacgtttctactatactctccctaagttcttggttttaaattaatggagatttttatatttctagcctgtacctttctttgggagatcaaggtttgtctaagtgccaacttgatatccccacttggatgtcagacaggcatttaacatacaatgttctaaaatggtatcatctcaattgtacccacccttttggttgcttaagccaaaatcctctgtggtcatccttgaccattcagttgattcaaaccatatctatctggagtctaatcagttattaccacctttcgctattttgaactaccccccctttctaccttgggattgttaactggctaaccttgtccaagtcccccttttgaagaaagtcttttatttttttataaggcagggatctcacctccggttgcccaagaatggaatggcagtgattacaatcctaggcctcactggcagcttttcctttccctggggccccaaaccgatctcctcctgcccttaaaccctcctgagataacctggatacctacaaggtgaat

SEQ ID NO: 38820 - DNA, 782 bp, Macaca Mulatta
  misc_feature (1)...(782): n = A,T,C or G
gggacaaaaattaagttcggtcttacagctgtaattggaaaatgaaataattcttttatatttgactttatgagcttttattataaattatatgataaaaaatgagtctgttaaaagggctttcatgaataattataagcaagccatctatgaacttcaaaggaatgcctgaaatctttctctcatattattatttaataattttcaaatgctgttgaaatgagattttctgtcttttagctattcaataaatatgcttttatataagtaaattaaaactagatagtcttaaataatgagttaggaattatgagcactagagtagatcagagtgttagatttttgtgaggacgttcactacccatatgcgtgttttaaaagaaaattgatagtaatcccagtactttgagaggctgaggcaggtggattgcttgaggcnnnnnnnnnnnnnnnnnnnntgtnnnnnnnnnnnnnnnnnnnttctactaaaagtacataataattagtcaggcatggtggtgcgnnnnnnnnnnnnnnnnnnnnnnnnnnnncgaggcaccagtattgcttgaacccaggaggcggaannnnnnnnnnnnnnnnnnnacgccactgtactccagcatgggtgacagaacaagattgtgtctnnnnnnnnnnnnnnnnnnngatttattgcattaaaatgcccgatttattttcctgtnnnnnnnnnnnnnnnnnngctgtattgtgggattctggtaacaggaaacnnnnnnnnnnnnnnnnnnttccttatt

SEQ ID NO: 38821 - DNA, 701 bp, Macaca Mulatta
actatcagctggggtgacagggatctttggactatcagctggggtgaaagggacaactggatcattagctggggtgacagagataactggatcatcaactggggtgacagggaaaactggattatcagctggagtgacaggaaaaactacagtatcagctggagtaacagggacaactagactatcagctaaagcaacagggataactggactatcagctggggtgacagggacaactggactatctgctggggtgacagagacaattggactatcaactggggtgacagagacaattggatcatcaactggagtgacagggacaactggacagtcagctggtgtgacaggatcaactggacaggcagctgaagtgacagggacaactggacaatctattggagtcacagggacagctagatcatcaactggagtgacagggataactggactatcagctggactgacagggacaagtggactatcagctgtggtgacagggataactggactatcagctgaagtgacagggacgactagactgtcaactggggtgacagggaaaactggacagtcagctgaagtgacagggacaataggacaatctgttggagtaacagggacagctagatcatcagctggagtgacagggataactgaactatcagctggagtgacagggataactggactatcagctg

SEQ ID NO: 38822 - DNA, 670 bp, Macaca Mulatta
  misc_feature (1)...(670): n = A,T,C or G
ggggattcaggggcggccggctttgttgggtgggcttggtttggtgtccctgcggctgaccgtgattggtgattcgcagcatcttcgtaaccgctaacaggtcaaaatgcagnnnnnnnnnnnnnnnnnnnnnnnnnnnnnnnnnnnnnnnnnnnnnnnnnnnnnnnnnnnnnnnnnnnnnnnnnnnnnnnnnnnnnnnnnnnnnnnnnnnnnnnnnnnnnnnnnnnnnnnnnnnnnnnnnnnnnnnnnnnnnnnnnnnnnnnnnnnnnnnnnnnnnnnnnnnnnnnnnnnnnnnnnnnnnnnnnnnnnnnnnnnnnnnnnnnnnnnnnnnnnnnnnnnnnnnnnnnnnnnnnnnnnnnnnnnnnnnnnnnnnnnnnnnnnnnnnnnnnnnnnnnnnnnnnnnnnnnnnnnnnnnnnnnnnnnnnnnnnnnnnnnnnnnnnnnnnnnnnnnnnnnnnnnnnnnnnnnnnnnnnnnnnnnnnnnnnnnnnnnnnnnnnnnnnnnnnnnnnnnnnnnnnnnnnnnnnnnnnnnnnnnnnnnnnnnnnnnnnnnnnnnnnnnnnnnnnnnnnnnnnnnnnnnnnnnnnnnnnnnnnnnnnnnnnnnnnnnnnnnnnnnnnnnnnnnnnnnnnnnnnnnnnnnnnnnnnnnnnnnnnnnnnnnnnnnnncatcc

SEQ ID NO: 38823 - DNA, 139 bp, Macaca Mulatta
agaaaagcgccctcatcaagctagccaacatccgggcagcggaagaggtggaggaaaagagcttgggcaggtcgcacgtcatgcaagtcatctacacggatgatgtcggcaggccacagactgcctacctgcagtgcaa

SEQ ID NO: 38824 - DNA, 825 bp, Macaca Mulatta
tgatgagggaaagagaacatgaaatgaacgtcctctatggtatagctcagaggcagaagcaagaagaggtacaggaagtgcttcaagaagcagagaaaacacatcaggccactcttggcaatgtgatggatacactggccaacacccagggggagctgctgtctatagcaaaacaactgggaatcatgacaaattggaaagatttcctagaggaggaattacaggaaaccaggatggcatttcaaaaatacatcaattatacctttcctaagctttcaccaggacatgcagattttattctgccagaaagaaagaaaacaccttctaatcttgttattgaggagaacaaaacaactcttgattagaagtcttcaactgaaatttcactacaaaagacatcattctagactaaataaattaactcattacaaaaaccatttattgatttcccagccttgtgcagggtactattgggctgtaagatttttcatggaaaaccaaaatattaaaaagtacattccagattatagtgagccaagtctgagaagaaaaaactgtgagagggagcaaactgattaaaaggggaaaggttttttggatgaagcctaaacacgcttctgtatctgtctttattcatttatacatcagacatataattaattatttcagtatttattgctatagaaaacaagtaaaggaagtgtccttaggtttttcctgttttgggcaggtgtggtaagttccagtagagagattatcatttggtgaatgcagtagcattgtgaatttaaaaaagcaatttctctcacatacagtaggataaaa

SEQ ID NO: 38825 - DNA, 112 bp, Macaca Mulatta
  misc_feature (1)...(112): n = A,T,C or G
tgttctggacttggtgcctctttttgttatanntgctttcctatttanngttgggagaccacgttgtatacaaatacctaacagaaaaagcagtaaaatggtcacagcaggt

SEQ ID NO: 38826 - DNA, 818 bp, Macaca Mulatta
  misc_feature (1)...(818): n = A,T,C or G
ggatgccccagttagacacatcgacatgattcaccactattatggcgatgcttcctacactatatcttatcatacagctaaagctactaaacacgaaccactaccaaccaccccttacaaaaaactccacccttcaactccacaacatccgnnnnnnnnnnnnnnnnnnnnnnnnnnnnnnnnnnnnnnnnnnnnnnnnnnnnntttaaatcaacccgctacgatccccattatcctattccctaccctactaatcttaacccccaagcaccccattaataatcgactagctaccattcaacaagacctgactnnnnnnnnnnnnnnnnnnnnnnnnnnnnnnnnnnnnnnnnnnnnnnnnnnnnnnnnnnnnnnnnnnnnnnnnnnnnnnnnnnnnnnnnnnnnnnnnnnnnnnnnnnnnnnnnnnnnnnnnnnnnnnnnnnnnnnnnnnnnnnnnnnnnnnnnnnnnnnnnnnnnnnnnnnnnnnnnnnnnnnnnnnnnnnnnnnnnnnnnnnnnnnnnnnnnnnnnnnnnnnnnnnnnnnnnnnnnnnnnnnnnnnnnnnnnnnnnnnnnnnnnnnnnnnnnnnnnnnnnnnnnnnnnnnnnnnnnnnnnnnnnnnnnnnnnnnnnnnnnnnnnnnnnnnnnnnnnnnnnnnnnnnnnnnnnnnnnnnnnnnnnnnnncaaatccgaaaagcctgtactagcacctatccaaccaccaaccctctgcataactctggctaaacttccacactttccggggattacataactacctcctagaaaatttgccagtaagcccctaaattcaagcctac

SEQ ID NO: 38827 - DNA, 379 bp, Macaca Mulatta
ggaagataaaaggggaaaaggtagaacagaaaatagaagggaaatgggtaaatgaaaagaaagcgcaagaagataaacttcagacagctgtcctaaagaaacaggtacagtaaacattttgcaccaaatgtgtgatgcctgtgacttgtgagaaatgtaatgcacatctgatttgggactgaggccacatgcatatagctcacatgcttgatcatttggcaagctgttcattttttcaagccatagcaatacacaagcatgcggcaattgattgatggctgaatattcaatcaaccaactttactgggacagccagtaaatttggctgtccaaaagacagagagaaattgattgctctgtgcttgattgttatgaatac

SEQ ID NO: 38828 - DNA, 834 bp, Macaca Mulatta
gggcaatctgaagtgcctgactgtccacttgtaggccaagaaaccattgtccacccccagcatgtttacagaggataggcttgtccagaaccatcaggacccatgtaaggtagaggaggtaggcagagccaatgagccctgcaccagctttgcagagtgtgtgtgtgatgagagttgtgagacggaggctctgtataagtggcttctgaacaaagaaggaaaggataaaaatggatgcccatggaacccaaacctgagcctgagaaacataaagattccctgaatatgtggctctgtccttctagtaaagaagtaatagaactaaagcaccaaagtcaatggttccttccagaattgctgattccttccaagtcataaagaacagcgccttgtaggagtggcttatcaggcccccatacaaagaaggaagtcctaaggaagtgcctaatactgaagacaaagctggcaaacaaaagctaaaaagccccatgagcacttcctggtgtccctttaacacagctgactgggtcctaccaggaaagaagatgggcaacctcagccagctattctctggagaagacaagtggctgcttcgaaagaaggcctgggaagtattacttaattcacctctacaggaagaatataacttccccccagaccattatggcctccctgcagtttgtgatctctttgcctgtaggcaacttaaagttggtaagttgctaaaaagaagtggttatatcgaactcatctacagatgtgaaggaatggacaagagttgagcagcctttctgctgattatcacacatcatgagctgagtgactgaggcttgc

SEQ ID NO: 38829 - DNA, 135 bp, Macaca Mulatta
tctagcctcctctgcttccagcaccaggaggagagcctggcccaggggcccccgctgttcgccacttctgtcacctcctggtggagccctcagaacatcagcctgcccagtgcctccaacttcaccttctccttc

SEQ ID NO: 38830 - DNA, 660 bp, Macaca Mulatta
gaaaagttattatgccaagctacgccaacaagaaattgagagagagagagagctagcagagaagtaccgggatcgtgccaaggaacgtagagatggagtgaacaaagattatgaagaaaccgagcttatcagcaccacagcttattacagggctgttggccccactgctgaggcggacaaatcagctgcagagaagagaagacagttgatccaggagtccaaattcttgggtggtgacatggaacacacccatttagtaaaaggcttggattttgctctgcttcaaaaggtacgagctgagattgccagcaaagagaaagaggaagaggaactgatggaaaagccccagaaagaaaccaagaaagatgaggatcctgaaaataaaattgaatttaaaacacgtctgggccgcaatgtttaccgaatgctttttaagagcaaagcatatgagcggaatgagttgttcctgccaggccgcatggcctatgtggtagacctggatgatgaatatgctgacacagatatccccaccactcttatccgcagcaaggctgattgccccaccatggaggcccagaccacactgaccacaaatgacattgtcattagcaagcttacccagatcctttcatacctgaggcagggaacccgtaacaagaa

SEQ ID NO: 38831 - DNA, 639 bp, Macaca Mulatta
agcatgcgcacactatgagctagggtgagcggtacctgacttggcctcaccttatgctccgaaattggagtgggtgccaggagtggggaggagtgggtgccaggagtgaggggagcgggagcaggcacttataagtctgccggggcaggggcacttcctgggcccccgagagctcagaggtgcctggatccggagctgcggctgggcggctgcagctgttcctgggagttcagggcttccgccctgccaactcagtgggtgatggggctcccgcctgttcctggctcctgttggccctgcagagtgcacaactctggccgcgcctcctctactgcagcttacgtctgcagcagccactcccgatgggccaccgctgccatcagtgagactattaatgtgtgcaatttgaggactcagtggtcttgccattgtttccttggttgtaggtgagtgttggctggagtgggggtgtgtgattatatttctgcgtgaatcgccagaatcttgaaccacaagtgtcctgctggcctgtttcactacgtaacaatgagtaaaacgtgatcatactcacagaaatcacaaagtggaaatcaataaaatgaaaagatctccttattacaaggtgagagtcccgaggat

SEQ ID NO: 38832 - DNA, 759 bp, Macaca Mulatta
ggctatttttatatttattctcatttggttcctgcttgaagctgtgtgtgaaaccttttctgtaaatgaagtggctaagttcattatctgtgcttggtggtccatgagatttccctctttatcctcaaaacaaacttcctgtagcttcagttgcttgaatggctttctactcctagtcacctatctatccttcagtaaaacattacttttatttttgaaaagcatatttaacatctaatgtgggcatcgtatagtattacatatttgggggtgcccatagcatcctttatggaaaatgctttggcagtggctggtgcctagtttggaaaagagcaagatacctgtattattttcctattgctggtgtaacaagataccacaaacatagtggctcaaagcaatactcatttattctctcacagttgtgtaggtcacaaatctaaaattatgttaaaaagtttgcttaagtacataataataataaactccaattaacattatttgttctagttatgagattgatttgcaaactcagtctgcagtaaggacaagatagcactgtaagtgaaaagaccccaaacgaagcaacatcacttactagttgtgtggtcttggttaagatactgaaactctcttagccatgtatcatatattgctgtgtaataataatgcctaaatcatagaatcattataagaatatatgaaagtgcatgtagcaatgtatatgtaaaaaattgttgggcattaactaaatgaatc

SEQ ID NO: 38833 - DNA, 594 bp, Macaca Mulatta
  misc_feature (1)...(594): n = A,T,C or G
cacagtgccgggcttacaatacatgagccactgtgctgaggagactgttttcaatgctctcttattctttcgtttntcagcctgagagacactctggtaagttacatggaaactaaagaaaatgaaattcttcctgaaatggaatctcagttcccagaaaagatactgctcgccagctgtgtctcagtgtggaaaacagctgctgtgctgaaacgggatcgacaaatgagatagaattatttcctcagctgtcttcggatgacgtgggagagaaggctcctctctcctctcctgcggtgtggacttcatcacggactggtgcttttgcattcagaaggaaagctgtcagcatagtaccgaattcaagaccaaggcgtgctacatgagctgacagctttttgaaggccgagctgtttctggaccatgtgtgtacatgttctgaaactttctcatgagtactgttcattgggagatgacaatgaagattagatgaaattggaaataaaccaatattgtttacattccaagagacaagtagctcagccacactcgcagcaatgatctgtgcccgctcgcctctggcactgcccaccc

SEQ ID NO: 38834 - DNA, 834 bp, Macaca Mulatta
  misc_feature (1)...(834): n = A,T,C or G
gggatactatgatggttgcatagttcagcagattgaataatgaagaaatgtattgtgtgtcctctgcacccttatggattgagtgagcagatcttacatgagaagtcactctgaccttccaatctctctaagcctttggataccttaggtcaatcacatgtccaattggagtttcagaagcagacaatagagacatcagaggaagaaatatccgtagataatgactgaaaataattttttttctgatttaatgaaagacacaaatacctggagttaggatgcagaaatgagtctcatataggacatacacctatacacattcacgcagctatgctcacnnnnnnnnnnnnnnnnnnnnnnnccaactagacacattatagtgtaaccgcagcataccaaaaacgaagttctcttaagaattagaaagaaaacagttacctacaaagacataaaagttaaattgctagtagacttctccacaataacaatgaacacaagatggtaatgaaataatatcttttaagtaacgagacaaaataatggttgttgggggatagtataaccagcataagtataacttatgaatgaggaaataatatagatattttcagatgcacgagaactgagtttaactagcatcatatcctcattaaaaatatttgtatatgatacaattcaggaagaaggaaatagtccccaagggaaagtgagagatgccaagaggaatgccaggtgggaattgtggatacattggcagacggatattgcccagaatttaggaatgaggaaggagaaggattgtattttttcatctatagttttgaacaacaatat

SEQ ID NO: 38835 - DNA, 160 bp, Macaca Mulatta
ctgcagtcggtgctgggtttcgtgttgtacgcactggtttttttcgtgggcttcttcacacattacttgctgccacaactccgctaacagctgccctggttctgcctgtcacagcccgtgctgaagccgctggagtacagccagtatgaagtgcgtggtg

SEQ ID NO: 38836 - DNA, 142 bp, Macaca Mulatta
tactgccgcctcagtccacttgtcggcccgtgtttgactcaactcagctcttttaacgctaatatttactggcaaaatcccatgcttgggtttttgtcactaacctgttaacgcttgcaatcccaataaagcattgaaagcc

SEQ ID NO: 38837 - DNA, 877 bp, Macaca Mulatta
  misc_feature (1)...(877): n = A,T,C or G
nnnnnnnnnnnnnnnnnnnnnnnnnnnnnnnnnnnnnnnnnnnnnnnnnnnnnnnnnnnnnnnnnnnnnnnnnnnnnnnnnnnnnnnnnnnnnnnnnnnnnnnnnnnnnnnnnnnnnnnnnnnnnnnnnnnnnnnnnnnnnnnnnnnnnnnnnnnnnnnnnnnnnnnnnnnnnnnnnnnnnnnnnnnnnnnnnnnnnnnnnnnnnnnnnnnnnnnnnnnnnnnnnnnnnnnnnnnnnnnnnnnnnnnnnnnnnnnnnnnnnnnnnnnnnnnnnnnnnnnnnnnnnnnnnnnnnnnnnnnnnnnnnnnnnnnnnnnnnnnnnnnnnnnnnnnnnnnnnnnnnnnnnnnnnnnnnnnnnnnnnnnnnnnnnnnnnnnnnnnnnnnnnnnnnnnnnnnnnnnnnnnnnnnnnnnnnnnnnnnnnnnnnnnnnnnnnnnnnnnnnnnnnnnnnnnnnnnnnnnnnnnnnnnnnnnnnnnnnnnnnnnnnnnnnnnnnnnnnnnnnnnnnnnnnnnnnnnnnnnnnnnnnnnnnnnnnnnnnnnnnnnnnnnnnnnnnnnnnnnnnnnnnnnnnnnnnnnnnnnnnnnnacacttcggggattaccttgcatccgggggtttacaattcacccggaagcccaacaaaagcccttcctaaaacaaaggnnnnnnnnnnnnnnnnnnntccaaggccccttacttctacaacaaatccctgggtcgggggatttttatttttccccccctaacttcaganaaannnnnnnnnnnnnnnnnnnggaagaccaaccccttttcaacccattatattcccgaagggggggtttattaatagggggcccnnnnnnnnnnnnnnnnnnnnngcaaaaaaagccagcgga

SEQ ID NO: 38838 - DNA, 806 bp, Macaca Mulatta
  misc_feature (1)...(806): n = A,T,C or G
gggaaataataaagatgatgagattagaatacaaggacattacagagtttagagaaatgcttgttttatgctcaaggatataaaggaaaacacgaatgtaagtaaaaagggagatataacaaaaaaccaaacaagttctagaaatgaaaagtaaactacacaaaatgaaaatctgacaggacagcagattagacattgtagagagaaaaaagattgtaaacttgaagacaggaatagaaagtattcacactggaagcaaagagaaaaaagactaaaaataaatgaacatttcaatcacctgtgtgacaagatcaactggtagttgttagccacatgtgagcatttcaaatgtggctagcataacagagaaattgaacttaaatttaattttaattaatttatgcagctacctgtggttagtggctaccacatcagacagtatagtcttagagcaaccgaaataatacaacaagatacatanggaagtaaatccatagtagagataaaatggaatacttcaaaatattcaattaatacagaaggcaggaaaagaggtaacaaagaacaatgaatagcaaaaatggtgaatactctaaataaaggcagtctgtcagactggataaaaatatgagaccccactatatgctaactacccacaactccacttaaatataaaaagcgatagggtaaaagtcaaaggattggaaaatgagataccccgtaaatgctaatccaaagccagcatggctaaacctagttagggaagtagacttttgaaacaaggggaaaaaagaggaaatcccctg

SEQ ID NO: 38839 - DNA, 724 bp, Macaca Mulatta
gagctgtaagctgatccctggagcaggtcttacataactgtgttagtctgctcgtccaaaagcagactccaagatagaataatatgcatggatttattaggggaaatgctggtgtgagagagaatgaggagagaactaggtaaggctgtgagagctatcagacctcgatgcaagtccacctgcgagggaggaagagaaggaagccaggttgagtggaagcatcccagacagctgtgcagtctaagagaacttcagcaaggtagtaaggagcttctccagccagtcatccattggggaggagctctatgtctcccagaaatgggtctgccttagtaagcatgcatgctcaggcactgccttgtaacggccccaagaaggtggcctaagcacaagcgcagagatgcagcagcagttgcgcctcattgtccattactttcgggggtcagcagtctgcaagggcacaggctcatggtgccacagtgaggatttagagaggccctcagggctttgagtaccgtgagacaattccatgagaccttcccttggacctgcaacaagaaggcctaggtttgcattcatagctgtaaaacactgggcaagtcccatttctttgcaattagccccattggtgatcaggccctatctcttatctctgaaacacttctgcgatccacctatctctccatccctgctatttctccagactgcttttcaccagtgcccc

SEQ ID NO: 38840 - DNA, 185 bp, Macaca Mulatta
cactgaaaccagcacacatgatcacagtaaaacctcattatatttcctccactatcactaacatcctttattctctggaaaatgaaaagttctgttgtgctcatatcatgcaaattatcactagtaggagagcagagagtggaagtgttccaggaataaagacccacaagataaagaagctcaga

SEQ ID NO: 38841 - DNA, 156 bp, Macaca Mulatta
gtgggaaagcttctcccaccaggttgtccccacaggctcccccgtctcctctggcctccaagccatcgtcagtcccaaagacctccatagggtcccctgggtctctgtcatccctgtgctcctcccagctaccagtgtcttcgtgtcccctgaagc

SEQ ID NO: 38842 - DNA, 667 bp, Macaca Mulatta
tggtctcttgcagcacgagtggccgaaggggcagcagagactgtggacccctcagctgcacctaagacctctgtgtggtctagctgtgtgtgctgggggaggcttttggccaccatttccccctttgtaaatgagaccgatatatgtggcatggagggtgggaggccagtgtgagttccatgcacttggagcagggccctgaatgagcatggacgtgggagcaggggtgttcctcgactttatgcaccttggggatgggagtggggctccctgcgtgggttgacaaggcattgcttttccccaccccacctctgtcccagccctgcaagtcagtccttgggggtctaggagggaagtagcgcctggctgtgtgaccttgggctggtgcctggccctctctggctctgagttcctgggaaagtcagcactcaacacatgccctccagtttagcaccttgacaagaagggtggggacactgggatcaggcccacccctctggtccaaaccccacagccccagctggaggatgaggagatgctgggcttgggtgggggaatcaggaatgtaaaggggcctgctcacccccagcttggcttaaaggctcagggcatcaaaggctcagcctgcccctcaggaaggagcctgggcccagccagacactcacca

SEQ ID NO: 38843 - DNA, 639 bp, Macaca Mulatta
  misc_feature (1)...(639): n = A,T,C or G
tgctatatgaaaacctgtatttaataaaatattttatattgattagaagataagttcagttcatattcataaaagcggacataccgcagaaatgatcacatgacagctcaataagctgtcactaagtcactaaattaaatttgctttttttgtagttaaatgtcttctcccattactgtttgatgtacttctgaatgtatctgcagcagtgctatttatgttctcgaagtgacatttggcagcatatttaaaattccatgaaatgttccgctcattttaccataaagccaaaaatgctccactgaataaggaagtgtttattaattcagaacaccttgaaagaggtccaatttcataatcaacttgcttcctctaaatcagcttttaaacacgggtttgtaatagggggcagtgccactttcacagtagtgaaatgagaaatcgncagtgccaaaaagtttgaaaggcaaaagcaaaacggtatttaatagtaatgaattgttctgatgtttaaactttttgaaagaagtaactatgccctaagattgttattaattaattaatacttaatacatatttattgttaaactgcaacccttttctacttgagagcttctaaggtttctatttatggtgtgt

SEQ ID NO: 38844 - DNA, 170 bp, Macaca Mulatta
tgctggagacccaggagcaagtcagcacaggctctgcccacagaaggcatgcacagtctgataggagaaacacacaagtacagatggcttgctctctgagtgtgtctcattgattcattcagcctgtgtgtcctaaggcctccctcttcacatactggagtgatgctggt

SEQ ID NO: 38845 - DNA, 534 bp, Macaca Mulatta
actcctggatcctgcaatgcggtattgctaaggtcctgtgacagcagtggttggaaggatcctggttggaaggatggggactctcaaggggcttcggaagagctcttctagccctttataaaaggagggcagcagctgagactgatgagaggagggcagcccgctctgttctttcagggcctcccatccctatctcccccacccaagcccaccctaggcctctacccagcgggagggggtgaagaccaggcctggttttattagaattcattttgtaataaaagccttttttagtggtgaaatactcctgtctaattgttctccccctgctttacttcgggcccttggtgagagccagcctgaacatctgactgatagcagaagccagcatccacctcatccaggagcttcaagagtaggaaacaatatgtatgtgcttcttctggaaagtttccttcttggaaagagcccagcttctcccttgtacgtccacagagactctgaggccaagagtagtagcagctgctactattt

SEQ ID NO: 38846 - DNA, 860 bp, Macaca Mulatta
gggagaaaacgaggccggaaggggcgggctttccgcctggacggggcgcttccgccaccatggctgcacgtggggttgttggtatttttttcctctctgctgtcccccttgtgtgtctggagctccggcgtgggatcccggatataggaatcaaggattttcttttgctttgtggccggattttcttactgcttgctcttcttactttaattatttctgtgactacctcatggcttaactcatttaaatcttcccaagtttatctgaagggagaagaagaaaagaatgagaaaagacaaaaacttgtgagaaaaaaacaacaagaggcacaaggagagaaggccagcagatacatagagaacgttttaaaacctcaccgggaaatgaaattgagaaaactggaggagcgcttttatcaaatgacgggtgaagcctggaaattaagcagtggtcacaaacttgggggtgatgaaggtacaagtcagtcatcttttgaaacatcaaatagagaagcagcaaagagccagaacttgcctaaacctttaactgaatttccatctcctgctgtacagcccacatgcaagggagatttctgatttacctgcaagaacccttctcaaaccagcagaagaagtaagttactggttggctctccgaatgtcccagtggggaatgttcctcgacgcagaaggtttcttgaagttcctgcagcctcaaaggtcttaccttggactgggtatgatgcagaattggcgtgaccacacatctctatacagcctttctacttcctttccccagacggccctctggcattgaaaggggggcagtcgctgggaggacgtaggaataactgtgggacc

SEQ ID NO: 38847 - DNA, 368 bp, Macaca Mulatta
catttctctttccacaactgttagatgaaggttgggcagttggtaatttagccagatgatagtgtgggtttgtgtgtggatacctgtgtgtctatgtttcagtatgaatcacagtgattctggttctcttaaaaagcaaaatgtaagtaaatgacacaagcacattatttatgtggaatatttatatccacgtatcccatataaggctagatttgggtcagacaaggctttctctagctgtcctgattttttacttcacgctctaacttccattctcccataggctatcagtgagaggaacaagtggaataccactcacccactgagaaaagactatccgaaatgctcatcttattgcagaaaatgaa

SEQ ID NO: 38848 - DNA, 408 bp, Macaca Mulatta
tcttttagatataattgatcctgttccgttagaaactccattatccaaaaatcttgtggcacagattagtgctcttgctcttcagctggattcagaagatcttcataattattcaggaagccaactatttgaaatgcatgagaaactaagtagtatggcaaactgtataataaaaaatctacagtcacgttggagatcaccatcccatgaaaattctatttagtattttaagagaaaattgaaggttttttttaaacatcactggatttcttgattgaggaaacaagttctgaaataatagcacaatttcaaagaagagactgtttgcaaagttgataacatttcaaaccctgaaggacagtggcttattgtgtaagttcaattttgtaagttcattatgtaagatct

SEQ ID NO: 38849 - DNA, 687 bp, Macaca Mulatta
  misc_feature (1)...(687): n = A,T,C or G
agagcccccaccccctccaacaagtagctgatgccccagtgattctctatacattttcacctcggccaatatgtccaggaaaactgcttacttctcttttcttgcctggagcattcattgttacacccttactttgcaatataggaattaatgctacaaaataaagtaaagcttacctgaaaagtgcatagtttggggcaatggtatctacatctcccactgtgggaaaccagcaaagcatcaaaactccgaattctccgttaccgaatgcagatctgaattataagatgtttatgtttgactattgtttcaacagtgggattttgttatgaattatccctttaactgaaaccctcagttttactgtttacattattaggaaaacagggatatcttttgaatctaaaaatttgatgtacagcgtgtgatttttgaagtttacatgtaaagtcacttaacagtgtaggtgaaataatgtttgtcatattttgagacatcctgaagtcatgtttttatgtgttttattcaaagtacacggtagacagtctttcacaataaaaggannnnnnnnnnnnnnnnnnnnnnaaatgtacatttatcaacctaatgattttttttaaaaagagatttaccccagtctgggtttatgtaagttcattgccctaaactgtgctgtttttatccagt

SEQ ID NO: 38850 - DNA, 776 bp, Macaca Mulatta
  misc_feature (1)...(776): n = A,T,C or G
ggatattagatgcttccgttggttgtctgctcacattaaaaaattgggaaccaacatggattaaaggctcggagtagagcttgttgatgttgaactttgccaaagggccatctattgggccatttttgttgagaaaactttttgtgtctgtatctttagttattccctattgagctggtcattcctcagagaacaaagactcttccaatctcccaagtgctgaatgaggccgtgccaatgttctgggattcaaaggaatggggctgtggtgaggctcaggagagagaggtgtgcgtatgtgtttcagtatccagtatgcatttgctcactgtgtctctcttttgagtataataactctgcgcaaactacttggcatcctgtaatctagagaccttctattttacccttttcagaaaataaactttttattttttggagacagttttgctnnnnnnnnnnnnnnnnnncatnnnnnnnnnnnnnnnnnnnnnnnnnnnnnntgactcaaatgattcttgtgccttagccannnnnnnnnnnnnnnnnnnnnnnncataccaccatnnnnnnnnnnnnnnnnnnnnnnnnatagagaccatgtttcatcatgttgtnnnnnnnnnnnnnnnnnngctggccttaggtgatctgcccatctcagcttccgnnnnnnnnnnnnnnnnnnnnnnnnnnnnnngcctnnnnnnnnnnnnnnnnnnaattttgaaagggcactgtggtaatggaagctgtttaacctgcataaagtttcaaaa

SEQ ID NO: 38851 - DNA, 951 bp, Macaca Mulatta
  misc_feature (1)...(951): n = A,T,C or G
nnnnnnnnnnnnnnnnnnnnnnnnnnnnnnnnnnnnnnnnnnnnnnnnnnnnnnnnnnnnnnnnnnnnnnnnnnnnnnnnnnnnnnnnnnnnnnnnnnnnnnnnnnnnnnnnnnnnnnnnnnnnnnnnnnnnnnnnnnnnnnnnnnnnnnnnnnnnnnnnnnnnnnnnnnnnnnnnnnnnnnnnnnnnnnnnnnnnnnnnnnnnnnnnnnnnnnnnnnnnnnnnnnnnnnnnnnnnnnnnnnnnnnnnnnnnnnnnnnnnnnnnnnnnnnnnnnnnnnnnnnnnnnnnnnnnnnnnnnnnnnnnnnnnnnnnnnnnnnnnnnnnnnnnnnnnnnnnnnnnnnnnnnnnnnnnnnnnnnnnnnnnnnnnnnnnnnnnnnnnnnnnnnnnnnnnnnnnnnnnnnnnnnnnnnnnnnnnnnnnnnnnnnnnnnnnnnnnnnnnnnnnnnnnnnnnnnnnnnnnnnnnnnnnnnnnnnnnnnnnnnnnnnnnnnnnnnnnnnnnnnnnnnnnnnnnnnnnnnnnnnnnnnnnnnnnnnnnnnnnnnnnnnnnnnnnnnnnnnnnnnnnnnnnnnnnnnnnnnnnnnnnnnnnnnnnnnnnnnnnnnnnnnnnnnnnnnnnnnnnnnnnnnnnnnnnnnnnnnnnnnnnnnnnnnnnnnnnnnnnnnnnnnnnnnnnnnnnnnnnnnnnnnnnnnnnnnnnnnnnnnnnnnnnnnnnnnnnnnnnnnnnnnnnnnnnnnnnnnnnnnnnnnnnnnnnnnnnnnnnnnnnnnnnnnnnnnnnnntctgcttttgtagcgacaattaaggggtctgctccccctattcaattgttttattgacagtttccttttgcggaaaaagcgcgaaaatagaagatgtgggaaccatgttgtcgtggggaaaccgtggaatttctgtctcttttttttttgtacgtatatattctttgtctagg

SEQ ID NO: 38852 - DNA, 764 bp, Macaca Mulatta
gggaacacccttagttttcaaaatggcagagtcgaaaatttttggtttcctttttttctaaggtgtcattctaccatacataagtggcatttggtaaacaaaatgttaaaataatttctcttaggtgtagggtctttgttctcttttaagaattgagaatgcttccttgctgtgatcttgtcaatttctacgacatttctgatgtctcagtgatgttactgtggtttagacatgaagcctaagtcagtgtttctcaaagtagtgttggtggaataccaggaatgcatgtatatgtttttaggtttcacaagttccctagaaatgtcttttaaatgttgttttcaggtcactggtaatttaaataaattcgttataaatatattttgtattttaacgtgttacccagtgattttggagccaaattttgggtttatattaaatattgtcatggtactaagcagcactattgtattcattcatcataagatagacttgtttagtatctccaaaattatgatgcacttacaactgatgataccttagcattgtgtcatagtttaattagaagtatttttctttatttttaatttaattttaacttaattaatttatttatttttgagacggagtttttgctccagccctgggtgacaggaccaagactccctctaaaaaaataaattaactaaattaataaataaattaaataaaaattaaatcatttatgtattttaataatccaaaggcctctctagattaatgaa

SEQ ID NO: 38853 - DNA, 795 bp, Macaca Mulatta
  misc_feature (1)...(795): n = A,T,C or G
attttggagtgaaaaaatggcacaaaggtttnnnnnnnnnnnnnnnnnnnaacccgaggtgatttaaaggacccaattgccatttttgaccctgttcttgtattccattaaaatccaaggtgtagggaatatttgggatattttaactgttggtcttttaaccggggaaaatatcagaaaagtgaattttgatgaagggatggtcattaagctttgaaattgaaattagagaatgaaaagcaggttttcaatattttttcaaaggagcaataaaagttttttcaaaattgtaatttgctcattattgggtttgagtaacttcagtatattcaccccagtgttatttctgcacagaattatatagctaaaacagattagaattattaacatacttttaaaatgctaatatttatatttcttaattgtatacagtcttcattattttatgcggtaaagttttataatactgataataaggatgctacatgctccagattttttctttgtgttctaattaattttttcaatatagataggaaagtatttatatgtaagtataaaaagtttactttctttatctttttccacagcgagtgaagatgttaaagagatctttgccagagccagaaatggaaagtacagacttctgaaaatatctattgaaaatggttagttannnnnnnnnnnnnnnnnnnngttcctggattagtggtggccgttgtatttttaaacttagtgtgtgttctcagtgatttgaactattaaagtgaagcaagttcaaatcttcccttaccc

SEQ ID NO: 38854 - DNA, 684 bp, Macaca Mulatta
  misc_feature (1)...(684): n = A,T,C or G
tgttgaaaacagaagagccttattattattcactcactcctatttaaagatccaatgattcaatgattaaaagcaataacatgattggtttggcagaataccaaacataaaaagtagtacatctggaccaagcacagtggctcatgcctgtaatcccagcccttgggaggccgagagaggagaactacttgagcccagaagttcaagaccagcctggacnnnnnnnnnnnnnncaattaaaaattagtcgggcatgatggcacacacctatagtcccagctactctggaggctgaggtggaaggatcagttcagcccaggaagtcaaggctgcagtgagctatgatcacttcactgcactctagcctaaatgacagagcaaaaccacttcaaaaaaaagtatcagatctggaaaactagtctttccttatctgtatactaattggtaatacctaggaacatcctttcccaaatcaagatcagcactgctgctctggccaggccaaggaaacagatgaagggaaagaacctaagaagagtagaatacagaagacaagaaggtgagatagaataaagatctgagccccaaactgctgcctttatccaggtgaataaatttcaacaaaagaagaaataaatgtgcccaaactcttaagctttctagttaaaaggctaacttccttat

SEQ ID NO: 38855 - DNA, 698 bp, Macaca Mulatta
ccacttgtggcctgcgatgctgattgaatctcctgttggaatgacaggccactgggctggtactacccctactcagcctgagcaaagctcaagtgggtgacccctatcagggatgagattgttcagggagagcaagtgaagtcctggaggcccagcttattagatcttgggcaaggtgttgatgtccatgcccaacctatccagagttactgtgcccttccctccccagaccacagcctacatgcctgtggactttgaagactgcagtgacagggctccatggaacaaggctaagggaaacctggccaggtccaaccagatggaggaggctgagcagtatacccggcccatccaggtgtccctatgccgaaatgccaagagggctggcaaccccagcacatactcacacaaacctggcttatgtaccaaccccggacactgggggagccaccctgagagccccccaaagaagaaatgcaccacaatcaacctcacacagaaatctgaaaccaaagaccctcccgccactcccatgcaaaaactcatctccctggtgagagaatgggacatggtcaattgcaaacagtgggaattccagccactgacagcctcccggagcagccccttggatgaggccaccctgcagctccccttgggaagtgaggctgcttcccagcccagcccctcagctgcctgga

SEQ ID NO: 38856 - DNA, 802 bp, Macaca Mulatta
  misc_feature (1)...(802): n = A,T,C or G
ggatttgaaagtagcccaatatgaaacttctgattctaaaattaaaccagcaacctattacaagcacattctttgattgagtcattggttataaacgtactaaatgcagagaagacagccaatttaggaaacttccgagttggtgggacactgttgattaataatgtactgtatgaattaagtgatgctttaactttgattttacattttaaagttaaaatgtgggcattatgtcagcaaacttaagggcattatgtcagcaagctaaaacattttttttcttgtgcttttaatgtatctctttacatgatctgagagaggattcaagttgatagaaatagctgaggggaaaaggggaaacatcttgggatgaagcttgttcttatggtgatggtttaattacagatttaaaaattagaaggaaatttcagtgggattaagtgtatagctttcatatctacttttcaaaaaattaccattgtaaacttggataagagatgatttattttttgtaagacatcctttgcaaaacaaggtggtacagctcacctagatttattactggtgcaccaaaagacaaaaccctataccgaataactcttttgtcttttccaaatataaagatttgctgaaatggacaacaaagaagttttatcactttagggatataagaaatttctttttacggggtatggggcgggaaaggagaacctgacctagggaaacttattacccttataaaaaaaagaattggactttgtcattagaatcctcaaacaaatttaaaacttggaaggctaan

SEQ ID NO: 38857 - DNA, 189 bp, Macaca Mulatta
atgaccaacatccccacacctctacatctctgtctcctgcatctcttcctctctaccactaaagtgttccctgctaccatcctggcctgtccacatggtgctctccatcctcctccacattacggaccacaggtgtgcctttctaggcctggccaccactcccaacttgacctagccacatacatctag

SEQ ID NO: 38858 - DNA, 647 bp, Macaca Mulatta
gaaaggtctctgacctctaatatatcattgatttactattgttaggtgatgaatgcacatactaagttccagctaagtcaggtgctgcttccaattcggtgttcctcttttgaccatgtattatcagtaaaatgtagtgatctcaagcagccagaaatcttcattttcattagcacagacatttggatgctttaggcttattgaaatttatctttttatggaggcctttaaagaatattctcatacagcacttgttcttaatatcttttaaactttaaggattctctattgtctggaatgtggaaagtagacctgggaaagtcatttgtgccttgctgacaaatttatatttctggatttctttctacattattccagcaatttacctcacacccttatcaaagatcactattaaaacaatcatttgctttagttttccaacgttctcccttcccccaacaaacgttatttaaagaaaaattccatgtatttctagttgttttctattatacgtggcacagatgttattactttcagaagaaccctacaggctatctgagaaccaatcccctggcttgggggtgacatcagaaaactgatttgtcttctctgctggtgggggaaagcataatcctattatctggaat

SEQ ID NO: 38859 - DNA, 777 bp, Macaca Mulatta
  misc_feature (1)...(777): n = A,T,C or G
gggattttctaactctagtatgaattgtattttatgaaaaatttataatatggctattcttttttataatatttattgtaaagcaactaacataaaaccttaattttcaagtaccttgagaatctgctgttctcaattgctgagtttacagtgtggctaagatttgctcctatgtgtacatgatttttttaaaaattaacctttttgatgaaaattatataaaaatatataggatgttctcttttcttaaatagactatacgaatttcattgggatcatttcatgattactcagggttgaacttgatttattatattttactataatatacacataaagtgccctcaaggactatatgacacatagacttagatgcattcacatttggatatattttattagagacctttttagcttatttgcttttagctgtgttcatttcttccagattttactgaatacaccaaatgtgtatgaaatgttccctgtatagatgagacaaaaatgaataagatataatctcttcctttaangagtttccatatggtatgattttacctacactgaatataggtactcattgtaccattttataattcatttttagtaaagcataagctttggaattcaagtaaagtttgaatttaaatccntggatcatttacttactagaatatgggaaccttgggataaatttatacaaaccttttccccaatgttgttcaagctgtaaaggatattttcaccctccaaggtttatttatttcaagggaattc

SEQ ID NO: 38860 - DNA, 163 bp, Macaca Mulatta
tgtaggaagtagagacttcctgcgcagttagctgaagacagtctgctcacaattgcacatgtgcatggcattgtggctgggacgcactagccattcaacacatttttttttccttgttttgcccatatctcctcaaattccttttaccatcaacacatatttt

SEQ ID NO: 38861 - DNA, 822 bp, Macaca Mulatta
  misc_feature (1)...(822): n = A,T,C or G
gggatcctaagtgaatgaagttttaattttgatcagtttgtatgtttctgggcatttggattttacatgttttaagttctttaggtgacttgttcattactgcttcagctagataattgttgctttttaaattaatctactcattttcttagcatttttgtttgctatgatatgtaagctataacatttatttggtaaatttttctgatgaagaattctagaaagaacatccattaccctgaggcctctttgaggaaagtggaccattaataaaaaaaaaatctgttcttttaaacactatgctgtatacatgtgtgttagatgcagctgtgtttgattttttaattgtaagtgtgttcctggttttattaatagtttttttagggaaagtaattataaatatgctactgattagtttaaaatggtagtgtcaactgtagttaaatcttatgtaacacatctgggggaagttatataagatttgttatgattctcccgttgtgcaaattcttttcttataagcaaaaaattaattaaatataaaaattttcccttgtcggcccgcctcggcccctnnnnnnnnnnnnnnannnnnnnnnnnnngggcgccccgggccccattaaggtaagttgaacatgggtcctaaccctgttttccctaggaaaaccctgggacctggaacaaagggcctggaaatccnnnnnnnnnnnnnnnnnnnnnnngggtgcatacccaagccgttttctgaaaaaaacccacaaaggggaatttctaagggtcacttttctgggtattttattcaaccgggaggcccaaggcca

SEQ ID NO: 38862 - DNA, 686 bp, Macaca Mulatta
  misc_feature (1)...(686): n = A,T,C or G
acacacacatatatacttacacacgtttttacatatatacatgaaagatacacatggggcatatttatagacatgatatatatgctatatatagtatgtgtgtatgtatatgtgtgcatatatacttgcatatgtgtatataagatgttagccaatttctttctctataagtctcaaatatttttgaatgaaaaaggtctagacataagtaaatacatttttagaaaggattaaagtacaaacaaggaacttttaagctacttaacttcccaatatgttgttgttgttttctttcatgaaggacaaactatatttagtttcttctttactgtgtgctggtaattccccttcaggaaagaaacctcagatgtacactacactaaccaggatgcctcaggttagagtggagggagcataaacagtcagataatatgaatttcagatctggcctctgcctctacacttaggtatcaaataatatgaatgtgttgttccctgagtctgaacatggaactataagatggggatagcaggccgggcgcnnnnnnnnnnnnnnnnnnnnnnnnnnnnnnnnnnnnnnnnnnnnnntnnnnnnnnnnnnnnnnnnnnnnnnnnnnnnnnnnctaacatggtgnnnnnnnnnnnnnnnnnnnnnnnnacaaaaactaagggaaaaaactcgagac

SEQ ID NO: 38863 - DNA, 467 bp, Macaca Mulatta
tggccgccaaagtgtttgagtccatcggcgagtttggcctggccttagttgttgtaggaggcatgttgaactctgccttacataatgtgaatactggtcacatagccgtcatctttgaccgattctgtggagtacagttttttgtggtaggggaagggactcactttcttatcccatgggtacagaaaccaattacctttgactgctgttctagaccacctaacgtgccagtcatcactggtagcaaagacttacagaatgtcagcatcacactgcgcatcctcttccggcctgtcgctagccagcttccttgcatcttcaccagcatcagagaggactatgatgaacgtgtgctgccatccattgttaccaagatcttcaagtcagtggtgtctcgctttgatgctggagaactaatcacccacagagagctgctctccaggcaggtgagtgacaagtttacggag

SEQ ID NO: 38864 - DNA, 655 bp, Macaca Mulatta
  misc_feature (1)...(655): n = A,T,C or G
ggatcggccgagggtgcagttagcaaggtttccgagttgtttgggttgagttcaggagaagcatggccaggtcgagtcggtacctacgccgacttcagggacctctgcttccactcaaggatctggtggaggaggacgaagactacctaaacgacgacgtgcaggagggattaaggaactccggggttcgtcgacgccgaagagctctgcagtgggggcgtaaaggctggcagcctccccgggtgcatccgcggtgaggaagccccctgccccggggatggggttggagggtccaacgtagcgcgtcccattctggctttgccctgagcaaggcacccagtcgctgctaacagatttagcttctcaatggtctagctgcttcatcctacttagggtaaagttttaactataatagtagcagtgactttaactgagcacatgctatgtgttaagcttgctgtattaattattctcattctcttattcgtcctttgaggtagttttacactacctcgaggaaacagtgtatgttgagtctctatttccacccagaatctgaacttttatttttctttctgaccgnttatcctcaagttctatagaatgagaacttgtaactattaatcctatattgcctggagtccaatacgtggtt

SEQ ID NO: 38865 - DNA, 496 bp, Macaca Mulatta
cactgtgtgtacagatgtcaaaaaggagaggtggcataggagtaacgacctggagcggactgctgtatgctataggggaacacgatgctctcgcatccaacttgacttccagactctctgaccgtgtggagacatctgatcccaaaacagatatgtggactacagtagaatcagtaagcatcagcagagatgcagtgggggtctgtttacttggtgataagttatatgccattgggaggtatgatggacaagcatacctgaatacggtggaggcttatggtccccagaccaatgagtggacccaggttgctccactgtgcctaggaagagctgaagcttgtgttgcgactgtaaaattataatttagtgctttgttttctacatgaagacactcttcctttattaatttagtacagttattctactatcaatggatacatttttagtaaacatgcattgccacaatcctgggcacaaagtgcctgatctcaaagcg

SEQ ID NO: 38866 - DNA, 810 bp, Macaca Mulatta
  misc_feature (1)...(810): n = A,T,C or G
ggcaaagtgtggttccaagacttgaagcatcagcgttacctgggagcatgttagcaatatgcattctcaggtgccatccccatccccatcccagacctactgaatcagaaattctgggagtggggttaagcagtttgtagttaaacaagccctccaggtgattctgatacacataaaagcttattcaatgagtagtgctgggaaaattggttgtccattatgggacaatacagacacacagtgaaacaatgtataatatatatattaaatgcctggaaaatcaataacaaaaattgtatcctcaataccaccttttgtacccctcttcagagatactgctaagtgaatcaggtaatttttacatattttatatcaaactaacatacattttgtaggtttcctcactttaattttatgttcaaatgcccctcaacaagtgaacatccttttcttcagctttgttgtaatatttagatattatggttattaattcactgtctaatagaattagtaaattgaacaaaagcttcagtaccaagacacaaaatctctatatatatttggctttgtggggtctaactttctaaaggtcattgactcccttgcagaatgtgttactagaaatggatattctgactgaacacatnnnnnnnnnnnnngtnnnnnnnnnnnnnnnaggccaaggcgagncggatcacttgaaggtcagggaatttgagaaccagccctgaacaaacatggtggaaacccctgtccaaatacaagaaattaagcttgggcatgggtgggtggcatggccctgtaagtccc

SEQ ID NO: 38867 - DNA, 905 bp, Macaca Mulatta
  misc_feature (1)...(905): n = A,T,C or G
ggnnnnnnnnnnnnnnnnnnnnnnnnnnnnnnnnnnnnnnnnnnnnnnnnnnnnnnnnnnnnnnnnnnnnnnnnnnnnnnnnnnnnnnnnnnnnnnnnnnnnnnnnnnnnnnnnnnnnnnnnnnnnnnnnnnnnnnnnnnnnnnnnnnnnnnnnnnnnnnnnnnnnnnnnnnnnnnnnnnnnnnnnnnnnnnnnnnnnnnnnnnnnnnnnnnnnnnnnnnnnnnnnnnnnnnnnnnnnnnnnnnnnnnnnnnnnnnnnnnnnnnnnnnnnnnnnnnnnnnnnnnnnnnnnnnnnnnnnnnnnnnnnnnnnnnnnnnnnnnnnnnnnnnnnnnnnnnnnnnnnnnnnnnnnnnnnnnnnnnnnnnnnnnnnnnnnnnnnnnnnnnnnnnnnnnnnnnnnnnnnnnnnnnnnnnnnnnnnnnnnnnnnnnnnnnnnnnnnnnnnnnnnnngtctctaacacatcaaaaacatcagcctattccatctatcgactattactataattaatatgacactactccagtcagtaatcttcagtcgctttgctcttgccangnnnnnnnnnnnnnnnnnnnnnnnnnnnnnnnnnnnnnnnnnnnnnnnnnnnnnnnnnnnnnnnnnnnnnnnnnnnnnnnnnnnnnnnnnnnnnnnnnnnnnnnnnnnnnnnnnnnnnnnnnnnnnnnnnnnnnnnnnnnnnnnnnnnnnnnnnnnnnnnnnnnnnnnnnnnnnnnnnnnnnnnnnnnnnnnnnnnnnnnnnnnnnnnnnnnnnnnnnnnnnnnnnnnnnnnnnnnnnnnnnnnnnnnnnnnnnnnnnnnnnnnnnnnnnnnnnnnnnnnnnnnnnnnnnnnnnnnnnnnnnnnnnnnnnnnnnnnnnnnnnnnnnnnnnnnnnnnnnnnnnnnnnnnnnn

SEQ ID NO: 38868 - DNA, 531 bp, Macaca Mulatta
tcatgttgcttttaggaacgtgtgggcaaacagcctttctctagtgaaaaaaaaaatgcagacaattgctacattaattgccacatccagaacatgaaatctgaaaacaaaataactataaaattgtatcacacaacagttaaagaagctgagtatgcagctccatatatgcttactataaagagaatatttttgcaaattaaaaatatgcgaataattgtcatgaagaagtaattgcttttaaagataaaataatcggaggctggttttgctctcaacttattcagaaccttgtttgtgcttctaaggatcagagcttagcaatgtttttgaacctttgctctttccctatacctctaaaatgttgttcaggactttctattctaaatgcactgaggaaagtactgttgctccccttaaggatcatatacagaacaaatctgagtgactggtgacaaacttctacatccccacaactataaaaattaatatgtggcagtaagtaatactttattacttatctttctgaat

SEQ ID NO: 38869 - DNA, 637 bp, Macaca Mulatta
  misc_feature (1)...(637): n = A,T,C or G
gggagcaacttggtgggttatcctttgccagtgggggttttgttcttttgttcttcacaataaatcttgctgctgctcatccttaaggttctcactatctttatgagctgtagttgtcactgtgaaggtctacagctttacttctggagttagcgagaccaggaacccagtgagaggaacaaacaactccggacacgaggccatgaaaccaccgggaggaaacaaacaagtccgggacgtgctacctttaaaagctgtaacgctcactgtgaaaggtctgggggcttcactttctgaaagtcagcgaagaccctgaaacgaacgggcaggaaagaaaacaactccaagaccacgcctttttttattaaagcctgtaaaaaactcccccaggaaggggtcccaaagggttttccatccctggaaggtctcgtgggaaactgggaaaaccccccccgggaaaaaataaccccgtttcccggaaacccccaaaaagggctttttccctttccccccctaattttcaaaaatggggccccatttttgaaaggcgcnnnnnnnnnnnnnnnnnnnnnnnnnnnnnnnnnnnnnnnnnnnnnnnnnnnnattttgggcggaaaaaaacaaaaagccctttcct

SEQ ID NO: 38870 - DNA, 469 bp, Macaca Mulatta
  misc_feature (1)...(469): n = A,T,C or G
cgtacacccaggagggagaccccaggaagaggcctgccatctaggaagcaggctcaggcctgtgtgggcagcaacctagagggaaggggttaggtgctgaggggccatgtcccttgagctggaggaggnnnnnnnnnnnnnnnnnnagcatgggcctcaggacagagctcctgggtcggggcagtgccagcccgcactgcaggagcaggtcaggggcctgcattggtgagaacagctcctgcattcgtgtgctagggctgctgtaaggaggtgccaccgacggggcatgaatgcagcagcgtgtggtcccacagttccggaggctccagctgtccacagggctggttccttctgaggcggtgccggggaatctggcctctcctccactctccaggggtttgctggctatctttgctgttccttggctgctggaggcagcggcccgatctctgcccgaatcttcacatgg

SEQ ID NO: 38871 - DNA, 856 bp, Macaca Mulatta
cttattcctcaagctgtagatgaaggggttcatcatgggtgtcaccacagtgaataggacagcaccaatcttatcagtgtcctcagggtgagtggaggaggggaaaaagtacacacctacaatggttccgtagaacagtaatacaactgtcaggtgagagccacaagtggagaaggctttccactttccctgtgtggatgatattctcaggacagctctgatgatgcagacataggagaagaagatgagtgcaaaggggaagatgataactgataaacccacaataaacaacacaagctcattgatcattgtgcctgaacaggacagtttgagaagaggggccaagtcacagaagaagtgtgggagggtgttgtggtcacagaagagcaattgaatgagcagaagggtgtgcgtcagagctataatattactcaggagccacgagatgacagtgagcaaaatgcagaacctgggtcgcatgagagttatgtaattcagagggtggcagatcgccacaaagcggtcgtaggccatggtccccaagagcaaattgtcagtgacgacaaacacaatagaaaagtacatctgtgcgatgcagctctcataagagatggattggctgttggtgtgaatattcaccagcattttggggactgagttggaaatggaggaaatatcagcaaaggatagattagcaaggaagagatacatggggttatgaaggtacgtatccaagctgatggccagaatgatgagcccattcccaaccacagtgaccaggtacatacccaggaaaagcacaaagaggaggttttgatgttcagcctggttggagagtcctaggagaatgaattca

SEQ ID NO: 38872 - DNA, 825 bp, Macaca Mulatta
ctcccgtgcacctaacagtccagactgagagagcagctagagtggcagctggggccggcccgaggggacgagcgggagagcctgcgcctccgaactgcacgggagctgcaccgccgcgcagacggggacgccgggagccatgggctgggaggccagacctgcttcagtctggaggtcagcgtgggcaagcaatccccgccccccttccattttctgtgtggctggctgcgtgacgttttctgtcccggacaatgccctgagggaacatggcaggagaatgtggaactaggtggaactcacttggcagcatacccattgtgtgcactgggacaggcaggtgtgtgcaggtgcatgcggtgaactgctgtgcttgtcagacagagggacagctcaccgcaggcgctgtccacctcctgtttccgcagaccgggagcccctggaggcaggccgattgttgagcgcgcagtggcttcttgtgcagttgcagagaacagggatgaaaactcagcccgggcttccctgctctggaggaaactccccttagggctcccctttttcggttgttgcctgtgtctcgtgtgaccatcccacggtctcgagtgatactgccagccggttggtagagtcagggaggctcactcctgacctgtgggcaccctcagcaggctctttcaccacagtaacccagtgtacacaaggctgcagccaccacagggaccatggttggaactgttgtcagaagcctgggagagtgaaagctcttagacacaggccaccccacccgggagagaaagagggggttcccagggagctgttgaatgagga

SEQ ID NO: 38873 - DNA, 601 bp, Macaca Mulatta
  misc_feature (1)...(601): n = A,T,C or G
aggcactgccctaagcctcctcattcgagctgaactaggccaacccggcaacctactaggcaacgaccacatctataacgttattgtaacggcccatgcatttgtcataattttctttacagtcatacccattataattggagggttcgggaactgactagtacccctaataatcggcgcccccgacatagcattcccccgtctaaacaatatgagcttcnnnnnnnnnnnnnnnnnnnnnnnnnnnnnnnnnnnnnnnnnnnnnnnnnnnnnnnnnnnnnnnnnnnnnnnnnnnnnnncaggaaacttctcccacccaggagcttctgtagatttagtcatcttctctcttcacctagcaggtatttcctctatcttaggagccatcaacttcattaccaccattatcaacataaaaccccccgcagtatcccaataccaaacnnnnnnnnnnnnnnnnnnaatcacagcaatccttctactcctctctctaccagttctagccgccggcattaccatgctactaacagatcgcaacctcaatactactttctttgaccctgttggaggaggagaccctatcctatatcaacacctattc

SEQ ID NO: 38874 - DNA, 796 bp, Macaca Mulatta
  misc_feature (1)...(796): n = A,T,C or G
ggggatcccttccttacaccttatataaaaattaactcaagatggattagagacctnnnnnnnnnnnnnnnnnnnnnnnnnnngcagagtttcgctctgttgcccgggctggagtacagtgtcatnnnnnnnnnnnnnnnannnnnnnnnnnnnttggttcaagcannnnnnnnnnnnnnnnnnnnnnnnnnannnnnnnnnnnnnnnattgtcaccacgctcagctaattttttgtattagtagcagagatgaggtttcactacattggtnnnnnnnnnnnnnnnnnnttgacctcaaatgatccacctgccttgccctcccaaagtgctggtgtggnnnnnnnnnnnnnnnnnnntatataagagaaccatcatccataactcaaaattagaatcccagaaaggaagttacctaacatgacatgtattcaagaaatctggccagcatgttgatcaggaattagaaagagacaagaaaggtaccaaaaacactccatgaggtagccccccagtcannnnnnnnnnnnnnnnnnnnnnnnnnnnnnnnnnnnnnnnnnnnnnnnnnnnnnnnnnnnnnnnnnnnnnnnnnnnnnnnnnnnnnnnnnnnnnnnnnnnnnnnnnnnnnnnnnnnnnnnnnnnnnnnnnnnnnnnnnnnnnnnnnnnnnnnnnnnnnnnnnnnnnnnnnnnnnnnnnnnnnnnnnnnnnnnnnnnnnnnnnnnnnnnnnnnnnnnnnnnnnnnnnnnnnnnnnnnnnnnnnnnnnnnnnnnnnnnnnnnnnnnnnnnnnnnnnnnnnnn

SEQ ID NO: 38875 - DNA, 813 bp, Macaca Mulatta
  misc_feature (1)...(813): n = A,T,C or G
ggnnnnnnnnnnnnnnnnnnnnnnnnnnnnnnnnnnnnnnnnnnnnnnnnnnnnnnnnnnnnnnnnnnnnnnnnnnnnnnnnnnnnnnnnnnnnnnnnnnnnnnnnnnnnnnnnnnnnnnnnnnnnnnnnnnnnnnnnnnnnnnnnnnnnnnnnnnnnnnnnnnnnnnnnnnnnnnnnnnnnnnnnnnnnnnnnnnnnnnnnnnnnnnnnnnnnnnnnnnnnnnnnnnnnnnnnnnnnnnnnnnnnnnnnnnnnnnnnnnnnnnnnnnnnnnnnnnnnnnnnnnnnnnnnnnnnnnnnnnnnnnnnnnnnnnnnnnnnnnnnnnnnnnnnnnnnnnnnnnnnnnnnnnnnnnnnnnnnnnnnnnnnnnnnnnnnnnnnnnnnnnnnnnnnnnnnnnnnnnnnnnnnnnnnnnnnnnnnnnnnnnnnnnnnnnnnnnnnnnnnnnnnnnnnnnnnnnnnnnnnnnnnnnnnnnnnnnnnnnnnnnnnnnnnnnnnnnnnnnnnnnnnnnnnnnnngacccgtacctggagtctaatcaaccgttttccggcacacacagcgcatacgaagtgatcggcaacactctgcatgtcacatccaaactgaagacgcttcgatactgcacctccaatnnnnnnnnnnnnnnnnnnnnnnnanannnnnaannnnngannnagngannnnnnnnnnnnnnnnnnnnnnnnnnnnnnnnnnnnnnnnnnnnnnnnnnnnnnnnnnnnnnnnnnnnnnnnnnnnnnnnanggagaaagagagagaagagaaaanagaggaaaaggggagagaaagagaagaa

SEQ ID NO: 38876 - DNA, 474 bp, Macaca Mulatta
ggacagaaggcaggtgagtgcagaggtgaagagatgccccactgctttgggggcatgcagacaggctcctaatcctgcccaatgtggcacaaccagatacaaccaagattcacacgagccgccagcttgtggtcgtcctgggtacgttatgttgcttctttccgacttgagaacagaccaattcacgcatttcccctgagtaataaagggaccagaggaaatctctctgggatcaagagatttggtgcctggctatgaatccgcgtcccctgtgttgtgactgtgtcgtcctgacgccccggggtgggggctctgggtctggccagactgagtgtctcctgttgcggacatctccctgcagtaaatattgtgcagttcgcagtctagccagctcgtcagagatggttgactgctctgaaagctgacctcatttttcctgctcacccgtactcccactttcctccccacaaagca

SEQ ID NO: 38877 - DNA, 230 bp, Macaca Mulatta
gccatagccgcacacctctcgggccaccagtagaggaaagaggagggccattgggaaatcaggatgcttttggcctggctgaactgagatctggatgaaccttggatcctaggttccatgaagacattctatctatgcatggctttaatggagcacaaatggttttcatttttctgagcatttctctaaatttttaattccacttattgttttcatttacatgtcttctg

SEQ ID NO: 38878 - DNA, 435 bp, Macaca Mulatta
cctccagctagtgtcttcatctacgagaatgagatcaaggggagaattcgctcacacattctgccagttcaaaagttttcgaagttttcaggttgcacccaagtggctgaacagttaaagaataacccacgacacgagagttacccataacaaggattcctgaggcatctagagaagctttccagtattttacgaggttacttgtcggggcagagtttggcagaaacgatgggacaaattcgaccagaaacaaccattgatcctgaaaaagacctgaacttaccagataacaaggagcttgccaaaaggaagagcatcatggatgaactttttgagaaaaatcagaagaagaatgatccaaattttgtttatgacgttgaggtcaaaatcccacaggatgaatatctgcagtcctgtggcttggacacagtcagc

SEQ ID NO: 38879 - DNA, 113 bp, Macaca Mulatta
ctcttgcagtgtttactcaacgtcctcaggatacaagtgtcgaggttggaaagaatataaacatttcatgtcatgctcaaggagaaccacagaccataattacttggaataag

SEQ ID NO: 38880 - DNA, 1147 bp, Macaca Mulatta
  misc_feature (1)...(1147): n = A,T,C or G
gtgtgccccctgaaggccgccatcgaccggctggacacacaagaggtggggatgcgtgtgcagctggcggagctgcagcggcgctacaaggaaaagcagcgggagctggcccgcctgcagcgcaggcacgaccatgagnnnnnnnnnnnnnnnnnnnnnnnnnnnnnnnnnnnnnnnnnnnnnnnnnnnnnnnnnnnnnnnnnnnnnnnnnnnnnnnnnnnnnnnnnnnnnnnnnnnnnnnnnnnnnnnnnnnnnnnnnnnnnnnnnnnnnnnnnnnnnnnnnnnnnnnnnnnnnnnnnnnnnnnnnnnnnnnnnnnnnnnnnnnnnnnnnnnnnnnnnnnnnnnnnnnnnnnnnnnnnnnnnnnnnnnnnnnnnnnnnnnnnnnnnnnnnnnnnnnnnnnnnnnnnnnnnnnnnnnnnnnnnnnnnnnnnnnnnnnnnnnnnnnnnnnnnnnnnnnnnnnnnnnnnnnnnnnnnnnnnnnnnnnnnnnnnnnnnnnnnnnnnnnnnnnnnnnnnnnnnnnnnnnnnnnnnnnnnnnnnnnnnnnnnnnnnnnnnnnnnnnnnnnnnnnnnnnnnnnnnnnnnnnnnnnnnnnnnnnnnnnnnnnnnnnnnnnnnnnnnnnnnnnnnnnnnnnnnnnnnnnnnnnnnnnnnnnnnnnnnnnnnnnnnnnnnnnnnnnnnnnnnnnnnnnnnnnnnnnnnnnnnnnnnnnnnnnnnnnnnnnnnnnnnnnnnnnnnnnnnnnnnnnnnnnnnnnnnnnnnnnnnnnnnnnnnnnnnnnnnnnnnnnnnnnnnnnnncctcgccctcctcggtgtcaagatggaggccaaccagaaggccaagaaaaagaaggagaggcaggggttgctaggnnnnnnnnnntgtccagccctgaaagtgaggtcaagatcaagaggcggtcagtgaaggcgcaaggtgggcaccaccctggagcgggcctcagggcagaggcccccaggtgcgctgggcaagaagaaagccaagggcaaggccaagggcggtctgcgggcagagccagggtccacccctagcagggataccctcttcagcccctctcgggccttcacctgccgtgaggagggcagccagctggccagcgagcgcctcaagagggccacgcgcaagggc

SEQ ID NO: 38881 - DNA, 780 bp, Macaca Mulatta
agatacagtaatgagaaatgtttgtagttttggtaaatagaatcatgtaaaaggcatcatggggaacttgttatttccataaccctgtaataatttgttctagtaatccttcgctagtgtaggcacgtgccttctggtttactggtgtgtttgtatgcccttaaagtgagacactgtaatttcaaatgctttttgaaaattaaaccaagatcttttagaattgtgcctagttattgcctagagtgttttattatttctattactcatcagtaaaataagatgattggctaatcgtcctgggttcccacctcctgtaagttcagcagtccaacaagtctttactgatgtctaagcactgcggacacaaatactgctaaaccgtatcatgaacgttggccttgcctgtgaacttagtactaggcggcacagatcatagcgtggaaggtgcctgaaggatgcgtgtgcacagccacatagaagtcctctttcactttggtgttcttgcagagtttgttgtaaagagaatttccaagtgaggaatttccttctctatgtattccattgtcaaacttgaggttacacataggccccagttgtaataaaatccaacttaattatctaacatcttgtggtctaagattcaagttttgaaaagaagaaaaggtggcagtttaataatactcacagtactctcccacattaaaatgatttttttttttagaattaaagtcttaaaatctctaatcaaataataagcacccccctttcctgtcggccccc

SEQ ID NO: 38882 - DNA, 137 bp, Macaca Mulatta
  misc_feature (1)...(137): n = A,T,C or G
tgctcaaatgtatcaaacacagtnttntgtggtcaagttcctctcctttcgtaaatgtgcttagaggatctcgtaagacgtaactcctctgacaagagaaccattnnggcacncaacactgcaaaagcttctgtggt

SEQ ID NO: 38883 - DNA, 98 bp, Macaca Mulatta
gtgtcacccacacatcatcatccggtgggcacaggagagcagagacagcatgcgcacacggtcctgtcctcccctcccagaggcacagtcagcctaag

SEQ ID NO: 38884 - DNA, 547 bp, Macaca Mulatta
ttctctctttgctattatgaatggcttttgcctatatcattggaaaggacttctaactggtgtccctgctatacaccttattctcccttaaatgtgttttcgacgtggtcaccagagtaaccctttttataacgataaaccatgtaacatttttgttcagaaacttctaggggcttaccatttcattcagtaaaagctcaagctcctgtatactcacatccttcatcacctattacttttctcctctcactcttcagcctttttgtttttcttcaaactgatgaagccttcatggctgatgtcagatattttatccattgagatcttccttgttgactcagttgcacttggtcatattattttcatttatttggtatatctaatcatagtctgaaagtttgtctacttatttttccccctttgagggtccttgccctgtttttatatccctgatagctggacggtatctggaacttacaggtgttcagtaaacgtttgtcgaataaatattctggaatcacccaagcgtattttttccctccagtta

SEQ ID NO: 38885 - DNA, 610 bp, Macaca Mulatta
  misc_feature (1)...(610): n = A,T,C or G
acattgcccaggnatggtctcgaacttttgggctcaagtgatcctcccacctcgctnnnnnnnnnnnnnnnnnnnnnnnacatgagccaccacacccagctgttttagccacgtttaatgaatctgtgacctttgtcagccatcttggaaactcagcataatgttgcatgcatgcctagttggttctcaagtagaattttggaacctaatctcttcataaattaagggctggttgtatatgcatattttatgatattttatatttcttttctatttttataattccctttcaacagtttttcctgattaaagatattttagtagctggtctctttttaaattctttttaaactttttaaagtttttaaactttaaattttaagaagcgtttgtaatatgtgatttgtctgtttatgtcttatcttgtttgttattttgaagcaaacataggaagtggcctactgccttgtataaaaagataccagaagagtggagtcatttggaaaaagcacagtgggaaagtggcttgggaagtgatttttttccccttattttctggcacagtgctttctaagatgatgttgttcactgtagttttcttcacttttaa

SEQ ID NO: 38886 - DNA, 416 bp, Macaca Mulatta
ctgtttatttttctgtaaaataattagattgacttaagatggtgtttttaaaacttttagctgtgaaactcattgttcaaatgaaatcttaggtgtggaggctcagcagcagatgagaaagaaagcaaagctgtcatagttgaagctgtggtaaagggccaggaatctgaagctccctttctcagccctgtgtggtctccaggaggttctttgaatcattacaactgcattatataatctttaacatcctatgatgttattcaaaaaacatgtcttttcatttatcaggtagctcaatgactctgctattgaaaacaatcatatttactagctaatcaggaagctgagagaaaatcatctgctacagtttctctgaaaaccccctgctacaggaaaatttaagtagggtgaggaac

SEQ ID NO: 38887 - DNA, 1138 bp, Macaca Mulatta
  misc_feature (1)...(1138): n = A,T,C or G
agttttcacattgtccccattactaggtccttgtatactaatgttttgagcttagttcaagtgttgcttggtagacaaaggaaccttttatttacaaagatactgtagaaagcatgtgaacagctctctgctttattaagatgccataatattgccgtatttgcagtgtgggttaagacaaactatcaagaagcttttccccccttcccgttccatagcgtagaagcccgcaggtgtagaactcactcttaaaacttaagtaggaagccagttttcttgtgcaatgatggccacaaaagcatagtatttggatgtcagcgagacagcatgagagccagcagtcatcaaagcattcctgtttgaatctagcgactgcttaacgttctgccgcattaaaattgctttctcgaaagtttgggttagtttcaaatttaagagtttagagggaaggtagagtaggtatctttcaggtcgtgatgatgagcttctatgaaagaatgtaatgtagtgaccctcttttctataagattcataatcagttctgggacaagcacacttaaatggttcctcacagtgtgtttcagagtgagattaagatcagacgttggaatgtgctatgctctggagtgtctggaaacaagtacagaaacctggctatggtgatgagttagcttctgtttactacctgtgacaacccaagtgagtgacactagtgaaccttctcccgtagtctgcaggctggcatagaaggttctcggattatattgggcagcttgcaatctgccgaagtagcaacttgcctttccacacttggcttgagcgctcaacccagaaggcaaagagagcttttggttgtaggcagctgcctgtatggcatatccctcggtaagggtaaaggagcagaggcaaangagaaaagcagaagttggagctgatgcaggtattctatgccctttgatggatgagacnnnnnnnnnnnnnnnnnnaagcctaacccacaaaaacagnnnnnnnnnnnnnnnnnnnntgttcgggccgccctcgggcccctccaaaaaaaactttttctaagaacccatttccgtttttgaggcggccccgggggcccccaacgttaagggtaaaagagtgggaaaat

SEQ ID NO: 38888 - DNA, 2374 bp, Macaca Mulatta
  misc_feature (1)...(2374): n = A,T,C or G
ggatttcatctccttaaacccagtgtgatctcttggttggaagaagaatagttgaggaccttgcagcaaggagttctccaagnnnnnnnnnnnnnnnnnnnnnnnnnnnnnnnnnnnnnnnnnnnnnnnnnnnnnnnnnnnnnnnnnnnnnnnnnnnnnnnnnnnnnnnnnnnnnnnnnnnnnnnnnnnnnnnnnnnnnnnnnnnnnnnnnnnnnnnnnnnnnnnnnnnnnnnnnnnnnnnnnnnnnnnnnnnnnnnnnnnnnnnnnnnnnnnnnnnnnnnnnnnnnnnnnnnnnnnnnnnnnnnnnnnnnnnnnnnnnnnnnnnnnnnnnnnnnnnnnnnnnnnnnnnnnnnnnnnnnnnnnnnnnnnnnnnnnnnnnnnnnnnnnnnnnnnnnnnnnnnnnnnnnnnnnnnnnnnnnnnnnnnnnnnnnnnnnnnnnnnnnnnnnnnnnnnnngcaagaaaccaaaatggagaggaactctatgactgtaatcaatgtggagatgtcctctataaacattcatgccttaagaccaacgtgagtactcacaatagagagaacacgtctgaatgtattcagtatgcaaaagacctcctttctctgtacnataaaacttctaccataaggaaagtttctgtgttcagtaagcgtggaaaatctttcnnnnnnnnnnnnnnnnnnnnnnnnnnnnnnnnnnnnnnnnnnnnnnnnnnnnnnnnnnnnnnnnnnnnnnnnnnnnnnnnnnnnnnnnnnnnnnnnnnnnnnnnnnnnnnnnnnnnnnnnnnnnnnnnnnnnnnnnnnnnnnnnnnnnnnnnnnnnnnnnnnnnnnnnnnnnnnnnnnnnnnnnnnnnnnnnnnnnnnnnnnnnnnnnnnnnnnnnnnnnnnnnnnnnnnnnnnnnnnnnnnnnnnnnnnnnnnnnnnnnnnnnnnnnnnnnnnnnnnnnnnnnnnnnnnnnnnnnnnnnnnnnnnnnnnnnnnnnnnnnnnnnnnnnnnnnnnnnnnnnnnnnnnnnnnnnnnnnnnnnnnnnnnnnnnnnnnnnnnnnnnnnnnnnnnnnnnnnnnnnnnnnnnnnnnnnnnnnnnnnnnnnnnnnnnnnnnnnnnnnnnnnnnnnnnnnnnnnnnnnnnnnnnnnnnnnnnnnnnnnnnnnnnnnnnnnnnnnnnnnnnnnnnnnnnnnnnnnnnnnnnnnnnnnnnnnnnnnnnnnnnnnnnnnnnnnnnnnnnnnnnnnnnnnnnnnnnnnnnnnnnnnnnnnnnnnnnnnnnnnnnnnnnnnnnnnnnnnnnnnnnnnnnnnnnnnnnnnnnnnnnnnnnnnnnnnnnnnnnnnnnnnnnnnnnnnnnnnnnnnnnnnnnnnnnnnnnnnnnnnnnnnnnnnnnnnnnnnnnnnnnnnnnnnnnnnnnnnnnnnnnnnnnnnnnnnnnnnnnnnnnnnnnnnnnnnnnnnnnnnnnnnnnnnnnnnnnnnnnnnnnnnnnnnnnnnnnnnnnnnnnnnnnnnnnnnnnnnnnnnnnnnnnnnnnnnnnnnnnnnnnnnnnnnnnnnnnnnncacactggagagaagccctatgggtgtaaggaatgtggtaaagcctttggtacatctgcaggccttattgaacatataagatgtcacgccagagagaaaacctttaaatgtgaacactgtgggaaggcctttatttctcacccatctctttttggacatttgagagttcataatggagagaagccatatgagcataaggaatatgggaaggcctttggtacatcctcaggtgttactgaagatagaagaagtaacacaggacagaaacgctttgattgtgaccagtgtgggaaagtctttgtttctttctcatctctttttgctcatttgagaactcacactggagagaaaccttttaagtgttacaaatgtgggaaaccattgacctcttctgcctatcttcgtattcatatgcaaactcacacagaagagagactctatcagtgtaagaaatgtgggaaaactttcgctaagtgctcatatcttaccaaacatttacgaacacatactggagagaaaccctatgaatgtatgaaatgtgggaaagccttcactgagcgctcataccttactaaacatttacgaagacacagtggagagaagccatatgaatgtaagaaatgtggaaaagccttcacagaacgctcagaccttactaaacatttacgaagaagacacactggagacaagccctatgaatataaggagtgtgggaaagcctttgttgtctcctccagtctagttgatcatttaagaactcacactggatataaaccctataaatgtaatgcatgtgaaaaagcatgcagtaggtcttgtgtactaactcaac

SEQ ID NO: 38889 - DNA, 692 bp, Macaca Mulatta
  misc_feature (1)...(692): n = A,T,C or G
gggggtttttgctgtcttggaacccaaccaccatgtaaagaaactaaggtttctctactgaatgatgagaagccgtgtggaaacagaagtcacataaaaagtcatggcttcccagctggctaccagcaaccaggtcccagacaagaaaaggtaaaagnnnnnnnnnnnnnnnnnnnnnnngagcaaaaaagaagagggaaaaacggaggaaagaaagaaggaagaaggaaggnnnnnnnnnnnnnnnnnnntnnnnnnnnnnnnnnnnnnnnnnnnnnnnnnnnnnnnnnnnnnnnnnnnnnnnnnnnnnnnnnnnnnnnnnnnnnnngannnnnnnnnnnnnnnnnnnnnnnnnnnnnnnnnnnnnnnnnnnnnnnnnnnnnnnnnnnnnntaaagagaacnnnnnnnnnnnnnnnnnnnccagacaagcagtttacaataaagggaaaaaattcacttagccatcaatatagaaacatgggccagatatgggtgagagggtccttatggcattcaggaaagatcttttcaccctacttatatccattctattctagctcaggcacttgagaacatatcctggtatcaatttagcctatgcaaaaacgctgtctnnnnnnnnnnnnnnnnnnnnnnnnnnnnnnnnnnngcgccctgcctcgaaactttataacttcgttgggcggggcca

SEQ ID NO: 38890 - DNA, 718 bp, Macaca Mulatta
  misc_feature (1)...(718): n = A,T,C or G
ggnnnnnnnnnnnnnnnnnnnnnnnnnnnnnnnnnnnnnnnnnnnnnnnnnnnnnnnnnnnnnnnnnnnnnnnnnnnnnnnnnnnnnnnnnnnnnnnnnnnnnnnnnnnnnnnnnnnnnnnnnnnnnnnnnnnnnnnnnnnnnnnnnnnnnnnnnnnnnnnnnnnnnnnnnnnnnnnnnnnnnnnnnnnnnnnnnnnnnnnnnnnnnnnnnnnnnnnnnnnnnnnnnnnnnnnnnnnnnnnnnnnnnnnnnnnnnnnnnnnnnnnnnnnnnnnnnnnnnnnnnnnnnnnnnnnnnnnnnnnnnnnnnnnnnnnnnnnnnnnnnnnnnnnnnnnnnnnnnnnnnnnnnnnnnnnnnnnnnnnnnnnnnnnnnnnnnnnnnnnnnnnnnnnnnnnnnnnnnnnnnnnnnnnnnnnnnnnnnnnnnnnnnnnnnnnnnnnnnnnnnnnnnnnnnnnnnnnnnnnnnnnnnnnnnnnnnnnnnnnnnnnnnnnnnnnnnnnnnnnnnnnnnnnnnnnnnnnnnnnnnnnnnnnnnnnnnnnnnnnnnnnnnnnnnnnnnnnnnnnnnnnnnnnnnnnnnnnnnngcaatcctttctaactcctctcctcttaccagtttctaagccgccgggcatttacccatgcctaactaacaaaattcgcaaacctttcaaatacctacattttcccttttaaacccctgttttggaaaagaaaagaaa

SEQ ID NO: 38891 - DNA, 124 bp, Macaca Mulatta
gaccccacgcgggaccagtgctttggggaccgcttcagccgcctgctgctggatgagtttctgggctacgacgacatcctcatgtccagcgtgaagggcctggcggagaacgaggagaacaagg

SEQ ID NO: 38892 - DNA, 855 bp, Macaca Mulatta
  misc_feature (1)...(855): n = A,T,C or G
gnnnnnnnnnnnnnnnnnnnnnnnnnnnnnnnnnnnnnnnnnnnnnnnnnnnnnnnnnnnnnnnnnnnnnnnnnnnnnnnnnnnnnnnnnnnnnnnnnnnnnnnnnnnnnnnnnnnnnnnnnnnnnnnnnnnnnnnnnnnnnnnnnnnnnnnnnnnnnnnnnnnnnnnnnnnnnnnnnnnnnnnnnnnnnnnnnnnnnnnnnnnnnnnnnnnnnnnnnnnnnnnnnnnnnnnnnnnnnnnnnnnnnnnnnnnnnnnnnnnnnnnnnnnnnnnnnnnnnnnnnnnnnnnnnnnnnnnnnnnnnnnnnnnnnnnnnnnnnnnnnnnnnnnnnnnnnnnnnnnnnnnnnnnnnnnnnnnnnnnnnnnnnnnnnnnnnnnnnnnnnnnnnnnnnnnnnnnnnnnnnnnnnnnnnnnnnnnnnnnnnnnnnnnnnnnnnnnnnnnnnnnnnnnnnnnnnnnnnnnnnnnnnnnnnnnnnngtcaaactggccatcaatctttagcaaactcaataccctaaatatcggtactaacacgaaaacataacaacgtttgtccccccacttttacataagtgttaataaaaaaaggaacctggatccccccattaatggggggggcttttaaaccacggattcccctttaatacacaagggttaaacaccggaaaacaaaaccttgtgcccaaaacccaaaattcggacagtaaaataatcctgtgggcgggttaaaaatataaaacactttcgattcccaccacaaaacaatatnactgtgggaacagatgcacgggaaatataaaccggagaacccataactttagaaattatacaccgcgaagtgaccaaaaatgtaaaaa

SEQ ID NO: 38893 - DNA, 873 bp, Macaca Mulatta
  misc_feature (1)...(873): n = A,T,C or G
ggatttctccccgtcccttccccacctttttaaagtaagccacagcttttctgattgaaagagtgaaaggccagtgcatataatgacaaactgatgataacctcatattggcagtaggggatggggtggggtgggaggatnnnntgnnntnnntttgnncannnngtattatctcctgataacatgctggtaaatgcaggggagtgagatttattgctcatctttggatatgaagtctattagggaagaaatggtgccactattcccttagatgcaacagtagcatagcctcttcacccaggtgtcccaaaagcttggcgtgaagatttcagcaaatatgtcttacaacatgaggaggaggagtctaaatcagtcaggggataaaagtatcgaatcattgacaacacacacttggctttagttcttaggagggctttgtttttgtttttaacttgaagatttccttttactattcagnnnnnnnnnnnnnnnnnnntctacactgttaactgattgagactccccttgggattcacccgtttactctaaaaacttttcccggcatgtcctgcaaatttccgcgggtatatgtcacggaaaacgggcggccgaattgctttcacaggacggccccagaaataactttcttgccgtcttcccccctcctcgcacggccaaaagaccattcgcgccgtctacctacggacccaccggcccccctgcattgaccctacccatcccctttcgcgtccgcccttcccgcccgtcatacaagctcccttccaaaagcgattcatcccgccatccgcatgcgcccgaacacgctgcacatgacaatatggcgctctcatgcgccgttcgacgcggcgagta

SEQ ID NO: 38894 - DNA, 786 bp, Macaca Mulatta
ggaaattattccaaaaacaaaatgagtttctcctgggttcccaacctaaatgctaatcaacatttaatacccaccctagaaaatctagaaaataaaacttaatttcctgcaaattataatttttaaagattttaattcattacgtgtgttttctattataacacagacctggttttgtaatagaattcatcagaaaaaaaaaggggaattattttaagtggctctactgagcttatctactatgtcctgtgaagtttttgtagtcagaaaaactagcatttcagatgagatctggcacatttagactggtatggccatagccaaaaactagcatttcaaaatgtgctgaatacagcttctctggtctgatacataaaaaagaatgccttatttttcttgggcatgcaaagcttagggttacaaacattttgtcattagcctgtcaaaatttctaccaagaactattgttatctcctagaccagaactgtctagagagaagtttctgagatgatggaaatgttcttcctatatctgcactaataatggtagccaccagtcacatgtggctactgagcacttaaaatgtggctaatgcaacagaaaaaataaaatttttcatttatttgattaatttaaataaccccatgtggctatattggccccatagttccagatcactattgcaacatcctactgccagagttgaacttcacattcaaaaagacaattttgccaatgtttaaatattaaaattgcttaaagtatatgttaagtttgaaaattcc

SEQ ID NO: 38895 - DNA, 1945 bp, Macaca Mulatta
  misc_feature (1)...(1945): n = A,T,C or G
agattatatatctttgagtgatgcaggccactgcagtggtggagacagcatctggtaaaggctaccacagtaatggaggcaacctccaaaaannnnnnnnnnnnnnnnnnnnnnnnnnnnnnnnnnnnnnnnnnnnnnnnnnnnnnnnnnnnnnnnnnnnnnnnnnnnnnnnnnnnnnnnnnnnnnnnnnnnnnnnnnnnnnnnnnnnnnnnnnnnnnnnnnnnnnnnnnnnnnnnnnnnnnnnnnnnnnnnnnnnnnnnnnnnnnnnnnnnnnnnnnnnnnnnnnnnnnnnnnnnnnnnnnnnnnnnnnnnnnnnnnnnnnnnnnnnnnnnnnnnnnnnnnnnnnnnnnnnnnnnnnnnnnnnnnnnnnnnnnnnnnnnnnnnnnnnnnnnnnnnnnnnnnnnnnnnnnnnnnnnnnnnnnnnnnnnnnnnnnnnnnnnnnnnnnnnnnnnnnnnnnnnnnnnnnnnnnnnnnnnnnnnnnnnnnnnnnnnnnnnnnnnnnnnnnnnnnnnnnnnnnnnnnnnnnnnnnnnnnnnnnnnnnnnnnnnnnnnnnnnnnnnnnnnnnnnnnnnnnnnnnnnnnnnnnnnnnnnnnnnnnnnnnnnnnnnnnnnnnnnnnnnnnnnnnnnnnnnnnnnnnnnnnnnnnnnnnnnnnnnnnnnnnnnnnnnnnnnnnnnnnnnnnnnnnnnnnnnnnnnnnnnnnnnnnnnnnnnnnnnnnnnnnnnnnnnnnnnnnnnnnnnnnnnnnnnnnnnnnnnnnnnnnnnnnnnnnnnnnnnnnnnnnnnnnnnnnnnnnnnnnnnnnnnnnnnnnnnnnnnnnnnnnnnnnnnnnnnnnnnnnnnnnnnnnnnnnnnnnnnnnnnnnnnnnnnnnnnnnnnnnnnnnnnnnnnnnnnnnnnnnnnnnnnnnnnnnnnnnnnnnnnnnnnnnnnnnnnnnnnnnnnnnnnnnnnnnnnnnnnnnnnnnnnnnnnnnnnnnnnnnnnnnnnnnnnnnnnnnnnnnnnnnnnnnnnnnnnnnnnnnnnnnnnnnnnnnnnnnnnnnnnnnnnnnnnnnnnnnnnnnnnnnnnnnnnnnnnnnnnnnnnnnnnnnnnnnnnnnnnnnnnnnnnnnnnnnnnnnnnnnnnnnnnnnnnnnnnnnnnnnnnnnnnnnnnnnnnnnnnnnnnnnnnnnnnnnnnnnnnnnnnnnnnnnnnnnnnnnnnnnnnnnnnnnnnnnnnnnnnnnnnnnnnnnnnnnnnnnnnnnnnnnnnnnnnnnnnnnnnnnnnnnnnnnnnnnnnnnnnnnnnnnnnnnnnnnnnnnnnnnnnnnnnnnnnnnnnnnnnnnnnnnnnnnnnnnnnnnnnnnnnnnnnnnnnnnnnnnnnnnnnnnnnnnnnnnnnnnnnnnnnnnnnnnnnnnnnnnnnnnnnnnnnnnnnnnnnnnnnnnnnnnnnnnnnnnnnnnnnnnnnnnnnnnnnnnnnnnnnnnnnnnnnnnnnnnnnnnnnnnnnnnnnnnnnnnnnnnnnnnnnnnnnnnnnnnnnnnnnnnnnnnnnnnnnnnnnnnnnnnnnnnnnnnnnnnnnnnnnnnnnnnnnnnnnnnnnnnnnnnnnnnnnnnnnnnnnnnnnnnnnnnnnnnnnnnnnnnnnnnnnnnnnnnnnnnnnnnnnnnnnnnnnnnnnnnnnnnnnnnnnnnnnnnnnnnnnnnnnnnnnnnnnnnnnnnnnnnnnnnnnnnnnnnnnnnnnnnnnnnnnnnnnnnnnnnnnnnnnnnnnnnnnnnnnnnnnngggaagttcaactttttaaagatacggagaaggatttgccatcaatgtgctgtcagaaaataatgcagagagccataaaagcagagctgcaccttttaaatgttcactatcagatgtgtcgtcgccattgttgtgatatttacaaacttgtaatggaaaatagggaaggattaaatatgtgtttattaattt

SEQ ID NO: 38896 - DNA, 708 bp, Macaca Mulatta
  misc_feature (1)...(708): n = A,T,C or G
ccatccatttcactggtgatgtggtagatagcagagggtacacgcagtccttgagcagtcctgtgtgatccatgatcagttgttatggtattctaactatccttccaaaccagcagatgtttggaaattagggaaaaaattaaattctcatcaatggttgctgttatagttaaatcaataaagatcttgaatannnnnnnnnnnnnnnnnnnnnnnnnnnnnnnnnnnnnnnnnnnnnnnnnnnnnnnnnnnnnnnnnnnnnnnnnnnnnnnnnnnnnncnnnnnnnnnnnnnnnnnnnnnnnnnnnnnnnnnnnnnnnnnnnnnnnnnnnnnnnnnnnnnnnnnnnnnnnnnnnnnnnnnnnnnnnnnnnnnnnnnnnnnnnnnnnnnnnnnnnnnnnnnnnnnnnnnnnnnnnnnnnnnnnnnnnnnnnnnnnnnnnnnnnnnnnnnnnnnnnnnnnnnnnnnnnnnnnnnnnnnnnnnnnnnnnnnnnnnnnnnnnnnnnnnnnnnnnnnnnnnnnnnnnnnnnnnnnnnnnnnnnnnnnnnnnnnnnnnnnnnnnnnnnnnnnnnnnnnnnnnnnnnnnnnnnnnnnnnnnnnnnnnnnnnnnnnnnnnnnnnnnnnnnnnnnnnnnnnnnnnnnnnnnnnnnnnnnnnnnnnnnnnnnnnnnnnnnnnnnnnnnnnnnnnnnnnnnnnnnnnnnnnnnnnnnn

SEQ ID NO: 38897 - DNA, 1110 bp, Macaca Mulatta
  misc_feature (1)...(1110): n = A,T,C or G
ggggcagttcggcggtcccgcgggtctgtctcttgcttcaacagtgtttggacggaacagatccggggactctttcttccagcctccgagcgccctccgatttcctctccgcttgcaacctccgggaccatcttctcggccatctcctgcttcctagcggaacccttgcagccatgcccccgtttcctctgggggggtctaggggctcccggctcttcgccccgactccgcacattcggggtgaacacgccttcccgcccgaaagctctcgggcgtcgagcggcggagccttcttctccccccgtcttgcgccgaggtcaagggcacccgcgagtgccctgtctcttggctggttcgcgcgctccgtgattcgtctgcgtcgcctcggcgtgcgtgggcctcctcagtcccatgccggtcgtaccaccgacgtggtgctcccgtccctcggctagccgctaagcctcccntctcggagaggtcgtgtgctcctggcggcgggggcgggcgcgggcgtggtattcgcggggggggtgcgtgcgcgcccctcctttgagggtgtgggcggccgtggtttggcgcggactcctgcgtcgaccccgaggggggggggtgacggtggcgagcgggacactgttgccggtgggggcgccgtttnnnnnnnnnnnnnnnnncaagagcnncntgtaatttaggtcacaagnnncncnncatgggnnncttcggggnnttcnnnttcttacagaatcgcgggtagagtggntggtagacggggtggtcagggntgggnnntctatagaggnnntcatagcaaacggnntagcgggtcgtgtagtacagtgggtcgtgagctgagggnagggaggacgtgcggtgggaggcgcttgcgtggcagttgctcgacccgcgcgccgttcgcgagctcggcgcgttgcccgttgcgcacnttttgcagcctcttctaggcgcgcgccgtggccacccgtgtncttcacaccccttctcncactgcccgcctagcttggtgcgtggggcgccccgcntcggtccggatgacccttcggtgttgccgccctgcgccggggtcacatcgcggggagctaggcgtgg

SEQ ID NO: 38898 - DNA, 756 bp, Macaca Mulatta
tccagaacccactacggaagctgaacattctacacccctgaagcagactctagttcctccaaagtaccatcaggtgacacttccacatccagaccaggttcagactcagcattcacacctgactcaagccacagttcaacctttggacctagggtttaccatcactccagaatccacgacagaggttgaaccttctacagccctgactacagctcctcctccaaaacaccctgaggtgacacttccaccttccgacaagggtcaggctcagcattcaaacctgactcaagtcacagttcaacctctggccctgaagcttaccataactacagaacttcctatagaggttaaacagtctccaaccacggaggagacctcaactcagcctccagacctgggacttgccatcactccagaaccttctacagagattggacattctatagccctggaggagactacagctcctcgtccagaccaggttcagactctgcatcgaagcctgactgaagtcacaggttcacctactgaactagaacctactcaggattcactggtgcagtctgaaagttacacccaaaataaggctttaactgcacgagaggaacagaaggcctccgcaagcaccaacatatgtgagctctgtacctgcggagatgagacactgtcatgtattaatctcagcccaaagcagaggctccaccaagtgcctgtgccagagcccaacacctacaatggcaccttcaccatcttgta

SEQ ID NO: 38899 - DNA, 4038 bp, Macaca Mulatta
  misc_feature (1)...(4038): n = A,T,C or G
gggcccaagacagggagtggaagagccagccccgtggaggggacctcagctgtggagtggagtggtcttgagccacaaatggataatggacaccccccaagaccctggccttgccctcaggaaaacagaacatccagcccgatggccccccggcctcccagagtatggggggtacagctccaaggcccctctgtgctggaatccaaggtgagggctttgaaggagaagatgacagcagccaaacagggagtgagcccttgctctgcttcccannnnnnnnnnnnnnnnnnnnnnnnnnnnnnnnnnnnnnnnnnnnnnnnnnnnnnnnnnnnnnnnnnnnnnnnnnnnnnnnnnnnnnnnnnnnnnnnnnnnnnnnntacccaaaacctgcctgataggcagctggacggcggcgtcaatgaggaggaacccaccagggatgggggccccgggcctcccaggccgcctgcccctgggcgtgagtactgcaacagggggagcccgtggcctccagaagccgaatggacgctgcctgaccatgagagaggtccgctgctggggcccagctctttgcaagagagccccatccatggagttactcccggacggcctggggatcctggtccttgtaacaaaatcatccacattcccagcccgaggacaggaaggtcctcccgttttccagatggtgtggtcacagatgcagatctggatagcacatccctgacctctgaggaggaatctgtccccgggacagccctactgggcgagcgctggagagctggagacctggaggctctgggcaccgggagcagtgccttgtccctgtctgatcgggtggagagaaaccgcctgttgctgcaggagatgctcagtgtttctgggcagagcccccgcaaggcgggaacccccgcccggactccgtcctgggacacagctgcaccannnnnnnnnnnnnnnnnnnnnnnnnnnnnnnnnnnnnnnnnnnnnnnnnnnnnnnnnnnnnnnnnnnnnnnnnnnnnnnnnnnnnnnnnnnnnnnnnnnnnnnnnnnnnnnnnnnnnnnnnnnnnnnnnnnnnnnnnnnnnnnnnnnnnnnnnnnnnnnnnnnnnnnnnnnnnnnnnnnnnnnnnnnnnnnnnnnnnnnnnnnnnnnnnnnnnnnnnnnnnnnnnnnnnnnnnnnnnnnnnnnnnnnnnnnnnnnnnnnnnnnnnnnnnnnnnnnnnnnnnnnnnnnnnnnnnnnnnnnnnnnnnnnnnnnnnnnnnnnnnnnnnnnnnnnnnnnnnnnnnnnnnnnnnnnnnnnnnnnnnnnnnnnnnnnnnnnnnnnnnnnnnnnnnnnnnnnnnnnnnnnnnnnnnnnnnnnnnnnnnnnnnnnnnnnnnnnnnnnnnnnnnnnnnnnnnnnnnnnnnnnnnnnnnnnnnnnnnnnnnnnnnnnnnnnnnnnnnnnnnnnnnnnnnnnnnnnnnnnnnnnnnnnnnnnnnnnnnnnnnnnnnnnnnnnnnnnnnnnnnnnnnnnnnnnnnnnnnnnnnnnnnnnnnnnnnnnnnnnnnnnnnnnnnnnnnnnnnnnnnnnnnnnnnnnnnnnnnnnnnnnnnnnnnnnnnnnnnnnnnnnnnnnnnnnnnnnnnnnnnnnnnnnnnnnnnnnnnnnnnnnnnnnnnnnnnnnnnnnnnnnnnnnnnnnnnnnnnnnnnnnnnnnnnnnnnnnnnnnnnnnnnnnnnnnnnnnnnnnnnnnnnnnnnnnnnnnnnnnnnnnnnnnnnnnnnnnnnnnnnnnnnnnnnntctgccctgacaacacagacaactctgacagctgcaggacggacagtgaggaggcggggaccgctcaggctggcggggcatgtaggcggacccgaggcagcagcccgcgactgcgactgcggggctccaggcctcgaggccacaggtggtccaagaaggctgaggtggagctgccttggggccttcaggcccaacaacacctgcctagggctgatgatatggaggtggaaaatgaggtgaaggagggcagaggacacacgcctgggggaactctatttttgagagaagatgctgtccctaagcctcctgacctggagttgaagcgggtgcccctgggaccccagtggcagcctggaccacggctgggaagtcaccaggctcaccttttggattcccggactccatgcaggacagcctacgccaccacctcccccatgacgcctgaatcaccggggccaggaggccaggcccaggttatagaaagccacgagtccctggaaattgtctgtccttcctccctgcaacagagccatgcagagccttccgccccgcaccaagcccggcagccaacagtttccttttgtcctgaaggctgggcgccaacccctcccccttcaaggaaggccacctcgccggtatctcacaggaaggcagccctggctggattgtgcaggccgggtgaccagggagaacctgtgggtatccccctgcctccttcaagaagcacgattctcaggacctgtgagctgcccccatcacagacccagcccagctgccctcaggtcaggcacccactcctggccctgtccaccaacaactgcaacaacagcgcacctcgggggctgcaggagccctacgggggagtcgtccacgagggtagggtggagaggggcccctgcagccgggagccggagccgccnnnnnnnnnnnnnnnnnnnnnnnnnnnnnnnnnnnnnnnnnnnnnnnnnnnnnnnnnnnnnnnnnnnnnnnnnnnnnnnnnnnnnnnnnnnnnnnnnnnnnnnnnnnnnnnnnnnnnnnnnnnnnnnnnnnnnnnnnnnnnnnnnnnnnnnnnnnnnnnnnnnnnnnnnnnnnnagagcatcagcaggggctgacacaggacctggctcccccttggctgcccctttggaccagaacaagaaaagaagcagcagcatcgcctccaccttggggctgaaaaagctcttctcagcccttggccagagttcccggcccaagctgggcaagtcccgcagctacagtgtggagcagctgcagcccgccgtgcctggcctggcgtcacactccagggccccgtcgttacaatccctgcacccggtnnnnnnnnnnnnnnnnnnnnnnnnnnnnnnnnnnnnnnnnnnnnnnnnnnnnnnnnnnnnnnnnnnnnnnnnnnnnnnnnnnnnnnnnnnnnnnnnnnnnnnnnnnnnnnnnnnnnnnnnnnnnnnnnnnnnnnnnnnnnnnnnnnnnnnnnnnnnnnnnnnnnnnnnnnnnnnnnnnccagcctggctcgcaccgtgggccgcctggtggaggtgttcccggacggcacgagccagctgcagctgcagcgctccccggggggcactttcggcttctgcgtggcctctgggaatgggcgcccagactcaggtatgccctctccccttcctcagccccatagccggggcagcctcagtaaaccgaggcagggccttctggctgtgtcagaggcttttctggtccttggctgagccgtggagctctgggaattcagaaagcccctgactacaggactaggcttctcccctcaggggctctttctgaattgtccagggctgtctaggagtctgcacctgcagagcctttgccctgggtagctgcagctgagagggcgttggtggggagtgtacgggagggggtagagttggcaggtttgactccactgtccccctgctgtctgatgatatcttgaaattagaatcttaggcaggcgcagtggctcacgcctgtaatcccagcactttgggaggctgaggtgcccggatcacctgaggttaggagtttaagaccagtctggcccacatggtgaaactccatgtctactaaaaatacaaaattagctgggcgtggtggtgcatgcctgtaatcccagttactcaggaggttgaggcaggagaattgctcgaacccaggaggtggaggttacagtgagccaagattgcgccattgtactccagcctgggcaacaagagcaaaacttcgtct

SEQ ID NO: 38900 - DNA, 3281 bp, Macaca Mulatta
  misc_feature (1)...(3281): n = A,T,C or G
gataccacttcccactcgtcttccaaggggggtggaggagcaggaggaactggcgttttcaagtccggctggctctacaaggggaattttaacagcaccgtgaacaacaccgttactgttcggngtcattcaaaaagcgctacttccagctgactcagttgccagataattcctacattatgaatttttacaaagatgagaaaatatccaaagaacccaaaggatgcatctttttggattcctgtacaggagtggtgcagncagaataacagactaagaaaatatgcctttgaattgaaaatgaatgacctgacctattttgtgctggcagctgaaacagagtcagatatggatgaatggatccacaccctcaaccgcattctgcaaatcagtcctgaggggccccaccaagggaggaggagcacagagctcactgatctggggctggnnnnnnnnnnnnnnnnnnnnnnnnnnnnnnnnnnnnnnnnnnnnnnnnnnnnnnnnnnnnnnnnnnnnnnnnnnnnnnnnnnnnnnnnnnnnnnnnnnnnnnnnnnnnnnnnnnnnnnnnnnnnnnnnnnnnnnnnnnnnnnnnnnnnnnnnnnnnnnnnnnnnnnnnnnnnnnnnnnnnnnnnnnnnnnnnnnnnnnnnnnnnnnnnnnnnnnnnnnnnnnnnnnnnnnnnnnnnnnnnnnnnnnnnnnnnnnnnnnnnnnnnnnnnnnnnnnnnnnnnnnnnnnnnnnnnnnnnnnnnnnnnnnnnnnnnnnnnnnnnnnnnnnnnnnnnnnnnnnnnngtgagtgtggcactttatgacctcagagacagcaggaagatttctgctgattttcacgtggatctaaaccatgctgctgtcagacagatgctcttgggggcttctgtggctttggaaaatggcaacatcgacaccatcacgccaagacaatcagaagaacctcacatcaagggacttccggaggaatggctaaaatttccaaagcaggnnnnnnnnnnnnnnnnnnnnnnnnnnnnnnnnnnnnnnnnnnnnnnnnnnnnnnnnnnnnnnnnnnnnnnnnnnnnnnnnnnnnnnnnnnnnnnnnnnnnnnnnnnnnnnnnnnnnnnnnnnnnnnnnnnnnnnnnnnnnnnnnnnnnnnnnnnnnnnnnnnnnnnnnnnnnnnnnnnnnnnnnnnnnnnnnnnnnnnnnnnnnnnnnnnnnnnnnnnnnnnnnnnnnnnnnnnnnnnnnnnnnnnnnnnnnnnnnnnnnnnnnnnnnnnnnnnnnnnnnnnnnnnnnnnnnnnnnnnnnnnnnnnnnnnnnnnnnnnnnnnnnnnnnnnnnnnnnnnnnnnnnnnnnnnnnnnnnnnnnnnnnnnnnnnnnnnnnnnnnnnnnnnnnnnnnnnnnnnnnnnnnnnnnnnnnnnnnnnnnnnnnnnnnnnnnnnnnnnnnnnnnnnnnnnnnnnnnnnnnnnnnnnnnnnnnnnnnnnnnnnnnnnnnnnnnnnnnnnnnnnnnnnnnnnnnnnnnnctttgacattatgtcagtcttgagagtcttggtgtgcctaaaattcagatagatgcactatgatttcttatgcagctgcatgttttcatctatgcgtagagctcaggcctatatatggatgtccaaatgaaaccatcaaaccaatcatttaaactcattttgattttgatactgtttagcctagccaaatgtatcagtaccagttgcctctctgaaagaaaggctgagttctgtggacatagatggacacatcattcacttggatgcataacctcttcatgaagaaccataattgcttttcagaactgtttaatatcatcaattattattgtcctcctcaatctctttacatctttattagtataagaatttcttaagtgaggaagagcctggcatagactcataaggctaaaaggtcagcaatgtacacattgaatgaactaagaaaggttagagctaccggccgggcatggtagctcacacctgtaatcccagcactttgggaggccgagacaggcagatcccgaggtcaggagttcgagaccagcctggccaacatggtgaaacgccgtctctctaaaaatacaaaaattagccaggtgtggtggcaaataatacagcccatcaaatattcatttgaactttggtaacattatctcaatgtatccaactttaacatccagaaggacgagagaacctattaattatgccatttttaagtctcacagttcccagtgatgtatattcagagtaaactcaccaatatctgtcataattttgaggttgttatttgaagttggagatgagtaggtgtaggaaggagaaatgtggaagtttgggcagcagtaaaccaagatagattcatgcagtctccaggaattagtttgccctaaggcagtgccatagcaagggagggagagtctaggcctgggagtctgataaacattgcagatcaggccactacttactgtgacttggaacaagtttcttctcaaagtctcaaggttcccagctataaattgaggctgacaatacttgcccttatgaacagtatgtgcaatctcaagtgcagaagcatttggcataaaatagctcatggatagtactttatcctcccttttctatctctttctataggaacaactaatgccaggacattctgcatgaaaaaagatggtatttagagctacaaaacccttcgtaatgaatttgtttttatttctcataagctttaagagaaaggctaactaattataattcactgattaaacatttttggtattcttaagcattctcagttccctccagaaaacctactggggcaagtagaggcaagatgtctgttgtgaaatattccagtataacaaaagtacaatagtgcacacatttttcactttaaggatccaacattgctctgagactttagaagcaggcgttttagggccagacagaactgagctcaaaatcctaactctggccaggcatggtgggccatgcctataatcccaacactttaggaggccaaggtctcctggaggttcgcttaaggccaggagttctagatcagcctgggcagcataatgagacccaatctctaagaaacttttaaaaaattaaccaagagtggtagcgtacacctgtagtcctagccactcaggaggttgagatagcagtatcannnnnnnnnnnnatgagcccagaagctggaagttgcagtgaactatggtagtagtgcactccaacctgggcaacagagtgagaccctgt

SEQ ID NO: 38901 - DNA, 1102 bp, Macaca Mulatta
  misc_feature (1)...(1102): n = A,T,C or G
ggcatggtggctcacacttgtaatctnnnnnnnnnnnnnnnnnnnnatgnnnnnnnnnnnnnnnnnnnnnnnnnnnnnnnnnnnnnnnnnnnnncggtaagacctcgtctctaccnnnnnnnnnnnnnnnnnnnnnnnctggtggtgcgcacannnnnnnnnnnnnnnnnnnnnnnnnntggcacaagaatcgcttgaacacaggaggcacaggttgcactgaactgaaattgtgccattgccaagaatgtgccacctgcacttcatcctaatgccaggatgacacagcaggactctgaatcagaacaaatcttagaccagacttaccaggaagattaaaacacggaagaacaaccacggggcatacagagacagcttgcgagctcttctaagacggtataaaagacataggcattgaatgaaaaaatctaaactaaactcctcccctgtaccaccttatcgggctctttgagttcggataaacacccagtcggtcacgacctctcaccccacactagttaacttcggaaatatccgactagcattatatttccgacatctctgcggaaataacataacccgtgcttgcttgacacgggtagttccactctattaacaaaaagaatataagtatgtgataagcccacgtaagtgtacgatagtgagctattacctggatgacctacacaggacagtgtaacggccctacactgctgaagctcgtcatctacatacatcaggggtacggggcagcacaagtaagaatatcaatactcgtcatggcgatcacgactcttcttctggtgtctcagacgataatatacactgaaactataaagatgctgaacacagagccagatataagattcaacatatgtacttgtactcacttactgcgcatatcactacttaacttctaccgcgacgtcgagcacatgtatattatatatctatacaagattctcctgttccagctatccataatgcctatcccatggtattcgttattccatgcgtagagcacatacccactancacacacaatatcatgntaggcattgccgttgctagatgcacaactgcgtctgttaactcgtataan

SEQ ID NO: 38902 - DNA, 804 bp, Macaca Mulatta
  misc_feature (1)...(804): n = A,T,C or G
ggggtccccagactggcagcaacagcatcacctgagtgtttgttagaagtgaacattctcgaccaggcatnnnnnnnnnnnnnnnnnnnnnnnnnnnnnnnntaggccaaggtgggaggatcgtttgaatcnnnnnnnnnnnnnnnnnnnnnnnaaatgtggtgagnnnnnnnnnnnnnnnnnnnnnnnnnnnngttagccgggcttggtggcacatgcctgtagtccgagctatttagggggactgaagtgggggaggatttcttgagcccnagaggttgaggctgcagtgagtctagattnnnnnnnnnnnnnnnnnnnnnagtgacagtgcgagatcctgtctnnnnnnnnnnnnnnnnnnnnnnnnnnnnnnnnnnnnttctcaagctccaccctagatgacggaatccgaaccggcaattctgtgctctaacaagccttttccgggtggatccgaaggcaaacttcagtttgaaaagccctccaagggaagtttaattttttccacagaaacttgaaatttcaaaagtgccctggaactgccccttgggaaacattcggggcccccccccctacttaaaattgaaaagcttgaaggaaaaaaccccttaaaacctttttcacctgggcccaaggtgccaagggggccccaaggcccgggaaaatccccaaaactcttttggggaggccccnnnnnnnnnnnnnnnnnnnctttttggggccccacaaaaattttttggaaaccaaaaaacggggggggcaaaaacaggggggggaaatnnnnnnnnnnnnnnnnnnnnn

SEQ ID NO: 38903 - DNA, 132 bp, Macaca Mulatta
agtgagctgagatggatggatgtgatggaatgcgctgtggcgatcaactagtgatatctttagcagatgattggatcttaaaagcataatgtagaatgaagaaagtaagatatagaaggatacctgtagtat

SEQ ID NO: 38904 - DNA, 231 bp, Macaca Mulatta
cagacttactgaatcctgaatcgtattaacaagatcctgggttattcgcacgcacagcaaagtttggcaaacataatgaaagtccctcacaggggagcaggagaaaatagtaggaaacaagtgtcattagactttgcctctttttgcctcttgccaatccagaaaagttggttgctatctgaagaggtctcaggatgaatggaagaggtagtgagttgccatcagctattt

SEQ ID NO: 38905 - DNA, 5518 bp, Macaca Mulatta
  misc_feature (1)...(5518): n = A,T,C or G
gccctgagatgtccatataggagaccatttttgccatagtgtgcttaacgtttataattacaatgttgttttctttatacctccattctcctgtgaaaggtgagaaaataataatatttcctgtgattatagaagaactgggtctccttccaaaatatactttcttccttttgggtcaaactagtatgaatatccctcattcagacatctcttcttaaaggaacacatcaatcttactttaattctcagtttaaataattgggcctactgttttatgagtgggtgaaagttttcaactgctccctcactagattgccagtggtcagattaggagnnnnnnnnnnnnnnnnnnnnnggtggtatttatttatttattttcaagtttcaatgtattttagattcaggggatacatgtccatgtttgttacatgggcacatgcgtagtggtggagattgggcttctaatgtacccattacccaaatagtgaacattacaccagatagataatttttcaactctagcgtctcccctttaggagtccccagtgtctgttatttctatctttatgtccgtatatacccattgtttagctcccacttaaaagtgagaacatgtggtttttgattttctttttctgcgttggtttgctcaggataatggcctgcagctccatccatgttgctgcaaggaaggtgatttcttttttatggctacaggggccgcttttgtggttcctgttttccgacatgacaccagcacattttacccttcaggtgttgccttaataaagcaaagacacttaccatattcatccacccaacaacttgggaaatagtggtactctgaatgatatctctaccattattgcttcatttctgacctgttcaggagcccacatgacacggaagcaaaagaccctaattggaatnnnnnnnnnnnnnnnnnnnnnnnnnnnnnnnnnnnnnnnnnnnnnnnnnnnnnnnnnnnnnnnnnnnnnnnnnnnnnnnnnnnnnnnnnnnnnnnnnnnnnnnnnnnnnnnnnnnnnnnnnnnnnnnnnnnnnnnnnnnnnnnnnnnnnnnnnnnnnnnnnnnnnnnnnnnnnnnnnnnnnnnnnnnnnnnnnnnnnnnnnnnnnnnnnnnnnnnnnnnnnnnnnnnnnnnnnnnnnnnnnnnnnnnnnnnnnnnnnnnnnnnnnnnnnnnnnnnnnnnnnnnnnnnnnnnnnnnnnnnnnnnnnnnnnnnnnnnnnnnnnnnnnnnnnnnnnnnnnnnnnnnnnnnnnnnnnnnnnnnnnnnnnnnnnnnnnnnnnnnnnnnnnnnnnnnnnnnnnnnnnnnnnnnnnnnnnnnnnnnnnnnnnnnnnnnnnnnnnnnnnnnnnnnnnnnnnnnnnnnnnnnnnnnnnnnnnnnnnnnnnnnnnnnnnnnnnnnnnnnnnnnnnnnnnnnnnnnnnnnnnnnnnnnnnnnnnnnnnnnnnnnnnnnnnnnnnnnnnnnnnnnnnnnnnnnnnnnnnnnnnnnnnnnnnnnnnnnnnnnnnnnnnnnnnnnnnnnnnnnnnnnnnnnnnnnnnnnnnnnnnnnnnnnnnnnnnnnnnnnnnnnnnnnnnnnnnnnnnnnnnnnnnnnnnnnnnnnnnnnnnnnnnnnnnnnnnnnnnnnnnnnnnnnnnnnnnnnnnnnnnnnnnnnnnnnnnnnnnnnnnnnnnnnnnnnnnnnnnnnnnnnnnnnnnnnnnnnnnnnnnnnnnnnnnnnnnnnnnnnnnnnnnnnnnnnnnnnnnnnnnnnnnnnnnnnnnnnnnnnnnnnnnnnnnnnnnnnnnnnnnnnnnnnnnnnnnnnnnnnnnnnnnnnnnnnnnnnnnnnnnnnnnnnnnnnnnnnnnnnnnnnnnnnnnnnnnnnnnnnnnnnnnnnnnnnnnnnnnnnnnnnnnnnnnnnnnnnnnnnnnnnnnnnnnnnnnnnnnnnnnnnnnnnnnnnnnnnnnnnnnnnnnnnnnnnnnnnnnnnnnnnnnnnnnnnnnnnnnnnnnnnnnnnnnnnnnnnnnnnnnnnnnnnnnnnnnnnnnnnnnnnnnnnnnnnnnnnnnnnnnnnnnnnnnnnnnnnnnnnnnnnnnnnnnnnnnnnnnnnnnnnnnnnnnnnnnnnnnnnnnnnnnnnnnnnnnnnnnnnnnnnnnnnnnnnnnnnnnnnnnnnnnnnnnnnnnnnnnnnnnnnnnnnnnnnnnnnnnnnnnnnnnnnnnnnnnnnnnnnnnnnnnnnnnnnnnnnnnnnnnnnnnnnnnnnnnnnnnnnnnnnnnnnnnnnnnnnnnnnnnnnnnnnnnnnnnnnnnnnnnnnnnnnnnnnnnnnnnnnnnnnnnnnnnnnnnnnnnnnnnnnnnnnnnnnnnnnnnnnnnnnnnnnnnnnnnnnnnnnnnnnnnnnnnnnnnnnnnnnnnnnnnnnnnnnnnnnnnnnnnnnnnnnnnnnnnnnnnnnnnnnnnnnnnnnnnnnnnnnnnnnnnnnnnnnnnnnnnnnnnnnnnnnnnnnnnnnnnnnnnnnnnnnnnnnnnnnnnnnnnnnnnnnnnnnnnnnnnnnnnnnnnnnnnnnnnnnnnnnnnnnnnnnnnnnnnnnnnnnnnnnnnnnnnnnnnnnnnnnnnnnnnnnnnnnnnnnnnnnnnnnnnnnnnnnnnnnnnnnnnnnnnnnnnnnnnnnnnnnnnnnnnnnnnnnnnnnnnnnnnnnnnnnnnnnnnnnnnnnnnnnnnnnnnnnnnnnnnnnnnnnnnnnnnnnnnnnnnnnnnnnnnnnnnnnnnnnnnnnnnnnnnnnnnnnnnnnnnnnnnnnnnnnnnnnnnnnnnnnnnnnnnnnnnnnnnnnnnnnnnnnnnnnnnnnnnnnnnnnnnnnnnnnnnnnnnnnnnnnnnnnnnnnnnnnnnnnnnnnnnnnnnnnnnnnnnnnnnnnnnnnnnnnnnnnnnnnnnnnnnnnnnnnnnnnnnnnnnnnnnnnnnnnnnnnnnnnnnnnnnnnnnnnnnnnnnnnnnnnnnnnnnnnnnnnnnnnnnnnnnnnnnnnnnnnnnnnnnnnnnnnnnnnnnnnnnnnnnnnnnnnnnnnnnnnnnnnnnnnnnnnnnnnnnnnnnnnnnnnnnnnnnnnnnnnnnnnnnnnnnnnnnnnnnnnnnnnnnnnnnnnnnnnnnnnnnnnnnnnnnnnnnnnnnnnnnnnnnnnnnnnnnnnnnnnnnnnnnnnnnnnnnnnnnnnnnnnnnnnnnnnnnnnnnnnnnnnnnnnnnnnnnnnnnnnnnnnnnnnnnnnnnnnnnnnnnnnnnnnnnnnnnnnnnnnnnnnnnnnnnnnnnnnnnnnnnnnnnnnnnnnnnnnnnnnnnnnnnnnnnnnnnnnnnnnnnnnnnnnnnnnnnnnnnnnnnnnnnnnnnnnnnnnnggaaatggatcctaggaatatcgcactgctttataatttcctattttggcaggatcttccacttataataagtgattttaagcttttgaagacttgacatttgtgagacattgttacaaagtaataatctctaaattcgtggtggtgttatgcgttggctttgaaggttgcaaggtccgtattggtgggaggtgttttcaagcagcttaggttctgtcttaggtaatgttagtaattagctttatgatttttagcnnnnnnnngtatttcccaatgtgtaaaatggggataataacatctattgatgtagagggtcaaatgaagaacaaaaagtagctgctgctacttgacttgaaatgtaagtatgtttacatcatgctgtggaatagctctaaacagtctatgtagaagaggagcgtgttatcctgggcttctcatggtaattgtgaatgaagccctttgttaaggtcttattaaagaaagaacactgtataagttcaggctttagtacattttccttagcaaaatgttggtagtgaatcaaagagttgatttctccagctttccactttttactttagtttgtgctgtgcctgccttggacttcctgtttagtttggatggaaaatacctgcttgaaattttaacaatgatttctttagtgcatctatttagctagtttctgataggtgacatgtaatattttnnnnnnnnnnnnnnnnnnnnnnnnnnnnnnnnnnnnnnnnnnnnnnnnnnnnnnnnnnnnnnnnnnnnnnnnnnnnnnnnnnnnnnnnnnnnnnnnnnnnnnnnnnnnnnnnnnnnnnnnnnnnnnnnnnnnnnnnnnnnnnnnnnnnnnnnnnnnnnnnnnnnnnnnnnnnnnnnnnnnnnnnnnnnnnnnnnnnnnnnnnnnnnnnnnnnnnnnnnnnnnnnnnnnnnnnnnnnnnnnnnnnnnnnnnnnnnnnnnnnnnnnnnnnnnnnnnnnnnnnnnnnnnnnnnnnnnnnnnnnnnnnnnnnnnnnnnnnnnnnnnnnnnnnnnnnnnnnnnnnnnnnnnnnnnnnnnnnnnnnnnnnnnnnnnnnnnnnnnnnnnnnnnnnnnnnnnnnnnnnnnnnnnnnnnnnnnnnnnnnnnnnnnnnnnnnnnnnnnnnnnnnnnnnnnnnnnnnnnnnnnnnnnnnnnnnnnnnnnnnnnnnnnnnnnnnnnnnnnnnnnnnnnnnnnnnnnnnnnnnnnnnnnnnnnnnnnnnnnnnnnnnnnnnnnnnnnnnnnnnnnnnnnnnnnnnnnnnnnnnnnnnnnnnnnnnnnnnnnnnnnnnnnnnnnnnnnnnnnnnnnnnnnnnnnnnnnnnnnnnnnnnnnnnnnnnnnnnnnnnnnnnnnnnnnnnnnnnnnnnnnnnnnnnnnnnnnnnnnnnnnnnnnnnnnnnnnnnnnnnnnnnnnnnnnnnnnnnnnnnnnnnnnnnnnnnnnnnnnnnnnnnnnnnnnnnnnnnnnnnnnnnnnnnnnnnnnnnnnnnnnnnnnnnnnnnnnnnnnnnnnnnnnnnnnnnnnnnnnnnnnnnnnnnnnnnnnnnnnnnnnnnnnnnnnnnnnnnnnnnnnnnnnnnnnnnnnnnnnnnnnnnnnnnnnnnnnnnnnnnnnnnnnnnnnnnnnnnnnnnnnnnnnnnnnnnnnnnnnnnnnnnnnnnnnnnnnnnnnnnnnnnnnnnnnnnnnnnnnnnnnnnnnnnnnnnnnnnnnnnnnnnnnnnnnnnnnnnnnnnnnnnnnnnnnnnnnnnnnnnnnnnnnnnnnnnnnnnnnnnnnnnnnnnnnnnnnnnnnnnnnnnnnnnnnnnnnnnnnnnnnnnnnnnnnnnnnnnnttgggtattcttaaatatgccaaaaggaattctagtttttataaccaatgggtttttttttgtttgtgtgcttatggatttgtgtaatcattgatacttaatgttgtggattcgtaatataaaaagtggctcctgtcctttatatttattcatgtgctagaaatagtacacattatatagagtatgaagttttcataagcctttatatttcaagctctttatttaaacattgttggaatatgtgacataagccttgtttcatttatttaataaactggagtaatatataataataaaa

SEQ ID NO: 38906 - DNA, 849 bp, Macaca Mulatta
  misc_feature (1)...(849): n = A,T,C or G
ggcagaaaacttaatgcgtatgtatccttttttctcctctcatactctatcctatagataatgttcagcgttttgnnnnnnnnnnnnnnnnnncttaataacttatcctggagattttttcctataattttagataaatatatcaccgtttttttttaaacatttgcacatttcattgtgttatttactgtgaattatcaagtgcccaacaatgtatatttagttatgaattaagtgccctattaatatataattagttatgaatgaagtgccttattaatatatatttgcagttttttggctgttacaagcagtggtggtaataaactgtacctctgtgttgctcagaatttaatacatataagggattgctatggcccttagttgggcaccttttttgtgaattaaaattgtattggaacacacccatacccatttgatatgaatgttgaacaatggctgcctttcaaactaaattttaaaaaaacgaaaataattgttatcaaaatggaaataatttgttaaatgaatgaatggtaataacccggtaaaaaatttgtgaagcccttttagggtctcacaaaagctgaaaaaaaatctttttactgccctggaaccccttttaagaacaaagtttgggccttgggccaccccattggtggtcaactattatcttctcttgtagttaaatgagaaatttgcttgggggtacaacaaacagaaattgcctttggaatttattaacatttcaaaaatcttttcaaaaggaaaaaccacattacaacaattctattctatatttaccttaagaggcctataaatatatactgatctcacaataaaacggtg

SEQ ID NO: 38907 - DNA, 1055 bp, Macaca Mulatta
  misc_feature (1)...(1055): n = A,T,C or G
acttccattgaaatactctttccattaaaatattctggatagaatatagtaataatggaattgtgatcttcantcgcgacctcaaccatttttttttgcttatgaactaaaatttctaaaattaacatttcagcatgtaataaagcaagggcctgtctcctttaaaatttaacattccatataattttttgacttattcataagttgcaaatattactattttcctaaaccagggtacacaatttaagttgccacttattgatgacagaatttctggataataggattttaataggcaagcaaataaaattaatttcaaggaaaaacatctggccagaggtagcttgattttgccccccaaaatactgaagactaatccattgacattcataatgggacagctaaataccaaatagctaactactccccgtggaggtttatgcaagcggagtaccaggggctccatcatatcaacctggcaatgcacttggtggttgtgcgaccttgagaaagtctcttactcttgtttgtaggttcctactttagaaactgagactttatttgtggttttcacactatttcagcagcaaaaactttttcaaggaaaatcttacagaacccttaaacacacgtgcatacacacataccctgcaccccactatataaaagtcaaattaatataaatgtccttatttattgtataaactttatatactataaatgtgattaagtcaatgaataaaaacatattaatgcattggtgatatccagcatgtttgaatttggtgagtaacacatatagtgggagttgnnnnnnnnnnnnnnnnnnaattaaattcaagtcaaatgtgcagaatcctgtatctcctccatagattcttagtattccatgaaacgtattttgaaaaacttggggatagatgatccacttgaaaccttttccagctctaagattttaaattgtcccttttagattagacttggcttgagtttaaattcagtttggcataaattttaaaaatggtttcctggaaaaagtgaaacaaaagttaacc

SEQ ID NO: 38908 - DNA, 931 bp, Macaca Mulatta
  misc_feature (1)...(931): n = A,T,C or G
ggnnnnnnnnnnnnnnnnnnnnnnnataaatcacaataaataaataggtcaatacaaatgttagctgggactacaggcgcccaccacctcgcccggctagnnnnnnnnnnnnnnnnnnnnnnnnnnnnnnnnnnnnnnnattagnnnnnnnnnnnnnnnnnnnnnnnnnnnnnnnnnnnnnngtnnnnnnnnnnnnnnnnnnnnnnnnnnnnnnnnnnnnnnnnnnnnnnnggcctagtcttgaacttctgnnnnnnnnnnnnntnnnnnnnnnnnnnnnnnnnnnnnnnnnnnnnnnncggnnnnnnnnnnnnnnnnnnattatggaaacaaatctccctcacccagtctggaatgacatgtgtgccactctggccttaaagaaaacctccccgcttctggggctaaaaacaaattttcacggccttagctaactcgcaaataactcgggctcaataaggctccccggatacaccacccggtcaaaaatcataacttttcaacccaataaaacaccctccagcagaacctcggataatcaccaaatccccccaaacttcctcatccacattccggccttacaccttgctcacgccaatccttttaatattcccaccgactcgtcaatataccctaataatcttttcacacctccctattcccccacacaccccaccctatatcgcactcattattacgacccccgtaccggcttctaactttatagcgattccagaagtagcaataatacgcgataatcagtcaaccatcacctaatcattgcaaaactgtcgtccttgttcagcaagcttatccttttctcatgagatagctaaggacctccgatggtggactgataacggcttatgcttcaccacccggcgatatccgccgattcatacgaaaacaaaacaccagctctcctacaagc

SEQ ID NO: 38909 - DNA, 732 bp, Macaca Mulatta
  misc_feature (1)...(732): n = A,T,C or G
ggtatgtaagtatttatataagactaatgtaatttaaagttctgtattattgtgattaattatatagaaattcaggaactgatcagaagtgagattcttttccacatctgattaatgtagtgagttgacaccctgtgggtggtaaagcattataaacatttcatcatgaaccatgatttatacacatctgtgttgtaagggaggcttgagtacatctaccaataaagagatattcagcatttgtgtatttgataaggaattaaatgtcctagtaattataaagtaaaaccacagaccaatttgaaaatgatcttcaatgttgagcacttgctttaacattaaaattccttttctttttaaggctaagggtgtgtacatatggcattgatgtctatgttgagattaacttatgtattgaaaaaaatttgaagtttattttttcaatgaataaggctgtcaaatgatttagtatagattaatgatgtcttttttagaaatattaaagtgagtattcctcattatgtcatcatttctgataattagagtgctaattttgatgttaggataatgttttcccatctataacctatttcctttctagggggcccatcctgaacatggggggcttgggggggtgaactttttggggcccaaggtaagtggcccgggggttaggggnnnnnnnnnnnnnnnnnnnnnttnnnnnnnnnnnnnnnnccatttttccccaac

SEQ ID NO: 38910 - DNA, 754 bp, Macaca Mulatta
  misc_feature (1)...(754): n = A,T,C or G
gggaatccatgatgggccttttgcaagtagcgttagctctttttaaatgttgaactgagctaaggatgcactttcttgtgggcatagaaggggcccacgtgaggccctgagtaggctccttagttgctgctttacctaatgagggccaaagagattaactctgcctcattgccatgtttcagaaaagttgccatatttcacccagaaggggctcgttttcctcttactcttactttaaccatgtgcctggaggagccgttctgggctcttgcacttgcccaacctttctttgccaggggcagagaagggaaagggggtagattgagtgtgccaagggccgtgcaagggcaggcttgctttccacccatctgctgagggaaccctcacctcttgctccttgcctctgttcacgcctgttgtcttggaaaaggatggtccctttgtcttaaggctttgtgataaaggcatctccaggtaggatcggcacctgtttccttcatcatagtgcctggcagcctttctgaagttacaggtggttgggagccctctcacgtgcagaacatctggtagattgacctgcccggctgggtggttctactgctttctcaatttctnnnnnnnnnnnnnnnnnnnnnnnnnnnnnaaagagttctgcagaaattatttgaacatatttgtaagtaccatggtttccctggtggggaaagcctccggtcccccgttcccggttttaaaaccaaaggcctggtttggg

SEQ ID NO: 38911 - DNA, 610 bp, Macaca Mulatta
gaccattttgtactatgtgaatttgaaagcagagatatgtacaagaatgaagatgacaggcagagaaaattagagataagaaataaacagaggatttcttgtataacagggtactatccttagatcaatccttttacataacttctttggcttctgtgagttagccctttgttatgataacaaattttatctttctgatgaatctaactcaggcacatgtgttccccatgaagacatgctctcatgatggctctgatttatttaacatacagatgaagatcatgagtgtggatttcagaaatgcagtcagtggactcaattactgcttgttgagtccatgagcagatatgactaacaaaggtctgtgcacatggggattgaagggtattttttgtttttgggtagaagttggtgaagaaattaaatgaaagtataccatagtccatggccaagaatttcagataataaagtgtttatatgagatgtttgggatttaacatgggaagtatgtatatgggctgtatgagctctgatttgtttaaattgtgtttattattaatatttgtgggcatatagtaagtgtatatatttatgaggacatgagatgttt

SEQ ID NO: 38912 - DNA, 776 bp, Macaca Mulatta
ggggcccctcgtctcctccaagatggcgagtagcggcagtgggggggtgtcagtgcctgcgctgtggagtgaagtgaaccggtatggccagaacggcgacttcacgcgcgctctcaagaccgtcaataagatactacagatcaacaaagatgacgtaactgccctgcattgtaaagtggtatgccttatccagaatggaagtttcaaggaagctttgaatgtcatcaatactcacaccaaagtgttagccaataactctctctcctttgaaaaggcatattgcgagtacaggctgaacagaattgagaatgccttgaagacaatagaaagtgctaaccagcagacagacaaactgaaggagctttatggacaagtgttataccgtttggaacgctatgatgaatgcttagcggtatatagagatcttgtccgaaactctcaagataattatgatgaggagaggaaaacaaacctttcagcagttgttgcagctcaaagcaattgggaaaaagtggttccagagaacttgggcctccaagaaggcacacatgagctgtgctacaacactgcttgtgcactaataggccaaggcaagctgaaccaggcccatgaaaatcctgcaaaaggctgaagatctttgtcgccgttcctttatcagaagacacctgatgggactgagggagaccccacaggcagaactggccatcattcatggtcagatggcctatattctgcagcttcagggtcgaacagaggaggcttttgccacttttaca

SEQ ID NO: 38913 - DNA, 774 bp, Macaca Mulatta
  misc_feature (1)...(774): n = A,T,C or G
ggggggaaagcatggatacttctgtgcctccacatatccactttaatttgtaacctctaaggaagggaatgagttacagaaaacactttcatgatgaattctaaaggttctcttagaaacagacatgcagtgagcttcttaaaagcaagcctttttaacgtggtctacataccacattgcccactcaagtttggaaatttttagcttgaggctctaggaagacccagcagtagatgttgctggatatgaatatcgatggcttggacgctgccaggtgactctaacgtgtggccagggtgggaagcactgctcacagcggtgccaaaaccaggttcctccctgtgttctcacatttcacagcctcagtgtaaaaagtaagatatgggcactctggaatactataaaaatatagaaaagcgtggtatagtaaataaaaggctcacagaattttgtcatctagaaacaatgattattaatgtattagtatgtattagtatgtgtttttactcattaacagtatatcctgagatatttcctataccatttaatattttaaaagatgtttacactggccacagtagctcatacctataatcctaacactttggagggcaagggcagaggatcacttgaagcctaaaaattagccaggtgtagtggcacatnnnnnnnnnnnnnnnnnnnnnnnnagctgaggctggaaagatcacttgaagcccaggagttcaagggctgcaattgaagctgttaaatggcaaccacctggcacttcct

SEQ ID NO: 38914 - DNA, 490 bp, Macaca Mulatta
ctttctcatcaagtggttttatagttacgtctgaatttatggttcatgtcaaagtatctttgacttactatccttttcaaaatatgtaagctgatgtatttttattgctcagttggtgatagctgagaaaactttttcaatatgtagaattttcatggttatattgtatgaattatttttctgggtaagccatctgccacagaaattgacactatggtgagattaatgttactgaaataagccgtagagaagctactggattgctttaaaacattctttgattaaattactctatagttggtaagttcatagagccatgtagttttcttttaagttacttaattgaagctctcagaagttgcaaagaatgtatctgataaatctggctttgcacaagtgtgatgctgatgcctggacggctttgctgaatgggctttgatatttgtgcctagtggaaggtatggagcttaaccatttaagatctcttcct

SEQ ID NO: 38915 - DNA, 110 bp, Macaca Mulatta
aggaagatgcaatcacacccagcgataagacccttttccctgatgttgattggttaatcggtaaccattctgatgaactcacaccatggatacctgtcattgcagccagg

SEQ ID NO: 38916 - DNA, 804 bp, Macaca Mulatta
ggaacatatcttttcatagtaccacagatttttgctgcatcctgtaaatgacacatgttaccactttttggtggatgagctccaggactaacagagcctgcggtttgtggtgttcctggtgtgagaaagaggttgccctttctccagcgctctgtgctcccattcccccacattgactaatccaactactcagtatttcaaggatttctttcaaggagaggacaaaacttggctccacattgcataattccaacattcttgagagagaaggagagcacacatattgatatattcctaggatagaaaaaaatgggcaatgttttgagcaagttagtctatgatgagggagagattagaaagctggaaaaatgttgtgaaggttgtttcattttaataaatgctggagtttgcttataaggtataacaacaagctaatataagattttaattaagatagcagaggttatatagccaatggtgttgggctcagacatcattcaggtattttatccacccatgggcaaaacattgttgggatgaaataaaccataaattaatggaaaacaaaacaattgaaacccctgaattgaaatttgttgttggaaatgccttttcaagttagtttgtggaatttgcaaaaaaaacccagtattttattagtggaccgaatttaatccccaagggactggtgggtaaaaagcctggatcactttatccctggccgtatacacttttaaggggccggtgttttctcccggaagcacagtgtttttcccccccggtggttgaacattgtggaacttg

SEQ ID NO: 38917 - DNA, 128 bp, Macaca Mulatta
ttcttatgggaaggcagtgggcttccaattccattctccacacctagcttagcttttcttttcaacagagtccacttctaacagactaaaaatgtcagacattgcctttctctgtaatctgatctaag

SEQ ID NO: 38918 - DNA, 738 bp, Macaca Mulatta
  misc_feature (1)...(738): n = A,T,C or G
tttcaaccgtgttaggccaggaggtcctcgatctcctggacttcgtgatccaccngtnttgggnnnnnnnnnnnnnnnnnnnnnnnnnnnnnnnnncaccgcgccccggctacagttctgtgttttgacaaacacatacagttgtgtcaccaccaccataattaagaacacttccatcaccttcaaaagttccctcatgctcttttgtagttatctcctccctattcccctatcccaacctccttgcaacaactgatcttttgtcagtctctttaattttgcctatttccaaatgtcagatacattggatcattttgtatatagccttttgaatcaggatcctttcacatagcataatacattgacttgtgtatcagttcatttttttattgctgagtagtatttgataatttgaatataccatggtttgtttatccattgacccattgaaggatattttggttgtttctgtgttgtggccattatgaataaaactattataaatattcccatacagtttttctgtgtgtgtgaacatgttttttcagtaaaagttttgacaggtaatatttctacttactaccaaaaaggggcatgggaaataaaatatgtaattccaaaaacattatttcaagcagcttcagtatcaagagtatctacagtaggcaagagtttttcaaggacagagagaatatttgatgaaatttgtaagttattccatgggaaaaggataattcc

SEQ ID NO: 38919 - DNA, 383 bp, Macaca Mulatta
  misc_feature (1)...(383): n = A,T,C or G
gatttaccaacagcatgaatcaagaaaagttagccaaacttcaggctcaggtccggatagggggcaaggnnnnnnnnnnnnnnnnnnnnnnnnnnnnnnnnnnnnnnnnnnnnnnnnnnnnnnnnnnnnnnnnnnnnnnnnnnnnnnnnnnnnnnnnnnnnnnnnnnnnnnnnnnnnnnnnnnnnnnnnnnnnnnnnnnnnnnnnnnnnnnnnnnnnnnnnaacaatcccaaagtccaagcttccctttctgctaacacctttgcaattactggtcatgcagaagccaaaccaatcacagaaatgcttcctggaatattaagtcagcttggtgctgacagtttaacaagccttaggaagttagctgaacagttcccacggcaa

SEQ ID NO: 38920 - DNA, 770 bp, Macaca Mulatta
  misc_feature (1)...(770): n = A,T,C or G
tttctaaaagaacaaggggggttataggaccccaaggcaaaagacagtcaagcaacatacantgaatcacgtttccataatcatattgttagaccacccagggagtagccttgaaatcacagccttgctgccatgatgtacaataccaggacagaggtgccaggagaagggcccacggtggccaaggaaagcttttgtgagaagactacttcagggtgttccccatcagaggagcacacccctgatcttgtattcctcgtcaatccagggttcgtgtgaaatggtcaggtggggcattttttcttccacagacatcagcatcttctgagtttcttcatcaaagccagatttgtgcagccccagcatctgcagggcacagtccgggtggctcagtgcctcacacagcaccgccactgcatcaggttccaaggtaatccagtcgaggttcaggctcctcagtgttttgcaggcaacgagtgccgcggcgaggtcaccacagcaggcacgggtgatcggacatgtttgcagaccaagttgctctaatttacagttaggatgcttcaaagctgcacataactgtctgacaccagcatctcctatttcattatgcccaagtttcagggtctttagtttttcattgcaaataagaacagcagcaatgtccttacaggaatcggaagtaaggaaacaacccatcaaccacagctcctgtatgctgcaggccgggtgcttcagcgctccacacagagacgccactccattatcttccc

SEQ ID NO: 38921 - DNA, 1209 bp, Macaca Mulatta
  misc_feature (1)...(1209): n = A,T,C or G
atcgcnnnnnnnnnnnnnnnnnnnnnnnnnnnnnnnnnnnnnnnnnnnnnnnnnnnnnnnnnnnnnnnnnnnnnnnnnnnnnnnnnnnnnnnnnnnnnnnnnnnnnnnnnnnnnnnnnnnnnnnnnnnnnnnnnnnnnnnnnnnnnnnnnnnnnnnnnnnnnnnnnnnnnnnnnnnnnnnnnnnnnnnnnnnnnnnnnnnnnnnnnnnnnnnnnnnnnnnnnnnnnnnnnnnnnnnnnnnnnnnnnnnnnnnnnnnnnnnnnnnnnnnnnnnnnnnnnnnnnnnnnnnnnnnnnnnnnnnnnnnnnnnnnnnnnnnnnnnnnnnnnnnnnnnnnnnnnnnnnnnnnnnnnnnnnnnnnnnnnnnnnnnnnnnnnnnnnnnnnnnnnnnnnnnnnnnnnnnnnnnnnnnnnnnnnnnnnnnnnnnnnnnnnnnnnnnnnnnnnnnnnnnnnnnnnnnnnnnnnnnnnnnnnnnnnnnnnnnnnnnnnnnnnnnnnnnnnnnnnnnnnnnnnnnnnnnnnnnnnnnnnnnnnnnnnnnnnnnnnnnnnnnnnnnnnnnnnnnnnnnnnnnnnnnnnnnnnnnnnnnnnnnnnnnnnnnnnnnnnnnnnnnnnnnnnnnnnnnnnnnnnnnnnnnnnnnnnnnnnnnnnnaaattatcctactaaatggtgcacccaagcaaacggctcaacgaaacgtacctattactaatcataactaaccggtcttacccaacacatatataagcacacttaacaaccaggccttaaaataatatagccacaagacgcagagtagacgtgacacaagttcgacacggcatactacgaaccccgttgaaagtaacagcagcacagggaacacaacacaggagaatactttgagagcgcttgtgtgttcttcctctttctttttgttgtccttttgtgcttgtatagacagaaagaaannnnnnnnnnnnnnnnnnnnagacaacggaggggacgaacgaggaggaagagagcaaagaagggaaggaagagaaaaaacagcaccaagcacagcaacagaaagaacgagggagcgcactacaagaaccaacagagaaagtgactcgaaacggaaaagcgagaataagaaaagaaagaagaccgaacagaactgagggaagaaaagacagagagagcacaaggagcacgacaacaaccagagcgaacagctacaacaacgaca

SEQ ID NO: 38922 - DNA, 799 bp, Macaca Mulatta
  misc_feature (1)...(799): n = A,T,C or G
taagagttaagcctttttgggttaaatttaatttcttcgttctatacgtggcccaatggtgaaaataaaacagagtacctttaagaaccacttaaaattctcaaaaaaaggtaccttttgtgggaaggatttttttatagggattattaactgtaagcaaatggttaccaactgacattttttgttgtcatgggttactaccaaacaggaacagttttaaattggtttatttgtatggtttgggtaatctgtggctgcataattaagcactccaaaacatagtggctaaaacaattgtgtatctgctcttgattctaaaatttgtgtatggctttatggagacttctccacatgtgatctgttggctataatgtccacggtggcttcttaactcataaatctagtgccttagctgggatggctggagcagttggtagatagctgggcatttccctcttgcttcctccctgtgttgcctctgcacttgaagaacgttggcnnnnnnnnnnnnnnnnnnnnnnnnnnnnnnnnnnnnnntgcccnnnnnnnnnnnnnnnnnnnnnnnnnnagnnnnnnnnnnnnnnnnnnnnnnnnnnntccgggttcaagcgtttctcctgtgtcagcctcccaaatagctggcattacaggtgtgtnnnnnnnnnnnnnnnnnnnnnnnnnngtttttnnnnnnnnnnnnnnnnnnnnnnnnnnnnnnactgannnnnnnnnnnnnnnnnngtgatttgccatctcagcctcccaaagtgttgtnnnnnnnnnnnnnnnnnnntgcgcc

SEQ ID NO: 38923 - DNA, 687 bp, Macaca Mulatta
  misc_feature (1)...(687): n = A,T,C or G
aaccatgtaagcagcttcgcttcttgccgcaaccgtccgcggcctgaggagcccactgccgggctctggggccgacttnnnnnnnnnnnnnnnnnnnnnnnnnnnnnnnnnnnnnnnnnnnnnnnnnnnnnnnnnnnnnnnnnnnnnnnnnnnnnnnnnnnnnnnnnnnnnnnnnnnnnnnnnnnnnnnnnnnnnnnnnnnnnnnnnnnnnnnnnnnnnnnnnnnnnnnnnnnnnnnnnnnnnnnnnnnnnnnnnnnnnnnnnnnnnnnnnnnnnnnnnnnnnnnnnnnnnnnnnnnnnnnnnnnnnnnnnnnnnnnnnnnnnnnnnnnnnnnnnnnnnnnnnnnnnnnnnnnnnnnnnnnnnnnnnnnnnnnnnnnnnnnnnnnnnnnnnnnnnnnnnnnnnnnnnnnnnnnnnnnnnnnnnnnnnnnnnnnnnnnnnnnnnnnnnnnnnnnnnnnnnnnnnnnnnnnnnnnnnnaggagacctccgagcttgcacatattgtagaaaaatagccttaagttatgctcattccacagacagtaattctattgggggaagacttgaatgctctttcagattctgcttgctctgtgtctgtacttgatccaagtgaaccccgaacacctgttgggagtaggaaagccagccgtaacatatttttagaggatgatttggcctggcaaag

SEQ ID NO: 38924 - DNA, 768 bp, Macaca Mulatta
  misc_feature (1)...(768): n = A,T,C or G
gggggtttcgccgtgttggnnnnnnnnnnnnnnnnnnnnnnnnnnnnnnnnnnnnnngtctcggcctcccaggnnnnnnnnnnnnnnnnnnnnnnnnnnnnnnnnnggccaaggccagcaatatttcttaaggctcctggggtcattccagtatgcagccaaggttgaaaaccaccctttaaaagagctcggcaaccagtgtggaagaccagcactcacacgtctgtagaccttacccagagccaggctgcccctgatcatctctgatactttaaaacgaagggctcagaagcagcccccgaagcaaaattttctctctgaccttctcctgccctcttgtttctggcctctcattctcccccaaggctacccatagaaactagaatccctcttccccaaggcaggtcatcagaaaccagaactggttttacccaaagccagtcataaaacctaaaaacggtcctctcactccccactcccctttctgtgtaaaaactggtcagaaagaaatgatctgacctaccttgtttgactgtcatacccattccagagagggtcccatcccacgtccagaaagaaagaatgctgcgcagagaggccaagaagaatccagacaggcccttgctggggtttcccctctcagtctgttactattagatcctaccccttcttggtccaatcgtattttctacaacagtcccataatctctttggaccntaancattagaaaatggaaccattttccccttgttaatctttggggggtc

SEQ ID NO: 38925 - DNA, 1241 bp, Macaca Mulatta
  misc_feature (1)...(1241): n = A,T,C or G
ggggcggggaaagaggctgtgtccaccatggcctggactcctctcctcctcctgctcctctctcactgcacaggttccctctcgcagcctgtgctgactcagccaacctccctctcagcatctcctggagcatcaaccagactcacctgcaccttgcgcagtggcatcagtgttggtagttacaggatattnnnnnnnnnnnnnnannnnnnnnnnnnnccccggtatcttctgaactaccacacagactcagataagcaccagggatctggagtcccccgccgcttctctggatccaaagatgcttccgcccatgcaaggattttactcatctctgggctcccgtctgaggatgaggctgactatttctgtatcgatttggcacaacaaatgcttacatccttcctgtgccttggaaccccgcctcaagcgttctaaaaaggtcaagcccccaaagggttttcccccccaacggggtcaccttcctggtttcacccgcaactcatcaccttctgggaaaaaggaagccgttctctccaatccctaacaacctacaagagggcgtcaaccaatcctctaaaacggtggatgaggtattacacagagagatttcccaaagaagacnnnnnnnnnnnnnnnnnnnatttgtgaaacacaccacacccgggaggtgttaataaaaaatttttctcaccgcatttgggtgtgcggaataaactaaccaaggttttttgggtgcggggggctcgataaaacaagcgggagtgcttaaaaattatagagaggtgggacccccttcgcttaataaaaagtggtggggttganaattataaaaaccgtttccctttttgttgattcctcnnnnnnnnnnnnnnnnnnaccaccttgcggtgtaataaccattcctcgatgtttaacataaacaatccaaaatccgcttctagttatgngcttacacgcgctcttaccttaggtttaaaactcgtcccgggaagctcntcaatattcccccgntcagaatttggttctttttttgcgctcatatatcccacttgaagacctcaacgcctatattcccttttaacaaaaaacataatacggaaataattttccagaaaattacactcattacataataaacaatttacactccccccctattacacatttcagcaaaagagccacgatgcgtaaagtttcatcgacatccataagataaaaaggtagaagcactatttatt

SEQ ID NO: 38926 - DNA, 763 bp, Macaca Mulatta
gggctccatccaccgcgtaattgagttccctacaaaagagttcgctgctggtttccgagttgaatttgtgatgaagaaagagggtcaaagcagttcccaggcaatcttgtggtggtggtggagatggcagctgcagttactggaaccagtaagaatgaaaactctgagggaagagtcttctctgatctatacagcttgcagtttcaagaggcacagggcttctgagagacgctgattttactcccgtggatagtgagaactgcaaaaactgtcaccgggaacgactccatccaaatccctgcactaaaagacttgatcaatgacttctagctgcctaaggccatattcctgggaagaccaaagtcccacctgagttcccatctggaaaagcttaagaatgccaaaagaatttactgatgttacaacaaacacctgagataggtccttgacctctgtttcttagagtatttgttaaggaaaaaaaagcttacaaatctaaatatttcctttgtccctttgagatgcatatgtatttcccacaatccttgcagtgtctttctcaaagacctgagacttttacaatgtaatcatgtaatttttagaaaggatagggtcccagtctctcactgtctttagggagcctaacttcgataaatgccagttagcaggcactggcaacctaatccatttttcattgacccaccatcctaacccactttttgtaattttttcacttctctggactctgcttctactaccaatg

SEQ ID NO: 38927 - DNA, 636 bp, Macaca Mulatta
  misc_feature (1)...(636): n = A,T,C or G
tattattcctaggggccgcggccaatgaaggtttgaaagatttggagggcggagcggccgacagnnnnnnnnnnnnnnnnnnnnnnnnnnnnnnnnnnncaagttagatgtttactttatcaggtaaaatttggaggtggccaactcaagattcccaagttaggttcagcgtgtcctcagggaccaaggctcctgctcccctgaggctctgctgttgatggccttgatcacatcatggcactggctggcaccctctagctcaagctgtcatgtctgcatttcagcagtggagagaaggctgagagttccaggaagccgcacattccgcttttgcttatatcctattgcccacgatttagtcacaaggacacctagcttcaacagtctggagaatgtagtcataactccagaaggccacatgctcagctaaaaatgagggtctattactgtaaacgaagccactgtttgatcccagaaaactcccagttaaatcacaaatctgctgtttttctgcagtctgcgaagaggatgtatcaccgcggcgtggacctccagcagctgctggacacgtccttcgagcagctaacacagctgaacagtgcgcgccagcggctgcggctgaaaccaggactcccc

SEQ ID NO: 38928 - DNA, 700 bp, Macaca Mulatta
  misc_feature (1)...(700): n = A,T,C or G
ttagattttttcacaccctcataaaaatatttgtctatttatatttttcacataaagatatatgtattaatgtatgtatttatatattacaagactttaaaaaaaataactgcccatgtcagagctatatcccattctactgaaatgctgcctagtattgaaagggtgaaggaatgtgtcataaattattgaaagtaaatgagcatttggttgtctccatttttcgtaattgcaaataatactgaaacaaacatctctgcacattggcccctacacatgtgtgtgaatatttctgagggtagaaatgaagccagtgtacatggcgtgctctgataagtactgccaaattcttctccagaaaagtcatgctatttcattccattaccaactgggcatgaaactggtgtgtttccatattcttgtcagtgcaggatattatttattaaaataaaatttaaattcctccagcctggtcaacaaagcaagactctgnnnnnnnnnnnnnnnnnnnnnnnnnnnnnnnnnnnnnnnnnnnnnnnnnnnnnnnnnnnnnnnnnnnnnnnnnnnnnnnnnnnnnnnnnnnnnnnnnnnnnnnnnnnnnnnnnnnnnnnnnnnnnnnnnnnnnnnnnnnnnnnnnnnnnnnnnnnnnnnnnnnnnnnnnnnnnnnnnnnnnnnnnnnnnnnnnnnnnnnnnnnnnnnn

SEQ ID NO: 38929 - DNA, 786 bp, Macaca Mulatta
  misc_feature (1)...(786): n = A,T,C or G
ggtactttcttgtgaatgtaatttgggattttttcaaccagattaatataaaatggttagcttttcaaaatatgtattatttgattcaaggcccttttggtatttgcattgattttaatgttttaacaaaaaaaaactttcttaaactggtttagttgttcactatgggttcttcaatatttctatatcctagttgttaaaatgttattttgagtttgtctctagcttggttggaaaaagtcttgagtttttttttgttttagtaaagatttgtgggtagtgttatgctattgcttgtttgaaatgtcttattcttacaaatttatgacaatttgacataaaattttaagtgataacatttttctcaaaattgtgtagatagtgtgccattgctttttgacattaaacgtcattgaactgtgaaaggggcatttttattttcttgcgagtgactgtgattttcttagatatgtgttagggttttttttcccccattttcttacaaatatatgtctagaatgatactgttttcattaatgtctgatacccagtgaannnnnnnnnnnnnnnnnnnnnnnnngaagacggnnnnnnnnnnnnnnnnnnctntnntntnnttnnnnnnnnnnnnnnnnnnnnnnnnnnnnnnntgttntnnttggttgtagttttttgagtgtatttttgggggagtggttagataaattgataaaagtgaattgtattaatgaagagtaagaattaaagattagataagggagggtatattaaatatagatggaagag

SEQ ID NO: 38930 - DNA, 614 bp, Macaca Mulatta
  misc_feature (1)...(614): n = A,T,C or G
gggggaaaagacctcaggtcacaggagatccaggaattggtcacaccaaacaggtaataatggaggaagcctgagtgtcatggatgatttctacatgtaaacccagctccttaaatttagttttaaagaggacatccttaaaaaattgaagagatttttgtcaaataaaatgaagggaagatatagaattacattataaaatactctagttcaagaaaataaaatttagcagcttcgagtattacatcatctctaatacagaaaatgtttcttgttgtattctcagggtagatttacaaatctgaaatttacacgtaaagtgtttgcagttaatggagaggcaacaacaactttatttaggcacataaatctgaaatcatatgatgggcccacgctgtcgtggaaaaagaaagtccctaagttgtggtaaaattattccattaaaaagcccccgccccaccctctaaaaacccataaatttcgccccgaacccaaaaaattgggggacctacacccctttaattacccgccccaatctcctaaaaaaccttnnnnnnnnnnnnnnnnnnnnnnnnntgcgccaactgtgtttttcaaagtttccccccggtgga

SEQ ID NO: 38931 - DNA, 1186 bp, Macaca Mulatta
  misc_feature (1)...(1186): n = A,T,C or G
attcatggagtagattgtagaaagtaggtgaatcagattataagcttcaagctaacacgaggcttcagaattaggtaaacatctgaaagtttagtatattagaaacacccaaaccagtaatatgctaacaacctgatgcactgctgaaagaaaatgtgaattttttgtaataattgcattttagtgaattgtacagtgggtggaaagggcatttggagctcattagaatgagacatagtacatcccaatggccctgtttattaaatatagtggattaagtgtcaacaaatacaccaaaaccattttttatagaaacagtatttaatggtcactcaatagctttcaaaatacatttttgtattacagcactgcacaagctattctaatagtgatctggcctcatcattcctgcaaagcttgctttggggagttggataatgtgaaaattttaagtacctaggggagaaagagccatgtacatatctgtaataaacttgtagcatatgtaaagttttattggcctttatcttacaaaaatggaatattttagtatgaatttgctgaatgtaagaccgtggactgttttttatagtatggcctaattttaaaggtccaaaataatttgtttttaaagtttgcccttgtgctaaagtgccagtgtacgtatgttatacttgattgtaaactacatttcaaagtaaatccgagtgtagtaagttttataactaaaaaggtttaagctgctaaaactatttttaagagatgtgaaatgcagtatgggannnnnnnnnnnnnnnnnnnntctaagcccaaagattaactggagtccctccaaccttacagatttttgggtttcacaatcttataaactaggatacaggtagttttgagtatggtgccaatgatgtttggtttttgtttggtcaagggtaggtgcaacccaacggaccatttatgcaaaagatgtaaactcttgcataatacattgataacatgttttgccaaccttaagagtaaatgcttaacataagcgaaacccagtagaaggtatgtggggtcagtttaaaaaattttgattgttaatgcccctatttttgtaatttgggcacctctttntgatgccctaaccagggtaagcaaaatgcctaaacctgtattttctcccaaataaaatccagaatggaac

SEQ ID NO: 38932 - DNA, 683 bp, Macaca Mulatta
  misc_feature (1)...(683): n = A,T,C or G
tggatctgtgtaggagttccctgtagataaattactgatcccccatctactatccccagtatgtaatggctgaattaatatgtaatcaactgcattgtatctaaagccttagaactagtcaggtgctccctccagccaataccatttcttaccctctaatcctacctgatctttaacaaagcattaataattctaaggataatctctattttgttgtgcttttatgtaactgttttaaataaatcaatttgtactgnnnnnnnnnnnnnnnnnnnnnnnnnnnnnnnnnnnnnnnnnnnnnnnnnnnnnnnnnnnnnnnnnnnnnnnnnnnnnnnnnnnnnnnnnnnnnnnnnnnnnnnnnnnnnnnnnnnnnnnnnnnnnnnnnnnnnnnnnnnnnnnnnnnnnnnnnnnnnnnnnnnnnnnnnnnnnnnnnnnnnnnnnnnnnnnnnnnnnnnnnnnnnnnnnnnnnnnnnnnnnnnnnnnnnnnnnnnnnnnnnnnnnnnnnnnnnnnnnnnnnnnnnnnnnnnnnnnnnnnnnnnnnnnnnnnnnnnnnnnnnnnnnnnnnnnnnnnnnnnnnnnnnnnnnnnnnnnnnnnnnnnnnnnnnnnnnnnnnnnnnnnnnnnnnnnnnnnnnnnnnnnnnnnnnnnnnnnnnnnnnnnnnnnnnnnnnnnnnnnnnnnnnnn

SEQ ID NO: 38933 - DNA, 664 bp, Macaca Mulatta
  misc_feature (1)...(664): n = A,T,C or G
cgaggcataanatgtgaagccgttggagtttgtgctatgcagcagtgttagccaggatctcatcagtgtgcaaacctagcatcttctgtggccacaagccacacacttgctttttttgaatgtgatgtaaaatttgtacagtaaagtttttatattttctatcaactgcatttgtcttccagacatgctattaatttaaattaaaatggttagtattnnnnnnnnnnnnnnnnnnnnnnnnnnnnnnnnnnnnnnnnnnnnnnnnnnnnnnnnnnnnnnnnnnnnnnnnnnnnnnnnnnnnnnnnnnnnnnnnnnnnnnnnnnnnnnnnnnnnnnnnnnnnnnnnnnnnnnnnnnnnnnnnnnnnnnnnnnnnnnnnnnnnnnnnnnnnnnnnnnnnnnnnnnnnnnnnnnnnnnnnnnnnnnnnnnnnnnnnnnnnnnnnnnnnnnnnnnnnnnnnnnnnnnnnnnnnnnnnnnnnnnnnnnnnnnnnnnnnnnnnnnnnnnnnnnnnnnnnnnnnnnnnnnnnnnnnnnnnnnnnnnnnnnnnnnnnnnnnnnnnnnnnnnnnnnnnnnnnnnnnnnnnnnnnnnnnnnnnnnnnnnnnnnnnnnnnnnnnnnnnnnnnnnnnnnnnnnnnnnnnnnnnnnnnnnnnnnnnnnnnnnnnnnn

SEQ ID NO: 38934 - DNA, 367 bp, Macaca Mulatta
taatgccattacctaaagggagggtattatgcactcaccaggggccaggcactgagctaggttagtagttacaaaattataaatatttatacttaaccaacttgtcaataatggtttcaaaagattctagttaaactctatcatccagaacagagttcttaagatgccacccgcagagaagacgccacaacacaaatgctggaggccaggcaggggactgtgagtacccatggggtagggacagcaggtgggcacattcacgggcaatgccaagttaaaaagcacccaccctgtgaggttccaaagaactctcgttccaggctagtcctgctgccacacagaaaggctcactgggagattcaatttt

SEQ ID NO: 38935 - DNA, 711 bp, Macaca Mulatta
tggccttaggttggccccactgcctcagggtgctggcagctactgcaatccttatagaagatgccaacaagctagtcctaggtcagaagataatagtccgggtgccacacgctgtattcaccttaatggagcaaagaggacatcgttggctgtccaactctagaatgctaaagtatcaagggcttctgtgtgaaaatccccagataacactggagtctgtgaataccttgaacccagctaccctactacctgtggaggagcccagttggaaggatggtgggttgccttactgctggcaggaccttccccactgttgcataaatacggtgaatgaagtgttctccagccgggaagatctcagagatacccccttggagagcccagatgttgactacttcactgatggtagcagtttcataacagatgaggtgcaatatgcagggtatgcagtagtgacccagtactcagtggtcgaggctcaagccttatcttctgggacttctgctcagaaggctgaattaatagcattaaccagagcactgttattggccaaggggaagaaagtaaacatatatactgattcaagatatgcttttgcaaccctgcgtgcccatggggcaatgtacaaagagagaggactattgactactgaaggaaaagaaatgcaaaataaagaggaaattttacaattattagaagccatatgggctc

SEQ ID NO: 38936 - DNA, 672 bp, Macaca Mulatta
  misc_feature (1)...(672): n = A,T,C or G
ggggggggccacgtccccgctgccccagccaggcgtttccttgcctcacctggtcgttcctctagggcgggaaggcgaggcgcccacagggatgtcgctaacgagtccgcggggcgacgccgagagtggcttgaggggtccccgcaggagcccccggcgcgcgcctctttcagcgctttccacctcagttctggcccagggcctcgggtgggtagagggcgagaaatcctttgcctcaagcatcccctaaatgggtcggaaagatcaaagagaaacgtttctaacctggcgccatcgcgtcagcccctttttaagagcgcgcgttttccgcggggtgggagctgctgtctgaccacaagtttctggtggccctagattcttcggcgccttaaacctggggttcggaagctgtagcccccctttcaaaatccgccggaagcgcctgacccccagaagtcacgctctgccttgacctgcccgggagcanggccgcgcggagtttcgcgggacttcctctgtggaggttaagcacgatttgtcaaacgccttaaaactgcaaggcgacatgccgtcaggtgggtcccaaaacaaccgtgagggaggctctgtatcttgctaatggaggccagtcgcaggagatgaaaaaagagcacccgggacccctcaagtccg

SEQ ID NO: 38937 - DNA, 620 bp, Macaca Mulatta
acaggctttttatttctcaggaacggccgagatgacctccagaggtttccaacgaagccgaagccgtaacaatccaccctgcagctctgtgacagggaggagggcgaatccaatccatcatcttacaccagacttcagccctgcgggagctgctgccgccaaagaaagccgggacctgggcagactgcatccctcccccgtgtggagaacgtgacagatgtgaaggttgggctgacagacacacggcctgcagcagcccagccagtcccacacagcatccagccaagtcatttaaaaaggattcaggccactgcctttttctcagggaggagcagccagcatgtgccccgcagctcactgggcctgtctaatcacacagcagtggcaaaaggagtacctgccagatgcttcctatcactctattctgtctccacgtccacctgaagttcaccccgtttccccaatgacttagaatggctttgtgcttagttttaattgtagtttgtgctattctgtgaattaacaattcaaacaaaataagaaagacacattgtgaaacagcagaggagccagagactgtctgcattcccctcctcatcacacacaagtcatgcatctac

SEQ ID NO: 38938 - DNA, 191 bp, Macaca Mulatta
ttattttggatcagagagagggaagggaataactgggctgacatatttgccttttaatccttgcatttttatttagaagtgactatagcttttatcaagctcctaatttaactcacttttttctgcaacatcattttaatgtcacgaaagatcaactgcggtgacacccttttgtaattatccaaaaatac

SEQ ID NO: 38939 - DNA, 1756 bp, Macaca Mulatta
  misc_feature (1)...(1756): n = A,T,C or G
gcggcgctccgccctatttatagcagcggtgccgggcgcgtcgcgtttctccgcaggccccggccgcggcgtcaccgacaacctagcgaaggcgctatggagcggccggctccgctagccgtgctgcccttctcggaccccgcgcacgccctgagcctgctgcgcggcttgagccagctccgcgccgagcgcaagttcctggacgtgaccctggaggcggcgggcgggcgcgacttcccggcgcaccgcgcggtgctggccgccgccagcccctacttccgcgccatgttcgccgggcagctgcgcgagagccgcgccgagcgggtgcgcctgcacggagtgcctcccgacatgctgcagctgctgctggacttcagctacacgggccgcgtggcggtaagcggcgacaacgccgagccgctgctgcgcgccgctgacctgctgcagttcccggccgtgaaggaggcatgcggcgccttcctgcagcagcagctcgacctggccaactgcctggacatgcaggacttcgccgaggccttcagctgctcggggttggcgagcgcggcgcagcgcttcatcctgcgccacgtgggcgagctgggcgccgagcagctggagcggctgccactggcgcgcctgctgcgctannnnnnnnnnnnnnnnnnnnnnnnnnnnnnnnnnnnnnnnnnnnnnnnnnnnnnnnnnnnnnnnnnnnnnnnnnnnnnnnnnnnnnnnnnnnnnnnnnnnnnnnnnnnnnnnnnnnnnnnnnnnnnnnnnnnnnnnnnnnnnnnnnnnnnnnnnnnnnnnnnnnnnnnnnnnnnnnnnnnnnnnnnnnnnnnnnnnnnnnnnnnnnnnnnnnnnnnnnnnnnnnnnnnnnnnnnnnnnnnnnnnnnnnnnnnnnnnnnnnnnnnnnnnnnnnnnnnnnnnnnnnnnnnnnnnnnnnnnnnnnnnnnnnnnnnnnnnnnnnnnnnnnnnnnnnnnnnnnnnnnnnnnnnnnnnnnnnnnnnnnnnnnnnnnnnnnnnnnnnnnnnnnnnnnnnnnnnnnnnnnnnnnnnnnnnnnnnnnnnnnnnnnnnnnnnnnnnnnnnnnnnnnnnnnnnnnnnnnnnnnnnnnnnnnnnnnnnnnnnnnnnnnnnnnnnnnnnnnnnnnnnnnnnnnnnnnnnnnnnnnnnnnnnnnnnnnnnnnnnnnnnnnnnnnnnnnnnnnnnnnnnnnnnnnnnnnnnnnnnnnnnnnnnnnnnnnnnnnnnnnnnnnnnnnnnnnnnnnnnnnnnnnnnnnnnnnnnnnnnnnnnnnnnnnnnnnnnnnnnnnnnnnnnnnnnnnnnnnnnnnnnnnnnnnnnnnnnnnnnnnnnnnnnnnnnnnnnnnnnnnnnnnnnnnnnnnnnnnnnnnnnnnnnnnnnnnnnnnnnnnnnnnnnnnnnnnnnnnnnnnnnnnnnnnnnnnnnnnnnnnnnnnnnnnnnnnnnnnnnnnnnnnnnnnnnnnnnnnnnnnnnnnnnnnnnnnnnnnnnnnnnnnnnnnnnnnnnnnnnnnnnnnnnnnnnnnnnnnnnnnnnnnnnnnnnnnnnnnnnnnnnnnnnnnnnnnnnnnnnnnnnnnnnnnnnnnnnngggggcagcctggccgtccttgggggaaagctgtacgtctctgggggatacgacaatacgtttgaactctcggacgtagtagaggcctatgacccagagactcgcgcatggagcgtggagggcggctcccagaacccaccttctggcatggc

SEQ ID NO: 38940 - DNA, 564 bp, Macaca Mulatta
ccagttaccagagccgcagaacggcgtgttttggtattgttgtcatcagtcaacgattctgacttttcctggtgctgaggatgactgcatatggcagaagcaaagtgctaatctagcacaggtcatcatatccaagttcttttctatgaaggcgggcagggttaggaaccaccccaccccaccccactccccaatcctataagaactgggatctgatgatctgtgctgtcgggagaggcagggttagaacacctcattcctcaatcccattgttgaaaataatagttggattgggagggtttttactcctaaggttgaagccgcgcatttctggagcctgggctgtcagtcatggtggctggggaatgctggggctgcggttgtctggctgccggtagccctgctggtgggtcctccctctttgacaccgttcatttctgaagcttgctttccccggtgttggaagtagcacgcacctggaagaatggccgccttcctacagtgaagtctggcaggagaggagaagatacggagcgtctgacaaggacgtgacgttctgggcac

SEQ ID NO: 38941 - DNA, 543 bp, Macaca Mulatta
acccacctcctctgagcccggcctgacacaaagacttctttctccaaatcatttcagaccaagcaggcgacgtagacaatgtctacactaaagggcataagaacagtggggtgcagtggcttaaaacatgctcaggatcccgccgagctttcgccaggttttcttgctgtatttacagatgccgttctgtgcctttctaagtattttaaatgtcgtgtgctcagccgatgcacttggcttctggaaagtgcgctgagctgagagctcacttctcttcctgctcagcgtgcactgggctgggtgttggggcgtagctgcccacacagacagtgctttgaagagtgagtggtttcggttggccatggggttgtgtctgtcttgttttcaaagttctaaattgccaatatactgtctttccaaaggctcctaaatgtggacagtcaatacagcaggcagttgttggggtgacagtgagaagctgggatgcttaacaagcttctgaggagttcgaactttgaaaaatagatgagagaaagagttctt

SEQ ID NO: 38942 - DNA, 889 bp, Macaca Mulatta
  misc_feature (1)...(889): n = A,T,C or G
ggctgcatatatttttaaatatttaagggaacatttaagagacatattagtcaaaggcaataaatagactatagaacctgattcaaataactcaacataaaaaatatatatttatgagacactggggactgggcacagaggcttacacttgtaatcctagcaccttgggaggccaaggagggtggatagtttgaacnnnnnnnnnnnnnnnnnnnnnnnnntacatggtgaagctctctctctacaaaagtacataaatttagctggcatggtggtgcgcatctgtagtcccagcaacttgaggggctgaagcagaatcacttgagcccaggaggttnnnnnnnnnnnnnnnnnnnnnntnnnnnnnnnnnnnnnnnnnnnnnnnnnaagtgagaccctgtctcagaacacaaaaaaacatacataaacaactttgtcggccgccctcggccccttcgagaagcctttcctagaccatctcgttttggccgcgcggggccccagtagggtacagccgaaccattgtctcaaaccctggtttccctagggaacaatccctgggtccatggacctattggcctccgcgatttcctcaccaatataaaaaaaaagtccccgggcggccaaacccgcagcaccgtccctgtaagaacaaatccaagacatgggaagcttcctttggagcggccattcaccttgggcctccctttccagccacgggcagtttcaacccgccgcaaactgccaaatacccccatatgtaccgtcccccctgtccttttgtccacgtttcccgtccgtaacacccatcggccgtctgttcacccccccgcgttcaagtgcgacttccctcgggcctgacaccccccggcatatagtttcccattcg

SEQ ID NO: 38943 - DNA, 305 bp, Macaca Mulatta
aactggatctatcctcccgacatacatggctataaaatgcttgactaacaacatttggatacagttattgaggaaaaattgtgacaagaatgttgagaggttgtgccaagatgcatatttgagagatgcccaagctgaggccaagaggttactggtcctaaaatattcaaacagatgggtttgggatatttgtatggaagattccagaacatttgctgtaagaattggattaactaaatatggtcacttctccaaacaaaagtatctgggtattccgtatgtcttggcaaaagggcaggaaagaa

SEQ ID NO: 38944 - DNA, 137 bp, Macaca Mulatta
ccaggtgcacctcctggcccagacctacagggcccaggtaaaaaaggatggggcccagctgatgaacatggcactggccctgcatgtcccaccacccacatcgtggagcactgtgactctgtgtctttctgcctctc

SEQ ID NO: 38945 - DNA, 167 bp, Macaca Mulatta
agcagaggtgacaggacacggtatgcgacgtgatcgcggcaaccatgcggcatgttggttaggaacatggacacctgcttctcctggcaccagtggcaaggacgccctccctgaccagaccctgggcttctccacgccctttttcagctcagcctcaagtctgcatc

SEQ ID NO: 38946 - DNA, 761 bp, Macaca Mulatta
gcaggacagtcacggacccacagttgagctgggcccactgagccctggatccttcttggtgtctcatcatggcaagcaagcaagcgtgagctcttgtgggtctccagaagcctatgaggaccagtggcccaggtgggaacaaggcttggcctcctcttctggggggaacaccagggcaggcctgaggaggcctgtgtccccagcctgtcatcgctgtggctccgcttctcagggcgcctaggaagaaggtgtggcaagagcccgaggtgttgattgcacctggcagggcctgtgggcgtcaatttagatgcatccgtgctcactgcagcattccagggtttgcccttatgctcggctgtgtgagggtgaggatgatgcttggagggcatgcacaatgggtgtgtttcagcctcctcttcctccaggcatcctgacatcgaggcacaggagagaggaatccggtgtctgcttgagaaacagctccccaatggcgactggccgcaggtacgccgccagggacctgagcgcacgaggcccagcaccgacctccagtgtgtgcggctgtttccacgtccccctgctctgtgtcctttttggggtattttggacacttgggaggcgtcagctctgccagtgaatgccagagttggtggcgggtctgtggcaggtggttgggtcctaaagtccagatcttgctgctttttcaagtgatgctctggctgggggaggagctggatgggagaagccagtgggcgggaagc

SEQ ID NO: 38947 - DNA, 703 bp, Macaca Mulatta
ggagttaaattcatgaactaagagaattaaagatggggtagagtaggatcagtacagtggggttacaacagataggaaagtcagcatttgagtgtagagaaaaaaagaggatcatatagatgtcatctataggctttaatacagcttgcttttttttaatccaaaaggaaaagcacttatcctatcagaatgtctaccatgttttatagtaataatttgtgtaaaaaatagaatttttgaatagtttttttgtattttttgtgatgaaaaactcataacataaaatttaccatattaactgtttgtaaagtatacagttcagccatgttaagtatatttacattgttgtgaaacatctccagaactttttcatcttgcaaaactgaaactccatacccattaaacaactcccctttttgtcttctcctcagtggaatagaattttgactccatataaatcaagaaacatctaaattctttagtttgtgtttgcaatatctaagatcatggtaaacattaagttcttaaaatttttgggagggccaatgtaccctctcctctgaattgttagcagttaaattgagtaagtttttaaatatctgttaaattggaaagggtttgttaatttcgttttttgagccaaaaggggaaagggcacatttttaaaatatccgaaatttagataaactttggagtttggaac

SEQ ID NO: 38948 - DNA, 718 bp, Macaca Mulatta
ggggacattggaggggcggtagcgtggaggggtggtagtctggtctctgaccacccagcggagccggtgacagcagcgtcctggtaagcaggcaggcgtatcaggtttcaaaggatgcagcagggaaggggggtagaggtgaggggtcgttgcatctgtcgctgtgtgtatcttttgggggttcagcgccaccagcgatctgggcctcgttcattgcgcttacatttctccacctcatttgaagaacgagcttggtagccgacggagctgaggtatatgagctccctgaaagcacgaagcagttatttccatcttcagatcattcagagattatgaaggcacaaaccctgccttcagtttgcttatagtcaagtggagcagacacaagtcaatgattgcagtatagctacttaagtaatctaaaagagacttatcagcatgttgcaggtgaacatggccttgagatgtttttcttctaaataaatgagaaagatgtttcaacaaaagctccttatgctgaataattgtgatgcttgaagttcctaatctgctttaagtggatttgtctgacatttggtgtaaatgtcagacaattctagacagtttttttcttggtcaaataaaaatttaatttaaacttccttacaggcaccccaaaatatataattttccttggcgggccggccttcggcccctttaaagaaacttttcctaaaac

SEQ ID NO: 38949 - DNA, 829 bp, Macaca Mulatta
  misc_feature (1)...(829): n = A,T,C or G
ggtgatgtaaagctgtgaattttcgttttttttttttgnnnnnnnnnnnnnnnnnnnnnnnnnnnnnnnnnnnnnnnnnnnnnnnnnnnnnnnnnnnnnnnnnnnnnnnnnnnnnnnnnnacctnnnnnnnnnnnnnnnnnnnnnnnnnnnnnnnnnnnnnnntgcctgccaccacgcccagctaattttttatgnnnnnnnnnnnnnnnnnnnnnnnnnnnnnnagnnnnnnnnnnnnnnnnnnnnnnnnnnnnnnnnnnnngcccgcctcaannnnnnnnnnnnnnnnnnnnnnnnnnnnnnnnnnnnnnnnngggccaagctgtgaattttccataaatgccctttgtcatgttgaagaagttctattctgttttgtgttttctgaatgtatttatcctgaaagggggctggattttgtcaactgcctttcctgcatcaactgcgatgatcatgtccttttttttacttgttttattaaagaaatatattgcattgannnnnnnnnnnnnnnnncnnnnnnnnnnnnnnnnnnnnnnnnttgaattttcctagggtggaaccccaccaagcttttccagggataaattcccccttgctcacttggggcatggtgggatagccccctttaatatacccctttaataatttttttacccaatacctttcggggtgtggtgcgcagtgtaaaatagggttaacnaaacccttttttattctggaactctagtttcccctccggncnnnnnnnnnnnnnnnnnnnngcggccgtgtggggatttacaccactcggggtttctccgccccgtcttggggagactctaaagt

SEQ ID NO: 38950 - DNA, 818 bp, Macaca Mulatta
  misc_feature (1)...(818): n = A,T,C or G
gggctttttcgcaacgggtttgccgccagaacacaggtgtcgtgaaaactacccctaaaagccaaaatgggaaaggaaaagactcatatcaacattgtcgtcattggacacgtagattcgggcaagtccaccactactggccatctgatctacaaatgcggtggcatcgacaaaagaaccattgaaaaatttgagaaggaggctgctgagatgggaaagggctccttcaagtatgcctgggtcttggataaactgaaagctgagcgggaacgtggtatcaccattgatatctccttgtggaaatttgagaccagcaagtattatgtgactatcattgatgccccaggacacagagacttcatcaaaaacatgattacagggacatctcaggctgactgtgctgtcctgattgttgctgctggtgttggtgaatttgaagctggtatctccaagaatgggcagacccgagagcatgctcttctggcttacacactgggtgtgaaacaactaattgttggtgttaacaaaatggattccactgagccaccctacagccagaagagatacgaggaaattgttaaggaagtcagcacttacatgaagaaattggctaccaccccgacacggaaacatttgtgccaattcctggctggaaaggtgacaacttttggaacaaaatttttcgggccttggattggggatcaaaagcttcccgtaaaacaccaaggcgcataaacccgccccttgggatnnnnnnnnnnnnnnnnnnnnnctccccacctaaaaggggatggccgaatttcctttcaagaagaacc

SEQ ID NO: 38951 - DNA, 800 bp, Macaca Mulatta
  misc_feature (1)...(800): n = A,T,C or G
atagttattttttcccggcagggtttataaggatattttgatttataaagaaaataaaagcttaggtctttggaacaactttctggcacagctcctaaaaacctttggaatctcccaagagtgactaagggtctttttggtaggctaatgaaatgactgatgggtggggagctcttagtagcttccagacagaggctggttgccaggagaaccaaccacttgatgagaggggttagaacttttattctgacctctgggaggggagaggagctaaaggttgttgatctccggtggccagtgattcaatcagtcatgcctgtgtaatcaagnnnnnnnnnnnnnnnnnnnnnnctttattttgagacagagtgtcactcggttgcccaggctggtgtgcagtggcatnnnnnnnnnnnnnnnncnnnnnnnnnnnnnnnnnnnnnnnnnnnnnntgcctcagtctccaaagtagctgagattacaagcgcctgccaccatgcccggctaagtttcnnnnnnnnnnnnnnntnnnnnnnnnnnnnncttggccaggtttnnnnnnnnnnnnnnnnnnnntgatccaccannnnnnnnnnnnnnnnnnnnnnnnnnnnnnnnnnnnnnnnnntgggcccgggcnnnnnnnnnnnnnnnnnnnnnnatagggtctctctctgannnnnnnnnnnnnnnnnnnnnnnntgattnnnnnnnnnnnnnnnnnnnnnnnnnggagttcaaacaattctcttatctcagcttcttgagcagctgggactacaggcatgtgccaccacacc

SEQ ID NO: 38952 - DNA, 772 bp, Macaca Mulatta
  misc_feature (1)...(772): n = A,T,C or G
ggcttatttgttgtagctttacatagagggtaaaatcatatatttacataagaaaatgcaaaatataatttgtctggtttnnnnnnnnnnnnnnnnnnnnnnnnnnnnnnccagtnnnnnnnnnnnnnnnnnnnnnnnnnnnnnnnnnnnnnaacatggtaaaacctcgannnnnnnnnnnnnnnnnnnnnnnnnnnnnnnnnnnncatggtggtgcatgcctgtaatcccaactactcaggagactgaggcaggagaatcactcgaacccaggaggcggaggttagtggcccaagatcgtgccactgcgttccagactgggcaacagaatgaggttctaaaaaaacaaagttttctaactaatggttaatttgatttttataaattatggtttctataatttataatctgtaatttatggttaatttgatttgtgtctctttctcctcgagtttaagcttttaaaggagggaagtcattcattatatatcaagtcccaggcagaatgtcttatgtccaatatatcctttattgattaagttaatatttagtgaatttagttattgaaagtaaatagcactgaaaacctactggactgcaggataaacttctggcaaattgaaaaatcctttttgccgaagaaaattttaaatttttggattgagatttactcccaagagaatttctttagtatagtaaaggaaaaggggaaaaaatgaaagggggaaaattttaaaattgccaattaaaccttctttttcggcaagcctaa

SEQ ID NO: 38953 - DNA, 803 bp, Macaca Mulatta
  misc_feature (1)...(803): n = A,T,C or G
ggatgccccagttagatacatcaacatgattcaccactattatgacgatgcttcccacactatatcttatcatgcagctaaagctactaaacacaaatcaccaccaaccaccccttacaaaaacccccacccttcagtctcacaatgtccgnnnnnnnnnnnnnnnnnnnnnnnnnnnnnnnnnnnnnnnnnnnnnnnnnnnnnnnnnnnnnnnnnnnnnnnnnnnnnnnnnnnnnnnnnnnnnnnnnnnnnnnnnnnnnnnnnnnnnnnnnnnnnnnnnnnnnnnnnnnnnnnnnnnnnnnnnnnnnnnnnnnnnnnnnnnnnnnnnnnnnnnnnnnnnnnnnnnnnnnnnnnnnnnnnnnnnnnnnnnnnnnnnnnnnnnnnnnnnnnnnnnnnnnnnnnnnnnnnnnnnnnnnnnnnnnnnnnnnnnnnnnnnnnnnnnnnnnnnnnnnnnnnnnnnnnnnnnnnnnnnnnnnnnnnnnnnnnnnnnnnnnnnnnnnnnnnnnnnnnnnnnnnnnnnnnnnnnnnnnnnnnnnnnnnnnnnnnnnnnnnnnnnnnnnnnnnnnnnnnnnnnnnnnnnnnnnnnnnnnnnnnnnnnnnnnnnnnnnnnnnnnnnnnnnnnnnnnnnnnnnnnnnnnnnnnnnnnnnnnnnnnnnnnnnnnnnnnnnnnnngcttaaaacccctgatccggaaacactggtactagcccctatccaacccacaaactcttcctaaacttctactagccctctacaattttctgggattaactaactattccaaaaaattgcaggtaaccccc

SEQ ID NO: 38954 - DNA, 578 bp, Macaca Mulatta
ccgtttataaacagaagtttaaaattataggtcctgtttaatattcagttctgttaacgcattctcacctttttgtgtttttactttgtcaagatttctttacatattcatcaatgtctgaagaagttacttatgcagatcttaaattccagaactccagtgagacagaaaaaatccaagaaattgccaaatttggggaaaaagcacctccagctccctcttgtgtatggcgtccagcagcgttgtttctgactgttctgtgccttctgatgctcattggattgggaatcttgggaagcatgtgtatgtactgcccctgttttggtcaaaagagaaagtatctagaatttcaaatatttaacaactaaagtttattccttaagtggaagatttataataatgataggtgataggcccacaagggggacttacaatgtggaactcagtctctttccctcactcctgtagagtaattgctttccctacccctttgacctttatactacttctgcaaatgatacaggatgattgggttctattgagcattccttttatttaatgtggagttccattacttt

SEQ ID NO: 38955 - DNA, 1233 bp, Macaca Mulatta
  misc_feature (1)...(1233): n = A,T,C or G
gcgggaggcagcgcgggagctgggcgttcattaccggcctagcgtggggctctggccttgcgtcttcccactgaatagcccctcctgagcccggtgcgcggctgccgccaccgcctggccgtgggtgccggagcggccgggcggcgacccagggttcctgggtgggcgcgggcggcgtctccgcggcgggcatcccccgaggccgccctcgggccatgatcgactcggtgaagctgcgccgcgacagcgcggcggacttcttctcgcactacgagtacctgtgcgcgctgcaggactcggtgccgctgcccgccgtacgcgcatgtctccgggagggcgtgctggacttcaacgccgaccgcctccgcggggtggactgggcacctctgctgagcactctcaagatcaataaagacctacccttgatctccatcaagagcttcttccagccttggctgggggacacaggttnnnnnnnnnnnnnnnnnnnnnnnnnnnnnnnnnnnnnnnnnnnnnnnnnnnnnnnnnnnnnnnnnnnnnnnnnnnnnnnnnnnnnnnnnnnnnnnnnnnnnnnnnnnnnnnnnnnnnnnnnnnnnnnnnnnnnnnnnnnnnnnnnnnnnnnnnnnnnnnnnnnnnnnnnnnnnnnnnnnnnnnnnnnnnnnnnnnnnnnnnnnnnnnnnnnnnnnnnnnnnnnnnnnnnnnnnnnnnnnnnnnnnnnnnnnnnnnnnnnnnnnnnnnnnnnnnnnnnnnnnnnnnnnnnnnnnnnnnnnnnnnnnnnnnnnnnnnnnnnnnnnnnnnnnnnnnnnnnnnnnnnnnnnnnnnnnnnnnnnnnnnnnnnnnnnnnnnnnnnnnnnnnnnnnnnnnnnnnnnnnnnnnnnnnnnnnnnnnnnnnnnnnnnnnnnnnnnnnnnnnnnnnnnnnnnnnnnnnnnnnnnnnnnnnnnnnnnnnnnnnnnnnnnnnnnnnnnnnnnnnnnnnnnnnnnnnnnnnnnngctcttgacctgcaacagtgcggcctcaccaatgaaggagcaaaggctttgctagaggcccttgaaaccaatacaactctggtcgttctggatataagaaaaaatccactcattgnnnnnnnnnnnnnnnnnnnnnnnnnnnnnnnnnnnnnnnnnnnnnnnnnnnnnnnnnnnnnnnagtaccagtggataacttctccatcagtgaaggaaccatccaaaactgctgaacagaaaaagag

SEQ ID NO: 38956 - DNA, 1490 bp, Macaca Mulatta
  misc_feature (1)...(1490): n = A,T,C or G
aggatggcgctcgcgggtcccgcacgtggaggccggcgcgggggcgcgggcagggccggctgctgagacgcgctgctgccccccgcgcgggcgccgcggcttcaatggcgccatcgcccaggacaaacagccggcaagatgcgaccgccctgcccagcatgtcctcaactttctgggcgttcatgatcctggccagtctgctcatcgcctactgcannnnntgcaggtcagctggccgccggcacctgtgagattgtgaccctggaccgggacagcagccagcctcggaggacgatcgcccggcagaccgcccgctgtgcgtgtagaaaggggcagatcgccggcaccacgagagcccggcccgcctgtgtggacggnnnnnnnnnnnnnnnnnnnnnnnnnnnnnnnnnnnnntccgtgtctggagggggaaggctgcgacttgctaatcaaccggtcaggctggacgtgcacgcagcccggcgggaggataaagannnnnnnnnnnnnnnnnnnnnnnnnnnnnnnnnnnnnnnnnnnnnnnnnnnnnnnnnnnnnnnnnnnnnnnnnnnnnnnnnnnnnnnnnnnnnnnnnnnnnnnnnnnnnnnnnnnnnnnnnnnnnnnnnnnnnnnnnnnnnnnnnnnnnnnnnnnnnnnnnnnnnnnnnnnnnnnnnnnnnnnnnnnnnnnnnnnnnnnnnnnnnnnnnnnnnnnnnnnnnnnnnnnnnnnnnnnnnnnnnnnnnnnnnnnnnnnnnnnnnnnnnnnnnnnnnnnnnnnnnnnnnnnnnnnnnnnnnnnnnnnnnnnnnnnnnnnnnnnnnnnnnnnnnnnnnnnnnnnnnnnnnnnnnnnnnnnnnnnnnnnnnnnnnnnnnnnnnnnnnnnnnnnnnnnnnnnnnnnnnnnnnnnnnnnnnnnnnnnnnnnnnnnnnnnnnnnnnnnnnnnnnnnnnnnnnnnnnnnnnnnnnnnnnnnnnnnnnnnnnnnnnnnnnnnnnnnnnnnnnnnnnnnnnnnnnnnnnnnnnnnnnnnnnnnnnnnnnnnnnnnnnnnnnnnnnnnnnnnnnnnnnnnnnnnnnnnnnnnnnnnnnnnnnnnnnnnnnnnnnnnnnnnnnnnnnnnnnnnnnnnnnnnnnnnnnnnnnnnnnnnnnnnnnnnnnnnnnnnnnnnnnnnnnnnnnnnnnnngctgcgcggaggccgtggcacacttgcgggaggcagnnnnnnnnnnnnnnnnnnnccgggaacacaggccgcttgattcctctgtacttagatcgactttaccgtactaaaatcactttctgttttaaccagttaaacatgcctcttctacagctccatttttgatagttggataatccagtatatttgccaagagcatgttgagtctcccgtgactgctgcctcgtcgatactccatttagctccagaaagcaaagaaaactcgagtaacacttgtttgaaagagatcattaaatgtattttgcaaagcctaa

SEQ ID NO: 38957 - DNA, 911 bp, Macaca Mulatta
  misc_feature (1)...(911): n = A,T,C or G
gggctgatttgnnnnnnnnnnnnnnnnnnnnnnnnnaaatggattctcannnnnnnnnnnnnnncannnnnnnnnnnnntgatcttggttccctgcaacctccacctccccnnnnnnnnnnnnnnnnnnnnnnnnnnnnntnnnnnnnnnnnnnnnnnnnnnnctcatcaccccnnnnnnnnnnnnnnnnnnnnnnnnnnnnntggggttttcatnnnnnnnnnnnnnnnnnnnnnnnntnnnnnnnnnnnnnnnnnntgcccgccttggcctcccanagtactgggattatatangcgtgagccactgcgtccagcattatttatttacttttgaaacagggtctccctctgttgcccagactggaagtgcagtatgcacaatctttggttcactgaaacctcccgcctcctggaatcaagatgaaacctcgaaccatcaggcatacctgaagtagcctgggaattacaaggctattgggaccaccaccgcgcaagataaatttttttgcgcttccgagggaaacaagtaagttagttcactttaacatcagctaatactgaaggaattatacccatttcaaccgctgtagaccgacttaacgaaatatatcttacgtcccgccctaaagacggaaaaaatgcgacttttcatgatgagcagtttacactaaagttgaagacaagtgaagcgctaacaactatttatacctctcaatggaaacacgcgaaagatatcccgattacctccagctcccctaacacgatttttaatcgtcagaaatagcaccagattgcataatgnacacacactatatccactagttgaaatgataattcctcagacagtagcgcaaatgtcttattacttgagtaaaaacgaccaggactaagctattataataaaaatta

SEQ ID NO: 38958 - DNA, 640 bp, Macaca Mulatta
cggctgtgcagtggacgtgggcatgcagagcctccctggctggcggcgagggacgaaggagcccgcggccgtggcccagttgggtgtcggggacgcggaggtcccctccgcattgtcccaaggggacttccgagatggtgggcgggcggagtggagacggtcgggggcgaaaggagcagaagttgggggagtcctgaactgttcccaccgcggagcgcgggggcttgaactacggtccaggacgctcccgccagcctgactttatccagaagggggttattatgggaagaaactactgcgtccacgcagcgcgaaccgggcgccttgcagtgtccacggagtaacgagccaccctgccccgcggcctgcgggggcagtccctgccctggactctgcgctgagctaagcgctagtctctcgccgcagacggctaattaaatgtagagcaattaacatgcaacggaatgaaacactcaacctctccttagcactagagacgttttgagcgctcagcagccttcacggcaggaagttctgtcgggcagcgctgcgagggctctgacccacagactcagagggaaggaggcatcttacgccgctggtcgagggcctctgaggcgtcaggacttggtgtgcgcaa

SEQ ID NO: 38959 - DNA, 770 bp, Macaca Mulatta
  misc_feature (1)...(770): n = A,T,C or G
ggatcttacctaagacaaccaaagtggtacttctatgagtctatgagagtgataatgttactgggcttggggtatccccttaatgcagacatggctgcagtaaccaaaaacttagatcataacactcacttccctatgaatatccctggaaagccttcacaagaaggatgggtacaaataagtccagactgcaaagagaacaataatacctaactcttcattgcctagacaaagatgaacatccatgagcttcaagatcatccaggaaaacatggccttaccaaaaagaactaaataagaaagctgtgaccagtcttggaatgacagagatatttgacctttcaggcaaagaattaaaatagctgttttgatgaagctcaatgaatttcaagataacacagagatagaatttggaatcctatcagatgaatttaacaaagagattgaagtaattttttttacactgatgttcacagcagcttttttacagtagcctcaaatttggtcaacttcaaatgtatataagaagattaatggaaaattataagattgtagtaattttaaaaaatcaggcaaaaattttgaagctggaaaaatcaattgacatactgaagaatccatcagagtctgtcatttgcagaattaatcaagtagaagaaagaatcagtgagcttgaaagatagctattggaanatacaccaattanggggagtcagtcaaaaagggnaaaagaataaaaagacaatggaaacacaccctacagggacata

SEQ ID NO: 38960 - DNA, 730 bp, Macaca Mulatta
  misc_feature (1)...(730): n = A,T,C or G
ggcgcagtggctcatgtnnnnnnnnnnnnnnnnnnnnnnnnccaaggcaggcggatcacttgaagnnnnnnnnnnnnnnnnnnnnnnnnnnnnnnnnnnngnnnnnnnnnnnnnnnnnnnnnnnnnnnnnnnnnnnntgtggtggcgcacannnnnnnnnnnnnnnnnnnnnnnnnatgaggtaggagaatcacttgaatccgggaggcgnnnnnnnnnnnnnnnnnnnnnngggccactgtactccagcctggcnnnnnnnnnnnnnnnnnnnnnnnnnnnnnnnnnnnnnataaatacnnnnnnnnnnnnnnnnnnnnnncctgatggcgcatgcctgttgtcccagttacttgggtggctgaagcaagagaatcatnnnnnnnnnnnnnnnnnnnnnnnnnnnnnngcaagattgnnnnnnnnnnnnnnnnnnnnnnnnnnnnnntcagacgctgtctnnnnnnnnnnnnnnnnnnnnnnnnnntgcagaaaaaaatatataaggcaattggggaattggaacattaactggatattcaataatattaagtaattgcttccaatgttttggatagtagttttctattactgcaccaatattaccacaaacttagtagctgaaaacaacacacatctattatttcacagttttctgtgggatcagaagtccagggcacaactgaagtttctcttcaaaagctgcaaatcaagggtatttagtgaagga

SEQ ID NO: 38961 - DNA, 770 bp, Macaca Mulatta
  misc_feature (1)...(770): n = A,T,C or G
gggaaatgccttgatttagtatttttattataaaannnnnnnnnnnnnnnnnnnctgaagccatatttattaatcactatttcttgataatgtatcaggtctacacatatgtttcagtagtttatttttattttcagtaattttttaagctgtcactaatctgttcatgtcatgggcaccaactcatacacatctcagcttacatttttataatatcatctaagacataaataatttattctgcttctgctaaaaatttccaaaatgtcatgccccgtgatcttcatggaattcttgtcatatatgtattgacatattacagggccttctatcaccactgactgccacttttcaaaactagaaccattatttcaagtgtcagggtactgattacattcattctctttgatataaacagacattttaactggtagtattgaaatattatttttgaaaactttatgaatcacgtattataagcaaaattttacgattaagatgatggttattttatctttatccccttgtatcttggacaagtatacacttagtattggttgcaagaagcaatgaagtatagaattctatttactaaattgttgttttcttaatctgagtaatgagaaattgttttgcactatgattacaaattggtagcaaactttgcnnnnnnnnnnnnnnnnnnnnnnnnnnnnnnnnntggcccgcctcggcccctcgaaaaacctttctaaacatttctttttggccccccgggccccattaggaaa

SEQ ID NO: 38962 - DNA, 165 bp, Macaca Mulatta
  misc_feature (1)...(165): n = A,T,C or G
cagggtgtacagcaagccgtgattcctgaggaaactaaaaaagnagctctctggacaacggggcccagagctgatggcagacaatgtcagccactaacaacatagcccaggcccggaagctggtggagcagctacgcatagaagccgggattgaacgtatcaagg

SEQ ID NO: 38963 - DNA, 792 bp, Macaca Mulatta
  misc_feature (1)...(792): n = A,T,C or G
gggtatatgaattctgtggtagggagacccatttgtaatctatatggcagttccatctaggttttaagtttagatttcaccatgtcttagtgcttcattctattggtttactggaacatgtaataaataggagtagtgatgtattaaaacacaagtattcattaatgttttatatcttcactaaaattctataattatgaaactgtttcatcaatcaaggtgttatatttcaatcagagaagtgaacatttatgaagattatttggaagtgtgtacagaaataaactagacttacaagtaggccagatcagaaagttaacatatgaacctgcagagatcttgtaggacttaaattcagtgtgaggaacaactctggttctctcctatgaggatttcctaaaagccatctgatttggcattcttactggagctgtagacagaaatctacaaagacaaaagtgaacaaaattaagttactattccactgttaggaatggaaataaacttgtgaagtctgtttattttgaagtattggtgaactaggcgcttgctaattgataactgcagcatagtttgtgtttactccagttcatcaacttgngtcatttgaaagatataagagcttaaggcaagggaagaaataacatggaattctatttcaaggacaacagaacatttcttggaaaagcagctcccagttggcttttcaactgtgtcaaacctgaattttgtaaagtccccacagaaccatgggacagttcggtgcagaagtttctaagggaaacaaattat

SEQ ID NO: 38964 - DNA, 1243 bp, Macaca Mulatta
  misc_feature (1)...(1243): n = A,T,C or G
ggggtatcaacgcagagtggccaggggtaatatgaaattaatctattttattaaaatttaaaagnnnnnnnnnnnnnnnnnnnnnnnnnnnnnnnnnnnnnnnnnnnnnnnnnnnnnnnnnnnnnnnnnnnnnnnnnnnnnnnnnnnnnnnnnnnnnnnnnnnnnnnnnnnnnnnnnnnnnnnnnnnnnnnnnnnnnnnntagcgcccccatagccnnnnnnnnnnnnnnnnnnnnncataaataaaggggtgcggcgccccccgccccgacatcagatcggttcaccccttattttctccgggagagctcgtgggaagataaaaaaagaagtatattccccactcatatctaaaataacgaaatacgagataacaaaagatattttgaggatgattcaccatcaaagaaaaattacaagaggcgttgtatagagtaaaaatcattaaaaaaaaggagttcaaagaaataaggggtggctacagtgcgctcagactgttacatggcgtctggggggtatagtctccaacccgaaacggtaagaccacaacaggtaagtgngtaaactttaattagtaataaaataaacgtaactcgtcccaactacgagatacagtgcgcgtttaataaataccntcttgataggagagaagacangagtgnggttatatattattacggcataagcaacgcacggatgcgatatatacttttaaacataactttatcgcgcacacaacattattatcggcgcggtcacataatatactatgaagtatagatgatctaagtgacataggagatttaggagngcacacgcaccatatattnttcgctagattgtaggatatgtgcgcgaggtagagagaagaaaacaatatacaggtgaacgtacgctccgacatanatacatgcgttattgttttttgctaacatagaccatatacgatgattactagatacactccccctatgagataaatatgtacacacactagcaattttgttgggggtcgtgnatattgtcgactacattgactcggtgcagtgtagtgtttgtatccaccatctcatacaagccgtgtaattgtatggtgtgaataaattagtgcgggaaacatataccctcagctcactcactattacaccgataaagagagacagtctcgaagatatatactcatttcacagactagcaatagttctcggtcctcacacgctatatataacatatcggcagaaaa

SEQ ID NO: 38965 - DNA, 90 bp, Macaca Mulatta
gtatgatcgcttgcttcggatcagagcactcagatgggaatatggtagcatcttgccaaatgcattacgatttcacatgtctgctgaaga

SEQ ID NO: 38966 - DNA, 760 bp, Macaca Mulatta
  misc_feature (1)...(760): n = A,T,C or G
aagaaaagcccatttacaaacagattaatacagctggaaatgggaatattttaatagcttttcctaaaaattgtggatattctttgactctacaccaagtagtagtttctttaatgcagtgtgaaatctgaaaccatagtatttaacttttcatcctccgttacattagtttgtctcgcactttgaatggatattttactcatgcatgattttgtaacatccatgtatggtcatttaaaaactactggtttgcggccnnnnnnnnnnnnngnnnnnnnnnnnnnnnnncnnnnnnnnnnnnnncgcaggcnnnnnnnnnnnnnnttnnnnnnnnnnnnnnnnnnnaccaatttggannnnnnnnnnnnnnnnnnnnnnnnnnnnnnnnnnnnnnnngtggtggcgcatggctgaaatcccagctaccnnnnnnnnnnnnnnnnnnctgttgcttgatcnnnnnnnnnnnnnnnnnnnnnnnnnnnnnnnngcgccattgcactacaacctgggcaacaagagcaaannnnnnnnnnnnnnnnnnnnnnntggtttgctaagttatacagggcttccaagtgttgatacatttcactaatatctttctaaaaactatttttgttagtatcaccatagatactagcagaaaagtctttgtaagtagtgggaagttgcgaaactcatggtggatacaagttttccaaaattcttactttcttttcaaagcctgaattttatcattggtaataaatattgcccc

SEQ ID NO: 38967 - DNA, 785 bp, Macaca Mulatta
  misc_feature (1)...(785): n = A,T,C or G
gnnnnnnnnnnnnnnnnnncnnnnnnnnnnnnnnnnnnnnnnnnnnnnctggtttcaagcagttctcnnnnnnnnnnnnnnnnnnnnnnnnnnnnnnnnnnntgtgtgccaccacgcttggctaattacaaaaatatttaatataggctgggttttgccatattggtnnnnnnnnnnnnnnnnnnnntgcctcaaatgatcggcccaccttgccctcctaaaatannnnnnnnnnnnnnnnnnnnnnntgtgcccggcctgatcctgacatcttttaaagctgccttcatgtaccaaaagccagtctatgtttgaaaatcagtcttgaagagcctaggaggagagggataagcttcaactaggtgaataactatgcatatgttaaaaatatgggccaaaatctaccccaaatgttaactcttctgctttgcgtattatatccatttatagttatttcagcactaaaatttttaaagactcttttgataattatggagaaattactattaaaactcacctgcatttgtaacacttcaaagaactaattggatgacatcatttttcccaaaggcattttggattgttacataattaatgtttatctctttgccaaaaannnnnnnnnnnnnnnnnnnnnaaaacagatannnnnnnnnnnnnnnnnnnntttgcattaaaatgtttatttcactggtgtggaaaatccaattttttaaacggtgaaaaaacaaaatcctcctggtaatttttgggggataacttccttgccctaaaaaggggaaaag

SEQ ID NO: 38968 - DNA, 334 bp, Macaca Mulatta
aagcaaggctatggggaggaagcaaactaactacccaccttcaggtcctaggcccagaatataaagtctaaaggaagagagacccagctctgcccacctgcccacactgctactccattttatatgcaactggagctgcaacaatagttctgtagagcattaggttcaaaagataccttacaaataattcagtccagtgttttttccatcggtagccaatagaaatcaagaaagtgaaggtcaggccagatggctttagagcctcccatcccattcaagcatcatcatatatttattaacagcctattttgtagccaagtgtggtggctcacac

SEQ ID NO: 38969 - DNA, 2298 bp, Macaca Mulatta
  misc_feature (1)...(2298): n = A,T,C or G
gggatgggccacagcaaacagcaccacggctcggtgtcttcacccggagcatggccaagaaaacagtacacagctcatccaaccaggtcctgctcaagttccaccgcgatgcagccacagggggaatcttcgccatagctttctccggtcagtatggaaacctggcctggtgggaagggccaggctttcaagtcaaggctgagcttgactcccagctccaccatttgcagatcaagtgaccttgagtgagttgaataacctcttggagcctcagtgtcttcagagttatgagaattaaatgtattagcctatgtgagagctctcagcgcagggttctgtaaatgcaagttttcctcctattccacactgccagggcagagaggcacagaagcccaatccttggtgccaagtccactcattcacatcaactcactggctgagtcgtccctataccctgtgccccagcttgtcccttagcattttctaccatgatctccctctccatagggatctagggcctctgctgacctctcaaggagcactgtgtttctgagcacaaatgaaagcattgtgatttctaataggaagattatgannnnnnnnnnnnnnnnnnnnnnnnnnnnnnnnnnnnnnnnnnnnnnnnnnnnnnnnnnnnnnnnnnnnnnnnnnnnnnnnnnnnnnnnnnnnnnnnnnnnnnnnnnnnnnnnnnnnnnnnnnnnnnnnnnnnnnnnnnnnnnnnnnnnnnnnnnnnnnnnnnnnnnnnnnnnnnnnnnnnnnnnnnnnnnnnnnnnnnnnnnnnnnnnnnnnnnnnnnnnnnnnnnnnnnnnnnnnnnnnnnnnnnnnnnnnnnnnnnnnnnnnnnnnnnnnnnnnnnnnnnnnnnnnnnnnnnnnnnnnnnnnnnnnnnnnnnnnnnnnnnnnnnnnnnnnnnnnnnnnnnnnnnnnnnnnnnnnnnnnnnnnnnnnnnnnnnnnnnnnnnnnnnnnnnnnnnnnnnnnnnnnnnnnnnnnnnnnnnnnnnnnnnnnnnnnnnnnnnnnnnnnnnnnnnnnnnnnnnnnnnnnnnnnnnnnnnnnnnnnnnnnnnnnnnnnnnnnnnnnnnnnnnnnnnnnnnnnnnnnnnnnnnnnnnnnnnnnnnnnnnnnnnnnnnnnnnnnnnnnnnnnnnnnnnnnnnnnnnnnnnnnnnnnnnnnnnnnnnnnnnnnnnnnnnnnnnnnnnnnnnnnnnnnnnnnnnnnnnnnnnnnnnnnnnnnnnnnnnnnnnnnnnnnnnnnnnnnnnnnnnnnnnnnnnnnnnnnnnnnnnnnnnnnnnnnnnnnnnnnnnnnnnnnnnnnnnnnnnnnnnnnnnnnnnnnnnnnnnnnnnnnnnnnnnnnnnnnnnnnnnnnnnnnnnnnnnnnnnnnnnnnnnnnnnnnnnnnnnnnnnnnnnnnnnnnnnnnnnnnnnnnnnnnnnnnnnnnnnnnnnnnnnnnnnnnnnnnnnnnnnnnnnnnnnnnnnnnnnnnnnnnnnnnnnnnnnnnnnnnnnnnnnnnnnnnnnnnnnnnnnnnnnnnnnnnnnnnnnnnnnnnnnnnnnnnnnnnnnnnnnnnnnnnnnnnnnnnnnnnnnnnnnnnnnnnnnnnnnnnnnnnnnnnnnnnnnnnnnnnnnnnnnnnnnnnnnnnnnnnnnnnnnnnnnnnnnnnnnnnnnnnnnnnnnnnnnnnnnnnnnnnnnnnnnnnnnnnnnnnnnnnnnnnnnnnnnnnnnnnnnnnnnnnnnnnnnnnnnnnnnnnnnnnnnnnnnnnnnnnnnnnnnnnnnnnnnnnnnnnnnnnnnnnnnnnnnnnnnnnnnnnnnnnnnnnnnnnnnnnnnnnnnnnnnnnnnnnnnngatgagacataaggcccttgctatggtgtaaatgcttaggtccccccagaattcatatgctgaaatcctaacccccaaggtgatggtattaggaggtggggcctttgggaggcgattaggtcagacaacagagccctcatgaatgggattattgcctttatcagagacctacagaatcactgctctgaagccttctcagtggaaagagctaggaaacacagaggcccaggcgggtggatcacccaaggtgaggagttcaagaccagcctgaccaacatggagaaaccccatctctactaaacatacaacattagacaggtgtggtggcacatgcctgtaatcctagctactcaagagcctgaggcagaagaatcgcttgaacccaggaggcagaggctgcagtgagccaagagcatgccattgcactccagcctgggcaacaag

SEQ ID NO: 38970 - DNA, 234 bp, Macaca Mulatta
atggggagtctggggaaaagtggcttctccagagccagcatcaaaggatcaagcactgaagacatagctggctctgaggtggggtgggtgcaggatcacagaccgcatgtcatccccttgccccacccccgcaagtctggggtatatctgtgtctagcaatgatgtcctatggtgggacagactagaggatacgcatccctggaatgagagtcaacaggaaagatgggccccca

SEQ ID NO: 38971 - DNA, 781 bp, Macaca Mulatta
gggatgtcatgtatatactcacagtaagtaaattcttaaaagctcatttatgagggctggtgtcccttttaggatatatgggtatgtactctgtaaattattttttttaagtcaggtacttttaaattatctatttgaacattaacaggtttttttgtcgttcatcttttattgaaaattattttgatctggcatttatgtttggtatttactttgttttcgccagtatccatggccttagttttgaaatgcaagctattaagtccagcttgtttttaggttttgttaataggtttttctgtttcatttattttgattgtttgatagatagggttttgttgttgttgttcattatccctgactgcttccctactgcccaggtatcttacaacttaaattaatctggtggtgttggatggcttaccttctttaattatgtatatgcctatggctttatacatatggcactgtctcaaaaataccaggcttgcgtaggttttcttctgcatattgtttgattttaacttttttaggagaattcttcattgtgaagactatcttttaagaacagttttttctgaagaacatgtttttcactaaaaaactcaaaatgactttttcttaaattttttccattttagtggggcccaccttttaatggtccgtttgaaaaagaattataaccttccaacccttaaaacattttttaatggttgccttaaaagaattaatggtggtcaatttcaaatttggccaattcctttcctttaattttgggcaa

SEQ ID NO: 38972 - DNA, 427 bp, Macaca Mulatta
ttcctatgatacttactatagaacacagtggatcctttttgaatgttcgtggaagggccaggagttcctgtgaaaccaggatactgcagctttattaaagttaaagaaactgtaacatatctcttatatattaaaaacatttaaaagttttaaagagaaattgcattaatacagattgaagtattttattcttttttgacttgaaaaattatatttcatattgcaaagatgtttacaagtattttaatttaagttcagtgaacttttttgtagctgggttaaatctttttattttagtatggccttatggcaaagaacactgtattattttaataatcacacaattgtgacggaattacaaaccataaaatgtgtaatgttttgaacagtattctgttgggatggagattttataggttcagacaaa

SEQ ID NO: 38973 - DNA, 558 bp, Macaca Mulatta
ctcctgcctcagcttcccaagtagccaggactacagatagggccaggtgtgagtgtgtgaatatttgagtgaaacctggaacccaaatgagaagaaatctgcaaggaataactactgacagtgaatctacagagtcatctgtatgcataatatggaatgttcttaacccagaagtagctgaatgtgttattccattgatgaggagtgactctctgttatagtccctgggtcaagacaacaatttatataccttcgtcgcggttcagaaaggagtctctgtagaaccagaagcaaagaaaggaaacaatccgagtatttctttattaaattgactgtgtaagatacttgacttccaggaacaaaaacacagtgaaataataaaatttcatcttggcatcactggacattgatcgtatcgaggagtgtataaagtggaacttcctgagttgagattcggaaccttccattggtgctcatttatactgtggactgtacgcatgagtgaattctggttgtgtccaactgctgtattgcagaacaggctcagcctaaaaggcg

SEQ ID NO: 38974 - DNA, 755 bp, Macaca Mulatta
  misc_feature (1)...(755): n = A,T,C or G
gggctgcctttatgtctttggacacaaagcacatagatgtatgttctgtaaagactaaagtgattgttacaccagggcttcctgaccttcgggagagactcaaaaaagcagagagcagcacaaagtgaagttaatttggttggtttgctttatctggtttctcattttctttcaatttaaacctgaacataacacccttctccaatatctatccagcagactcctggttgggaagccctgtattaaattttgagaatgtacacagttttcttttgtacagtgctttacacctgctaaaagttaacttgtttaatgcaaaacaagaccttgaaaggtcaatcatattaaagctggtttgattattaatagttatcttttaggaagaagcttttttccctatgtaagatgtcatactgcagatttaaaatatagactatcaataaaatgcatgaagtgatcatttgtgcttgatcatctctccttgggtttttctttaaaaaggggaatctgctataaaggttctgttgcttcaaaccaatgtcaaatagacttgatttttagaatcaaatggaattacagtgcaaccttggtttttattcctttcactgctataagtgtgggcaggtactggtttatatgttataacttctgttttatctgtgtttgggaagttgaaatggcttaaatcgtgaatgggtaaaaataaaagactatannnnnnnnnnnnnnnnnnnnnnnnnnnnnnnnnnnnnccg

SEQ ID NO: 38975 - DNA, 777 bp, Macaca Mulatta
  misc_feature (1)...(777): n = A,T,C or G
ggtccggccacagcacttcagcctgggccnnnnnnnnnnnnnnnnnnnnnnnnnnnnnnnnnnnnnnnnggcaggcggggcccggcaaaggagtggctaccaggcctcaacaaccacgttctgtgacagcgcagagctcggcgccggcccctccctccctccgccaaggactccgcccagccagctcttggggcctttttccagcgcccatttgggtactctgccgctaagcttgggagccagcctgccaacagccgcctggcctggcctcccgactggctggccttgaggtgggcagagcgggttgtggcacctcctctccctgtgtgggaccaggacggtggctcagcctccactccagggaagaatcaaagtttctagagtcgtgagaaaactattgagagtggctctcctctgattcttcactgtgaggggcattcttcatgttctcccagctgttccaagactgggccatagaattccatgtttcaggagcctaagaccctcccagagcccaggtgcttcaccacagaccccaagccgtcaagcacattgcccagagcagtggccaacatcatggacccctgtgccttgtcacagatgggtgctggtcctcaggtgttgcagacactgctgggntcatggggtcggattctgccagtttctgcactgcagccaaagatggtcagaagcattgtcgcttcactagcatcaagtgctcaaagacatggncagccggtttgggtggtacttaaagtatttcaaaaatggacgacn

SEQ ID NO: 38976 - DNA, 197 bp, Macaca Mulatta
ggacctgaacgcctacaagaagcaagggatagcattgctgaccagaatgggcgagtcagtcaagcacgtcactggcggctacaagctgaggactcggccgcttgagtttgccaccataggtgactacttagatacgtttgcactcaaactgggaaccattgatcgaatagcccagcggatcatcaaagaagaaatag

SEQ ID NO: 38977 - DNA, 770 bp, Macaca Mulatta
  misc_feature (1)...(770): n = A,T,C or G
gggccaatannnnnnnnnnnnnnnnnnnnnnnnnnnnnnnnnnnnnnnnnnnnnnnnnnnnnnnnnnnnnnnnnnnnnnnnnnnnnnnnnnnnnnnnnnnnnnnnnnnnnnnnnnnnnnnnnnnnnnnnnnnnnnnnnnnnnnnnnnnnnnnnnnnnnnnnnnnnnnnnnnnnnnnnnnnnnnnnnnnnnnnnnnnnnnnnnnnnnnnnnnnnnnnnnnnnnnnnnnnnnnnnnnnnnnnnnnnnnnnnnnnnnnnnnnnnnnnnnnnnnnnnnnnnnnnnnnnnnnnnnnnnnnnnnnnnnnnnnnnnnnnnnnnnnnnnnnnnnnnnnnnnnnnnnnnnnnnnnnnnnnnnnnnnnnnnnnnnnnnnnnnnnnnnnnnnnnnnnnnnnnnnnnnnnnnnnnnnnnnnnnnnnnnnnnnnnnnnnnnnnnnnnnnnnnnnnnnnnnnnnnnnnnnnnnnnnnnnnnnnnnnnnnnnnnnnnnnnnnnnnnnnnnnnnnnnnnnnnnnnnnnnnnnnnnnnnnnnnnnnnnnnnnnnnnnnnnnnnnnnnnnnnnncccttataacaatacattataattggccaaaaattcttgtccggcccgccctcggttctctaaaaaaaaccttcctagaaccattcagttttgggggccccgggagccacagtaaaggtcaagatggaaacattggggccattgatctctgtttttcccaaaagagaaaaaacccttgtggggccaagaaaacaaagagagccccttgggaaaa

SEQ ID NO: 38978 - DNA, 801 bp, Macaca Mulatta
ggtacttaaaaatcctttagtcttaataggcagtgatgggatattatctgagagaagctttccaaaatgagagtgctctgccatttctttcatttcgtgtgtggatcgttatgtccccaaagctcctgcatccactctctcaggaggcagaaagggagcatctgagacctaacattgcctgcatgcagaagtggtcctgctgggtttgtttctgtagtgatgacacaatgttttttcctgttgggtttacagtcactcagcacttttcactgtaagatggtgtggaaccagacgcagagcacatcagaattcacatcctattttcttctgcctccaattatgcaggtgaaacaagactcaggtctactttctcctgggatatgggagtgggctttgtcctttgagaatcacagccactttttgatgtgtttgtctttactgtttggaggtgggccagtgatatgctttactgagtccacctgatgatctcatgtacacttttttaaaattgcaaaagtggttgggttaggtctgcccaaagggaactgaccatccaggattcccgtctttggtgttaatagctatgtgttgacagaaaaaagaaaatgtcaaactttctatgcttgtgagtagataccagtctttgccttcattttaccattctagaaatgaaattagcatgtgtggataattggttgggacacaagtatttttatattctggggcccccaaaaagtggaaggcctcctttggatttggggtttgaaggaaagggtttggtgggcaaaaattgggaagggc

SEQ ID NO: 38979 - DNA, 235 bp, Macaca Mulatta
cgcggtcgcgggtttcgcttcccagctctgccctcgcttgctggcccgtctccagggtcagcgcggggccaccatccagccgctcggggccctccccaagcagctgtggaggatgcactgagcctgcgcagccatggcctcggcaggggcggagaggcggccgggggtccaggaggctacggtcgtggggcagggacagctcgcggaggaccccggcagcgcggagacctccgag

SEQ ID NO: 38980 - DNA, 230 bp, Macaca Mulatta
caggagctatactccagaacacagtggaatctctcagcaagacctggtgtgctcaggattccagcttagcttatgagagagcctttctggcagtgtcagtgaaacttcttgagtatatggctcacatcgctcctgaagtagtgggacaggtggctatccccatgacgggtatgatcaatgggaaccgagccatccgggagttcatccagggccagggaggttgggtaagt

SEQ ID NO: 38981 - DNA, 130 bp, Macaca Mulatta
caggtcagccctggagagcagcccagacccggccacactcagtgaagaggaagcgcgcctcctgctggctgcactggtgcaggactatgtgcagatgaaggccagtgagctggagcaggagcaggagaca

SEQ ID NO: 38982 - DNA, 1745 bp, Macaca Mulatta
gggattacaagaaggactagaacttgctaaccttacaggacttcatagcctgtctggctgcttcctgtgcgccactctagggcgtccaccgctaacagctgtccctctgccatggggaccctctacctttgcccaagctaacaacctccgaaaccactcgtatgctcctatcctgaacgtgcccctatacctaaaccccagtcaggagaagtttccctactgtttctcaggaaccaattccagcctctgcagcatcactgcaacgccccctaatatcaccttaagggctccatcaggcatattcttctggtgtaatgaaaccttatctaagaacctacctagtccttctgttaataacctactatgtctccctgtcacattagttccccggttgactctactaactgctggcgagttcctagggtataccggtaactggactagtgctgttattcacccagaccctagaccgagacctgcacgagccatatttctccccctcattgcaggaatctccctcaccgcatccttcattgcggccggactggcggggggagccctaggtcacaccctcatagaaagtaacaagttgtaccaacaatttgccgttgctatggaggagttggctgagtcccttgcctcccttcagcgacagctcacgtccctagctcaggtaaccttgcagaaccggagggccctagacctactcactgcagaaaaaggtggtacatatatctttctaaaagaagactgttgtttctacataaatgaatcaggacttgtagaggaccgggtccaacagttacgcaagttaagcactgaagtaaaaacacggcagtttgcttcagctgcagaccaatggtgaaattcctctacgtgttctctgttagcccccttccttggacccctgctaagtctactatttctgcttaccgtaggaccttgtgttgttaacagaattttacaatttgttaaggagagatttgacaccgtacaactcatggtcctcagagcccaataccaacctgtaaatgctgaaacagaatcagatttataagacccaagatttggctctaaagatacctgaaaaggaggtggggaatgaaaaggagctgggcacattcctcagcccccgggctcgaaactccctgagcccagtacaaacaccacctggaaagtctccgataaggagacagccgttcaaggttactgaaagcgcgggagccaaaagaatttctttgttcccctgcaactttcgggctataaaaagcaaacgctcgctttgatcgggggcctcttgtttactgtgttaaagaaggaacaacgttcgaacttgtagtaaatattcttgccacttggctctctaaacaataaaatttaagattagaaaatgtatcttgtaggcccgcctcggtccctcgtaaaaccttttctaagacattttcttttggaccgcccgggccccctatttgacaaattgtacatgggttcaacaacgcttttcccagagaaaaactaggagcaataaagtaaggcaatgggattacacgcccttttataaaaacgctttggattgaaagactaatcgttcagtgaaatagcacggttattggtgttttctaagagctaatagaccggcaatactttttatagaacgatccacgatccatccttcgatatcctgaatttaacccgtcgcccgctgcataattcgttctataaatagagcgcacgataatgcataa

SEQ ID NO: 38983 - DNA, 660 bp, Macaca Mulatta
ataaagatcattataatactgtttaaaatgtgaggcaataagaattactttatgttggatctgaggaggctttggtaaaacagtttcatgtaaatgaaagtggtaatcctcttctaaaatagcaataactgaaaatgaaagtgttaattttaccttgtttgagttatcagggaacttagtaatatcaaaacattttataaatgatatcaaagaagagtcaacattgatccagtaattttattttgtaacattgagggataattggttattgaacagaatagtttaggagactttacaaacctttatttcaactttcttatttggaaataatatcatttataaagggacacttttatgtttttcccttttctatgttggttaatataacacaaagagatatttaggaaaatgcttattgatgaggtttattctatctgtttttaaagcacagaggttgcattctagataacttttattattttattagcatggcatatttttaatcattatttgagactgtcctttgcctgattattttagctgaattcagggagatcggtggggcaggaaagcatgcattgaaaaatgtctaaccacggttatttaagcataatctgaaaacatctagcccaaaggtaagttgctatttcatcacagttg

SEQ ID NO: 38984 - DNA, 870 bp, Macaca Mulatta
  misc_feature (1)...(870): n = A,T,C or G
gggaagatacaatatttttgtagtatttataaactgttctaaatgatagactatagaaagcatttttgtcatatgaaggtaaatcagtccattatttagatcatttaaactctgaacattacaccttctgggctttgatttatgaagtggcacagaatctaactttgcactgaatatcttttcattcacatctcctctgccttagtcacaatggcaacagtacagaaaattctatcaaacctcagaatatagtagaaataattaagctgttgaatgagtcttaaaaattatactactgttaagtggaccaagtttggtgaagcagaatgtgacaaaggttgattaaggaaggaacaactcaaggacattgggaatgataacttttccacttgagaactactttatgttttactgnnnnnnnnnnnnnnnnnnnnntcccttttgttattttgcccaaagaaaatagtatttacagggggcttctttttcaaataatagaaatcttaaaccaggaatgttatatgaaaaagtccgatttttattggtatttgcccgcaggaattagccttttgaaaatttgaaataaaagaaaagcttgctcttgtcagatttttaaaatggcccttaattgggtattcaattttaaaaaaatttccttcccaattttttggaaggtaactttagaagccttttttgaagttgttagaaaatttttaaattggcccgggaatttttatccgctgttttaacaatgcccaagttgcctttttataacaggcgggttcctataatggtggcaaaaaaacataatttttctcaactgggtaaaaattgtttggcccaagtttgccaaaaggggctcgggtccaa

SEQ ID NO: 38985 - DNA, 765 bp, Macaca Mulatta
  misc_feature (1)...(765): n = A,T,C or G
ggaatatcagtggatgaaaacagcttaacattttaccatgcttaagttttaagaataaaataaaaattggaaataattggccaaaattgaaagnnnnnnnnnnnnnnnnnnnnnnnnnnnnctctaaatgtaggcctggctgggctttgaccttttccattttaaatcactcacagagggtgggacaggaggaagagtgaaggaaaaggtcaaacttgttttaagggcagcctgcctttgttctgaattggccttaagaacattaccagctccaggtctaaagtgtttagtttcatgcagttccaataactgatcattgttgagatgaggacaaaatcctttgtcctcactagtttgctttatatttttgaaaagtaattatttttgtccaagtgcttatcaactaaaccttgtgttaggtaagaatggaatttattaagtgaatcagtgtgacccctcttgtcataagattatcttaaagctgaagccaaaatatgcttcaaaagaagaggactttattggtcattggaagtcatacatacttttcaaagcatctaaactggagtttcccatgggcaagccaattacctccattaagggggaaaaaggaaatagaataaatggcccaaagatggattgggcccaagggaaccaaggggtgaaaaaaatcctggggggtggaaaattcttctaggcctttccttctcgggaacatttttttaagtcaagaaactcccgaaatctggaaaagtatttaatggggtc

SEQ ID NO: 38986 - DNA, 85 bp, Macaca Mulatta
cagttatgattgtcttaaattatttcacacagactgttaggctatgcttatggtcctagagacctttattaagtataaggatatg

SEQ ID NO: 38987 - DNA, 125 bp, Macaca Mulatta
gagacttagacacatgatcccacgtcaaactgatttcaatctgatgcggattacatacaggtttcaagaaaaatataaacacgtgaaagaagatcttgcccatttgcattttgagaaacttgaaa

SEQ ID NO: 38988 - DNA, 761 bp, Macaca Mulatta
atggaaatttttgccttcttttaaatatgatccatgtgattttttttctttcagtcggaggggattaattacatggatttttttaaaatgtggaggcagtcttgataaatactgctggatcatgatatgtaattctttttgtacattgttggatttaatttgctaatatttcgttgaggaggtttccatctctgttcataagagattggtctgtagttttcttttcttgtaatgtctttgtctggttttgatattaggttagtattgtcctcacagaatgacttaggaagtaactgctgtatttctgaaagacattgtagagaattggtattatttcttctttatatgttgattagaactcaccagtgaacccatctggatttggttccctctgtttttgaaagttagttattgattcaatttctttaatagatataggtctattcaagattgtctttttcttcttgtgtgagttttggcagattatgttttttaaggacttgctccatttcatttagctttgcaaatttgtggacatagatttatttacgatactagttatctttttaatggctttggggtagtagcaattagtaaagatcttctctttcatttatgatattactaatttgtcttctgtctttttttctgagtctggctagaggcttatcagttttattgatcttttcagaaaagttacttttgggtttgttaatttactctattgatttcctgttttcaatttcattgatttttgctcc

SEQ ID NO: 38989 - DNA, 665 bp, Macaca Mulatta
  misc_feature (1)...(665): n = A,T,C or G
atcggacgagcattcgctgatctcactgctacttagaaacattgagtaacatttggtctagtagtggtccatttattatttgtaaatatgttaactnnnnnnnnnnnnnnnnnngctccacattttggtctgttaggactgtaatgtattaaaatatttggaaatactgatgtttttcacttaggcttggcaatagataaagttgaaaataatggtaaattcttagccaggcatggtggcgggnnnnnnnnnnnnnnnnnnnnnnnnnnnnnnnnnnnnnnnnnnnccttaaacctggannnnnnnnnnnnnnnnnnntctatatcgtgccattgcgnnnnnnnnnnnnnnnnnngagcaaaacttcgtctnnnnnnnnnnnnnnnnnnnnnnnnnnnnnnnnnnnnnnnnnnnnnnnnnnnnnnnnnnnnnnnnnnnnnnnnnnnnnnnnnnnnnnnnnnnnnnnnnnnnnnnnnnnnnnnnnnnnnnnngagtannnnnnnnnnnnnnnnnnnnnnnnnnnnnnnnnnnnnnnnnnnnnnnnnnnnnnnnnnnnnnnnnnnnnnnnnnnnnnnnnnnnnnnnnnnnnnnnnnnnnnnnnnnnnnnnnnnnnnnnnnnnnnnnnnnnnnnnnnnnnnnnnnnnnnnnnnnnnnnnnnnnnnnnn

SEQ ID NO: 38990 - DNA, 890 bp, Macaca Mulatta
ggggccagaacagcccaagatggccgacttcgatgatcgtgtgtcggatgaggagaaggtacgcatagctgctaaattcatcactcatgcacccccaggggaatttaatgaagtattcaatgatgttcggctactacttaataatgacaatctcctcagggaaggggcagcacatgcatttgcccagtataacatggatcagttcacgcctgtgaagatagaaggatatgaagatcaggtcttaattacagagcacggtgacctgggtaatagcagatttttagatccaagaaacaaaatttcctttaaatttgaccacttacggaaagaagcaagtgaccctcagccagaagaagtagatggaggtctgaagtcttggagagaatcctgtgacagtgctttaagagcctatgtgaaagaccattattccaacggcttctgtactgtttatgctaaaactatcgatgggcaacagactattattgcatgtattgaaagccaccagtttcagccttaaaacttctggaatggtcgttggagatcagagttggaagttcaccatcacaccacctacaggcccaggtggttgggagtggcttaaggattcaggtctcactatttatgaaggagggcaacggtcccctctggcttcctcataccaaaatgtgcacgggatccccctaacctggcctcccaatcgggagcccccaaaccgccccaagggagttttactttacaactccctatcaccaacggccccacaaatgggatcatcccgcaccaggccgattttaggggccacaattcgttcaaagacaagtggtcacagaatatctcccacttgtcccggggctctctttgtccgcgcctggtcaaccatttctagcagc

SEQ ID NO: 38991 - DNA, 678 bp, Macaca Mulatta
tgtgtacccattactggtcctcccaactcctcccttgccccagcccctggctaccactcacctttctctctgtagacatttgcccgttctggatatttcgtataagtggaatcgtaccccgtgtggcttcttgtgcctggcttttactcagtgtcgtacttttgaggttcttcatgtggcatgtatcaatacttcattcctttttatggccgaattatgttccgttatatggatatactaaattttgttgtataaccatggcagaatttttaaatctagcaatgatggccacttccataataaggatgtcatggctgttcctaatggtggaccattttgggggtagtacttctgcctttatcttaaggttataggggtaattcttggctttgctcaccctcccttgggaaggctgtcaacttcataaaaagactctagctgtatcttttgtcagcttactgtcagagagtatgggatctgccttaatttagttaaatttgatcttaccagataatacaaccttgaatttttcgtttagttctattcaaaagctcagtttcagaaaataatgtagtgaatatgtattccatttattcctctagaatctagatcgggttcagcaaactacaggccacaggctaactgtctgggtatgtaaattgagttcattggaacaac

SEQ ID NO: 38992 - DNA, 807 bp, Macaca Mulatta
  misc_feature (1)...(807): n = A,T,C or G
ggcctcttacttcaaactctgccgtttgaataactgtttagtttctgtatgctgctctcactccatttttatacacaccatgttggcatttattcaagaagaatggcatgttctgctnnnnnnnnnnnnnnnnnntaacttttatatatttttttagtttctccgttttctggatggtaagcgggttagtagaatcatttctattccttatttataggattagtattagaaacattatacttttctctatacagttttcttttatcatcccctaaatttaaagcaatcatctctatggatatgactcctgaatagctctccagaatttcaatctttattacttccagcatagtaaaattaaatttctcattattccccccaaactgctgtcacttcttatattcctgtttctgctgttctctgagatactctctaatccttgtctgtgttgaattttctttctctctgatgtctatgccatggactgccagaaaaacctgttgatcaaacaaagctgtttattagcttattacagtaagaaaaaacccactttgactgtatcttagtaatatccgcacagggagaagtcagggagaggatattcataaagttttaggaccctgggctaggtgattttggaggtccggtcttgcaatgttaaaaaactgggttgttatttgaaacaaagtttaattaccgtaaagagtttttgggaattggtccacccttaaagaacagccaagccacactgggtttgaactataacccctttaagaaattccataatgggggaaatttttaaattct

SEQ ID NO: 38993 - DNA, 683 bp, Macaca Mulatta
tacctcctagcccaggaagagggagtatgcggaaagttcaacctaactaactgctgcctggaaattgatgacaatggaaaggtcatcgaagaaataactgcaaaaatccaaaagttagcccacatcccagttcagtcttggaaaggatagtctccagattccctcttcagaggttggttctcatcccttggaggatttaaaaccttagtatgagtagttctagccatattgggagtctgccttgcactcccttgtctcttacccctcattgtcaaaaatatccaaacagccatagaggctcttgtggacagacagactactacatgactaatggccctaagtatcaacccctgccaagaaaataggtacttcctcttgaagaactaaatgaagatagtgatgctttctattaaaccttacttataaaaagtatcaaaggagggaatgaagcaggaaatataaaaggaaaaacaagtaaagggaaaacaagtccttccctgaccagtctgactcactccaaagtcctgttggagctatgataatgatctgcaaggccagacaggggccccgaaagaatgggcttcaggagcagagatgagaaaaacaagttctccttattagtttccccatttgaaattctctccccataccattattctttgttctgttctcacaactatttt

SEQ ID NO: 38994 - DNA, 702 bp, Macaca Mulatta
ctgtgctgtttgccaaagaggtactttttagggctagagtatttctataaacagaagagctaagttcctgaagactaagctagatagatgcagctatatgtaaattgtatatttttatgaacttttgaagcacacactcccgtttccctctgcgtagctttgtggggatttcatgtgtatatgctgtctgaaagaatccagaggttggagtgccaataggaaatgaaaacaaatgcctcatactacagagagcctttgaaggtgaccagataactgtcttcattgtgaccagctggagtccctccttgcttgtgaagaaggggcttttgtaccttgttggagatgccacctcagaaggtcacgccgtgcaggaaaaaggttttattctctcgcggtgtacattagaatgtcagatgcctgcatccatgtggaccacgatgggcctctaaaatttggtgggcagggggtttgcttatgagttttctctggaagccgattttactcctggatgtattgaatgccccttgagctttatgagatacgagtccacatggataaaatgtcagagagtgaagttctacagaggatattccaggaaaaggccatgtctgtgcagtcctagttccagacaggtgagaagctcccggagctccctggctacctttgacagctgggtagatagttatattctgggtaactgtt

SEQ ID NO: 38995 - DNA, 796 bp, Macaca Mulatta
  misc_feature (1)...(796): n = A,T,C or G
aaatttaatacaattttacgtaattagtgtcagattcaaacaatatgaaagtgtctaacataaaacatgaaggatccctcccctcaccttcaggaaggtaacttccagaggtaatttgtattattccaagtttttttcttgctttcgcatgtgtcaaaattgttttattagatattcagtagttaaaaagagcatgtgcaaatcacacataaagtagaaagattcatgatacagtgaacacccatgtacctaatacccagtttaagagaaagaacttttcaccatttatggagtcctgtctgtgctcttcctctcccattctcttttctctcccttcaaaagtaactcttacttcaatttcatgtgttcgttctttaatttttaaagctttaattacatatgtatttatagttttacatgtttttgaatttttaatattgaatcatattctttcgcaaactgcctttaatgttatattcccacaattctacagttgtagttctcatatcacagtttatgcattctgttggtgatggacagatttgtacttaaaaaaattacggataagaaataattctccaccttttcctgcaacgtgctttttccgcttaacattgtgttaaagtatttttatgtcagtaaatttatatataggttactcatttttattacattttttgaccgttgtatcctgttcctagaggcggtgtccctgagtatttccgcgtagaacatagttgactcggatcaaaaaaccannnnnnnnnnnnnnnnnnnnnnnnnnnnnnnnnnnnnn

SEQ ID NO: 38996 - DNA, 674 bp, Macaca Mulatta
  misc_feature (1)...(674): n = A,T,C or G
attagaaaatagtaataaaatcctttcactattgtattagggagtttaagttaagtatctgtgcttagtctannnnnnnnnnnnnnnnnnnnnntttataaagaaaaagaggtttaatagactcacagttccaaatggctgggaaggcatcacaatcatggtggaaggtgaaaggcacgtcttacatggcagcaggcgagagagagaatgagagaaccaagcgaaaggggttntccccttataaaaccgtcagctctcatgagacttattcactaccacaagaacagtatgggggtaatcaccctccctcctcctgtgattcagttatctcccaccgggaccctcccacaacatctgggaattatggaagctacaattcaagatgagatttgggtggagacacaaccaaaccatgtcaatgcctaatcctgctgcatgttaatagttagccctcaggacatacctgggcctcattcagaattccctctgactagttnnnnnnnnnnnnnnnnnnncaaacctcaagtctggcttacagatggttcttcatggcatcctggcaccacacaaaactggatcgttacgggtctgcttttaccatttcgagtggtctggaaggtccctgggaatgggaacaccttcaagtgggaagaacttccattaccatattcctt

SEQ ID NO: 38997 - DNA, 230 bp, Macaca Mulatta
gattcccattcccatgcctgcctttgaaatctgggctgttcccagatttcagaatagcttccaaatagcccagagggttctgaacctgggcagagactcccagaccctcctatctggggagtctcccagctttccctgtcactgtggatatagccagcctgctatgaaacccaccaaggagggccccaaagcacttttctttcttccagcccgctgcctgctttcttcta

SEQ ID NO: 38998 - DNA, 1373 bp, Macaca Mulatta
agcgtggtgtgtgttgggttcttcttggtccagaggacttgtccatacacgggtggtcaggacaagaccttcctatctgtccagcccagcgctctggtgcctcagggaggacacgtgacccttcggtgttactatcgtcgtgggtttaacaactttaccaacttcactctgtacaaagatgacagaagccacgttcccatcttccacaacagaatattccagcagagcttcctcatgggccctgtgaccccggcagacgcagggacctacagatgtcggggctcatacccgcactcccccactgagtggtcggcactcagtgaccccctggcgatcttggtacacgggagtccacagaaaaccttccctcctggccctcccaggtcccctggtgaaatcaggagagacggtcaccctacaatgttcttcagatatcgtgtttgagcacttctttctgcacagtgaggtgacctttgagaagcccttgcaccttgttggagagctccatggtgggggttcccaggccaactattccatcaattccacgacgtctgaccttgaagagaccttcagatgctacggttctgtcactcactccccctatgtgttgtcagctcccagtgaccccctgaacatcgtgatcacaggagacccttcaagtagttggccttcacccactgaaccaagctccaaaaccggtatccccagacacctgcatgttctgattgggacctcagttgtcatgatcctcttcaccatcttcttctttctcctgcatcgctggtgctccaacaaaaagaatgctgctgtaaaagaccaagagcctgcgggggacagaacagtgaacagggaggactctgaagaacaagaccctgaggaggtgacatacgcacagttggatcattgcgttctcacacagggaaaatccactcgcccttctcagaggcgcaagacacccccaacagataccagcgtgtacatggagcttccaaatgcagaatccagatcgaaagttgtctcctgcccatgagcaccaccgtcaggccttgaaggggtcttctagggagacaacagccctgtctcaaaaccggcttcacagttccaatgtaccagccgcaggaatctgaagctgtgagtctgcatcttagagcatcgctcttcctcacaccacgaatctgaacgtgcctctctctggcttacaaatgtctaaggtccccactgcctgctgcagagaaaacacactcctttgcttagcccacaattatccatttcacttgacccctgcccacctctccaacctactggcttacttcctagtcctactggaggctgcagtcacactgaggaactcacagttccaaacatacaagagg

SEQ ID NO: 38999 - DNA, 213 bp, Macaca Mulatta
gcagaaccccaggtaggacaccttgggccagaggccacactggcccccgggctgcccacggcacacacagggagagtcccctgaggagcaagggacagatcagggcggagccagtgtggggagcaccctgctggggcgatggcaagcagggccccacgggcgcgctggaccacagggacatgggacggcgtgggccgctcctgggtgctgttc

SEQ ID NO: 39000 - DNA, 498 bp, Macaca Mulatta
  misc_feature (1)...(498): n = A,T,C or G
caccagatatctctgattctcttgcccactgtgaagtctacatcctcagacttttccccgtaaagctaagctgctttatgaaccttgtatcctaaggctctctttcataagcccttggctccaggcaggatactcgtaccttacatgttgccatggtaatggttatcatttgagtgactgctttgtgctcagtactttgctggatgctgtaccccaccttgtctcgtttgtgaaccttacgagaactatgtgagataaggggagcttattatgtttgctgctaaatcatatactcttatacnacatctatttaactttcaggagcccttaggtttctccccctttaaacattaaagttaactcaccctgtgtatcagcaatattcatgaaagtaggcaagtgttttccctaaactaaaaagcccctatacangatacaacgatatatagcatactgggcttaaatagcgatttntgtagccctggaaaccatttattt

SEQ ID NO: 39001 - DNA, 624 bp, Macaca Mulatta
  misc_feature (1)...(624): n = A,T,C or G
ggggggagcggccaacatggcggaacgcaggagacacaagaagcggatccaggaagttggtgaaccatctaaagaagagaaggctgtggccaagtatcttcgattcaactgtccaacaaagtccaccaatatgatgggtcaccgggttgattattttattgcttcaaaagcagtggattgtcttttggattcaaagtgggcaaaggccaagaaaggagaggaagctttatttacaaccagggagtctgtggttgactactgtaacaggcttttaaagaagcagttttttcaccgggccctaaaagtaatgaaaatgaaatatgataaagacataaagaaagaaaaagataaaggaaaagttgaaagtggaaaagaagaggataaaaagagcaagaaagaaaatataaaggatgagaagannnnnnnnnnnnnnnnnnnnnnnnnnnnnggtgaaaaggaagaacccaaaaaggaagaaactccaggaactcctaaaaagaaggaaactaagaaaaaattcaaacttgagccacatgatgatcaagtttttctggatggaaatgaggtgtatgtatggatctatgacccagttcactttaaaacatttgtcatgcgattaattcn

SEQ ID NO: 39002 - DNA, 576 bp, Macaca Mulatta
tgagacatttttggaacaaggctaatccttagttacataggatatttaacagttgaagatagtgtcatggcatttttacccttttctagcaagtaatgctaagaaccactggcctgagctagtcttcagtataccttattacgattgcataggcttacctagaggaacagtttcaggttttgattctaatcagcgttgtgtcctaaagttgtcctttgtgcctttaaaaagtcttggctataccctgtagtttaaaattgcttattaaggaattcattttataattgcaatgggaaagtcatggtcaagtaacactaggtagactatcattcctgtttagcccagagaatttggggagagtgtagttaaaaatggtacccagaaaaatgttaaaatttttagtcaagactggaattaatagaattgtctacacttgtatggaagaagtaaccttaaagtgttcaagggattcagagaagggagtgtaccaaatagcaagcaacagggagaaaattaggtcagttaagaaattagatatgaatgagaaaaccgattcattgctcatccttcccatgc

SEQ ID NO: 39003 - DNA, 443 bp, Macaca Mulatta
tgaaaaggtggaaggagccaactgagacacagaaaacgggctaaggttctattcatggtgaggaagtcttttttttgtttgtttcttcaagctctaacaagggtgcctactgtatggcttttcagttagccccaaaataaaatgtaataatttgttttctattcttaggctttatctacaaagaaatgaattggataataatcataaacaaaaaacatggaaaatgtatcaaccacaatatgcagtagagacgtattttgatgagaaatgacttagttattttgtaactggtagctgattaggtatagttccccgcaccccttctgggaaagaattatgttctttccaaccctgccacatagttatatgttctaaatcttccttgctggtacatctatattggtatttgttacacatgttctttataaatctattaaatatat

SEQ ID NO: 39004 - DNA, 791 bp, Macaca Mulatta
  misc_feature (1)...(791): n = A,T,C or G
ggggccatgttccctgtgtgtctttgtcttttgtgtgttctttcattctccaccacccccggcacagaccccaacaagtggtgcagcgagcagggtcagcacgggtatctcagaagcatttcacaaaattgagaaagttttagatgttgtttacagagaccctccaaatctcaaatcactgagataaatttgaactgagcnnnnnnnnnnnnnnnnnnnnnnnnnnnnnnnacctacctcggcctccctnnnnnnnnnnnnnnngnnnnnnnnnnnnngcacctggccaaaagatattttgtttcttgtgataactcaacatccatccaacaaattgccatagttttttaaaattattgcttggataggttatggattactggaaagtataccacagagatgatgtgctgcttttcttccccagagcattgtactaagtggtatataatgttcatatgcattagtggtgatgttagtctcgatgctctgcctgaaaccagtgtcttttaaaatccctctgcctatagacattatttttctgtttgtaattaacaaaacccttggggagagatactttgaaaaccatacaaatgatcctgtttttgccttaaacttttcccccactcatttttaattgtccaattgaatggacccttgtttggatataaaatgcatacctttaaacgggttaanatgagcggaacttttaaaagtatccacaccattattccttttgaacaagatggcttccaattgggaaaattcccttgcgaaacaaaaagaaagacaat

SEQ ID NO: 39005 - DNA, 944 bp, Macaca Mulatta
  misc_feature (1)...(944): n = A,T,C or G
ggggatgcttgcccaacactctggtgtatgtgttgtggggaggccgtctcctgtcctgcttatgcctgactagctacccaccgtaacattttcccagtcaagagtccataaccccaaatctttggaagaaaatggatgaagaggaagaaactgtggttcagagaagttttgacctggaataaaggaatgttgctgaaaatataggctatgattcatacacatatgagactcgaagggaaaaatctgactcagaaaaactcaggaaagctaataagaaagaacaagtaagtaaacttgaaagaactggatccggatggactggtactctattctatttacttcaagaggatagagctctggctttcagtgttcctgaatccatttgagtattaagcagaatacttttgctcacaatagaagcttttacaaacccttgagggaataaggaagaaggaacccaaattcaaggaataaaaatgggtgcctgcctttccaaaatggaaaaatttttggaaacgccgagagagaaagtttttccaaaaaagcccgaaaaaagtgggaagtcgaaaattngccccggcatgtaatttcccccattgggcccccccataaaggggggaagtcttctacaaaaggaagagccatttataatatgagggatggatttctatcccctccaattggaaaatacccctattccgtggagattaatccaccccccccccggaagtggccccagtgaggaaccccaacaatttcctcgacaggtggcccagtctccaccatatggggcaggatctgctgggcgcagagaagaataaaatgaggtgaatatgaggggggtgacaagacaaggggtggtgaaataaacccccacatggcgctagttgctctctccaaactttagaaagggggtaattttaatttgatgagggncttctccc

SEQ ID NO: 39006 - DNA, 540 bp, Macaca Mulatta
  misc_feature (1)...(540): n = A,T,C or G
agctcccttctgctcgcggctccctggcgctctccctctctctccggtaggctcaccgagcgatgcgagctctgggagacagcgacgccgcctcccgctagagacctgccccccggcccggccccctgcccagccctgttctgcgcgcgggggtcggcgaaggcgccgcggacgcaccgacggctgaagagcggcgatgcacatgcactagcagcaccccctaactcactccctccacatcccgcgccgccgccgccgcctcctccacctcctcctcctccgccgncgnctcctcctcctccggcagccgcggcagcaggacccaccctgccccccaccccaccctccgtcggctccggctgcggctccagcctcgactattattttatttattttgggtcgtgcacaagcctcagtgcctgcagcccgcgcctcctcggcccgcgggcgcctcctccctcggctgcggagccccagaccccggccacactcggttcgacaaccccagacccccgccagctgccgcgagtctccgctgct

SEQ ID NO: 39007 - DNA, 558 bp, Macaca Mulatta
acatctcaataaaacataatagcaaaaaattactaaaaagcccccaataattcaccaatggaggatgataggtagccaagacattatttgaaaacccagtaaataaaagggaataatcaagcatttatcccgactttcctgtgtgaacttcactaatgggttactaaatagtaaattcctcttataaaattatctcatttcatgaactaaaatgaaaggtagaatgtcatcacctttcaccccctactagagtagcagatgtaggtacatagtgtatggttctgttgatctgagctgtaagaatagggtgactctagaactctgcagagtgctaagcttagggtggggcgggacgtgagaggacattctggagtcggggagcctgtgcctcggtctgggtgccgactgtgtggctgtgcacatgtgtaaacatgttgagctctatttactgagtgtatattataggcccaaaaatgcataaataaaaataatatcattcaaatataagctctacaagacgtatttatttataccctttcttattccaacacaggatgt

SEQ ID NO: 39008 - DNA, 643 bp, Macaca Mulatta
  misc_feature (1)...(643): n = A,T,C or G
gcacctgaagctatgaaagaagttgttcctgaaatgaaaatgtttgaggatgtacctgaagagccagaaactccacatatgaaaannnnnnnnnnnnnnnnnnnnnnnnnnnnnnnnnnnnnnnnnnnnnnnnnnnnnnnnnnnnnnnnnnnnnnnnnnnnnnnnnnnnnnnnnnnnnnnnnnnnnnnnnnnnnnnnnnnnnnnnnnnnnnnnnnnnnnnnnnnnnnnnnnnnnnnnnnnnnnnnnnnnnnnnnnnnnnnnnnnnnnnnnnnnnnnnnnnnnnnnnnnnnnnnnnnnnnnnnnnnnnnnnnnnnnnnnnnnnnnnnnnnnnnnnnnnnnnnnnnnnnnnnnnnnnnnnnnnnnnnnnnnnnnnnnnnnnnnnnnnnnnnnnnnnnnnnnnnnnnnnnnnnnnnnnnnnnnnnnnnnnnnnnnnnnnnnnnnnnnnnnnnnnnnnnnnnnnnnnnnnnnnnnnnnnnnnnnnnnnnnnnnnnnnnnnnnnnnnnnnnnnnnnnnnnnnnnnnnnnnnnnnnnnnnnnnnnnnnnnnnnnnnnnnnnnnnnnnnnnnnnnnnnaagtgcctgaggctcccaaagaagttgttcctgaaaagaaagtgccagtggctcctcctaaaaagcctgaag

SEQ ID NO: 39009 - DNA, 731 bp, Macaca Mulatta
agcctcttcttggttttaatccatcatgttctggagcccatctatgccaaaccactgcgctcctactgaccactcttcgcgaaaacgaaaacctgttctctccttcattgtgatgacatcgatgagcagaaagacactattcagagccttgacagccctcctgccgtaagacgggaggagtgtccgtccatcacgaagacaaatctcctgagtcctggcttccagaaacaggattgccaaattgtccctgtggggctagattcttaccagcttaagaaggatattgctatcttcttagtacccggaccttaggatttccaactgttttgaaagggaaatagtaacagtgatctgcttagagtggattttcactcaagtccttagtgagtggattttggggaaaggagcacatgggcttctggttctttttgataatatataaaattcttcattatgaagttgcggtcgtttgcaaaggagaggcattcaaattcgaaaggttattttaatgtgataatttggaagacttactcaaatgttggtcattgaccactctgtgcatgtatttctgcagagctctataaaggcaatgagtgtcacttccctctgctctaataaagcaataaataatagctaaagggctgactttcacggtgaacacttgaccatggctttttgaatcaagtatctttaggtttccttgggattagagaaaaggtatggaaatattg

SEQ ID NO: 39010 - DNA, 439 bp, Macaca Mulatta
aggaagctgtgtcatctcagaggctttctgaggcctgtgccaaagtcagaacccaggtgtttaatattctgccctggatactttcttttacagccatctgccaaatcagtgctaaccctggcccacccaagaaacttccaagttgaggtatgtttagggcggcacacaacagcccttgtgccagaactaaagtgacccttatcgttgggtttccgaaagtcagaagctgaacattgtcttgtgtgtttagatggttgatttggagaaaatgattgtttagcatctttacagatggagaggacagattcagtctcattaggataattccaatcgtcttccttttacaggtgggtaaagtagattaggacaagatcacacattctatcggtgtctgtggctgcatattttgcaaaaccagaaacaaaatcacagactgcct

SEQ ID NO: 39011 - DNA, 334 bp, Macaca Mulatta
gaattgactctggaaggcatcaagcaattttttgtggcagtggagagggaagagtggaaatttgacactctgtgtgacctctacgacacactgaccatcactcaggcggtcatcttctgcaacaccaaaagaaaggtggactggctgacagaaaaaatgagagaagccaacttcactgtgtcctcaatgcacggagacatgccccagaaagagcgggagtccatcatgaaggagttccggtcgggcgccaggcgagtgcttatttctacagacgtctgggccagggggttggatgtccctcatgtgtccctcatcatcaactgtgatctcccca

SEQ ID NO: 39012 - DNA, 649 bp, Macaca Mulatta
  misc_feature (1)...(649): n = A,T,C or G
gggaagactgggatgacagccatagtgactgcttagagcaagctgctctctcattcttgggcctcctgggcacatcttcctcttggcatctctaagagttgttaagtggcaggccacttacatacagtggggggctcagtctctaagttcaacccccgtgctctacatggctcctggcagatggccagcattcacgcactcttcctgagcaaataagcaaataaatatggtcacagattccgagaaagaccactgatgacttcttcacctcgacgatcccccccaggggaaggagatggtaggaaaagctggtgagtcacttataaaacgtctcatttctaagacactgaacagccactagggacgggaaacgcaccgatccgaagattaactgagggctccttcttgcaggctttttttgggaccttctccactgaagggtgaaataaaccaagcccaaaaacattttcccttttaacttttggaaaaatggcccaaatgaacccccaaatttggataagaaaaatctggatggtggcccaaaaaaaacggagagaaaaacccaaaaaacatggttttgttgagcccctaatgtctccccaaacccaaaaaattggaatccccannnnnnnnnnnnnnnnnnccaaag

SEQ ID NO: 39013 - DNA, 904 bp, Macaca Mulatta
ggataccacatctctgggatagtgtcagtgggaggaaatcacaaatgatctgagacaaacaagaatgaaaaagcagaaaactgtagaaaagcatattttttgaaattatgtaggcaggtaatgtgggaagcatgtcaaagaaagcagaaggcaaatgacaaaagtgtcatataacacactacagaggaatgagagcagcacaaacaattgtcttcagttctttcaatggcaaagcacatggctttatgtgaaaggcatgaggatagcaacagctaaccgttctatattccttactttgtgtcacgcatggttttaagtgcattacatatattcattcatttaaccccagaaccaatgaggcaataaccaggttagaaaaaaaacgactggaatagagaatgcaaataatttgcacagaaatccacggtttaaagtggctttttcctaaggcatcctttctctcccactccttagaaaggatcctatgatttaaaaattgcagccccacaaaaaaaaactggaattattttaacaaagaatttcctaaaaacaggtggaaagtcaacaaaccgggggaccaattctctatatcagagcggatggaaaaaaactggggagaattaacccctacttatctttttgaacaccgggggggacacatatacagccccccttaccaatcctaacccggtttaagcgcctgaataccctttgttccggcccaaccctccatcttaacccccccccccccttagagttcgggtccccccttgtcaaagccggtccttccattttgtaccacctccgctttttggtgtggccgcgagagcgcggcctctaactgggctgcgaacgccccctttcgcgcccatccccacactcgccacgggatacccgtcttccc

SEQ ID NO: 39014 - DNA, 564 bp, Macaca Mulatta
ttctattttttaataatttatttagtgaatagctcatgatctgaactttcaaaactgtttttgaaattcttatttgtgtttgcatgtttgattatgtcagccttcaacaaataactctgtttttcatgatagaaatcagaaacagctgacatatattactcagaaagaatactttctgtcacaaaagagagtagacatcaaaaatatggaagaaggactcatcacactccaggaacttcaacagtatgtttgttgcctttgaaattttttatctttactttctctgcatttattttttaataaatgatagcaataaatctatgttgatttctaacatactacagaaacggaagtttataactagctctctctgtttcacagtctggaagtcattctcatggactttttcattgaaaggatagacaggttctgaattctgtgggagctcctgggtcccaggaatggaccagttggggtgcagtgacaagaatgtgcctgaacattgtcacaacactgagtcccattgatgttcatttctgcattctaagtcattttaattttaat

SEQ ID NO: 39015 - DNA, 856 bp, Macaca Mulatta
  misc_feature (1)...(856): n = A,T,C or G
nnnnnnnnnnnnnnnnnnnnnnnnnnnnnnnnnnnnnnnnnnnnnnnngggtggatcacannnnnnnnnnnnnnnnnnnnnnnnnncgtcaacacnnnnnnnnnnnnnnnncnnnnnnnnnnnnnnnnnnnnnnnnnnnnnnnnnnacacannnnnnnnnnnnnnnnnnnnnnnnnnnnnnnnnnnnnnnnnnnnnnnnnnnnnnnnnnaaaggttannnnnnnnnnnnnnnannnnnnnnnnnnnnnnnnnnnnnnnnnnnnnnnnnnnntgnnnnnnnnnnnnnnnnnnnnnncaaagccaagtggcttataggccagagggtccccacaccaagttccttctaacaccaggccattctcagaagctatcttggtgctgcggtaccaggcaatgccttgacagttgttgacaatgaaggcaacaaagctgcagggaccgaagagcaagctctccatcctgaaagtacctcgggagggcagaggccagaccctgaacatggattggcatcatgctaggtctcaagtgcttaacctctttttcagcttttttctttgggtgattcctttggccctaggcaaataccaagccacaagacagacctttcaaccttttgacccctatgcccagacagaaatganaaactggtgttggggggcctccttggaagaatggggtttgggggggcgaaggaaataggtatttgtgaaaaanngatttctttccctgaagggggggttaaataatccaaaggggaaagggcccccggccaagggggggctctccacacctggcaagcnccgagacctttttggggagggccccaaaaccggggggcgaacaccaggggctccgc

SEQ ID NO: 39016 - DNA, 541 bp, Macaca Mulatta
  misc_feature (1)...(541): n = A,T,C or G
acacttcggaagcacagaggtgggagggttgcttgaggccaagagtatggcnnnnnnnnnnnnnnnnnngcgagnnnnnnnnnnnnnnnnnnnnnnnnnnnnnnnnnaatggtggtatagtagcctgcagtcagtccctgctacttgggaggctaaggtggaaagatcccttgagcccaggagttggtggctacaatgagctatgatcacaccacannnnnnnnnnnnnnnnnnnnnnncaagcagaagaaacacttgattctgttagcaaactgtggatctaatgtagtcaggtattccagtaattgtgccaatgtctttgagctgcaggtgaccttgaaaatagaaaccataaggttcagcaggttgaagttgggatgtactagatagggactgtgtcttgggcttttggggcttgggatggacgaaggcatgaagaaccactcttactgggctgaagggacctactgaatagacccgaatggaagtttggaccaaggggcctactaccattgagaggtctgatctctgcagaatgatt

SEQ ID NO: 39017 - DNA, 791 bp, Macaca Mulatta
  misc_feature (1)...(791): n = A,T,C or G
ggatgccccagttagatacatcaacatgattcaccactattatgacgatgcttcccacactatatcttatcatgcagctaaagctactaaatataaatcaccaccaaccaccccttacaaaaacccccacccttcagtctcacactgtccgctgtacaaataaaatgaacgaaaacttgtttacccctttctcagccttaataattctaaaccaacccgctacaatccccattnnnnnnnnnnnnnnnnnnnnnnnnnnnnnnnnnnnnnnnnnnnnnnnnnnnnnnnnnnnnnnnnnnnnnnnnnnnnnnnnnnnnnnnnnnnnnnnnnnnnnnnnnnnnnnnnnnnnnnnnnnnnnnnnnnnnnnnnnnnnnnnnnnnnnnnnnnnnnnnnnnnnnnnnnnnnnnnnnnnnnnnnnnnnnnnnnnnnnnnnnnnnnnnnnnnnnnnnnnnnnnnnnnnnnnnnnnnnnnnnnnnnnnnnnnnnnnnnnnnnnnnnnnnnnnnnnnnnnnnnnnnnnnnnnnnnnnnnnnnnnnnnnnnnnnnnnnnnnnnnnnnnnnnnnnnnnnnnnnnnnnntctaattcccaatgccagtaagcaatccagactattcagttctaccttattcaaccaaggggctttaggccgtacgaataaaccgctagactgccaatccgggcaattaggttaataccacctgaaccgggaaaacaatggtataaaagcacttataaaacctccaaccatctttatagagatctgtatggcctctgacactgatgggggaaggg

SEQ ID NO: 39018 - DNA, 770 bp, Macaca Mulatta
  misc_feature (1)...(770): n = A,T,C or G
ggcgtggtggcgggcnnnnnnnnnnnnnnnnnnnnnnnnnnnnnnnnnnnnnnnnnagcannnnnnnnnnnnnngnnnnnnnnnnnnnnnnnnnnntgnnnnnnnnnnnnnnnnnnnnnnnnnnnnnnnnnnnnntcatctcaacaaaataaataaaattgggccangcgcagntggctcaccccnnnnnnnnnnnnnnnnnnnnnnnnnnnnnnnaaacagggcagatcacaaaggtcagaaagatttgagacccatcctggcctaacatggtgaaaaccacattctcccttaaaaataccaaaaaatttagggcccgggcccggtgggctctcggccttgtaattcccacccactttttgggaaggcccaggggggggggggttccccaagggccccgggaaaaggggaaaaccctccccctggggctnnnnnnnnnnnnnnnnnnnnnnnnnnttttccnnnnnnnnnnnnnnnnnnnnnnnnnnngttttnnnnnnnnnnnnnnnnnnnnnnnnnnnnnncccccgtgcgaattcccccccctattattcctaggggaggtgcttaaagacccagcaaaaaaaggtgggctttaaaaccccccccagagggcgccgggaggtgttcaccatggggagacgcaagagatacacgtgaaccgggtggaaaagattcggggcccaggtggggggggggagaagcggacgaggagagactcaccccgcgtcctcgcggtaggcgtggcagcgaaacgcccaagcggggag

SEQ ID NO: 39019 - DNA, 800 bp, Macaca Mulatta
  misc_feature (1)...(800): n = A,T,C or G
ggggacagtattatctgtgggaaatataaagaagtataaaaccattgcccacaagtttacaatttgactggacaaataaaatatttcttaagacagtgaacatataaaaatttttttcatgtgttatatctattgaacagtgttccattgtatgattaaccatcacttattttatctatcctagtgatgaacacctagattattctgcattttaagaaacaaacttcaggatagtgtttttttttcccctggaagtgaaaaggagggaaagggatcgtagcagaggaaaaagctaagttacatgtttaaaaaaataagaaattttacagttatgggggaagaggcaatggcatcatggacatgaaataaattaacgttaatcatagtaacaattcagaggaggaggacaatattttcaggaatctttcatttnnnnnnnnnnnnnnnnnnnnnnnnnnnngagacagtgtcttgccctatcacccaagctggagtgcaatggcgtgttcttggctcttctctcttggcttacctctcgagttcaagcgattcttgtgtctcaacctccctgaataactggggactataaggggcctggccaccacgccctggnnnnnnnnnnnnnnnnnnnnnnnnnnnnnnnnnngggcaaggggttttttccccctttgaaccaggccttggggcccccgaaaactcccgggggccctccaggtggaaaactggcccctaaacccttnnnnnnnnnnnnnnnnnnnngggggccgtgggggagattattacaacggggggatattaat

SEQ ID NO: 39020 - DNA, 768 bp, Macaca Mulatta
  misc_feature (1)...(768): n = A,T,C or G
cttttgtgtttggctttgtcagggcaaaaaaaaaatatctttataaatctttggaaattagaagaagaaatttcaggtgggtttaagtcagagctagttccccaacagaaagatcatttgaaaccagtttttatcccttctctttccttccctttccctaaatcaaatcaatattaattgtgccttatttcacttaacatagacttgaattatttttagggaaagcccctataatgaattcagaagtcactacaagcagcattaagactgaagttggaatattctgttgaacgtaaaaccttgatatcattctgtgtatatagaatgtaaaaggaatattcagtgttaactgccatatatgtaatatacacaaactcaattagcattgtgatggccaaatgcattcccctgtgcttttcnnnnnnnnnnnnnnnnnnnnnntcaattcttatccccaacagctgcctaattttaggagtcttgaccctccacattctcactggtgtgggtgcatggggcttttgagtggatatctgtatgggtgtgtctgaaatgtgtttgtgagcgcccttggaaggaaccctttctccacaaacctgtaaataccaattcccttttttaaaaagccttgtccagaaacacaaaaaaacctttggtttggattttataaacaaaaacgtaacccccgcgnnnnnnnnnnnnnnnnnnaaaattgtcctttttttctgggnnnnnnnnnnnnnnnnnnnnnnnntcggaaacactttg

SEQ ID NO: 39021 - DNA, 337 bp, Macaca Mulatta
tgataaggcttgtaatctagatgtagctagtatcatagcagactatgccgcctcccttctaccctctggctggctcacccggcgtatgtccctgctctccgtggtgtccactgccagtgagactagtgagccggagctgggtcccccagccagcactgctgttgacaacatgagtgcaagttccagctctgttgacagcgaccctgaaagcacggagcgagagctgctcaccaagctcccagggggcctgttcaacatgaaccagctgctagccaatgaaatcaaactactggtggactgactccactggtaattaaccaacaaaacccttgtaaaa

SEQ ID NO: 39022 - DNA, 668 bp, Macaca Mulatta
  misc_feature (1)...(668): n = A,T,C or G
tgacacattgctcatcagcgatgagctcttcaggcatcaggatgtagccacacggagccggtatgtgaggctggtggacagtgtgaaagagaatgcaggcaccgttaggatattctctagtcttcacgtttctggggaacagctcagccagttgactggggtagctgccattctccgcttccctgttcccgaactctctgaccaagaggatgattccagttctgaagaggattaatgattgaaacttaaaactgagacaatcttgtgtctcctaaactgttacagtacatttctcagcttccttgtgacagaaagctgcaagaatggcacttttgtattcatacagggatttcttatgtatttggctacactagatattttgtgattgccagaacatgtatttaaacaataaactaaaagnnnnnnnnnnnnnnnnnnnnnnnnnnnnnnnnnnnnnnnnnnnnnnnnnnnnnnnnnnnnnnnnnnnnnnnnnnnnnnnnnnnnnnnnnnnnnnnnnnnnnnnnnnnnnnnnnnnnnnnnnnnnnnnnnnnnnnnnnnnnnnnnnnnnnnnnnnnnnnnnnnnnnnnnnnnnnnnnnnnnnnnnnnnnnnnnnnnnnnnnnnnnnnnnnnnnnnnnnnnnnnnnnnnnnnnnnnnnnnnnnnnnnnnn

SEQ ID NO: 39023 - DNA, 652 bp, Macaca Mulatta
acttctcccgcagcgacgcggccggccggcgagactgtttgtgttgcgggggctggacttcaaggtgatttacgacgagatgctgctctcaatagggatgctcatgctgtcagccacacaagtctacaccatcttgaccgttcagctctttgcattcttaaacctactgcctgtagaagcagacattttagcatataactttgaaaatgcatctcagacatttgatgacctccctgcaagatttggttatagacttccagctgaaggtttaaagggtttattgattaactcaaaaccagagaatgcctgtgaacccatagtgcctccaccagtaaaagacaattcatctggcgctttcatcgtgctaattagaagacttgattgtaatttcgatataaaggttttaaatgcacagagagcaggatacaaggcagccatagttcacaatgttgattctgatgacctcattagcatgggatccaacgacattgaggtactaaagaacattgacattccatctgtctttataggtgaatcatcagctaattctctgcaagatgaattcacatatgacacaagggggccaccttatcttagttccagaattaagtcttcctttggaatactatcttatttccttccttatcatagt

SEQ ID NO: 39024 - DNA, 796 bp, Macaca Mulatta
  misc_feature (1)...(796): n = A,T,C or G
tacttgaaaaacttaggggaaatcgtactgataaaactttctaacttaattcggaaaatatataccagaaatgagaggggaaggaatactgattataggaaattattgcaaatatggaaattaggggtcataaaagtaaatttacgcagttatctcagcatggggtagtttcgtatgtttcatatacaattatgcatgncataaaagctntcagtcaaccatggattgcatatacaacagaaagattataatactttattttactgtaccttttctatgtttagatacataaatactttccattgtgttacaaatgcctacagtactcagtacaataatatgctgtacagatttctaggttaagagcaatagactattccatatagccttaggtgtgtagtaggcttataaaagttcactctatgatgttcgcacaatgaaaaaattacccaacaaccaatttctcagaacgtatccccattgttaagaggcgcacgactgtatttagtccaacaacctgctgaaatatgattctgtcatttttccagtcaactcctaagttgtaaataccgtacatctgccatcttaccaggcagtttcaaccataacaacagaagaatactcttggcaaatagatcccactctctgagggttgtgttggggctcagaaaatgctacccagaagtatgacactttggcatgctgagtacttcgaactaaaagagattggaaggcctcagcagcagcctcggaagcaaagtctccctctgatcttgtcttacccttctgtctcccc

SEQ ID NO: 39025 - DNA, 610 bp, Macaca Mulatta
  misc_feature (1)...(610): n = A,T,C or G
gcctggccttattgggttattttgaagtgtgcttttggacggcacatgtgggaattacatataaaatagcatgacctacattaatcagtggtagagaagggcaaaatcaaagttgcactgcatcaacaaacatagacataaaattatttctagcagttctcagtcttagtttcatacttgttcttacagactttagttcctattagatagctgataatagtttgttgtagaatatgttaactgggtagactgaccatcgttgtaaatgagtaacttaaatttgatctttatgacttacatgctttgctatatgcacnnnnnnnnnnnnnnnnnncttgtgtttttttatgctagaaaggaaaaggtaagttttgttacactaaaatgaaaaacttccagtgtcaaggaaaaatacaacatatatgactaaacataaatatatgtaatatcaaatttctataagccatggtcatagaaaaatgggcagaggacatgacaatgcaatttaatgcaaatggttactagtacaaatcaatgttattcattagtagtcaaataagcacaaagaaaaccagtaaaatctctttaaaattttttctttatgggatta

SEQ ID NO: 39026 - DNA, 832 bp, Macaca Mulatta
  misc_feature (1)...(832): n = A,T,C or G
tcccagttcttggcaattttccaaatgaacagccacccttctagtcaatagtcatgtcattttggccatgggagatatcaggtccctgctgcttagcaggactggaaaagagggacaaacctgagaatgagtagaataaaccatcctaacaccaggacggtttctcccttctagccacaatacaattacccgttcttcatagcagtcttcacacagaggtcctttaaccacgttagaagagagcctccttctccttcctgctgattctggtttctcacacaggctttttccccttttgttttaaaagatgatgatgccccgccccacgatgcggccccaccattggatcttctacccccgattaaagggaaaaaaagtcccaagagccagaatggcctggatagccccaggacatcaggccgcagcagccccccatgtctcccgcacatgagagcgtccaggagggcactgccagcagctcaaggtaaccattcccagggtgcacagatgccccccactggctggtatgtggctcatttccagggccgtgtggctgctgtgatggaagttttctgaaaggcactccattgaaaaggggtaattgacacagtttctgatgatgtcagtgggattaatgttccccatgcatattcctaaagggtcagtacatgttttaagggtttgctgcaccgacatgcactgccacgctgttttgtgctttcttcactcctggcagcagcatttgatgacacagctccctgcgctcctgngggagacacactactggatttacaggcacactccaaactgagccataacccttgccccctga

SEQ ID NO: 39027 - DNA, 147 bp, Macaca Mulatta
gtttctaatagaaaaaactcaaccaaacattcagattctcctttacatattaactttatactagctaatttgttgtttaattagtcccatattaattggtaaagctgtaaagactttgattgctaaactcttctattttttcccctc

SEQ ID NO: 39028 - DNA, 761 bp, Macaca Mulatta
gttggtgcactaataagcagaattagagtaactatatatgatacggagatattttaatccatttattctggctcaagaacacgaataaagatgattttctgttactttagctcattcagagcatgatggacatgctctttttgatctataactggtcagcaagcttccagataatattttaggctatgggagctatacagtctctcttattactcatttctgctgttgaattgttgaaaacaggtatagataccatgtaaagaatgggcgtagctatgttccaggaaaactttatttacaaaagcagagggagggctggatttcgtccatgggtcatagttagtgactccgatcccaagtttattttgtgttagaccttctaacctttgatctgcgtcttttctctctgttttgatttatgtaattcatttttaaatcaaaatgatgtgcgtatgtatgactgtgtgtacctgtataacctaaagctatttattttgttatcttgaaagtagatacactcttcctggagtctgttcaggtttcaggacgattgactataatgaaagaggcagaatgggggtaagggaagatgggtatgctatccggcattatctttgccttgacatttaatgccataatttcagattctctatgtcacatgaacgtctgggtcttgtccaaatactatattctccaagtttcagggcaatgagccttttgaccaggatctgactggtggcgctaagaaaatgtccacatgg

SEQ ID NO: 39029 - DNA, 582 bp, Macaca Mulatta
gcggggcaggatggttctgtggtgcagtttaagattaagaggcatacaccacttagtaaactaatgaaagcctattgtgaacgacagggattgtcaatgaggcagatcagattccgattcgatgagcaaccaatcaatgaaacagacacacctgcacagttggaactggaggatgaagatacaattgatgtgttccaacagcagacgggaggtgtctactgaaaagggaacctgcttctttactccagaactctgttctttaaagaccaagattacattctcaattagaaaactgcaatttggttccaccacatcctgactactaccgtatagttttctctattctttcatttcccccttccccattcctttattgtacataaagtaactggtatatgtgcacaagcatattgcatttttttttaaactaaacagccaatgttatgttttgattgacatcaagtggagacgggatggggaaaaatactgattctgtgaaaataccccctttctccattagtggcatgctcattcagctcttatctttatattccagtaagttattttgctctcactgtttta

SEQ ID NO: 39030 - DNA, 692 bp, Macaca Mulatta
tggcatgcatagggtggtgttccagacatttgttttattggtggtgtttgggccttgaaacacatttctaatggaaggacatacggcaaagggtatttagatggtcccatgggatcacagaagcccatttgatttataatataataaaataacacaaaattgggtacataagggtttaaccaggctttcctgggttagactaagcctctaacagctctgttgctatcctattcttatgggaggaaaaaaatgttctatgggatgaaaagaaaatgcattgactttgtagtctttattctcctagctgcacttagggtatatccagaaggaagaggaaatgcaaagaggaagatgtaatagttcttcttctccagctaggtgcacttgaggttgttcataaatgtaaaattatgtcaggtttctaacatgggacactgcacacggttgtctgacctgatgaaccatcccatttgcaagtatagattattattatttcttgtggtatttggatgttttccatctcatttatgaacaactcaacctgatagtagattccaataaatgcctttcagggctcaggaatgaattgatgtcctagttaagaaatgagacttaataatggagactgaggcggtttgtattaaattatatgccatgaagtgttccatttagctttaaactaattatgactg

SEQ ID NO: 39031 - DNA, 785 bp, Macaca Mulatta
ggtgactcttggactcatcacaggtacatctggaaatacctggattttgtgtgatgagaaaagtcttcagatttttaatatcaattggtcgaaattagtaagtatgactacaggtggtgcttctgcaatagtgtttagaactgttggacccaagaaacaatgtgaagcagaaacactttccggggacctaaacttaaagctctttctgctaaaagcttagaaatgaatcagtcagatcaggaactagtaattaacatggtggtttgctccacaactgaatactttgcttggtgaattattgggtgcatgttatggaaatctgccctattacacggaggttgattggcttagttgaagcatggtactcaagatactgaaaaaaatgacttggcatccaccacacccgcagagagtgaaataaaatatttggcttgtttggttgattttacaactcatctagacactgaataaaaacagcattgttcataaataccttcacaaatgtatggttgtacttgcttgttcctagcaaaattatgcctttgagaaactcatttgggcagagataaactggctgacttttctttgctgaaattggtttcccagaaattgaaagtgatggcctgaattacatttcccacagttgtgaaattgtctgttgaaattccagaaaaagttctctggacttattttgatgaaaatgtaactaatattggttcaattagccctttcctcaatgttttagagtatgaaagaaagaacttccatgggaaaatccgaaattt

SEQ ID NO: 39032 - DNA, 759 bp, Macaca Mulatta
  misc_feature (1)...(759): n = A,T,C or G
ggagagagtggcataccatatttaacatgttgaaggaaaaaaacttttaccttagaatagtgtatctggcaaaaatatccttcaaacatgaaggagatataaggactttcccagaaaaaatgaaagctaaggaatttcatcaacaccagacctgtcctacaggaaatgctaaagggagtacttcagtcaaaaagaaaaggtaattaatgagcaatatgaaattacctgaatatacaaaactcactcactggtaatagtaagtatacagaaaaacacggaatattgtaacactgtaactgtggtgtataaataactcttatcctaagtagaaaggctaaacaatgaaccaatcaaaaatagtaactacattaacttttcaagacataagcaatacaagaagatataaatagaaataagaaaaagttaaaaagcagagggatgaagttaaggcaaagagttcttattagagttattcttgtttgtttgtttatgcaaacagtggtaagttgttatcaggttaaaacaatgggttataagacagtatttgtaagcctcatggtaatcttanaccaaaaaacatacaatggacacacacaaaataaaaaccaccaacgtatacatatttgccagagaaagtcaccttcactaaaaataagacggggaaagaaagaaaccaggaagagaaagacccccagggccaccgaaagcaaataacaaaaagggggcagggagtaaagtccctctagcttgatcaataac

SEQ ID NO: 39033 - DNA, 3214 bp, Macaca Mulatta
  misc_feature (1)...(3214): n = A,T,C or G
tgcagatcggtgaggagacctcagtgtttatcactcagttgctgggaactgtaaactttgagaacatggatactttctacagaagagggatttcttattttggaacnnnnnnnnnnnnnnnnnnnnnnnnnnnnnnnnnnnnnnnnnnnnnnnnnnnnnnnnnnnnnnnnnnnnnnnnnnnnnnnnnnnnnnnnnnnnnnnnnnnnnnnnnnnnnnnnnnnnnnnnnnnnnnnnnnnnnnnnnnnnnnnnnnnnnnnnnnnnnnnnnnnnnnnnnnnnnnnnnnnnnnnnnnnnnnnnnnnnnnnnnnnnnnnnnnnnnnnnnnnnnnnnnnnnnnnnnnnnnnnnnnnnnnnnnnnnnnnnnnnnnnnnnnnnnnnnnnnnnnnnnnnnnnnnnnnnnnnnnnnnnnnnnnnnnnnnnnnnnnnnnnnnnnnnnnnnnnnnnnnnnnnnnnnnnnnnnnnnnnnnnnnnnnnnnnnnnnnnnnnnnnnnnnnnnnnnnnnnnnnnnnnnnnnnnnnnnnnnnnnnnnnnnnnnnnnnnnnnnnnnnnnnnnnnnnnnnnnnnnnnnnnnnnnnnnnnnnnnnnnnnnnnnnnnnnnnnnnnnnnnnnnnnnnnnnnnnnnnnnnnnnnnnnnnnnnnnnnnnnnnnnnnnnnnnnnnnnnnnnnnnnnnnnnnnnnnnnnnnnnnnnnnnnnnnnnnnnnnnnnnnnnnnnnnnnnnnnnnnnnnnnnnnnnnnnnnnnnnnnnnnnnnnnnnnnnnnnnnnnnnnnnnnnnnnnnnnnnnnnnnnnnnnnnnnnnnnnnnnnnnnnnnnnnnnnnnnnnnnnnnnnnnnnnnnnnnnnnnnnnnnnnnnnnnnnnnnnnnnnnnnnnnnnnnnnnnnnnnnnnnnnnnnnnnnnnnnnnnnnnnnnnnnnnnnnnnnnnnnnnnnnnnnnnnnnnnnnnnnnnnnnnnnnnnnnnnnnnnnnnnnnnnnnnnnnnnnnnnnnnnnnnnnnnnnnnnnnnnnnnnnnnnnnnnnnnnnnnnnnnnnnnnnnnnnnnnnnnnnnnnnnnnnnnnnnnnnnnnnnnnnnnnnnnnnnnnnnnnnnnnnnnnnnnnnnnnnnnnnnnnnnnnnnnnnnnnnnnnnnnnnnnnnnnnnnnnnnnnnnnnnnnnnnnnnnnnnnnnnnnnnnnnnnnnnnnnnnnnnnnnnnnnnnnnnnnnnnnnnnnnnnnnnnnnnnnnnnnnnnnnnnnnnnnnnnnnnnnnnnnnnnnnnnnnnnnnnnnnnnnnnnnnnnnnnnnnnnnnnnnnnnnnnnnnnnnnnnnnnnnnnnnnnnnnnnnnnnnnnnnnnnnnnnnnnnnnnnnnnnnnnnnnnnnnnnnnnnnnnnnnnnnnnnnnnnnnnnnnnnnnnnnnnnnnnnnnnnnnnnnnnnnnnnnnnnnnnnnnnnnnnnnnnnnnnnnnnnnnnnnnnnnnnnnnnnnnnnnnnnnnnnnnnnnnnnnnnnnnnnnnnnnnnnnnnnnnnnnnnnnnnnnnnnnnnnnnnnnnnnnnnnnnnnnnnnnnnnnnnnnnnnnnnnnnnnnnnnnnnnnnnnnnnnnnnnnnnnnnnnnnnnnnnnnnnnnnnnnnnnnnnnnnnnnnnnnnnnnnnnnnnnnnnnnnnnnnnnnnnnnnnnnnnnnnnnnnnnnnnnnnnnnnnnnnnnnnnnnnnnnnnnnnnnnnnnnnnnnnnnnnnnnnnnnnnnnnnnnnnnnnnnnnnnnnnnnnnnnnnnnnnnnnnnnnnnnnnnnnnnnnnnnnnnnnnnnnnnnnnnnnnnnnnnnnnnnnnnnnnnnnnnnnnnnnnnnnnnnnnnnnnnnnnnnnnnnnnnnnnnnnnnnnnnnnnnnnnnnnnnnnnnnnnnnnnnnnnnnnnnnnnnnnnnnnnnnnnnnnnnnnnnnnnnnnnnnnnnnnnnnnnnnnnnnnnnnnnnnnnnnnnnnnnnnnnnnnnnnnnnnnnnnnnnnnnnnnnnnnnnnnnnnnnnnnnnnnnnnnnnnnnnnnnnnnnnnnnnnnnnnnnnnnnnnnnnnnnnnnnnnnnnnnnnnnnnnnnnnnnnnnnnnnnnnnnnnnnnnnnnnnnnnnnnnnnnnnnnnnnnnnnnnnnnnnnnnnnnnnnnnnnnnnnnnnnnnnnnnnnnnnnnnnnnnnnnnnnnnnnnnnnnnnnnnnnnnnnnnnnnnnnnnnnnnnnnnnnnnnnnnnnnnnnnnnnnnnnnnnnnnnnnnnnnnnnnnnnnnnnnnnnnnnnnnnnnnnnnnnnnnnnnnnnnnnnnnnnnnnnnnnnnnnnnnnnnnnnnnnnnnnnnnnnnnnnnnnnnnnnnnnnnnnnnnnnnnnnnnnnnnnnnnnnnnnnnnnnnnnnnnnnnnnnnnnnnnnnnnnnnnnnnnnnnnnnnnnnnnnnnnnnnnnnnnnnnnnnnnnnnnnnnnnnnnnnnnnnnnnnnnnnnnnnnnnnnnnnnnnnnnnnnnnnnnnnnnnnnnnnnnnnnnnnnnnnnnnnnnnnnnnnnnnnnnnnnnnnnnnnnnnnnnnnnnnnnnnnnnnnnnnnnnnnnnnnnnnnnnnnnnnnnnnnnnnnnnnnnnnnnnnnnnnnnnnnnnnnnnnnnnnnnnnnnnnnnnnnnnnnnnnnnnnnnnnnnnnnnnnnnnnnnnnnnnnnnnnnnnnnnnnnnnnnnnnnnnnnnnnnnnnnnnnnnnnnnnnnnnnnnnnnnnnnnnnnnnnnnnnnnnnnnnnnnnnnnnnnnnnnnnnnnnnnnnnnnnnnnnnnnnnnnnnnnnnnnnnnnnnnnnnnnnnnnnnnnnnnnnnnnnnnnnnnnnnnnnnnnnnnnnnnnnnnnnnnnnnnnnnnnnnnnnnnnnnnnnnnnnnnnnnnnnnnnnnnnnnnnnnnnnnnnnnnnnnnnnnnnnnnnnnnnnnnnnnnnnnnnnnnnnnnnnnnnnnnnnnnnnnnnnnnnnnnnnnnnnnnnnnnnnnnnnnnnnnnnnnnnnnnnnnnnnnnnnnnnnnnnnnnnnnnnnnnnnnnnnnnnnnnnnnnnnnnnnnnnnnnnnnnnnnnnnnnnnnnnnnnnnnnnnnnnnnnnnactggaattcacaataaatcccagtattgtggttacagatgtaaaaatgctatcaggatttactccagccatgtcatccattgaagaggtaaataatagaagcctaatctgtcagcacaaagacagctacatagagtataa

SEQ ID NO: 39034 - DNA, 1318 bp, Macaca Mulatta
  misc_feature (1)...(1318): n = A,T,C or G
tggcgccgcgagggtgagacttccggaggttgtgagtcgctggtccctttccctttgagtcctccctcgcacctctgtcccagagcttgacctagagcctccattctgtagcgttagggacatcgcgcctccctggtccaaagcgggcttccgcggacccgcccaccctgggtccctgaaggtttcaaggtgcgtggctcaaatagccgcagatccttggctgggccacttctaggatggctcaggtacgaatctgttggtctccacgccccaacttcccctcccaaatagtgacagggtgagatctttgagatgtctgtcagctgcgagttacctcttaacttttactcctgaagccgaagagtcgagtttcgcggtgattcctgggaaacgagggaagcctcctccacatccaccccgtaccctcattatcagcaaccagaagtgcccctgggtggccggtcccattagttgcggcgtctggtttccccagttagacaccaacccataggagcagagagggagctgccttcctgcccatcccacttttactgtagatggtgtttcgaggtaaacggttgtcctccaccccgctggaaatcctgttctttctgaacgcgtggtataatgctacctatttcttgctggaacttttcatatttctgtataaaggtgttctgctaccatatccaacagctaacctagtactggatgtggtgatgctcctcctttatcttggaattgaagtaattcgcctgttttttggtacaaagggaaacctcttgccaacgaaagatgccactcagtattagcgtggccttgaccttcccatctgccatgatggcctcctattacctgctgctgcagacctatgtactccgcctggaagccatcatgaacggcatcttgctcttcttctgtggctcagagcttttacttgacgtgctcaccttggctgctttctccagtatggacagaatttgaagtacagaatttcagccagcagcccatcaggctgacaccacacatattgcttctggtactttagccacaccagtgagaattggtggggcaagttatcctgagaaaggctgtgtggcttttcttcagcacatacatttgggcaagcaactcaacataaggccagtgggtgccatcttctaaaccaggaccatcaacccgagagactgttctacactccancatagggacgggcaaggttattcccatcctgccccttctcaaaccagtcccctgctgaccttaagttctcctctttgatcacgtggccagagcatctcgtgttggaccatctagg

SEQ ID NO: 39035 - DNA, 621 bp, Macaca Mulatta
  misc_feature (1)...(621): n = A,T,C or G
tcagagtctagcaggaggaatgttggggtcaaaggtgctaaaatcaaagaactttgagagaacactcaaacaaccatcaaacctttctaggaatgctgttctcatcccactgacagagttgttcttattggaggaaaaccgaatagggttgtagagtgcataaaggtcatccttgatcttatatctgagtctcccatcaaaggacctgtacagccttatgatcccaatttttacaatgaaacctatgattatggtggttttgcaatgatgtttgatgaccaccctggatgcccagtgggatttccgatgtggggaagaggtggttttgacagaatgcctcctggtcggggtgggcgtcccatgcctccatctagaagagatatgagccctcgtcgaggatcacctcctcctcctcctggatgagatggccggggtggtagcagagcttggaatcttcctcttcctccaccaccaccacctagagtggggagacctaatggcctgtgacagaagagggagacctaaagactgttacgatggcatggttggtttcannnnnnnnnnnnnnatggtgatcttggtggacctattattactatacaagtaaatgttcccaaagat

SEQ ID NO: 39036 - DNA, 260 bp, Macaca Mulatta
caggtgcggtggctcacgcctgtaattccagcactttgggaggccaaggtgggcagatcacgaggtcaggagatcgagaccatctggctaacatggtgaaaccccatctctactaaaaatacaaaaattagctacacatagtggtgcacgcctgcaatctcagctacttgggaggctgaggcaggagaatcgcttgaacctgggaggtggaggttgcagtgagctgagattgcaccactgcactccagcctggcgacaga

SEQ ID NO: 39037 - DNA, 1021 bp, Macaca Mulatta
tttttgggaaaatgggctctcaagctaagctataggctggcagattcagaagtttcaggggtctgtttctatacatttgcctatgttaaaggggtaaaagggctctcttcattagacatgtggaagatgaagcaaccccttcctttagaactgtgcctgcatggcactcttttcaccctggtacacctccttatagtgggtatagtgatttttaaccctaaaacaaaacaaacaacctcaccatgagctttaggaccagatgaggaatgacaagtgaagcgatgaagcaagccatcttcacagagtataaaagacatcggagagttggtagataactgtgaagatagttctcttaaaactattctgtgatacagtcatgtggaaagggatgtttggctgtgattgttttctcagttaatgggtaactgaatttctttacccctcaaaaaacaaaatatttggaaaagaaagtggggatggttagtttcagaacaagttacagctgtaaacaaaagcagttagcatttgggatggcatgccaaaacctgtatagatgtccttgtatcacatcacttctcaagtattccttcattgggcttcatccttttagctgggctcttggtggtgggatagagacttagggagggtagagggagagtgttggaaataggtgcttcctttggctggcaaatgtctacatcttggaaacaaacagatgtacctaatgagcttctccattcactttgtgtaaattagatttgtatgtgtaccatcttggtcctctcccctcccccattttgttaaaatatcaggatagcactcccaggccactttggtctcagtgtaagatccctattaactatctgaaaggaaaatagagccaagacctctggtctcaaatatataggaattgcctttctttagtcttcaggactattgtgtgaaaacaagtaggggtctaatctcctagaaagtaggggcttttatcctttaagagatatgtcccccgattatagcactt

SEQ ID NO: 39038 - DNA, 580 bp, Macaca Mulatta
aaaagaaaccctttgtgagcagacgagtaagaataggaggagagaacatgccacagaggtaggcggagcacagattgcagacagcatagaaataattttgggcttttcccgttaacttcctctagcttctaggataaattttttttaacttgcgactttgagttaattttagacttagagaagagttgcaaaaatagtagagagagttcctgtacagccttcacccaggttcctctactgctaacatcttacataatcatagtataattattcaacctgagaaattagcattgggtacagtcctattaatgaaaccccaggctttattcagatttcaccaggttttcaacaacatcctttatctgtttcagaatccaattcagaattccatgttgaatttagttgtcatgttttccttagtctccctcaatttccacacaccgaacatgagattttaccctttactagttcagtatgggccaacaataaggataataaacaagttatcacaccaaaaaaatttaaacaattctctatattgtctacttcctagtccttgttgttcttaaggtatcattta

SEQ ID NO: 39039 - DNA, 788 bp, Macaca Mulatta
gggataatattttgaaccaaatgttaatgcttgatgcagaattgtaaagcagcatctggttcctatataaccttaaggattaattttagtgatcctcaaggaattaaatagggaatttcagaaatgtagactgcaaatgcagtatacaggaaaaggtggagtgggttttgtttatgagggtgtctgaaaactaaaattgagcgggatatcatggtatagttggacagtattggtccttcacgctttggccatattgtgtaatggagcttttaccaaagatgtatgagaagtgtaagactataaaaaaaatgaactattcaaagtaaaactcttgacagacgttttacttaaagcagatgcaaaagggtattctcatgtaggctcctgttggtgcagagggatttttgatttcaagatgcaactaaagtacgaagttctcagtttcactttagtagaaatagctctagaaatgaggctgataaacacatctaagaatactggttgctttctaaaattcccaaagctccatcataaatgtaattcttagtgttttaaatgattgcattttaaggtatataaatatgggttatccaatatcaatgctatagtaacatcctgaaacaaaacaagcacaaaggtataaatgcctaaactggaggaaacttgaaaccctcatgttaaatcttaaatgtagtatttctaaactgtgaagacagattggtaggcagccatttttttttgtgtcttaaaataactggggggcataggttaaaattttataacatcaa

SEQ ID NO: 39040 - DNA, 510 bp, Macaca Mulatta
ccccatgtctcacaggtaggtagaggcagagctggaactagaaatctgttgactctagctcagtgtcttttctgtataactggagaaattgtcttagtttgagagatggctgacataatgaacataaaatgctatttataataacaagtatatgtgacatttcctattgtaagactactgccggctcactgttgaataggttggttatagtgtttaggctagacatgcttcccacattggtaataaataacattacaaaatacaatgtatttttaggtaggcattttataaaatgcattatgccatggttgcttttgagatagattgtagtctgggtagcatctttaaaatgtatgtgggcttaactgttgttcatatcaggagatgctctgattgtatagatgaaactgtttctgttatttttattgctgtatgaaatgtgatcagattattttactaccaacagttataagtttgaaactgtattagttgactgataatatgataata

SEQ ID NO: 39041 - DNA, 193 bp, Macaca Mulatta
ctcctatctgaagatgcctccacttagtcctctagcctgacccacattctacttgtgggcacgtgtcattgcattgtcattattgtttgcagagtggtctcctgaactcacccctgagcagggcacagaactttcctttctcatgttggtgatccagctcctcctggagcatgtggcggctaaaaactgtttg

SEQ ID NO: 39042 - DNA, 1283 bp, Macaca Mulatta
  misc_feature (1)...(1283): n = A,T,C or G
cttaaaagtaacactgttattttaacagggggtttctgaaaacgtaacagacacatcaccagcagtcactaacatttattgaattctaggcacagtaactagcatgtgcaacacataacaaattttagtgtctattaaaattcacataatgaatatacatgtgctactataaacatgggaaatacagcagtgaacagagcagacaaacagcctggcttgtggtacctgtgttctagtgaaagaggcagacaatacacaggtcaagaaataagtaaaacatagagcacgttagataagtgctaaagaggaaaacaagtaagagtctcannnnnnnnnnnnnnnnnnnnnnnnnnnnnnnnnnnnnnnnnnnnnnnnnnnnnnnnnnnnnnnnnnnnnnnnnnnnnnnnnnnnnnggagaaaattccagaggcttgtgtgtatcattgtttgttgatcatcaagggagtacagggcatgaggccttgaggtctgggaggacctcttaggtcaccatatgaggacactggccttaatgccctatgaggtggaagaagataaatgtactnnnnnnnnnnaaaaggaagcaagaccaggtaataacctaggtaagagatgaaggtggttagacctatggcagcaatagaagtggtgaggaaggtcagaggatcacttgagcccagtagttctaggctacagtgagctgtgagctatgatcatgccactgccctccaccctgggggatgaagtgagatctcatctcaaaaacaaaacaaaacccaacacatttgggctgagcactgggaggaacagaaatgccactggtgggcttgggaaccaggaggatgccaagtactctgtcaagtgcgttgtgcatatcatctcgttcaatcctcaaaaccgctttacagaaaccataattctcattttgtaggtaaggaaacaacgctactacaatagtcaagtaacttggccaaagtcacgcagtcagcagggatctaaatcaagaatgatcttccagtgtaagactgagtataaccacatgcttcaccaccacagccacgtcactgacaggctggtgggactgacaggatgtggtgacttctaaatcagatcatgagtaattagacagacatccatgatggtttgctgagaggaggaaaacagacaatccttgggcatgctgtanaagagaaggccaaaatgacaccacttaaaaatacacgtgtacacacattactcatttatgagcacatgcagaaaaatataaaaagttacatgaaccc

SEQ ID NO: 39043 - DNA, 90 bp, Macaca Mulatta
tggaggaacttccatcctcaatgtctccagcgcttcaacacacctcgaggctttctgcttcactactgcctcttggccgtcacacaaggt

SEQ ID NO: 39044 - DNA, 2112 bp, Macaca Mulatta
  misc_feature (1)...(2112): n = A,T,C or G
aggccagcccttcctcagctaataagcggaaaaacaaacccctttcagacatggagctgaactctagctcagaggactccaaagggagcaagcgtgtccgtactaattccatgggctcagccactggcccccttcctgggaccaaggtagaacccactgttctggacagaaactgtccctccccagtcctgattgactgtccccacccaaactgcaacaagaagtacaagcacatcaatggacttaagtaccaccaagctcatgcccatacagatgatgacagcaagccggaagcggatggggacagtgagtacggagaggaacctattctccatgcagatctcgggagctgcaatggtgcatctgtctcacaaaaaggttccttgtcccctgcccgctcagctacccccaaagttcgacttgtagagccccacagcccttctccctcaagcaaattcannnnnnnnnnnnnnnnnnnnnnnnnnnnnnnnnnnnnnnnnnnnnnnnnnnnnnnnnnnnnnnnnnnnnnnnnnnnnnnnnnnnnnnnnnnnnnnnnnnnnnnnnnnnnnnnnnnnnnnnnnnnnnnnnnnnnnnnnnnnnnnnnnnnnnnnnnnnnnnnnnnnnnnnnnnnnnnnnnnnnnnnnnnnnnnnnnnnnnnnnnnnnnnnnnnnnnnnnnnnnnnnnnnnnnnnnnnnnnnnnnnnnnnnnnnnnnnnnnnnnnnnnnnnnnnnnnnnnnnnnnnnnnnnnnnnnnnnnnnnnnnnnnnnnnnnnnnnnnnnnnnnnnnnnnnnnnnnnnnnnnnnnnnnnnnnnnnnnnnnnnnnnnnnnnnnnnnnnnnnnnnnnnnnnnnnnnnnnnnnnnnnnnnnnnnnnnnnnnnnnnnnnnnnnnnnnnnnnnnnnnnnnnnnnnnnnnnnnnnnnnnnnnnnnnnnnnnnnnnnnnnnnnnnnnnnnnnnnnnnnnnnnnnnnnnnnnnnnnnnnnnnnnnnnnnnnnnnnnnnnnnnnnnnnnnnnnnnnnnnnnnnnnnnnnnnnnnnnnnnnnnnnnnnnnnnnnnnnnnnnnnnnnnnnnnnnnnnnnnnnnnnnnnnnnnnnnnnnnnnnnnnnnnnnnnnnnnnnnnnnnnnnnnnnnnnnnnnnnnnnnnnnnnnnnnnnnnnnnnnnnnnnnnnnnnnnnnnnnnnnnnnnnnnnnnnnnnnnnnnnnnnnnnnnnnnnnnnnnnnnnnnnnnnnnnnnnnnnnnnnnnnnnnnnnnnnnnnnnnnnnnnnnnnnnnnnnnnnnnnnnnnnnnnnnnnnnnnnnnnnnnnnnnnnnnnnnnnnnnnnnnnnnnnnnnnnnnnnnnnnnnnnnnnnnnnnnnnnnnnnnnnnnnnnnnnnnnnnnnnnnnnnnnnnnnnnnnnnnnnnnnnnnnnnnnnnnnnnnnnnnnnnnnnnnnnnnnnnnnnnnnnnnnnnnnnnnnnnnnnnnnnnnnnnnnnnnnnnnnnnnnnnnnnnnnnnnnnnnnnnnnnnnnnnnnnnnnnnnnnnnnnnnnnnnnnnnnnnnnnnnnnnnnnnnnnnnnnnnnnnnnnnnnnnnnnnnnnnnnnnnnnntcggtcatccagcagcgtcccaacatgtatatgcagtccctgtactataaccagtatgcctatgtgccccgttatggctacagcgaccagagttaccacacccaccttatgagcactaacacggcttaccggcagcagtacgaagaacagcagaaacgccagagcttagaacagcagcagcggggagtggacaagaaggcagagatggtcctgaaggagcgtgaggcagcactcaaggaagagtggaagcaaaagccgtcaattccaccaactctcaccaaggcccccagcctgacagaccttgtgaagtcaggacctggcaaggccaaggagccaggggctgattcagccaaatcagtcatcattcccaagttagatgactcttcaaaactcccaggccaggcccctgaaggccttaaagtgaaactgagtgatgccagccacctaagcaaggaggcctctgaggccaagacaggcgctgagtgtggtcgacaggcagaggtggatccaatactctggtaccgacag

SEQ ID NO: 39045 - DNA, 187 bp, Macaca Mulatta
gatgtctgaattggtggaggtccctgatatagccaaaaaactttcctgggtagaaaattattggccagatgattcagtctttcccaagccgtttgttcagaaatattgcttaatgggagttcaagacagctatacagatttccacattgacttcggtggaacttcagtctggtaccatgtcctctgg

SEQ ID NO: 39046 - DNA, 269 bp, Macaca Mulatta
tgcccgagagaaaggctgaaggggatgctaaaggagataaggccaaggtgaaggatgaaccacagagaagatccgtacggttgtctgctaaacctgctcctccaaagccagagcccacgcctgaaaagacccctgcaaagaagggagagaaggtacccaaagggaaaaagggaaaagctgatgctggcaaggaggggaaaaaccctgcagaacatggagatgccaaaacagatggggcacagaaaactgaaattgatggagatgccaag

SEQ ID NO: 39047 - DNA, 838 bp, Macaca Mulatta
  misc_feature (1)...(838): n = A,T,C or G
ggnnnnnnnnnnnnnnnnnnnactttcggaagctgaggagggtnnnnnnnnnnnnnnnnnnnnnnnnnntnnnnnnnnnnnnnnnnnncnnnnnnnnnnnnnnnnnnnnnnnntaaagattagccagacgtggtggcannnnnnnnnnnnnnnnnnnnnnnnnnnnnnnnnnatggnnnnnnnnnnnnnnnnnnnnnnnnnnnnnnnnnnnnnnnnnnnnnntgcaccacggcactccagcaagactccatacccctaaaaagactccctctactttattatttctaaagtctctttcaatttagtatttcacaagtctattactaaattttaccaatcaaagtgtgtgacagtaaaacaaagagaaattcagagtagagcataattggaataccatcacactataagaatatggcttaattaagcattcatcctgggggaacacaagtataaaaagataagaggagagattttcacaaagaaaatttcttgtgaaacacaggagaccataaaagtcaatataaacaccatgaatcataagaatcaacctttcaatactatttgcagtttcttttgtagctgtcaagaatgcaatacagggccaggtgtggtggctcacgactataattccagcactttggaaggccgaaggcagtggaccactttgagttnnnnnnnnnnnnnnnnnnagannnnnnnnnnnnnnnnnntgtctctcccnnnnanannnnannnannnnnnnnnaaaacatgttcgcccgccttcggccctcggaaagctttctaaaccatttctttgggcgcgcggggccccatagggtaattgaacatgggtcta

SEQ ID NO: 39048 - DNA, 635 bp, Macaca Mulatta
  misc_feature (1)...(635): n = A,T,C or G
ggaggactccagaggcccaggcctgtggggcccagccctggagaggccccatgggctcagtgaagatgccaaccatgtccgttttntccagcagaactcaagtgagcgtcctcaagggcgtcccctggcattgggcccctatgtgagggggacagactggctctccccaccccaccagctcagctccagggactcatgccatcagtccctgcaggacaaaagccttgtcctcccccagcttggcctgactgggctatcctcaaggctgaggccgaggcccagcagcacaaggcggcttcaccagaacccagggcagcaagccactctgtgaggggcccagaggctcaagatgaggccagcctgtcacccagtgaggtcaggccttgtatatgaaaatgcctgtgctggaactctatgccacagcgcccgacagacctggacgttgggagcccatggttccccagctacaattttgaacagggctactgtgcccctgtcactcccaacatcttacctgggcagctctggaaccacaggccaggcctggtccagcaaaccccctgggaccctgacaccaggccctgcctgggcttaagacagagaggacgcaggtcgagagaccccccagcagcaag

SEQ ID NO: 39049 - DNA, 317 bp, Macaca Mulatta
gacatctgtgccttctgccacaaaacgtgtccccctaggagctgactgtggaggccatgaagaggccgtaccatgcccagtgcttcacgtggcacacctgcctccgccagctggctgggcagagcttctaccaggatgggtgacccctctgtgaactctgctaccaggacacgctggagaagtgcggcaagtgtggtgagatggtctgggagcacatcatcagggccctgggccaggccttccacccctcctgcttcatgtgtgtgacctgcacccggtgcatagaggatgagctttgccctgggcagccaaaacga

SEQ ID NO: 39050 - DNA, 118 bp, Macaca Mulatta
cacgacgagggacctgggtttacgataacgcgcttttgctgcccctgaagtgtgtttggtccaacgttgttccatattttattatggcttccagtaacactgtgttgatgcggttggt

SEQ ID NO: 39051 - DNA, 121 bp, Macaca Mulatta
cgaactgctacagaatgtgacgttcgtatgagcaagtctaaatcagacaatcagagcagtgacagagctgctttggaggccaaagtgaaggatattgtcacactggcaaaaactaaagacg

SEQ ID NO: 39052 - DNA, 644 bp, Macaca Mulatta
taggcccttagcaaggatacatgaagaactcttgcaccaagggtcaaaataagttgaagtcttctgaggatgtccttgtgcccataacctagatctgtgttagagtccctgtacctgctgcccggttcctataggccagggcactgatactacattcattccgtgtggaattctgagattggctgcccaggtcattaattatgggttcagggtcagggtcgtaagatctaaatccagtgactcagcaactcctaatgaccggttcctccaagtctggattctctacctctagtccttgagctatggctgggccccgtcttctgttttctcaaactgattaacatcttgctaatactaatcctctagctccaaacttggtctgcccttttggaccttggatgccctaccattcaaaatattagactttctatgtccagaacagattttctgcccctgaacttaagtggagatcagatgcctagaagattctcaaaattgccccctttttctattgattcctgttactatgacctttttctccatctctcactaacctacaacagtccctccagtctcttggcagtgctccttgaagggattaaatgaagtatataaaacatgcatttatcctaaacaaatagtgc

SEQ ID NO: 39053 - DNA, 461 bp, Macaca Mulatta
  misc_feature (1)...(461): n = A,T,C or G
tattctgaccaggtcatgaattcacaacaccacaaattcctgtttttcctataagcaggttgactctggtgtattatatattccttcaagttttcccccaactaaattgtgaatcattgactgataatgctgcccccagacccagaattctctatcagaaataaaaccctcaaataaaaatgtcaccaatgatttccaccgtgtagtgtctcatcctaatatccctatttatttctaaggaactgcatgaaagctattccgaattgtgtcatttcaaatgttgccgcaatccatggtgttgtgaaggcagttatttgggtggctctgctagctgcaattgaattttcttggtggtgaccaccccaccaccaagaaaaaattcagaaaagatctttgccatgtttcanagcatttggttggattctgctacagagttcaagttgtttcaaactgtgtgtgct

SEQ ID NO: 39054 - DNA, 617 bp, Macaca Mulatta
  misc_feature (1)...(617): n = A,T,C or G
gagtttcagttttacgacatgaaaaaagttctggaggtagatggtggtgaatggctacacaacaatgtgaatgtacttaatgccactgaaacgcacatttaaaaatggctaaaatggtaaattttatgttatatatattttactacaacttaaaaaatannnnnnnnnnnnnnnnnnnnncaagataaaaaataagagttatctcttcaaaagacacttcccaagattactctatgcaaagctctctctcctttcccctgccaggtaattctctggcacgtatcatggtatactttcttcacagaataccactatataaaattaccctgtttgtttattatctgtcctccaattacagagtatgatgtcttctaacactacccgcacaatatggtaataaatacacaataggaaggcactcaatatacatttggaggctaaatgaattaactggcttctaggtcaacccagatctactaaatgagaatcttgagattctcagacattgctttattggagagaaaacttgctatttatgacccaaacagcacctcccaatcccaacagntagttaggacaatttgacacaaatggcacttaaatagatattctctgtt

SEQ ID NO: 39055 - DNA, 120 bp, Macaca Mulatta
ggctttgacaaggcctatgttgtccttggccagtttctggtgctaaagaaagatgaaggtctcttccgggaatggctgaaggacacgtgtggcgccaacgccaagcagtcccgagactgc

SEQ ID NO: 39056 - DNA, 875 bp, Macaca Mulatta
  misc_feature (1)...(875): n = A,T,C or G
gggggctcttttcctttctccgccatcgtggtgtgttcttgcctccacttctcgccatgtcttctcacaagactttcaggattaagcgattcctggccaagaaacaaaagcaaaatcgtcccattccccagtggattcggatgaaaactggaaataaaataaggtacaactccaaaaggagacactggagaagaaccaagctgggtctataaggaattgcacatgagatggcacatatatttgtgctgtctgaaggtcacgatcacattaccgtatcaaactgaaaatgtcaccactctctggagagttcgacgtattttcctctctgaatctattatgaatgcgttggttggctgggttcagtaataaatatgtgaggcctttcatttcnnannnnnnnnnnnnnnnnnnnnnnnnnnnnnnnnnnnnnnnnnnnnnnnnnnnnnnnnnnnnnnnnnnnnnngtcnnnnnnnnnnttttgttggcccccttggcccttcgaaaaactttctaaaccatttcttttggggcccgggcccccttaggtgaaaggaaaatgggggcaaaactgtttccccagaaaatcccgggcacgacaaggggcttggaaatannnnnnnnnnnnnnnnnnnnnnnggggggggaaaccgaaagggttttaaaaaaatcccaaatgggggtttctcgagagggcttttatcgggtatttccttccaaacggggggttcccaaaggggaagccccaaaaatccaaatttccccccccgcccttggccaatttattggcaataaagggttggaaatttccttataaacattttccgccccaaaatgggaaaccccttcccacaaaggggctttgaaaaaaccctaaa

SEQ ID NO: 39057 - DNA, 756 bp, Macaca Mulatta
gggacaactgattgtgaaaccttaaatcccgcatacctcttcttatagtgaggagtatgcaaaatctggaaagatattctattttttttatataggtagataggatcgccatttatttcctatttagatatactgacattcatccatatgaaaatatgcaggtcattagcttactataatttgactatttacttttgacttaatggggcataaataaaactttcatagtacacatgaggtggatatttgatacacagaacatttgtggtgggctttctgtgggttagatgtaaagcccacatattttaatattcactattttaaatgagcaatgcatgaggggaatgcagtgtcagtacctggcctatttttaaactagtgtaatcaccctagtcataccattcagtatgtttgctttttaaaataagtaaccacaattaagttgttttagcccttgcacttcaagagatctagtctttactttcagttgtctgttaggtccattctgtttactagacggatgttaataaaaactatgtgagcctgaacgaattctcggccaaatttagtcttgtctctcatcttgattggattaattccaaattctaaaatgagtcagtccacaatagctctaggggatggaagaatttgccttactttattggtcactcagttcctaaggactgtgaattggcaaatccctaaactgtaagctctttcaggagcaagaagcgcatttctcggtcagaatttcta

SEQ ID NO: 39058 - DNA, 662 bp, Macaca Mulatta
ttttgctatccgtcagtatatgaaggaaaatgctcaaatatgattataattatcatagaacagaggtgactcacctgtcagacattgtacttcctataattgactttttaaattaagggtttaaaaaaaatacacatattcaagtcttcattacatgttttctttattgtctgatatatttggaagtagttctactgaggaagaatcaaagaaaatgctacaagtaagattgagaattctcacagaacaatgcattgataaatataaatgtaatagtgcttgaagaaaaggagaattgatttatcaactataggaacaaatatatgtgtgctggatgctatcactattcttggtcagttattccttccctattttctgagataaatttatttcatttcagaaatcattttagccgtagaaacaatacttttttttatggctttgcagaataaggactaatagtgatgctagttttgtaaaagagttgtgaccttaatggaattttttaatgctactcgatcaaaggtatatcaatacaactatttgaggcaattacatggtagtatgtattaaaacctgtgaatgttgggccaggccacagtggctcgtgcttgtaatcctagcacttagggaggctgaagcagaaagatcccttgagctca

SEQ ID NO: 39059 - DNA, 1019 bp, Macaca Mulatta
  misc_feature (1)...(1019): n = A,T,C or G
tcttnnnnnnnnnnnnnnnnnnnnnnnnnnncnnnnnnnnnnnnngtctttgtcttgtttgttttctctttcttttctatttgttctttgatcgcctccatgtgtcgagctgagcttgggcctggggagcagcgagngttgtatctcgccccgtgtgtgtctccctccatttgtgacctctgtgaccctgtttgtgcctgatccttgttgggacccaaatncgttcttttattttatcggccagttttatatactgccccgggttcgcgcccttgtcagatcccgtatgattcccctctttagggccaaaaattttggggttttccaagaccccaacaggtccccccggcgcttatttggnnnnnnnnnnnnnnnnnnnnnngtggttaaaaagtaagaccttttcccctgttaaaaaaccaatatannnnnnnnnnnnnnnnnnnnnnnnnnnnnnnnnnnnnnnnnnnnnnnccacgcaggccggagtgccgtggtgtgacctcagctcacttnnnnnnnnnnnnnnngannnnnnnnnnnnnnnccnnnnnnnnnnnnnnnggagactccgtctcaagaaaaaaaaaagattttaaaaaaccctacatgcccctagttgcctctgtaggagacggcatggttccagaaggtagactttgtgttgaggactctgcagcgtcaggctggagacagtctcccttcctagcagcgtgggcccctgagctgttcttctaccagaagggatggtggcgtctctgggaggtatctgtagactcagatctgtgtggattagtgacttgtgttactcacagatacttaattttatgggtaaatgaatacctggactggctgcaacttcagggcgagattcgggagtagggagtgaaaggtgacgacggaaccctgggcttgtcctgccatccccaggacccggtcggggtgccttctcgtctgaagtcccagcacgtggtcaggatacccttgcctctgaagcccccagaagtaatcggcgctcg

SEQ ID NO: 39060 - DNA, 327 bp, Macaca Mulatta
tccctttacacattatattaacatacatattgcaaggcattccattcacaaatattacagtgggataaaaacttcacatactcccaaagtctataccagattcagtcaactttactaaatcattcaaataataaaagtaatgaaaacattattatattttaaagcaatcaggtctgaggcactctgggaacagatgttctcttgtaacgctataaatgtgtcacgaggtatgaaattatattacacggatgcccagtaaatcaagtacactctaatgacaatgactttgtgatgtgatatgtcctcattggatacactcctacttgg

SEQ ID NO: 39061 - DNA, 507 bp, Macaca Mulatta
  misc_feature (1)...(507): n = A,T,C or G
agagtctcagacaaagagagagcaccatactggagaaaattgaccancctgaaggaacagctgcagccccttgcaagaggttaggaagcatcacggttgagcatatttgaaaataatacctagtgtttattgagtgctcctcatgtgagcatctttctgaatgctttccatattctaattttctcctttactcctcacgaacaacctgtaagttcaggacttctatcttcctcattttttcagatgaggaaactgagccacagaggtatatcgctaatacatgtagagcctggacttgagctcacgtgacctgtgttcagagctgccatcttaaactctatgccatgcttcctctccagagatcagtcgtaatgtctctgtaaataagtgcatatgagcagggaagcactagctggagtcctacatccctttcctttaacagagaatagagcccagagcttactccggctaacagaatttgcagctggaaagtcggtaataactagc

SEQ ID NO: 39062 - DNA, 695 bp, Macaca Mulatta
  misc_feature (1)...(695): n = A,T,C or G
gggccgggcatagtggtgggcacctcagccttctccnnnnnnnnnnnnnnnnnnnnngtgnnnnnnnnnnnnncgnnnnnnnnnnnnnnnnnnnnnngcnnnnnnnnnnnnnnnnnnnnnnnnnnnnnnnnnnnnnnnnnnnnnnnnnnnnnnnnnnngtaagcaagtaagtaagtaagtctggatattttagtcctggaaaggataccacatttgaagtcaaagacctgatctgaaattctgtcttcacggttacttgctatacctctgataaatgccctaacctccctcacccgtggttttctcaactatgtaatgggaaaatacttgtttctgcctgcctggggcttaacattttattggtaaagatcaaatggaaatgaattttctcccccgttgccccaacagttgtgtttggccctctgggcaattttgtcctcctgggccacctattccctccggtttggcaagtttgaaaaaaaagggggaacccttgggttttcccgggcccaaaccccttaaaaaatttcccaaaaggggctgggaaatttctggcccccaaaaagaatttttnnnnnnnnnnnnnnnnnnnnaccccccaaaattccccccannnnnnnnnnnnnnnnnnnnntccccnnnnnnnnnnnnnnnnnnnnnnnnnnnnnnnntnnnnnnnnnnnnnnccccccccc

SEQ ID NO: 39063 - DNA, 806 bp, Macaca Mulatta
  misc_feature (1)...(806): n = A,T,C or G
gggtttgcatcctgaaaaaacccttttccatggttgttcactgagtgggctctgagagtttggtattttgttaagggaggtgggggtaaatgagaaaaagctgtaatcttagtgttgaaccacttttatggttcaatataaatgttgcaaaattatatatggtcattgttaaaaatttaggagaaaatgcagaaaattacaaaggaaaaaaattctgtaatctaccactcacagataataagcaaaatgttaaaagatgacccttctagtctttttgccataccattttaaaacaaaaaggggataatactgtgcactatttagtaaccttttatcacttagcgccacatcatgcacgttttccgatgtctttanatggccttttcaaacataacttttcttccctatcaggtgatgtatcatgatttaattagtccttccttgttggacattgggatgattaagagtttgttcccttgattagctcacctggtggaaaaatccattagacgacctggaacagtgggacaggcatctatcttgaaaaatccatgctatttatatactcctcactctgttaataattggccctattaaccaattaaccaaagggcccaaactacccttctgaaattttatagcccccctccctttccttttggttcccccaaagggaaactcagtttaaaaaattgggaaaaccctttttatttttataaaaggggaacacttttaaagcccagagaaattctcttctcccgggggaaaattggggggggcacaccaaacccagggggtgttattta

SEQ ID NO: 39064 - DNA, 281 bp, Macaca Mulatta
aagccatcgtgttgaacttacttttgttaatacattttacttcctgatatttgtttatacttttggatatttggttgatgattctttacccaaaggaatcgtacttgtaaaatgagaggagatatataaattccaagtttcttttatcccacacttacttatgagtagcatattgatgataaattgttgttgttgttttcctttaaccaaggagtttgagaagagctgccagaccttcatgcacaggcctcctcacccaaatttagagttgtttgctgtct

SEQ ID NO: 39065 - DNA, 813 bp, Macaca Mulatta
  misc_feature (1)...(813): n = A,T,C or G
gggtctatgtatcttttgttgattgatttctagctaaattccattatggtaagaaaacataatatattatatatataaaatataaaatataatatatgtgatttgtgtgttttgaagtttattgagacttactgtgtagccttttacattagtagacctgaaaagactgctatctgtgttgtttttacagtattccacgtttattatttaggtcaagtttgttaattttctgttcaagttttccttatatctaatgattttatcagcttataatatcaattactgggagaaacttataaaaatttgcaaactgtgattgtggatttatctatttctttatcccccgatggattacatcctgggaaaccatcactcaccactggctttaaagggtccaatttcattaaaacttatctaaaaccttttgctccccggctttgaaacataaaagcccttttattgtagcttttcccaaaaacattttcatgttttcaacctccaaaagtcgagtaatttttttcaaaaagcctttgcgtttttaaggaaacgtatccctttcttagggacataaaatatcgggaaagattccggacaaggatggaaatgcgaaaaaaaaggaattttttcgtaaaaacaaaatatttaattatgggtaaaaannnnnnnnnnnnnnnnnnatttttcttaatacttttttttacaggttttggaaaaccattttccccccccaataataagaaatcaaagtaaaatatttagggaaaatccaagcccctttcctttcacgtcaaaaaagaacaataagaaaaaaat

SEQ ID NO: 39066 - DNA, 143 bp, Macaca Mulatta
caggtcctcctgcaggagcccaaccccggcatcgagtttgagttctggctccctcaggagcgctacagccccttccaggctcgggtgcaggccctgggctggcccctgcggcagccgcagccccgggaggtggagcctcagcc

SEQ ID NO: 39067 - DNA, 2065 bp, Macaca Mulatta
  misc_feature (1)...(2065): n = A,T,C or G
tgtcatcacctaggaggacgtacataaatacatataaatattaattaggagcaataagaaataaattaacgacgctctaattcccaccgggcttagccccagcttggctgtgcctcggtctatgtgcgcctcagtcccgcctcaagcactgggtgtcgtctccgctgtagtgttctgagttcaagttgcctcggaagtcccagtttgggatacgctctcgcgcaccaggtacgcctggtgtttctttgtggtttttcggattctttttggggagtgcggggagtcaaagtcagaaggcggctgggtgttgctggaggaaagtgctgaggtccaaagcgtagtccgagggctccgaagtcagattaaagggctcgaggaccgggggcacaggggtgggcgcctgggatgcggtgctgggggcgtcctccggagcctcgtgccgaattcggcacnnnnnnnnnnnnnnnnnnnnnnnnnnnnnnnctctggaaggttctcatgtcttccatttattttgtctctcaaattttaggaatcttctcctttaattaactcatcaacctctcatggcaagaatttgaaaaagtaaatttatactcaggttctaattgtaatagggaaggaagaagatacagctcagtgcaccatgaagttgagacagagatagagacatcccagccccacctccctggaacaggaaagataaatggggagggaacacaggtcagcgtggggaagagggtcatggtggacacgggggtggggtgttctccccacctcctcacattatgcctacaggaacacagacacattcaggtgcctttgcagaaagaaagtcagggttcttcaagtcacaaagagaaggcgtgaacaaatcttgcctctcagtcccacacaaggcagctgtctcacactttacaagccgtgagagacacatcagagccctgggcactgtcactgcttgcagcctgagagtagctccctccttttctatctgagctcttcctcctccacatcacagcagcgaccacagctccagtgaccacagctccaaggagaaccaggccagcaatgatgcccacgatggggatggtggactgggaagacggctcccatctcagggtgaggggctcgggcagaccctcatgctgcacatgacaggtgtatctctgctcctctccagaaggcaccaccacagccgcccacttctggaaggttccatctcctgcaggcctggtctccacgagctccgtgtcctgagtttggtcctccccatcccgctgccaggtcagtgtgatctccgcagggtagaagcccagggcccagcacctcagggtggcctcatggtcagagacggggtggtgggtcacatgtgtcttgggggggtccgcgcgctgcagcgtctccttcccgttctccaggtatctgcggagccactccaggcactcgccctccaggtaggttctgatctgctccgccacacccgccgcctcccacttccgctgggtgttctgagccgccatgtccgcggcggtccaggagcgcaggtcctcgttcagggcgatgtaatccctgccgtcgtaggcgaactgttcatacccgcggaggaggcgcccgtcgggccccaggtcgcagccgtacatcctctggaaggtgtgagacccggcctcgctctggttgtagtagcggagcaggttccgcaggttcactcggtaggtctgtgtctcggtcttcatgttccgtgtctcccggtcccaatactccggcccctcctgctccacccacggcgcccgcggctccatcctcggactctcggcgtcgctgtcgaaccgcacgaactgcgtgtcgtccacgtagcccacggcgatgaagcggggctgcccgcggccgggccgggacatggaggtgtagaaatacctcatggagtgcgagcccgcccgggtctgggtcagggccagggcccctgagagcaccaggaggagggttcggggcgccatgaccgccatccttggcgtctgcggagaatctgagtcctggtgggtgagtggggactttagaacccccc

SEQ ID NO: 39068 - DNA, 875 bp, Macaca Mulatta
  misc_feature (1)...(875): n = A,T,C or G
ggaacatcacgaatactgaatgaccagaagaatttggcacatactagatatgggatgtaaagatgaatctggccgggtgcagtggctcgtgcctgtaaccccagcattttgggaggccgaggcaagtnnnnnnnnnnnnnnnnnnnattttnnnnnnnnnnnnnnnnnnnnnnnnnnngctgtctcgactaaaattgcaaaagttagctggacgtggtggcgggctnnnnnnnnnnnnnnnnnnnnnnnnnnnaaggannnnnnnnnnnnnnnnnnnggannnnnnnnnnnnnnnnnnnnnnnnnnnacgccactgccctccagtttgggtggcatagcgagactccgtctcttaatattaaagtaannnnnnnnnnnnnnnnnnnnnttgtcgggccggcctcggcccttcgaagaagcttttcttagaccatttcgtttggccgcgcgaggccccattagggtaaagtgaaacatggtccataagcatggtttctctaaggaagatccctgggttcatgaaaataagttgccttggggaattcttccccccaaattaaaaaaaaccgccctcgggcgggacaaacccgaaagcgtttttctgaaacaaaattcccacaaatgggagatgttcctgaagaggttcgtttaacccgggcaatccttttcagacaccggaagtgtccaaaggccaaaagcctcccaataattcaatatttatcgtcccccgcggcccccgtggcaccatctcaaatccggcaaaaaaaccgggggtggaaaaattttcctgtataaaaacaatttttcctctcccaaaccagtgagtaaagagcctacacctacaaataacgaggggctgtggtattttaagaact

SEQ ID NO: 39069 - DNA, 1056 bp, Macaca Mulatta
  misc_feature (1)...(1056): n = A,T,C or G
cctgaacgaccgccgggtgccttacatggacagagtgaggagcctggagaccgagaaccggaggctggagagcaaaatccgggagcacttggagaagaagggaccccaggtcagagactggagccattacttcaagatcatcgaggacctgagggctcagnnnnnnnnnnnnnnnnnnnnnnnnnnnnnnnnnnnnnnnnnnnnnnnnnnnnnnnnnnnnnnnnnnnnnnnnnnnnnnnnnnnnnnnnnnnnnnnnnnnnnnnnnnnnnnnnnnnnnnnnnnnnnnnnnnnnnnnnnnnnnnnnnnnnnnnnnnnnnnnnnnnnnnnnnnnnnnnnnnnnnnnnnnnnnnnnnnnnnnnnnnnnnnnnnnnnnnnnnnnnnnnnnnnnnnnnnnnnnnnnnnnnnnnnnnnnnnnnnnnnnnnnnnnnnnnnnnnnnnnnnnnnnnnnnnnnnnnnnnnnnnnnnnnnnnnnnnnnnnnnnnnnnnnnnnnnnnnnnnnnnnnnnnnnnnnnnnnnnnnnnnnnnnnnnnnnnnnnnnnnnnnnnnnnnnnnnnnnnnnnnnnnnnnnnnnnnnnnnnnnnnnnnnnnnnnnnnnnnnnnnnnnnnnnnnnnnnnnnnnnnnnnnnnnnnnnnnnnnnnnnnnnnnnnnnnnnnnnnnnnnnnnnnnnnnnnnnnnnnnnnnnnnnnnnnnnnnnnnnnnnnnnnnnnnnnnnnnnnnnnnnnnnnnnnnnnnnnnnnnnnnnnnnnnnnnnnnnnnnnnnnnnnnnnnnnnnnnnnnnnnnnnnnnnnnnnnnnnnnnnnnnnnnnnnnnnnnnnnnnnnnnnnnnnnnnnnnnnnnnnnnnnnnnnnnnnnnnnnnnnnnnnnnnnnnnnnnnnnnnnnnnnnnnnnnnnnnnnnnnnnnnnnnnnnnnnnnnnnnnnnnnnnnnnnnnnnnnntcttggtgatgccttggacagcagcaactccatgcaaaccatccaaaagaccaccacccgccggatagtggatggcaaagtggtgtctgagaccaacgacaccaaagttctgaggcatta

SEQ ID NO: 39070 - DNA, 706 bp, Macaca Mulatta
tcatgtgcctcaagggggtaacatttagcgtagttccaagaaaaaggactggactccagtgaattcatggtccccaaacaagcatcccagccacaaataggcattgcagatctccccacccccaggatttctgatgaaaacaggacttgaaatcagcagctcctcaagggcttcatctgaactagaattctgaagccatgaaattgattctcagatgcccacaccaagggcaccaagagcatttaaaacccaaggctgtagatgagatactggtattttcctggggacataacctttaagttgtgtcacttttcacctcttacaatacctcccacccccaggctttcttagagccttgaattaattttgttttattcaatattaaattgagattttgattcctgcatgtatctcatcttcgaagtggaagagatagcaagaaactggcctggtatcaggaaacagtggtggaaaaaggtttctagcttttctcttgcatttgaaagtgcttacaataattagaaagccattgcacctgagcctctgggcagatgtctgcaattttaggagacatgcccattcaatagaaatttactaatttgtcccttagaagcaagtttgtgtgttacacatatgtaattattctgcacagcacctggcacaaagtctggcatttacctaataataacaacaataatcatataat

SEQ ID NO: 39071 - DNA, 297 bp, Macaca Mulatta
cccttgttagagtaagatgcacaccttactgggctgggttttcaccttttgaaatcatgtatgaaagggctccgcctatcttgcctaagctaaaggatacccatttagcagaaatctcacaagctaacttgttacagtacctgcagtctctccaacgggtacaagacatcatccagctgcttgtcaggggagcacaccccagcccagttcctgaccagactgggccctgccactccttccagctgggtgacctagtgtatgttaaaaagttccagaaaaaaggactgactcctgcct

SEQ ID NO: 39072 - DNA, 892 bp, Macaca Mulatta
  misc_feature (1)...(892): n = A,T,C or G
ggatggattcctgagcccaacccttaacttaatgattccatgtctggagacgcaacatagaaatctgtttttattaccaagcacctcaggcgattcttaagcatactgaaatttgaaagcttctggtctgaacctcttgtattcacctagggcttttgctaggtgggataccatgccgaaaaattgaattaattgtatgttcttaaaattgtttttcttctacttcactatcctcttccctcaaagtcacttttctaaaagaactctatgaaaaacttgtttgtatcgtacccagattgatatatttgtctgaactctgttacataaaaattggtatgattcnnnnnnnnnnnnnnnnnnnnnnnnnnnnnnnnnnnnnnnnnnnnnnnnnnnnnnnnnnnnnnnnnnnnnnnnnnnnnnnnntttgggccgccttgggcccttnnnnnnnnnnnnnnnnnnnnnnnnnnnnggcgccgcgggcccccaaaggggaaagggaaccttggcccctaacctggtttccctaaggaaaaacctgggccatggacctaagggcttggaattcccnnnnnnnnnnnnnnnnnnnnnnngggggaaaacccaaagcgtttcttagacaaaattcccaaaatgggaggtttctgggaggggcctttaactggggatccttttcccaacggggagattcccaagcgcggagcccgcaatatctaacattatccgccccgccccctctggcccattcactttggaaaaaaatgtgtggggaaattctcatttaaaggcgcttttctgccccacaactggggaaaacccttctccccaaaacgcgggggtagtagagaacccgtgaaaatcctgccaacggcgggataataaaaccaaccct

SEQ ID NO: 39073 - DNA, 733 bp, Macaca Mulatta
  misc_feature (1)...(733): n = A,T,C or G
gggggaattacaatttctagggagcattttcaggaaaatgttttggctttttcataattttatgtcttacagtatggaattataatacgaaaatctttatatgagttttggcttattggtatttgtacttattcaggggaaacagtctttcgattacttatgcctctaaagagtttaatttcttgagaaattcaacagtcccatcaccagcataattttatcttaaggaataactaacaggaaaagtcaacttaattatttaagaccctagtttctacgtataatatattcaatagtaatgaaaatctgccatggaattaactaataagtagtaacaataaacttcatatttagaatacaaagtctataaagaacaattttacatgatcttcaatatcaactccagtttaaaaggtgttatttttaaaacatttgaaaccaagtactgcttaatttcagtcagaagatgcaaataaatactttgatctatgtctgattttgctaataatatttgaaggagattgcctaccaaggacaaattaaacaatacatttaaaaatcaaacaacaaacgatttctccatacactcatagtcacatatggaattttgagaaaataaagcatgctgtctctagngaatttttatacttcctttttctttcctaaataatttgccttctagcctggcctcttgggcaatgaatgaaatttgtttacgtaatggcatttaatt

SEQ ID NO: 39074 - DNA, 561 bp, Macaca Mulatta
  misc_feature (1)...(561): n = A,T,C or G
aggctacagctggtgctggcagagatggtggccacggagcgggagtatgtccgggctctagagtacactatggagaactatttccccgagctggatcgccctgatgtgccccagggcctccgtggccagcgtgcccacctctttggcaatctggagaagctgcgggnnnnnnnnnnnnnnnnnnnnnnnnnnnnnnnnnnnnnnnnnnnnnnnnnnnnnnnnnnnnnnnnnnnnnnnnnnnnnnnnnnnnnnnnnnnnnnnnnnnnnnnnnnnnnnnnnnnnnnnnnnnnnnnnnnnnnnnnnnnnnnnnnnnnnnnnnnnnnnnnnnnnnnnnnnaggacaagcagcaagctctgggggaccacctggacctggcttcctacctgctaaagcccatccagcgcatgggcaagtatgcgctgctgctgcaggagctggcacgggcctgcgggggccccacgcaagagctcagtgcgctgagggaggcccaaagccttgtgcacttccagctgcggcacggaaacgacctgctggccatggatgccatccagggctgtgatg

SEQ ID NO: 39075 - DNA, 671 bp, Macaca Mulatta
  misc_feature (1)...(671): n = A,T,C or G
ctattgccccccgncaccaccaccgaccacaccccattactgctttctcccagactccgaatacgaaatggcttctctggctgactgcgaggctgtctccttaaggtactgagtgggccggggaggctgggagccggcggcaggattagctggtgctgaactttctctcataggacgtcgcttggatttcaaatccacagtcacctgctgccctttgcctcccgcgacgccccagctggtgccccagagaggcaggatcgcagcggtcagaatccatgtgctttcctattcacaggctgttctgactctcagagccaacagctggaccgtgtctcatccccggaacatgccgtctgtccccaccagggagcgggccttgatggctgggcctcgaaggccacaaacaagacgtcgaggaattggaaagatttgcacaccctccagaaaggagagacgcaatctcccctccctcccatcccgcacctgcgctggaacagcttcctctcactgaacggagacgcccccttggacgaactgcctaattgtttggttctgaggcctggtttgctcttaattaatatatgaactcctcagaccttaaaccttttcctaagctttctttactgcacctggagttctgactccctttgagttgtgtgttaccggggggg

SEQ ID NO: 39076 - DNA, 776 bp, Macaca Mulatta
  misc_feature (1)...(776): n = A,T,C or G
gggaattgttccttcaagtgtagttacgttgtaactaatggccttgggattaatgtcttcaaggacccagttgctgatcccaacaaaaggtccaaaaagggccgattatctttacacaggacgccagcagggaattttgttacactggaggaaggaaaaggagaccttgaggaatatggccatgatcttcttcatactgtcttcaagaatggcaaggtgacaaaaagctattcatttgatgaagtaagaaaaaatgcacagctgaatattgaactggaagcagcacctcattaggctttgttttatgactgggtgtnnnnnnnnnnnnnnnnnnnnnnnnatgtgcatgcacacacacatacacctgtgtgtatgtaatacataatgttcattgtacagatgtgtggggtttctttgtgttttatgatacattgcagccaaattatttgttggtttatggacatactgnnnnnnnnnnnnnnnnnngtgtttaggtgatatcaaaataggaaatgcacttaaccatgtaaaagatcagtgctaaagtaagctttttagggcctttttgccaataagtagtcactcaaatgtgggtaattgatctttttcacaaaataacatcaaactggaaaaaactttttatatattaaactggaatcaccctaaaaacaggattttgccatcacaaattaacccattggattgggccttttataggttttaaaaagctataacattgggtaattttttttgcgcaacccaaacatagtaatttt

SEQ ID NO: 39077 - DNA, 539 bp, Macaca Mulatta
  misc_feature (1)...(539): n = A,T,C or G
agagagacaacagatttacatcccagacacattcacactgggccaagagcagctgccattgcagattccagtcacgtcctttttttccctccttctccttcttggagttacnnnnnnnnnnnnnnnnnnnnnnnnnnagaaaggacatggatgaagcagggaggcacgtgcctgtctcgttcgcctaaaaatatgctgcatccaggaccatgccggcacaaagtaggagcccaaggaatatttattgaagaaatgaaaggtgacagaaggcagaaggagggagactccaagaagannnnnnnnnnnnnnnnnnnnnnnnnnnnnnnnnnnnnnnnnnnnnnnnnnnnnnnnnnnnnnnnnnnnnnnnnnnnnnnnnnnnnnnnnnnnnnnnnnnnnnnnnnnnnnnnnnnnnnnnnnnnnnnnnnnnnnnnnnnnnnnnnnnnnnnnnnnnnnnnnnnnnnnnnnnnnnnnnnactccatggagcagctggtcctcacatatcagccggagaggaaagactgacagtgggagtggctgg

SEQ ID NO: 39078 - DNA, 808 bp, Macaca Mulatta
  misc_feature (1)...(808): n = A,T,C or G
ggggagtgtgtattcggctgcctgcctgcctgcttgctctctggctgtgctcctgcttaaagaaatcagtccttcctttccgacttagtcctcgggaagaagtttcagcctacgaggtatcattggaacatttcaagatcatcaaatcaaattccacagggattggtgatctaccagaaggctcagacatctgattgctgacctgtccagacgtcatctggtctccctgaacctgaaatcacaccatggatgattttgaacgtcgcagagaacttagaaggcaaaagagggaggagatgcgactcgaagcagaaagaatcgcctaccagaggaatgatgatgatgaagaggaggcagcccgggaacggcgccgccgagcccgacaggaacggctgcggcagaagcaggaggaagaatccttgggacaggtgaccgaccaggtggaggtgaatgcccagaacagtgtgcctgacgaggaagccaagacaaccaccacaaacactcaagtggaaggggatgatgaggccgcgttccttggagcgcctggctcggcgagaggaaagacgccaaaacgcctttcagaggctctggagcgggcaaaagagtttcgaccccaacagtaacagatgcaagtctgtcgcttcccaagccnaaaaaaaagaagagaagagnnagnngaaacattgttcggcccggccttggcccctccaaaaagcttttcctaaaacaattcctttttggcgccgcggggccccgtaaggttaagtggaaaaatgggcccaaaacgtgttttccccagggaaaaatc

SEQ ID NO: 39079 - DNA, 769 bp, Macaca Mulatta
  misc_feature (1)...(769): n = A,T,C or G
ggacctgggcagactgttgtctctccccagatttataaaaacaaaaatgcattccattcctctgaaagcaaaacaacttcataattgagcgatattagatagagaggttttcggaagcagatctatgaatatgaaattcatgtgcatatttcattccccaggcagacttttttagaaatcaatatatgccccaaaattggaaagacttgttcttccagggtgactacagtacatgccgatgcgtgcggtttcagccctcatttaattcaatttacaagtagcacagcagcctctgtgggggaggataggnnnnnnnnnnnnnnnnnnggcttgtatttatctacaagactccatatagtcatatataggcatataaatctattttttcnnnnnnnnnnnnnnnnnncttttctttcaaaagtttgcattaacttttcaaagtagttcctataggggcattgaggagcttcctcatgctgggaaaactgagaaaacccatattctcctaatacaaccacccgtaatagcatttttgcctgcctcgaggcagagtttcccgtgagcaataaactcagcttttttgnnnnnnnnnnnnnnnnnnnnnnnnnnnnnnnnnnnnnnnnnnnnnnnnnnnnnnnnnnnnncggcccttcgaaaagcttttccagaaccatttctttttggggcgccgggcccccagttgaggtaaattgaaaacatgggtccataaccttgtttccctaagggaaaatccctggggcccatgaac

SEQ ID NO: 39080 - DNA, 617 bp, Macaca Mulatta
tttgagaaaaagcctaagaatttgcattgaacaggatatccagcccaaaagggacctcacctgctgtgttgactgttgaatggcccaaccacatctggttgcagtggcaaagggctgacctccacgagcagacgaaagtgcctcctgcgagtgaccgactcatccaggccttggaccgagaaacagctcctcactgcatcagctggaccatgtacagaccagagatagggcaagaaaaaagcagaggctgttggcctgccagagaagaaagctgccagcaaagagagcatctccgtgaagaccccagctgtcccatgagcagggttaaccccaacagcaccttgtggagaacaagaagcctcagctggcggtgactgcacgtgacactcgtcaagctggctgtctccctgtctgcgctgggtcctacagtgggggtcccttactgcattacccaggggaaggcaggacggagatgcctggtctgcaggaagagccctggaactgtcaccttcacacaggctcactgggaagacaaagcagctctggctaaggtgggggaagctatcaggaccgattacaatggcagggatgatgagatccacagtcgctggggaggc

SEQ ID NO: 39081 - DNA, 3325 bp, Macaca Mulatta
  misc_feature (1)...(3325): n = A,T,C or G
ccatccgttgtgggatcaggaacaactagaccattagctggtgaatcaggtacaactgaatcatcagttggagtgacagggacaaggccatcatcantcatcaagagaatcagcaacaactggaccatcagatgaaggatcaggaacaactggactatcacctggagtgacagtgacatctggacaatcagctagaaagactgggacaactggagcaccagctggagttacagaaacaacgagatcatctgttgtcaaatcagggacaactggaccatctgttacaggaacaaggacaactgtaacttcatctggagaatcaggtacaacaagatcatcaggtggagaaacagagacaactggccaatcagctgtaaaatcagggacagcagaatcatttactgggttgacaagaacatctaggcaatcagctggaatgactgggacatctgcacaatcagctgaagtggcactaacannnnnnnnnnnnnnnnnnnnnnnnnnnnnnnnnnnnnnnnnnnnnnnnnnnnnnnnnnnnnnnnnnnnnnnnnnnnnnnnnnnnnnnnnnnnnnnnnnnnnnnnnnnnnnnnnnnnnnnnnnnnnnnnnnnnnnnnnnnnnnnnnnnnnnnnnnnnnnnnnnnnnnnnnnnnnnnnnnnnnnnnnnnnnnnnnnnnnnnnnnnnnnnnnnnnnnnnnnnnnnnnnnnnnnnnnnnnnnnnnacaactggaccatcagatgaaggatcaggaacaactggactatcacctggagtgacagtgacatctggacaatcagctagaaagactgggacaactggannnnnnnnnnnnnnnnnnnnnnnnnnnnnnnnnnnnnnnnnnnnnnnnnnnnnnnnnnnnnnnnnnnnnnnnnnnnnnnnnnnnnnnnnnnnnnnnnnnnnnnnnncaggaacaactggactatcacctggagtgacagtgacatctggacaatcagctagaaagactgggacaactggagcaccagctggagttacagnnnnnnnnnnnnnnnnnnnnnnnnnnnnnnnnnnnnnnnnnnnnnnnnnnnnnnnnnnnnnnnnnnnnnnnnnnnnnnnnnnnnnnnnnnnnnnnnnnnnnnnnnnnnnnnnnnnnnnnnnnnnnnnnnnnnnnnnnnnnnnnnnnnnnnnnnnnnnnnnnnnnnnnnnnnnnnnnnnnnnnnnnnnnnnnnnnnnnnnnnnnnnnnnnnnnnnnnnnnnnnnnnnnnnnnnnnnnnnnnnnnnnnnnnnnnnnnnnnnnnnnnnnnnnnnnnnnnnnnnnnnnnnnnnnnnnnnnnnnnnnnnnnnnnnnnnnnnnnnnnnnnnnnnnnnnnnnnnnnnnnnnnnnnnnnnnnnnnnnnnnnnnnnnnnnnnnnnnnnnnnnnnnnnnnnnnnnnnnnnnnnnnnnnnnnnnnnnnnnnnnnnnnnnnnnnnnnnnnnnnnnnnnnnnnnnnnnnnnnnnnnnnnnnnnnnnnnnnnnnnnnnnnnnnnnnnnnnnnnnnnnnnnnnnnnnnnnnnnnnnnnnnnnnnnnnnnnnnnnnnnnnnnnnnnnnnnnnnnnnnnnnnnnnnnnnnnnnnnnnnnnnnnnnnnnnnnnnnnnnnnnnnnnnnnnnnnnnnnnnnnnnnnnnnnnnnnnnnnnnnnnnnnnnnnnnnnnnnnnnnnnnnnnnnnnnnnnnnnnnnnnnnnnnnnnnnnnnnnnnnnnnnnnnnnnnnnnnnnnnnnnnnnnnnnnnnnnnnnnnnnnnnnnnnnnnnnnnnnnnnnnnnnnnnnnnnnnnnnnnnnnnnnnnnnnnnnnnnnnnnnnnnnnnnnnnnnnnnnnnnnnnnnnnnnnnnnnnnnnnnnnnnnnnnnnnnnnnnnnnnnnnnnnnnnnnnnnnnnnnnnnnnnnnnnnnnnnnnnnnnnnnnnnnnnnnnnnnnnnnnnnnnnnnnnnnnnnnnnnnnnnnnnnnnnnnnnnnnnnnnnnnnnnnnnnnnnnnnnnnnnnnnnnnnnnnnnnnnnnnnnnnnnnnnnnnnnnnnnnnnnnnnnnnnnnnnnnnnnnnnnnnnnnnnnnnnnnnnnnnnnnnnnnnnnnnnnnnnnnnnnnnnnnnnnnnnnnnnnnnnnnnnnnnnnnnnnnnnnnnnnnnnnnnnnnnnnnnnnnnnnnnnnnnnnnnnnnnnnnnnnnnnnnnnnnnnnnnnnnnnnnnnnnnnnnnnnnnnnnnnnnnnnnnnnnnnnnnnnnnnnnnnnnnnnnnnnnnnnnnnnnnnnnnnnnnnnnnnnnnnnnnnnacaactggaccatcagatgaaggatcaggaacaactggactatcacctggagtgacagtgacatctggacaatcagctnnnnnnnnnnnnnnnnnnnnnnnnnnnnnnnnnnnnnnnnnnnnnnnnnnnnnnnnnnnnnnnnnnnnnnnnacaactggaccatcagatgaaggatcaggaacaactggactatcacctggagtgacagtgacatctggacaatcagctagaaagactgggacaactcgaccatcagtaggagtgacaggaacaactggacnnnnnnnnnnnnnnnnnnnnnnnnnnnnnnnnnnnnnnnnnnnnnnnnnnnnnattggaccatcagctggagtaacagtgacatctggacaatcagctagaatgactggggcaactcgaccatcagtaggagtgacaggaacaactnnnnnnnnnnnnnnnnnnnnnnnnnnnnnnnnnnnnnnnnnnnnnnnnnnnnnnnnnnnnnnnnnnnnnnnnnnnnnnnnnnnnnnnnnnnnnnnnnnnnnnnnnnnnnnnnnnnnnnnnnnnnnnnnnnnnnnnnnnnnnnnnnnnnnnnnnnnnnnnnnnnnnnnnnnnnnnnnnnnnnnnnnnnnnnnnnnnnnnnnnnnnnnnnnnnnnnnnnnnnnnnnnnnnnnnnnnnnnnnnnnnnnnnnnnnnnnnnnnnnnnnnnnnnnnnnnnnnnnnnnnnnnnnnnnnnnnnnnnnnnnnnnnnnnnnnnnnnnnnnnnnnnnnnnnnnnnnnnnnnnnnnnnnnnnnnnnnnnnnnnnnnnnnnnnnnnnnnnnnnnnnnnnnnnnnnnnnnnnnnnnnnnnnnnnnnnnnnnnnnnnnnnnnnnnnnnnnnnnnnnnnnnnnnnnnnnnnnnnnnnnnnnnnnnnnnnnnnnnnnnnnnnnnnnnnnnnnnnnnnnnagattggtgcttcattcgatgaccccagcaacccctgcgtctcctattcctgcaaagacactggctttgctgcagtagtccaggactgcccagagcagacctggtgtgcagaag

SEQ ID NO: 39082 - DNA, 610 bp, Macaca Mulatta
ctgctgccgtcccacctgctgccagaccacctgctgcaggaccacctgttgtcgccccagctgttgctgcagtccttgctgtgtctccagctgctgccagccttcctgctgctgatccacttgctgcagacccaccacccaccagagacatatttcctgaaacattctgtcaaaattcctatgcccccaagaaacattccctaagcttttctgagaaacaacattctgacattgaactttgtgatcatcttcttcctaccatgcttgggattctactgaaggtatgcagtctgcttcacttttattcttcttcatttcctctggattaatgtgccagatggtggtcagtcagctccacctaattgacatggacacatggtctcagtcacaggaagtggtcatcagcttttgcccctgtggaacttaaaaaaaattcttaagactacacatctaactctctataatgatcaatactgatcacctttttagatatgtgcattttatttagtagcctctgccagattactaaactctttcatgatcacttttaattgtctccctacctggtctttcctaataaaatttatattatcctgcatcttatggtatg

SEQ ID NO: 39083 - DNA, 7530 bp, Macaca Mulatta
  misc_feature (1)...(7530): n = A,T,C or G
ggacatcttgagctctaaactgaatggaaaattcaacaaacatctccaaccatcttccacggtacctgaatggagagcgaaagataatgatctacgattactgctgacaaatggaagaataattaannnnnnnnnnnnnnnnnnnnnnnnnnnnnnnnnnnnnnnnnnnnnnnnnnnnnnnnnnnnnnnnnnnnnnnnnnnnnnnnnnnnnnnnnnnnnnnnnnnnnnnnnnnnnnnnnnnnnnnnnnnnnnnnnnnnnnnnnnnnnnnnnnnnnnnnnnnnnnnnnnnnnnnnnnnnnnnnnnnnnnnnnnnnnnnnnnnnnnnnnnnnnnnnnnnnnnnnnnnnnnnnnnnnnnnnnnnnnnnnnnnnnnnnnnnnnnnnnnnnnnnnnnnnnnnnnnnnnnnnnnnnnnnnnnnnnnnnnnnnnnnnnnnnnnnnnnnnnnnnnnnnnnnnnnnnnnnnnnnnnnnnnnnnnnnnnnnnnnnnnnnnnnnnnnnnnnnnnnnnnnnnnnnnnnnnnnnnnnnnnnnnnnnnnnnnnnnnnnnnnnnnnnnnnnnnnnnnnnnnnnnnnnnnnnnnnnnnnnnnnnnnnnnnnnnnnnnnnnnnnnnnnnnnnnnnnnnnnnnnnnnnnnnnnnnnnnnnnnnnnnnnnnnnnnnnnnnnnnnnnnnnnnnnnnnnnnnnnnnnnnnnnnnnnnnnnnnnnnnnnnnnnnnnnnnnnnnnnnnnnnnnnnnnnnnnnnnnnnnnnnnnnnnnnnnnnnnnnnnnnnnnnnnnnnnnnnnnnnnnnnnnnnnnnnnnnnnnnnnnnnnnnnnnnnnnnnnnnnnnnnnnnnnnnnnnnnnnnnnnnnnnnnnnnnnnnnnnnnnnnnnnnnnnnnnnnnnnnnnnnnnnnnnnnnnnnnnnnnnnnnnnnnnnnnnnnnnnnnnnnnnnnnnnnnnnnnnnnnnnnnnnnnnnnnnnnnnnnnnnnnnnnnnnnnnnnnnnnnnnnnnnnnnnnnnnnnnnnnnnnnnnnnnnnnnnnnnnnnnnnnnnnnnnnnnnnnnnnnnnnnnnnnnnnnnnnnnnnnnnnnnnnnnnnnnnnnnnnnnnnnnnnnnnnnnnnnnnnnnnnnnnnnnnnnnnnnnnnnnnnnnnnnnnnnnnnnnnnnnnnnnnnnnnnnnnnnnnnnnnnnnnnnnnnnnnnnnnnnnnnnnnnnnnnnnnnnnnnnnnnnnnnnnnnnnnnnnnnnnnnnnnnnnnnnnnnnnnnnnnnnnnnnnnnnnnnnnnnnnnnnnnnnnnnnnnnnnnnnnnnnnnnnnnnnnnnnnnnnnnnnnnnnnnnnnnnnnnnnnnnnnnnnnnnnnnnnnnnnnnnnnnnnnnnnnnnnnnnnnnnnnnnnnnnnnnnnnnnnnnnnnnnnnnnnnnnnnnnnnnnnnnnnnnnnnnnnnnnnnnnnnnnnnnnnnnncttgtcagggcttgaattttattttgttgttggtagtgtcttgatgtattttcagtggtagggtaaagaattatcaataatttatttaacagnnnnnnnnnaaagttaacagcttttaaattctttttttaaagctatttatttggaagatttctggagaaatatctcactaatttagatgtaagaatgtgaaggtttttaaattatttttgatagtgtgtgtgttacatgtggggaagagccacggtaacagtaactagtctggactcttaaatttgatattcaggttaaagtcttaaacagggatttgatgcattaattattttaaattaagatgtatatgaaaatcattttattttatatatttcatgtgttttttataagctattagcttcgcttttgctaacatccaaggtgcatactgttatccaggttgattaccttatatcccaccttccctctgcactccctatcattttgtgatgacccagtgagactcttctctttgcagggaaatactttcttagccaatgtgtaagaactccataaaagatccctcatttctcatttcgtttgacattgtgattttcttctcaatattaaaaaaaataggcttttgcattttcatttctgctgatgatatctgggtcccaaagagaacagctttaatatctttttcctacttgtgggaaaagtattataagtttggttaaatagacatgtttatagtttttccaaatacatttgtaactacaacaggccttctccgtactgctggtgttggacaacaggactgacacctgctgcggaggttatatcttatgatgcttttattctccatacctnnnnnnnnnnnnnnnnnnnnnnnnnnnnnnnnnnnnnnnnnnnnnnnnnnnnnnnnnnnnnnnnnnnnnnnnnnnnnnnnnnnnnnnnnnnnnnnnnnnnnnnnnnnnnnnnnnnnnnnnnnnnnnnnnnnnnnnnnnnnnnnnnnnnnnnnnnnnnnnnnnnnnnnnnnnnnnnnnnnnnnnnnnnnnnnnnnnnnnnnnnnnnnnnnnnnnnnnnnnnnnnnnnnnnnnnnnnnnnnnnnnnnnnnnnnnnnnnnnnnnnnnnnnnnnnnnnnnnnnnnnnnnnnnnnnnnnnnnnnnnnnnnnnnnnnnnnnnnnnnnnnnnnnnnnnnnnnnnnnnnnnnnnnnnnnnnnnnnnnnnnnnnnnnnnnnnnnnnnnnnnnnnnnnnnnnnnnnnnnnnnnnnnnnnnnnnnnnnnnnnnnnnnnnnnnnnnnnnnnnnnnnnnnnnnnnnnnnnnnnnnnnnnnnnnnnnnnnnnnnnnnnnnnnnnnnnnnnnnnnnnnnnnnnnnnnnnnnnnnnnnnnnnnnnnnnnnnnnnnnnnnnnnnnnnnnnnnnnnnnnnnnnnnnnnnnnnnnnnnnnnnnnnnnnnnnnnnnnnnnnnnnnnnnnnnnnnnnnnnnnnnnnnnnnnnnnnnnnnnnnnnnnnnnnnnnnnnnnnnnnnnnnnnnnnnnnnnnnnnnnnnnnnnnnnnnnnnnnnnnnnnnnnnnnnnnnnnnnnnnnnnnnnnnnnnnnnnnnnnnnnnnnnnnnnnnnnnnnnnnnnnnnnnnnnnnnnnnnnnnnnnnnnnnnnnnnnnnnnnnnnnnnnnnnnnnnnnnnnnnnnnnnnnnnnnnnnnnnnnnnnnnnnnnnnnnnnnnnnnnnnnnnnnnnnnnnnnnnnnnnnnnnnnnnnnnnnnnnnnnnnnnnnnnnnnnnnnnnnnnnnnnnnnnnnnnnnnnnnnnnnnnnnnnnnnnnnnnnnnnnnnnnnnnnnnnnnnnnnnnnnnnnnnnnnnnnnnnnnnnnnnnnnnnnnnnnnnnnnnnnnnnnnnnnnnnnnnnnnnnnnnnnnnnnnnnnnnnnnnnnnnnnnnnnnnnnnnnnnnnnnnnnnnnnnnnnnnnnnnnnnnnnnnnnnnnnnnnnnnnnnnnnnnnnnnnnnnnnnnnnnnnnnnnnnnnnnnnnnnnnnnnnnnnnnnnnnnnnnnnnnnnnnnnnnnnnnnnnnnnnnnnnnnnnnnnnnnnnnnnnnnnnnnnnnnnnnnnnnnnnnnnnnnnnnnnnnnnnnnnnnnnnnnnnnnnnnnnnnnnnnnnnnnnnnnnnnnnnnnnnnnnnnnnnnnnnnnnnnnnnnnnnnnnnnnnnnnnnnnnnnnnnnnnnnnnnnnnnnnnnnnnnnnnnnnnnnnnnnnnnnnnnnnnnnnnnnnnnnnnnnnnnnnnnnnnnnnnnnnnnnnnnnnnnnnnnnnnnnnnnnnnnnnnnnnnnnnnnnnnnnnnnnnnnnnnnnnnnnnnnnnnnnnnnnnnnnnnnnnnnnnnnnnnnnnnnnnnnnnnnnnnnnnnnnnnnnnnnnnnnnnnnnnnnnnnnnnnnnnnnnnnnnnnnnnnnnnnnnnnnnnnnnnnnnnnnnnnnnnnnnnnnnnnnnnnnnnnnnnnnnnnnnnnnnnnnnnnnnnnnnnnnnnnnnnnnnnnnnnnnnnnnnnnnnnnnnnnnnnnnnnnnnnnnnnnnnnnnnnnnnnnnnnnnnnnnnnnnnnnnnnnnnnnnnnnnnnnnnnnnnnnnnnnnnnnnnnnnnnnnnnnnnnnnnnnnnnnnnnnnnnnnnnnnnnnnnnnnnnnnnnnnnnnnnnnnnnnnnnnnnnnnnnnnnnnnnnnnnnnnnnnnnnnnnnnnnnnnnnnnnnnnnnnnnnnnnnnnnnnnnnnnnnnnnnnnnnnnnnnnnnnnnnnnnnnnnnnnnnnnnnnnnnnnnnnnnnnnnnnnnnnnnnnnnnnnnnnnnnnnnnnnnnnnnnnnnnnnnnnnnnnnnnnnnnnnnnnnnnnnnnnnnnnnnnnnnnnnnnnnnnnnnnnnnnnnnnnnnnnnnnnnnnnnnnnnnnnnnnnnnnnnnnnnnnnnnnnnnnnnnnnnnnnnnnnnnnnnnnnnnnnnnnnnnnnnnnnnnnnnnnnnnnnnnnnnnnnnnnnnnnnnnnnnnnnnnnnnnnnnnnnnnnnnnnnnnnnnnnnnnnnnnnnnnnnnnnnnnnnnnnnnnnnnnnnnnnnnnnnnnnnnnnnnnnnnnnnnnnnnnnnnnnnnnnnnnnnnnnnnnnnnnnnnnnnnnnnnnnnnnnnnnnnnnnnnnnnnnnnnnnnnnnnnnnnnnnnnnnnnnnnnnnnnnnnnnnnnnnnnnnnnnnnnnnnnnnnnnnnnnnnnnnnnnnnnnnnnnnnnnnnnnnnnnnnnnnnnnnnnnnnnnnnnnnnnnnnnnnnnnnnnnnnnnnnnnnnnnnnnnnnnnnnnnnnnnnnnnnnnnnnnnnnnnnnnnnnnnnnnnnnnnnnnnnnnnnnnnnnnnnnnnnnnnnnnnnnnnnnnnnnnnnnnnnnnnnnnnnnnnnnnnnnnnnnnnnnnnnnnnnnnnnnnnnnnnnnnnnnnnnnnnnnnnnnnnnnnnnnnnnnnnnnnnnnnnnnnnnnnnnnnnnnnnnnnnnnnnnnnnnnnnnnnnnnnnnnnnnnnnnnnnnnnnnnnnnnnnnnnnnnnnnnnnnnnnnnnnnnnnnnnnnnnnnnnnnnnnnnnnnnnnnnnnnnnnnnnnnnnnnnnnnnnnnnnnnnnnnnnnnnnnnnnnnnnnnnnnnnnnnnnnnnnnnnnnnnnnnnnnnnnnnnnnnnnnnnnnnnnnnnnnnnnnnnnnnnnnnnnnnnnnnnnnnnnnnnnnnnnnnnnnnnnnnnnnnnnnnnnnnnnnnnnnnnnnnnnnnnnnnnnnnnnnnnnnnnnnnnnnnnnnnnnnnnnnnnnnnnnnnnnnnnnnnnnnnnnnnnnnnnnnnnnnnnnnnnnnnnnnnnnnnnnnnnnnnnnnnnnnnnnnnnnnnnnnnnnnnnnnnnnnnnnnnnnnnnnnnnnnnnnnnnnnnnnnnnnnnnnnnnnnnnnnnnnnnnnnnnnnnnnnnnnnnnnnnnnnnnnnnnnnnnnnnnnnnnnnnnnnnnnnnnnnnnnnnnnnnnnnnnnnnnnnnnnnnnnnnnnnnnnnnnnnnnnnnnnnnnnnnnnnnnnnnnnnnnnnnnnnnnnnnnnnnnnnnnnnnnnnnnnnnnnnnnnnnnnnnnnnnnnnnnnnnnnnnnnnnnnnnnnnnnnnnnnnnnnnnnnnnnnnnnnnnnnnnnnnnnnnnnnnnnnnnnnnnnnnnnnnnngcttgccctatgggatgattcgctgtgcttccttgaaaccaggtggaaagaaaggggaagacttaattttctcattctgttgctgttgaacgtaatgtaatcttaatactgtagccttcctagaagcccttccctcttttccatgctataaagtcaaatatttgatacccttagcataaattttaaaaattaaggtcattaggaagcaaatgtctatttccaaagcaattagcttgttgtgactgactgtgattttattcttctatagtattttttccctcattttaattgagagaaaataatactcttttgcaatatccttagattctccccctcaccctggtgccccttctagtgtcttgagactttgtcttaacaagtataacgttacattttgttgttaaaaccttttcgaaactatattcagtgattcttccaagtttatctgctctgcactatttcactaataaatcctggctaccacgtagcccttgacctccaagtagtttacctatgcaagacctgtgacactctgaattcacttctctttctttcagaaactagtcataaatggagcttaattataaaggtaaaacttgtctccagccagttttattttgaccagttccttttcaaaatgtcagctgttttctccaagatttttcaccaaaacagtgatcataagtgctcaaaaatataatactttgcaggcataaaataacccagacatactcttatatttctttgatgtattttggttggtaaaacttaccagcattaaatgtaaaatataatgaggagttaattccttacctagtatcatttcttccttnnnnnnnnnnnnnnnnnnnnnnnnnnnnnnnnnnnnnnnnnnnnnnnnnnnnnnnnnnnnnnnnnnnnnnnnnnnnnnnnnnnnnnnnnnnnnnnnnnnnnnnnnnnnnnnnnnnnnnnnnnnnnnnnnnnnnnnnnnnnnnnnnnnnnnnnnnnnnnnnnnnnnnnnnnnnnnnnnnnnnnnnnnnnnnnnnnnnnnnnnnnnnnnnnnnnnnnnnnnnnnnnnnnnnnnnnnnnnnnnnnnnnnnnnnnnnnnnnnnnnnnnnnnnnnnnnnnnnnnnnnnnnnnnnnnnnnnnnnnnnnnnnnnnnnnnnnnnnnnnnnnnnnnnnnnnnnnnnnnnnnnnnnnnnnnnnnnnnnnnnnnnnnnnnnnnnnnnnnnnnnnnnnnnnnnnnnnnnnnnnnnnnnnnnnnnnnnnnnnnnnnnnnnnnnnnnnnnnnnnnnnnnnnnnnnnnnnnnnnnnnnnnnnnnnnnnnnnnnnnnnnnnnnnnnnnnnnnnnnnnnnnnnnnnnnnnnnnnnnnnnnnnnnnnnnnnnnnnnnnnnnnnnnnnnnnnnnnnnnnnnnnnnnnnnnnnnnnnnnnnnnnnnnnnnnnnnnnnnnnnnnnnnnnnnnnnnnnnnnnnnnnnnnnnnnnnnnnnnnnnnnnnnnnnnnnnnnnnnnnnnnnnnnnnnnnnnnnnnnnnnnnnnnnnnnnnnnnnnnnnnnnnnnnnnnnnnnnnnnnnnnnnnnnnnnnnnnnnnnnnnnnnnnnnnnnnnnnnnnnnnnnnnnnnnnnnnnnnnnnnnnnnnnnnnnnnnnnnnnnnnnnnnnnnnnnnnnnnnnnnnnnnnnnnnnnnnnnnnnnnnnnnnnnnnnnnnnnnnnnnnnnnnnnnnnnnnnnnnnnnnnnnnnnnnnnnnnnnnnnnnnnnnnnnnnnnnnnnnnnnnnnnnnnnnnnnnnnnnnnnnnnnnnnnnnnnnnnnnnnaaaattgtattacttctgctttgatttttttagcactcagtgtattttttgctcattttgtttgaaagtataaatgttgaaacttgtataaaatgcgtccttgaaagaaaaagaatcggaattctatatc

SEQ ID NO: 39084 - DNA, 774 bp, Macaca Mulatta
  misc_feature (1)...(774): n = A,T,C or G
nnnnnnnnnnnnnnnnnncgagtnnnnnnnnnnnnnnnnnnaaccacccaggttcaagtgatactcannnnnnnnnnnnnnnnnnnnatgagattacaggtgtgtgtcactatgcccaggnnnnnnnnnnnnnnnnnncagagatgggcttttaccacnnnnnnnnnnnnnnnnnnnnnnnnttggcctcaactgatcctcctgcttccgcctcccaaaggnnnnnnnnnnnnnnnnnnnnnnnntgcacccagccccaaaatacatattttccttatctgacctttcaagtcaaagaggaaaaagtactaagttacaaatatagaatactcttaaactagaatttgtactggtgactgattttctctgtggttccttctccatagggcctatgtgtatccaaatgtctgtggggaaactgaggcaattttcttaatattttgcgagagattcagagagactccttccatttaaagaatgattaataacaggcaaacatgggaaaaatatgttcacataaaaggtaatattttttctgcatataattttttcaaataatggaatacttagattatattcttttatacaacagttagggaaaatattcactgaataactgaaagaaggttaataacatgtacctgatcttaaaatccacataagaaatagagttgatcatctgaaaaaaagttctctagatttttgttagtaaactatacctactggttagggccacacacagtttaaccagggcaggtggggcgtcaagtcccc

SEQ ID NO: 39085 - DNA, 645 bp, Macaca Mulatta
  misc_feature (1)...(645): n = A,T,C or G
ggggttgtatatttactttgcttttgttctaagaaaaagtcaaggactaaatcaacttgttactgtgtttcagtaatcagtttaaaaatctaagattttttaaaagttgagaatatttaatgaagtgccatgtaattgtagcttgctagtgtttcatgtttaatagactggttctgtaggtgttttaaccatttaacactctctgccatccctggagaaagtggttctactcttactgaacacattctctttgacaggatcaccagctgctttatttttctatttattacatttaaacagttgatgaggtctgaatcttgaccaaaactgctcagctgagatgtttttcacaatagacactgtacaaagtgtgcgtgcaaaaggacacggttggtagtattttttcattaatgtgaacattgacttaaaaaaaagcagtcctgccttttaaatcttgtggcagctcagaagggaggtgcttaagaaccttaactactatgtcagataannnnnnnnnnnnnnnnnnnnnnggagattggttactgctcacacatgatgtatagggctaaatatatgcttgttttcttgcacctgtgtacttccttctctccctcctttcctccctgtagcaataatgccatttgc

SEQ ID NO: 39086 - DNA, 637 bp, Macaca Mulatta
gggatctcagagaagtagattttctccccaaagcaaccaataggatgattaggtctattaactggtgactggcaaaatgaactccgttgtcagagactggggatggctgtgattgcccaaccagcagaagaagcctcgattgtcgttggtttataatgatgaaaggggaagagaaagagagtgtctgattgtttttttctaaaggaaacttagtggttcaatttgttgaatgtccttcagggatagccttagagaagcaacatgtgtgagcctttgtgagcttagcttgtataagcccttctgtagtgccatctgtcaagtccttgctcccatctcctgctgccatggagagccagcccagaagcccattttttgccttaggctctagctggagaacaaagctgacttatttccccaagtaaacttttctcttaattctaacctctaccttacttattcttgcttctaaactcttcaaaatgatgtttttaatatgtataaaagagaatttaaactagttgtctatctctttcagtgttcccagatgagatttccttgaaaaaagaacaggatagtgaaaataaacctgtataagttagtcataaggtgggaactgtcttaggggtgacaggtccgc

SEQ ID NO: 39087 - DNA, 767 bp, Macaca Mulatta
  misc_feature (1)...(767): n = A,T,C or G
ggtgctattatgtaatatgacagtctctataatacactatttacatccgcaattcattctcacaactgatttttgggttacacattgtcataataattttgcacacagggaataaaaggtcatagaaactcgatctgctaaaaaaatgtggcagaacaaaaattttagttcaatactgtctcctaagcctacattctttccacatctgcaagttgtcttcttcctattcaggtctcaagacattcttttctgtgcaagtcttgcaaattctttacaataaaaaaagccaattctagagtatacaatttactcaacacctataattttaagatataagactactgcatgggaaattgttggtataatccatgtttgggttgccaccagacagttactatatgaggaagggggttaatgctttaaaaaggattgatatttagattggtacnnnnnnnnnnnnnnnnnnttacatgaagtccttcaaaaatgtctccatagctgggcacggtagtacatnnnnnnnnnnnnnnnnnnnagggggctgaggtgggtggctgttagttagtttggctttgctctaaaggaatacctgaaattgggtaatttataaagaaaagagttttatttggcgcacagttctgtggactgtacatgaagcatggcaccaacatctacttctggtgaggcctcaggaagcttttgatttgtaccagaagaaaaaggaggtgcccagcgtgtcacataggcaaggggacagaagcaagacc

SEQ ID NO: 39088 - DNA, 185 bp, Macaca Mulatta
gtttaccgctgtggcagtgctcagggctggagccgtcgcttccgcttccgggccttgaagaagggaccccactggagcccgcgcctggctgtgtttggggacctgggggccgacaatccgagggccctccaccgactgcgccgggacacccagcagggcatgtacgacgctattcttcatgtggg

SEQ ID NO: 39089 - DNA, 165 bp, Macaca Mulatta
gattcagtggccaaggactgtacctggcgtcctggaagctctgccacagtctccgtttgatgctgcactctgctctgcctggaagcagcgggtggagctggggctgtttcgctaccgcctacgggagctacagacacaaatcctccctggtgtggtgggtttcgt

SEQ ID NO: 39090 - DNA, 1145 bp, Macaca Mulatta
  misc_feature (1)...(1145): n = A,T,C or G
gttccgggtccccaccaccttcacgatgcaaaccttcttgggcctccgggaaagctccttctccagctctgcaaagaaacagaccctgtgagccctgggcaggccaccatggaggatggcgcagcagctgcaggcacagtcctggttccccagtttgggcaccacagaagggagagnnnnnnnnnnnnnnnnnnnnnnntttgccagtcgacagggtctaggtttccggggcagaaaggcactcagaagactccagctctgcagttccggtttccctcgggtgcctgagagggcacaaggtgcaccgtcagcagaagtttccatcacaaaccctnnnnnnnnnnnnnnnnnnnnnnnnacaaacagtgtcgactcagttcacttttgtctgaggacagagctcagcaatgatattctaggttactgaggcactcattaggccctgggcaaatctaaacaagcagttcttttccgtacactctgcatctgcctgtgtcacccgcggctcggacactgggaagcccacatgcagatacgctccttagcctcgtggggtggaacttaccatggctgtagctactgctgctgaaactgcccttaggacatatgaatctttgaaagacaaacacataagtgaatacatctgcatgtatgtgtatacacgcatacacgcacacattcatgcacatatgtatacgtgtgcacgttttagttaatggaagtccttgggagctggacaatgttttggctccaagggatgtgagcaatcataaagtcatgagactgggtttcttgtgcggccccagcagctctgagagcccctctgaagggagtccaccagcgnnnnnnnnnnnnnnnnnnnnnnnnngggtctgcagaggtgctggtgtcgatttggcaagttacagggaagattcagaatgcggcagaggcactggcctccaggagctgtctgcctgcacgtctgggagcaggaatgccactcgcagccttctgttgcctctatgccttcctagcctggtatgtcttcatggaatcatcccctactggggagctaaaaaagaaaaaggagacttacggaagcggaggggaaccaggactcttcaagactgtcaaaggcacgagaaacaagaaagactgagcag

SEQ ID NO: 39091 - DNA, 845 bp, Macaca Mulatta
  misc_feature (1)...(845): n = A,T,C or G
actaccgcacgcacatcggggagaagccctacgagtgcgccnnnnnnnnnnnnncctgtccacgctgctggagcaccggcacannnnnnnnnnnnnnnnnnnnnnnnnnnnnnnnnnnnnnnnnnnnnnnnnnnnnncctgtccacgctgctggagcaccggcacacacacatcagcgagaagcccttccagtgtgcgcagtgcgacaagcgcttcacgcgcctggccaacctgaccgtgcaccagagggtgcactcgggcgagcgcgccttccagtgcgcccagtgcggcaggcgatttgcgcagaagcccggcttcctgcgccatctgtgcggccactcgcaggagaagcgctatccttgtagccggtgtggcgagagctttacctgtccctcctggctcatgtgtcaccaggacagccatgctggtcatgtttctccaccttgcctggtttgtgagagggactccccgatcgacgagccgcccacgggcctcagggatgcagtgcgggggagcgccactggtgatccttctgccgcattcagatttgagggcaccggtacagagctgagcctcaggaggtgccctggggacaggcagcggagcagtggtgatcaggaaggtcttgcggggagtcccttggacagttctttttctcgtgtgaagatggagaatgtgggtagcacccagagagctccctaaaggggctctgagggcacaggggcagttggtgccccttaaatccaagcggcctctgctgnnggtcacttcttgaccaggtcgaagtattctggccatggtcatggcttcccaagggagggctgttctcccaggcactgcgattg

SEQ ID NO: 39092 - DNA, 726 bp, Macaca Mulatta
  misc_feature (1)...(726): n = A,T,C or G
agacggtgtgaattgctaatttctttcaaggaattatgttcattttctcaggcattacagcctcaaagcaaagatgcactattagaaacattgacacagttgggaattcttcctgttcttaaaatcataatgatcagggatgatttgcaagtgaggtcagctgctgcagttatatgtgcttatctagtggagtacagtccatccaggatccgagaatttataatttcagaatcccaggtgtgcaaagatagtgaccttttcattaatgtaataattaaacaaatgatctgtgatactgatcctgagttaggaggtgccgttcatttgatggtagttctccatactctacttgatccacgcaacatgctgacaacacctgagaaaagtgaaagaagtgaattcctacatttcttctacaaacattgcatgcataaatttacagcaccacttttggccgccacctcagaacacaactgtgaggaggatgatatagttggatatgacaaaaacaaaaattgccccaataataatcaaacagcacaactgcttgctttgattttggagctacttacattttgtatacaacatcatacatactacataagaaactatatcttgaacaaagacttgctaaganaggccttgatattgacgaattcaaagcatactcacctgattttgtgtgctcttcgctttatgagaaggatgatcagccttaatgatgaa

SEQ ID NO: 39093 - DNA, 132 bp, Macaca Mulatta
tagtaactaagcagcctttagaaaagtcttggagaatactttcatctgagtagtgaggtcaaaggcggatatcaacgaggtgagaaataaatgtgagggaaggaaacagaaattacaagtatagcctatttt

SEQ ID NO: 39094 - DNA, 578 bp, Macaca Mulatta
  misc_feature (1)...(578): n = A,T,C or G
caaatctttacaaattaagattggtgtaggtttaaaaaaggcatttgtatgttgttagcttacatatggggggaggtaatttcattgcttaaaaaaatatgcccaggctccctcttggtggctggatttcctttttttccccccatggtggccatggttcttaatagggccacgagaaatcatggnnnnnnnnnnnnnnnnnnnnnnnnnnnnnnnnnnntggagtctcactctgttgtgcaggctaaagtgcggtgacatnnnnnnnnnnnnnnnnnnnnnnnnnnnnnnnnnnnnnnncaattctcctgtctcagccttnnnnnnnnnnnnnnnnnnnnnngtatgccactatgtccnnnnnnnnnnnnnnnnnnnnnnnnnnnnnnnncttcaccatattggtnnnnnnnnnnnnnnnnnnnnnnnnnnnnnnnnnnnacctgccttgggnnnnnnnnnnnnnannnnnnnnnnnnnnnnnnnnnnnnnnngggcccagaattacggtttcttgagtttccatagcccttgttccttagtcttacgtgatatttatgtggacctttatcactttc

SEQ ID NO: 39095 - DNA, 744 bp, Macaca Mulatta
  misc_feature (1)...(744): n = A,T,C or G
gggggtggggggcctcagaaagcttacagtcatggcaggaggcaaaggggaaaccagcgtggcacatgacaagagagggaggaaaagagagaagaagaggagcgaggttcccttaaacaactagctctcctgtgaattcattaccatgggaagggaaccaagtcattcatcagggatttgcttccatgacccaaacaccccctagtatgtcccacctccaaccctagggatcacattttaacatgaaatttgcaggcaacaaacatccgtactatatcaatgttgtcttcaaacaaaccactgttgtcttctaatagaagtggctataaaatatttgctcgaatacacatcagttggagtgtttactcaaaatgatgattctaaagtcccaccttcacttccacaacatgcagtaggcttttgttgtaactttggaattttaattttaattcagcagtaaaaataattattctgattcccaggaaactcactttggaaactcttttacttgagaagagttcctaaaatttccatcagtcaaacatttcctcatttgaccacactattgaagtgtgactaatgctagttcatgttaaataanacataaaaaatagagtaattaaaaagagtctatataaataaaaacagttttaaggcaagtcttttttcaagaagcaaaacctaaangtgtgagaacattgaaataatcaacctttgctttaattttcaacatccataaacttt

SEQ ID NO: 39096 - DNA, 366 bp, Macaca Mulatta
agctctggtctgtttctctgcagcgttccttctccctgtcccggagacggaaaggcacacggtgtgcaggtgcagagacaccgtgtccttaggtggcagtaccctaagggtggtaagaacccctcccactgctcaccttggtctctcttccttctctcccttttccttgttcaagggcccagggttccctcgaacctggggcttccatggtttcaggttttccttcccttcctttctcccaaaggtctggggaaccagggctccgttccagcacttcatggggcacctggtacttctggccgtgtgcccaaaggccccgcagtttttgcacttgatctgtgggtggaaaggaagtgatgtcagtga

SEQ ID NO: 39097 - DNA, 621 bp, Macaca Mulatta
cctatacttttcaaccgaaaaagattaaaataaagccgtttctataaatttaatgacattttatattttatatagagaaatagcttctgtttgattttctggacatcatgtcagtcaagatctactttctgtgtaaaaatgagtaagtcttgcacataaaccattcgtgttgcataaggttgcaaaaacaattaagtgggaaatgactcctaacttatgtgtctactctgcctagaaagaaagttttgaaggcatctatatatatttcataacaatgtctgttctttatggatttgatccataaatatttatctatctgaaaactttgatacttggaatgttttccttggagcatttggtgctccaagaaaaaacatttggtgctaagagttgcagcactgatgcctttccccaagttaattctattttaaaaatttatatttccttcccaatgagatgcagagtaaaatttgagaccctccattgactagggagcagcatctgtcatctatggttaattactattttgacaaaaatatagaaggtttaaacccccatgtatttcagattgttagagaaagaagaaggttgcttatatttcccttgaactttattctaacc

SEQ ID NO: 39098 - DNA, 744 bp, Macaca Mulatta
  misc_feature (1)...(744): n = A,T,C or G
ggtctggcccgaagaatatctcaggctccacagcatacggactagactacgttcacaaccgtagacctgcttcagttgctaaaaataatgaagttcccacaaggcgagtacgtactacccataacatgactctctaaaaataatacaatttgaatcaacttgagcatgcatagctttaactatcagtccttctatccccattactattcttcaagccaaaccagcaccaacctcctcaatcactcaacctatctatcttctgatccactagtagtacaccgccgaacnnnnnnnnnnnnnnnnnnnnnnnnnnnnnnnnnnnnnnnnnnnnnnnnnnnnnnnnnnnnnnnnnnnnnnnnnnnnnnnnnnnnnnnnnnnnnnnnnnnnnnnnnnnnnnnnnnnnnnnnnnnnnnnnnnnnnnnnnnnnnnnnnnnnnnnnnnnnnnnnnnnnnnnnnnnnnnnnnnnnnnnnnnnnnnnnnnnnnnnnnnnnnnnnnnnnnnnnnnnnnnnnnnnnnnnnnnnnnnnnnnnnnnnnnnnnnnnnnnnnnnnnnnnnnnnnnnnnnnnnnnnnnnnnnnnnnnnnnnnnnnnnnnnnnnnnnnnnnnnnnnnnnnnnnnnnnnnnnnnnnnnnnnnnnnnnnnnnnnnnnnnnnnnnnnnnnnnnnnnnnnnnnnnnnnnnnnnnnnnnnnnnnnnnnnnnnnnnnnnnnnnnnnnnnnnnnnnnnnnnnnnnnnnnnnnnnnatg

SEQ ID NO: 39099 - DNA, 746 bp, Macaca Mulatta
  misc_feature (1)...(746): n = A,T,C or G
ggtggatgatattttttcattagtagtatggtaactagcagaacacaattaatttagtcctttaggcaaaaatttgaatgaactgttctgtccattgccaagccattaatttctaatcagaatattaagcttctctgtggtttttctccaaggtacccgtgcaccagcccatatgctaactggatgcctgcagatgcctgcccttgcagcttgactggggatacctggctgacctccttagagtctgagaagtagggatgtcactgaatggtttattgtgcttactaaatctcctcctcacaagaaagaccattttttcagtattcccctccaatgtcagataaaaggagccaagtatctatttacatcttgttttgggaatagccagttgtattctctttctccagtttctccaactggtggcaactctccactcagtgtcagaatttctaaaatgtgtgacacctaatttctaatcatcttttctatttgtggatttctggtttgctacttttagggggagacacttatgaaatggggctggtgggaaggggccctgcagaactacaatgtatggcaattgagtataaatttcatcaatgagagagataaataaaggcacttgatagcccgctgctatttgtttgtaagaaattaaaactagtgcgtgggtgagctggggtttctctcntcgaaaaccccatgtagatgccctggattgnaggtcataaagggacaaaaggggt

SEQ ID NO: 39100 - DNA, 778 bp, Macaca Mulatta
  misc_feature (1)...(778): n = A,T,C or G
gctttcaaggtatagattcccacataaagtcttttttagtcattccggtaggcatttcttctctggggtgtgctccttagttccaggtactgnacaccatcatctgcaaattcttttatgacatcttttgtgaccattagaatatcttcagggctactagtaagttgatgaatagtttgaaacatctggaaacattcttctaaagttcttttctttcctttgtcaatcacagtcatctgatcgtggattttaagatctggcttctgggctattaatttcttcatggtatgagaactaatggatccattcaagtgggcatgaagttccacttttggcaattcagaatagaagtccgtcttccatggctgttgctcttctgcctccaccattttagcaggaaaaaaatggtcgttctccactcttattcttggtatgagcaatgtgatgtatttcagtcagtacactgcatggtactgaatttccttcagattgctttactttcacacattttgataagattagatgtatgtgtagatctgggttcagcttcaccagtgagtaatcttctcctttttctgttccttcaacctctccctctccactggctgatgtccctcacaggaccaacatgcatgtgcagtacttgcttccacctcttagagatttctcaactacgaggacttaggcaaggtttcccttctgactgaaaggcttgtagaaacgtgacaacccgccttctctaacacacatttctgaggcaaacggaacgcaggacccc

SEQ ID NO: 39101 - DNA, 2356 bp, Macaca Mulatta
  misc_feature (1)...(2356): n = A,T,C or G
agagccatgttgttcaagagcatttaagtgaagaaaagtatgaaggactacactgtgagaataatgataaagcccctgaatcagagtcagagccaactcctgtgtccactgggcaaggtaataaagctgaagagggaccaaatgctagttcaggtttcatgaagactgctgtactaggacctacactgttaatgctgaaaaataataaaataacagttcctcctaactatagtgctaagtttatgggcttcaagatgatggatggaaaacagcatattgtattaaaattggtgcctatcaaacaaaatatatgttcaccagactcacactcaggtgctgcaaaggacagtactgctaatttgcagccccagactttggacactaatggatttttgacaggagtaacaactgagttaaatgatacagtttatatgaaagcagctactccattttcgtgttcatcttctatactttcagggaaagcaagttcagaaaaggaaatgactttgatatctcaaaggaataataagcttcaaacagtggataatgagaaaagtgtatcttctttgtcaacaacgtcagaattggttacatcatcagtgaatttgaccacaaaatttgaaacaagagataatgttgacttctggggaaataatctcactcagagtcaccccgaggtattaggtaccaccattaaaagtccagataaagtcaactgtgttgccaaaccaaatgcatacagcagtggagatatgcataattattgcattaattatgtcaactctgagctacctgttgagtcctcaaccanagatcattaccttttcatattactcaaagtgaataattctataaacgtcgtannnnnnnnnnnnnnnnnnnnnnnnnnnnnnnnnnnnnnnnnnnnnnnnnnnnnnnnnnnnnnnnnnnnnnnnnnnnnnnnnnnnnnnnnnnnnnnnnnnnnnnnnnnnnnnnnnnnnnnnnnnnnnnnnnnnnnnnnnnnnnnnnnnnnnnnnnnnnnnnnnnnnnnnnnnnnnnnnnnnnnnnnnnnnnnnnnnnnnnnnnnnnnnnnnnnnnnnnnnnnnnnnnnnnnnnnnnnnnnnnnnnnnnnnnnnnnnnnnnnnnnnnnnnnnnnnnnnnnnnnnnnnnnnnnnnnnnnnnnnnnnnnnnnnnnnnnnnnnnnnnnnnnnnnnnnnnnnnnnnnnnnnnnnnnnnnnnnnnnnnnnnnnnnnnnnnnnnnnnnnnnnnnnnnnnnnnnnnnnnnnnnnnnnnnnnnnnnnnnnnnnnnnnnnnnnnnnnnnnnnnnnnnnnnnnnnnnnnnnnnnnnnnnnnnnnnnnnnnnnnnnnnnnnnnnnnnnnnnnnnnnnnnnnnnnnnnnnnnnnnnnnnnnnnnnnnnnnnnnnnnnnnnnnnnnnnnnnnnnnnnnnnnnnnnnnnnnnnnnnnnnnnnnnnnnnnnnnnnnnnnnnnnnnnnnnnnnnnnnnnnnnnnnnnaaacaagtgccatcaatgccacaagatgtgagagattcagagaagatgcctagaatttcaggttttggcacattacttaagactcagtcagatgcaataataacacagcagcttgtaaaagacaaactacgagccaccacacaaaatttaggttctttttatatgcagagtccacttttaaattcagaacaaaaaaaaactataattgttcagacttcgaaaggatttttaataccactgaacattactaacaagcctgggctaccggttattcccggaaatgcacttccattggttaattcacaaggtatccctgcttctcttgttgtcaacaagaaacctgggatgattttaacacttaataatgggaaacttgaaggtgtttccgctgtcaaaaccgagggtgcccaagctcatggaactatgactaaggagccttgcaaaacacctattttgaaggtagaaccaaacagtaattgtcttacacctggactttgttccagcattggcagttgtttgagcatgaaaagtagctcagaaaatactttgccattaaaaggcccttacgttttgaaaccaacaagttctgtgaaagctgttcttattcctaacatgctatccgagcaacagagcactaagttgaatatctctgattcagtaaaacagcagaatgagatttttccaaaaccacctctttgtaccttcttgcctgatggcaaacaagctgtttttttaaagtgtgtgatgccaaataaaactgagctgcttaagcccaaattagtccaaaatagtacttaccaaaatatacagccaaagaaacctgaaggaacacaacgaagaatattgctgaaaatttttaaccct

SEQ ID NO: 39102 - DNA, 625 bp, Macaca Mulatta
  misc_feature (1)...(625): n = A,T,C or G
ggtacaccgatactgaagtactatgagccttcagaacttgtggagagactacaaagttttgattgttatggtccctttagttgggctcatacatttggggtggtacaaaatcaaaagcagccctgttttccaaatacctaaaaacaacgacattcctgaggaagatagtatggaactttcaaatcttcagaagagccaaatccaagggaagtagcaggcttgcgatctttaggtaannnnnnnnnnnnnnnnnnnnnnnnnnnnnnnnnnnnnnnnnnnnnnnnnnnnnnnnnnnnnnnnnnnnnnnnnnnnnnnnnnnnnnnnnnnnnnnnnnnnnnnnnnnnnnnnnnnnnnnnnnnnnnnnnnnnnnnnnnnnnnnnnnnnnnnnnnnnnnnnnnnnnnnnnnnnnnnnnnnnnnnnnnnnnnnnnnnnnnnnnnnnnnnnnnnnnnnnnnnnnnnnnnnnnnnnnnnnnnatgctgattagcttcataaacattgaactctttgattttatagccacaatgctgcatattcatactttaattcctaaagaataatttttaatgttaaaacgtgataatggaataaatagaaaaatgtggtttacaaaataaaaacggtctt

SEQ ID NO: 39103 - DNA, 7933 bp, Macaca Mulatta
  misc_feature (1)...(7933): n = A,T,C or G
caggtgtctagtcacattcaggttcttgccagaaggaaatctcgtgattttcattccaagctaaaggnaaggatcagactgcaaaggataaggcccttcagcacatggcagccatgtcctcagcccagatcgtctcggccactgccattcacaacaagctggggctgcctgggattccacgcccgaccttcccaggggcgccnnngttctggccgggaatgattcaaacagggcagccaggatcctcacaagancgtcaagccttttgtgcagcaggcctaccccatccagccagcagtcacagcccccatnnnnnnnnnnnnnnnnnnnnnnnnnnnnnnnnnnnnnnnnnnnnnnnnnnnnnnnnnnnnnnnnnnnnnnnnnnnnnnnnnnnnnnnnnnnnnnnnnnnnnnnnnnnnnnnnnnnnnnnnnnnnnnnnngtacaacaaacacctcttcgtgcacattgggcatgccaaccattcttacagtgacccgttgcttgaatcagtggacattcgtcagatttatgacaaatttcctgaaaagaaaggtggcttaaaggaactgtttggaaagggccctcaaaatgccttcttcctcgtaaaattctgggnggctgatttaaactgcaatattcaagatgatgctggggctttttatggtgtaaccagtcagtacgagagttctgaaaatatgacagtcacctgttccaccaaagtttgctcctttgggaagcaagtagtagaaaaagtagagnagacggagtatgcaaggtttgagaatggccgatttgtataccgaataaaccgctccccaatgtgtgaatatatgatcaacttcatccacaagctcaaacacttaccagagaaatatatgatgaacagtgttttggaaaacttcacaattttattggtnggtggtaacaaacagggatacacaagaaactctcctctgcatggcctgtgtgtttgaagtttcaaatagtgaacacggagcacaacatcatatttacaggctgtaaaaggactgaacatggttatttatatatatagatatctgtatatnnnnnnnnnnnnnnnnnnnnnnnnnnnntctctctccattatcaaacgactgactgtaaactcacccacacaagggtggtgccctggccccgaggtcaccccaactttttctaaatcttgtttgagtgaagtcattttttcatgtgttcatactatcattgtagctgtgaagttctggtacagtggtaaaaagagaaattgagttgtttctatatgttcttcagatgtgcagcccacaattcctcgggaaaggtgaacctgaacaacccaagtctctctctgcagagccctgtttctaattgtggtagaaaatattgagacagagcatttgccatgggacatttacagcctttatacaaatgtatttagttctcttttttccaacataaaattcttgttttaagatacaagtaaaattaatctttaaatataaatgtaaattagtacacaaaactaagaatctttagacttatctttgtaactaattagggtggaagttatgaaagaatgtaattcactaaattattttttaaatgaaaccnnnnnnnnnnnnnnngaaaccaaatgttaaactatagccttaagaaatgcttggtagaagtgtcctaatgagacaaatttgtatttttttcctcaaggttaacactaatctcctaatccattaaactcttgaacaggtattacaaaggaagaaaacttcaccccttatccttaacatatatagtatatttaaaaaatataaaattgtattgtactaatgtgatgattgattatttaatgaaaaagaaaagatggctctttttgcaataagtagatactgaaaaatctaaacttacaatgtttatagtcttgtttgtgcagttatattttatatggacaaccaaattttttattaagatgagtaaatatttgaaccactgaattttaataacaaaatttttaaattggcgtcaatactgaatactgcactgtgcgatgcaaagtatacagaatcctgtggctgggagaaaatttcatcaaacagacaagtaaaaggctcatcagttttagcatctctgctccccagaaaannnnnnnnnnnnnnnnnnnnnnnnnnnnnnnnnnnnnnnnnnnnnnnnnnnnnnnnnnnnnnnnnnnnnnnnnnnnnnnnnnnnnnnnnnnnnnnnnnnnnnnnnnnnnnnnnnnnnnnnnnnnnnnnnnnnnnnnnnnnnnnnnnnnnnnnnnnnnnnnnnnnnnnnnnnnnnnnnnnnnnnnnnnnnnnnnnnnnnnnnnnnnnnnnnnnnnnnnnnnnnnnnnnnnnnnnnnnnnnnnnnnnnnnnnnnnnnnnnnnnnnnnnnnnnnnnnnnnnnnnnnnnnnnnnnnnnnnnnnnnnnnnnnnnnnnnnnnnnnnnnnnnnnnnnnnnnnnnnnnnnnnnnnnnnnnnnnnnnnnnnnnnnnnnnnnnnnnnnnnnnnnnnnnnnnnnnnnnnnnnnnnnnnnnnnnnnnnnnnnnnnnnnnnnnnnnnatttccttagcctctctcagtaagttacagttcttgtttggcctaggttaagaggcccagctacctatctctgaccttttcaaataggctcatttgggagattctcttgccaggagaaattcaactttccggtctaagaattccagagcattgcccaggcagagttggtttgatgtggccagatgttttgagttatttcccataagtgtttcactggggagagaacaagggagtactcctccagcttcccaaagaaatatgtttttataagtggtaggaacatgtgcacacaatagaacatgaaacaagttttttaacttgtaaaacttgtcaagattttttcaccaagctagaaaataaacttagttctaccacatccagttaacttacatgcccccttccctgtgtcaacacctgctttgaccctgcttgtattaatacatcggtcagcatctcgtggttccaaacatgagggtgtggctggcttgtgggaaacagcaaaacactnnnnnnnnnnnnnnnnnnattgggaagacaagaggagaaagtgcaaaactgtccccatttggaatgcccattccttctagaaaccagttggacagtgctactctgcccttcataaagagactactgttggttccctgattccaggctggcctgtgaaggattgtgccaggtgtcccctttcacggtcgccacatttacaatgacttctgttgaacactcctcttagggatgtttcttttgctcttatttcctgcatctttccttaagggaagccccatcctctcccaggaccaggagtatatgaccaggtgagcacaaatggctaaaagccaagctatcctagaacctcagtgggagagatatctgtttcatattctacccaggaatgggacttttcattgcagccaggagggctcttgggatttactttccaaagcacaaaaatactgggacccaggaagaccagctagaggacaactctgttggcgcagagacggacacagcccagtctgctgacctaacagggtcagcggggcccctggtgcttcaccacctgcatcctcttgctcagaatgcctttgcatttgagttttctgggtttctgtggttgaccttgaggtttactccttgctcttacaacatttctaaagatttttaaaagtttacttcttgtcgtcgtcttctaaagccttctccaggacagatattttccctatcttaaccactggtccagtcaccccagtgggcttctctttgtctctctcagattagacctttgggtgagattggcatcacaacatctaatctgagtctgtcttttgtccttcattctgtatggctgtctccctttgttnnnnnnnnnnnnnnnnnnnnnnnnnnnnnnnnnnnnnnnnnnnnnnnnnnnnnnnnnnnnnnnnnnnnnnnnnnnnnnnnnnnnnnnnnnnnnnnnnnnnnnnnnnnnnnnnnnnnnnnnnnnnnnnnnnnnnnnnnnnnnnnnnnnnnnnnnnnnnnnnnnnnnnnnnnnnnnnnnnnnnnnnnnnnnnnnnnnnnnnnnnnnnnnnnnnnnnnnnnnnnnnnnnnnnnnnnnnnnnnnnnnnnnnnnnnnnnnnnnnnnnnnnnnnnnnnnnnnnnnnnnnnnnnnnnnnnnnnnnnnnnnnnnnnnnnnnnnnnnnnnnnnnnnnnnnnnnnnnnnnnnnnnnnnnnnnnnnnnnnnnnnnnnnnnnnnnnnnnnnnnnnnnnnnnnnnnnnnnnnnnnnnnnnnnnnnnnnnnnnnnnnnnnnnnnnnnnnnnnnnnnnnnnnnnnnnnnnnnnnnnnnnnnnnnnnnnnnnnnnnnnnnnnnnnnnnnnnnnnnnnnnnnnnnnnnnnnnnnnnnnnnnnnnnnnnnnnnnnnnnnnnnnnnnnnnnnnnnnnnnnnnnnnnnnnnnnnnnnnnnnnnnnnnnnnnnnnnnnnnnnnnnnnnnnnnnnnnnnnnnnnnnnnnnnnnnnnnnnnnnnnnnnnnnnnnnnnnnnnnnnnnnnnnnnnnnnnnnnnnnnnnnnnnnnnnnnnnnnnnnnnnnnnnnnnnnnnnnnnnnnnnnnnnnnnnnnnnnnnnnnnnnnnnnnnnnnnnnnnnnnnnnnnnnnnnnnnnnnnnnnnnnnnnnnnnnnnnnnnnnnnnnnnnnnnnnnnnnnnnnnnnnnnnnnnnnnnnnnnnnnnnnnnnnnnnnnnnnnnnnnnnnnnnnnnnnnnnnnnnntaatatccctgcctttacccagtagtacattaacacctttccccactcagcgttcttcagacattgccaaatatcccatcaggtacaaaatgatccccagtcaagacctgttgcctaagatgttacaggtcacaatgaccacatttgaaattgttttcccttccattttaccccgtgaaagcatctctcccagagccttgcaagaggcaggtngtgacattgtgtccatatttcttcctgtttcaaaacttttgtttcccaacaatttctctcgctacaagtattctttcactcagcagtggggaagttggtgacagctggtcaccatcatccctttaatcacctcacacctgtttaaagagtgtttctgatttgaccctcatccttagtttactggnnnnnnnnnnngtctcagcaattttcattatttctcatggatctcattatcaaacctttacttcagcatatttcctctgggcttcttccagtttctgccttacaatcaatgctgttttgtaaatttattgaaacctctggaacatttcacctttagagatggaggannnnnnnnnnnnnnnnnnnnnnnnnnnnnnnnnnnttttctctctcgagctgaaagcacagtctactctccttcattttgtcaatgagaaagttgaggcccagaggggaggtgacatgtttagagtcacccagctggttagtgacagaaaaagggtgagacttgtctagggttcctgccagtttgatccttggcctctcctgggagaggctgcttttcttcgctgctctaagcttaaacaagccctcagagtgtgtggacaggtcagcttagaagagactgggagattgaggatctccctgtgctggagcacagcctcacaggatgctgcttcccacactgaagtgtcctgtctgactgttgctgtctgaggcatccacaagcaggtaggagagctggtgagccatttacttcctgagaacaatccccagccnnnnnnnnnnnnnnnnnnnnnnnnnnnnnnnnnnnnnnnnnnnnnnnnnnnnnnnnnnnnnnnnnnnnnnnnnnnnnnnnnnnnnnnnnnnnnnnnnnnnnnnnnnnnnnnnnnnnnnnnnnnnnnnnnnnnnnnnnnnnnnnnnnnnnnnnnnnnnnnnnnnnnnnnnnnnnnnnnnnnnnnnnnnnnnnnnnnnnnnnnnnnnnnnnnnnnnnnnnnnnnnnnnnnnnnnnnnnnnnnnnnnnnnnnnnnnnnnnnnnnnnnnnnnnnnnnnnnnnnnnnnnnnnnnnnnnnnnnnnnnnnnnnnnnnnnnnnnnnnnnnnnnnnnnnnnnnnnnnnnnnnnnnnnnnnnnnnnnnnnnnnnnnnnnnnnnnnnnnnnnnnnnnnnnnnnnnnnnnnnnntctgaaaaaccttaaatctttaacatgttgcatgaagggaatgcaatgaaaaaggaagcctcataactgtgagccctctttataagctggaaacaattctcttacgactgtcacgtttgtacgaagtttgcaattcagatctgccaaaacgttcccgtaagcaatgccttactaataccttagacatgccgccactcttttcttacacctattccgaatggtcatttactaattggcaccaatattgtcaaacaaaacaagcaaaaattgtcttcatttttgtttgtaaccccattttttcaccacttctataagaaactgactacttggtctaaaatctgaaactggacacaagtcagttctttcaccacactctcaaatgtatataccaaaacaaaaggttgcaacttcatagtttactatgaaaagcaaattgtactttttaatgttgccttttaaatttatgaccannnnnnnnnnnnnnnnnnnnnnnnnnnnnnnnnnnnnnnnnnnnnnnnnnnnnnnnnnnnnnnnnnnnnnnnnnnnnnnnnnnnnnnnnnnnnnnnnnnnnnnnnnnnnnnnnnnnnnnnnnnnnnnnnnnnnnnnnnnnnnnnnnnnnnnnnnnnnnnnnnnnnnnnnnnnnnnnnnnnnnnnnnnnnnnnnnnnnnnnnnnnnnnnnnnnnnnnnnnnnnnnnnnnnnnnnnnnnnnnnnnnnnnnnnnnnnnnnnnnnnnnnnnnnnnnnnnnnnnnnnnnnnnnnnnnnnnnnnnnnnnnnnnnnnnnnnnnnnnnnnnnnnnnagccctgcgtcgggatgaggggacttccgcacaaacgacagaatcttggccggtggacagatattacagctttctcctcctccttgtgttcgtgttcagtctctgtggagactttcttttccattcaaatgacagtgcgcacttatctggtttacacaatgataccattttgaaagttggaagcctcaaactgagacgacagtgcagaacaaaacaaaagtgagttagggtcgttacaattgaagtgttcttcttagggcaaacatgttgactccgagtagtgtgtatgaatgtgctacgaggaacttccaaagagcaccattcacaatttggcattttcaaagcatgttccagccctcaaaggggcaactctttaaagtccttgttggcttttatcaaaccttgtagaaattgggaaagctgatagaggtaagaaagatgagtgaaaaggacaagaaggccaaacaccagccaaaaagaagccaggaaaaaaagatttttctttgctaatatagatgtaaaaataacatcagacatctttgaaaattagcctcgaaactcttcatacatatgttctgtgtgtctctacctggtgtctttaagaatatcctctctgggctctgaaattttaggagtgattcttatccactccaagttgtgagtatttatagaaatttgtgcaaacaaacaaaaactatcaaacgaaaagaaaatgtactcaatctaagttatagttagctgctggaattctcaactcctccctgccagcactataccacagtgtggaagaaattagtcaaatgcttgttttcctgcttctcttttcaactgttactgtgctttgtttgacagtagttttctcaatgaaagtcattgcttatattgttaagaatgaaggtttggtttaaaattttattgcattgcaaa

SEQ ID NO: 39104 - DNA, 681 bp, Macaca Mulatta
  misc_feature (1)...(681): n = A,T,C or G
gggaggctggattactctgaagtccatacatcaataggcaagtatgaaagtggcttatgtatgtaaatagattgctgttatattcttctgaaatttaagttgtctggcttcagtttgcagggctttaagaaagcacagttagctgggcatggtggtgcacnnnnnnnnnnnnnnnnnnnnnnnnnnnnnnnnnnnnnnnnnngcttcaatctaggaagtggaggtggcagtgagctgagattgccccactgcacttcagcctgggtgacagagtgagtctgtctgnnnnnnnnnnnnnnnnnnnnnnnnnnnnnnnnnagaaagcaagacttaatctggacatggtggctcacccctgtggtcccggcattttgggaggccggggcgggtggatcacttgaaggccgggaatttgggacccagcctggtcaacttggtggaaactcccttctctccttttaaaatttaggaaactcatcaccatacactgtgatatcacacaacctattcatctattgtttatattctttttgcaatatcacatttagttctatatggtgacttgtatccaacaaaaaatttgtatctaacttgtgggtccctctggctctcaagaaaatttttaaaatcttttttggctgcgcgccaaataaaataaaaatgtctctactttttcccata

SEQ ID NO: 39105 - DNA, 621 bp, Macaca Mulatta
agggctctccagaacatcattcctgcatctactggtgctgccaagggtgtgggcaaggccatgcctgagctgaatgggaagctcactggcatggtcttccatatcctcactgccaatgtatcagtcgtggacttgatctgccatatggagaaacttaccagatatgatgatatcaataaggtggtaaagtaggcattggagagctcccctgaagggcatcctgggctacactgagtactaagttgtctcctctgtctttaacagtgacacctactctttcccccttcaatgttggtgaaatgccctcaattaccacttactttgtcaagctcatttcctggtatgacaatgaatttggctacatcaacagggtgttagaccttatagttcacatggccttcaaggagtaagaactccctggaccaccagccccagtgagagcgtgtgtggaggagaggggccttcagtgactgggaagtccctgccacagtcattcaccttcacactaagaatctccccttgacacagttttcatgccagaaaccctgaagaatgagaggggcctagggagtcccaccttgccatgtactgtaccatcataaagtcccctgtactcagcca

SEQ ID NO: 39106 - DNA, 309 bp, Macaca Mulatta
  misc_feature (1)...(309): n = A,T,C or G
nacaagcacaacatgaaaaacaattggagcagttaagcaaggataacatggcttcactaaataagaaggaactcatgcttaaagatgtggaatgtaaattctccgaaatgaaaactgcttatgaagaggttacaaccgaattggaagaatataaggaagcctttgcagcagcattgaaagctaacaattccatgtcnnnnnnnnnnnnnnnnnnnaataagaaaatagcaatgatcagcaccaagctccttatggagaaagagcggatgaaacattttctcagcactctttctacaaggcgagacccag

SEQ ID NO: 39107 - DNA, 212 bp, Macaca Mulatta
ccataagcccccatcctagccccatctgattatttcttccccctctcatttcctgtaatgctgttggttttctaacctgaagggtaactgcttactccttagttttttgccgtaatttctaaatcttaggctactttcaggctaaaagttttcctccagccgtggttttagtctcattctataagtcttggtaggtagtttattcattggaa

SEQ ID NO: 39108 - DNA, 366 bp, Macaca Mulatta
tgaacccgtccacgccttccgatggcaccttcggccaaggcttccactgcgactcgcccagcctgggtgctcccgagcttgatggcaagcatttcccaccgctgggccacccgcccacggtgttcgacgctggcctgcagaaggcatactcgcccacctgctcgcctacactgggcttcaaggaagagctgcggccaccgcccaccaagctggctgcctgcgagcccctcagcatgggctccagggggcagcctgggccacgcagctgcagcccagggccacctgagctgccgggacctgccactgggccagggccactacgattcccccagctgcaaaggcccagcataatgttaccctccaggt

SEQ ID NO: 39109 - DNA, 802 bp, Macaca Mulatta
  misc_feature (1)...(802): n = A,T,C or G
attattaatgtatttcattaactctctgtattaatgtctttatcaaattggtacaatctttcgctgtacaaatattttggatgaagttcttgtccgttgtattaatcttttgtggggctcttttctatatggcgagtggttgtcatgattgtcatgttatttttttttggtgtattttttctatccttgtggttcaggccgcgaaaaggcccacccaaaacgcgcccccacccggggggggcgagaaacagggaaaacgaactccccacaccccgccgggcggggcgagaaaaaccgggggggaggggcacgagccaaccacaaggaaaagcttcacaaaggcacaaaacacgaagaaaggccccaaccaccaaaaancccccactaaacccaaaaccccacaaaanaacaacaaaaaaaacactcgaggccaaaacatccacaccancnnganaaacannnaaatcctgtctctacannnnnnnnnnnnnnnnnnnnntcctgggtgtgatgatgcatgcttgtaggcctaactacttaggatgctgagacagcaggctgccttgaaccaaggagttcatgaggttacagtgagttaagtaactcttgatcatgccattacactccagcctaggcgacacagtgagattctgttttttgttttgttcagtttttttaagttgtggtaacctatagttaacttattactgaagaaannnnnnnnnnnnnnnnnnnnnnnaaatttcatgtagcctcagtgtagagtgtttgtaaagtctgcagtagtgtgcagtcatatccc

SEQ ID NO: 39110 - DNA, 868 bp, Macaca Mulatta
  misc_feature (1)...(868): n = A,T,C or G
ccaacaaccacctatcctcccacatannagcgcgcagcacccttacccgccccacccccccccagctcattagaaagtacacagcgacaaacccgggacaagtttttggtaaaaaagggccccccccccccattttactcaaaaaacgggggctcctggaagcaggattttatcaatagcccagccacacacacccttgcgggtttcgttttttcgcttttttgtgtggctcgcaagagcaggcccaaatttttgttttcgttctcaaaacaatctatttaggcccatttcctctggaaagtcccagcccccctccctccctcattttcacccttacaggtcatgtggtccagattttcaaccagtttctgggactgcttagctttctcgctcgccttttgtcacgtctctttactaccttatggggtactttttgaggatcatctttgagtcccaacaagcaagaaactgagtctttggccagtggtgagttatctcaggcacccacttttctttcacatcttcaaatactccttgagagccccctcccaaacagactagaaatacatctatctgtggataactcagcggtcgtaatctgtcataatcctcttgccctgcagtatcaaaaagtccaagagtatatggttctccaccaatcataactgtgactgcatagttgtcaaaaacagttggtacatattccgatggaaatttgtttgttgtgtaggatatcaggagacatgttttaccaacagcaccatcgcccacaacaacacacttaattgtctgcattgctgaaatagttttgtatccactttaaatatttcaaatctgatgttgacctcagcttcttcaccggggcccc

SEQ ID NO: 39111 - DNA, 863 bp, Macaca Mulatta
  misc_feature (1)...(863): n = A,T,C or G
ngggggggaaggccgcggttcaaaagggatttacaatatttttttttcggggggcgccggggggggctaaaaaggcgctccaaaagggggggagaggcctccccccaaaaaatatcctttgtgttaaaaaagaagaacaccatttttggggggtatttttttttgccccccctgtggcgccccaaaaattttttggaaacccccccagtattttgaaaaaagccccaccccccctccctttttttccctggaggagggggggggggaaaaatctcccagaaaaccaaggggtttgaaattttggggggggagaaccccatttttgtggtttccccaggaaatggccccccatgaaaattttttgttcccctccccctgggggggcaggggggttcaaaacccggaaaattcccatcccttttggaaaggattaatcccaggaggaatggttgaaattccaagaattttggagcccctttatggggcaacttaagaccccctccttaaccacggagggcccccagtttttcttctaaggtttattaatagatctgaaggtcacttaaatggtggtgctaatctccccacttttccttcccatcatactgtctgggtttgtgttttcaacaccaacagcggagccactgggtatttaaattcaactctccgctcaactttggagaggggtcctgccggcacccacgcgcctttgtgtggagctgtaggtagggggtggtgctaggaaagacctcgtgtgcttggcatgggtgcagttcagggaaaggcaagcgaatctgcgtctgagctgcctctcagctccactagtttgcaaagtaaagttttcgggttctcaggcgcgcccc

SEQ ID NO: 39112 - DNA, 590 bp, Macaca Mulatta
  misc_feature (1)...(590): n = A,T,C or G
gtggccgtggtggtggctctggcagcttacatgtcccagaacggccatggctagtagccagtagggcctgcatcctgactcccctgcccacctgaggaagcagtggggtttggggttgcagacgctatggaaaggcccagcccctgaagatgatcccgggagagtggcttgctgagggggagacccccattccgcagcctgcagagctcagccttcacttctgcttgcccgctgctcccagccccagagcagggcccgggaccccactctctaacccaggctacagacgggaagcagaaggcagggctgcccaccaggccatcccagcggggcctagctcagtccattctgcccattccctagaagatctcctgccctacagccagcccaccacctaccctgccaacctccccacagagaaagagcaggaggttacagggaggaaagggggtgcccagggcacaaggggacctgtcccaatcctttcagcccacagggatcttcacctgnggacagcctgagcttcccccaactccactctggccccatcatgcccagacctcagcaggccaagaaggaaatatgtggag

SEQ ID NO: 39113 - DNA, 712 bp, Macaca Mulatta
tgtggcagtcatccccacacaaggtcacacagggatgccacagtgcgttcaaaagtagaatccgtagccttctgtccgtaactctgggccttgctgtaaatagcaaaggctcgggctggggatcctgtatcactggactggatgtgccaatgaagagaagactgaaaagcagattggcacaggagaagcccagtgctcctggtggacacgagcctgcattcacccgcatgtctgaagaacgcgaaagccttctacagccccaagcgcactgatctttcatcactacaggttttgaaagtcttaccacacggagccagtggttagcaggcgcttgatacaaacatcctgcagggaggctgtgaagtttctaactctgcagcacttacggaggagcacttgagcgtgcagtagagcgcctagatacctgagttcttaagaattcatgcagcagactccgctttacttatggttcctttcatttggagtctgcctaatcagtttttctcttaagttccaagaaatctttttcctgttgagtagaacctgtaaaacatgccacctgtctacaggcgaacagaggccctgaaggttccaaaatagctgggcccacgagctgtctccagccccagtggagtcctgggattctcaccagatccaaagatgacagaggaatgggaaccagttaggcagaggagacaagacttgagagact

SEQ ID NO: 39114 - DNA, 227 bp, Macaca Mulatta
ttctaagagcaactgagaagctcatagctgatacgtgcttctactttttaaaaaaattcccatcctatggaaagtctgatgaaatcccagacagaaccccagtagcgtcttccccagcccttcctggcttcatcctgtgttcatcacagtgcactgctgagcagagagctatttcttttctttgcatgaaggtccctcgccatgccatgaacacagagcctctcaag

SEQ ID NO: 39115 - DNA, 1149 bp, Macaca Mulatta
  misc_feature (1)...(1149): n = A,T,C or G
gnnnnnnnnnnnnnnnnnnnnnnnnnnnnnnnnnnnnnnnnnnnnnnnnnnnnnnnnnnnnnnnnnnnnnnnnnnnnnnnnnnnnnnnnnnnnnnnnnnnnnnnnnnnnnnnnnnnnnnnnnnnnnnnnnnnnnnnnnnnnnnnnnnnnnnnnnnnnnnnnnnnnnnnnnnnnnnnnnnnnnnnnnnnnnnnnnnnnnnnnnnnnnnnnnnnnnnnnnnnnnnnnnnnnnnnnnnnnnnnnnnnnnnnnnnnnnnnnnnnnnnnnnnnnnnnnnnnnnnnnnnnnnnnnnnnnnnnnnnnnnnnnnnnnnnnnnnnnnnnnnnnnnnnnnnnnnnnnnnnnnnnnnnnnnnnnnnnnnnnnnnnnnnnnnnnnnnnnnnnnnnnnnnnnnnnnnnnnnnnnnnnnntcaaatgggtcccccaagccaataaattttgagaccccataaggggaattaaatcctccacaaatatataacctcgctacaggggggggttctataaacctggggaaattagtattcgtttaagacaaaagaatcttccaataacgcactataagaaagatactatcggcgtaaatcattaatctagattgtggacgatgattaccagtattagaccctgtgaaggggggtcatagttgttgaattcgtgggaaaccatgagaacttggtaacggtttatgaagaaccacgatgttatttgaactgagtgaaatatttccccctataatatatctaattaaattatttaataggagcgaaaaaagcccgagggtgtgtgaatttttattacaggacgcaaaaacaaagataaaaaattaaacccaaacacaagatcgacaccataatcttgtttttgaggcggagtgggggggaaatattttcttgcacgcacaatttttcaactactctccctcacataatgggggagatagaacactaaataatcatttgttgagaattagatcgcacgggccgtttactttggtgccctcgaatgaagcgcactacagcaactcttcatagtgacatattgggctcttgattaaacataagtggtagataagctgacagaaattagttgtgagcccctatttctagattgctactgcgcaaaggagaaatataataccgttaggggaacc

SEQ ID NO: 39116 - DNA, 376 bp, Macaca Mulatta
gatgccaaatgcaaaaaggagcgaaagaagaaaaagaaagtgaccaacattatctcatttgatgatgaggaggatgagcagaactctggggacatttttaaaaagacacctggggcaggggagagctcggaggacaactccgaccgctcctctgtaaatataatatcagcctttgaaagcccctttgggccaaattccaatggaagtcagagcagcaactcgtggaaaattgattccctgtctttgaatggggagtttgggtaccagaagcttgatgtgaaaagcatcgatgatgaagatgtggatgaaaacgaagatgacgtgtatggaaactcatcaggaaggaagcacaggggccacgcagagtcacctgaga

SEQ ID NO: 39117 - DNA, 556 bp, Macaca Mulatta
ggagaaaatcaaagcctaaattgagatggaaattacaaaagaaagagagcaatcatcttgcagccaatccagcaagagtatgggtctaaagccctaaatgccatgcttatctttaagaagttttatcttttgaaataattctgattaaccaagggtaagcatgttttggttgctaaagaaaaaagcataatctttaaatgagtataagtacttgctgtgtatttaacgtaaaagtacattcagaaagatgaaacacaaagtaactgatgtatttctatcttttatattttttagtccaataattagcaaaatgttactatatacgtaagatatacctgtgtagtgttgattatatttcagttttttgcccattacttcatccctaaatcttcagcatgaacaaatattgatgttgataataaaacaacggactctttgaaatgtatgttaccattaatttctatttgacctctaaattgtaaagtgcctccaaaagtttatttatttatagaacaaaaatacatgaggatggatttgtacaaatgtataaaatgca

SEQ ID NO: 39118 - DNA, 114 bp, Macaca Mulatta
taaagggtgtgataggtcaccagagaggtaaagagatctagggaattcaaaggcaggatggtaattacttttcaacaaccatcactcccttcccattacaaatattccaaaaca

SEQ ID NO: 39119 - DNA, 655 bp, Macaca Mulatta
  misc_feature (1)...(655): n = A,T,C or G
cccccccaaggggggccccttttggggggggaannnnnnnnnnnnnnnnnnnnnnnnnnnnnnnnnnnnnnnncnnnnnnnnnnnnnnngcggggaaaannnnnnnnnnnnnnnnnnnnnnnnnnnnaaccttataatttgggggggggagaaaccccccggttttttaaaccccccnnnnnnnnnnnnnnnnnnnnnnntttaaggggggattggagggggaggggaannnnnnnnnnnnnnnnnnnnnnnnnnttttccggaaaggtttaattggtttgggatttttggaaggaaaaggttttaatttaaagggggcccccccccttaaagtttcccctttaaaaatttcgaaaatttgatttaaaaaaacgagaccaaccatgaagccttttttttggtacaggctgattaggcgaaatatgatttatatctgtgtgctgaatacatccctcagtttaattaaactctccccccaagtcacagacaggcctggatgacacaggcatcctctgggaataggctgattttcaaaggacacaggaaagaagtgtgccctcaggatattcccaaaaaggtagaaaggccaccccacacatgcccatccctgtcatagctgggcctgctctgagctccctaattcctccctgtgccc

SEQ ID NO: 39120 - DNA, 870 bp, Macaca Mulatta
  misc_feature (1)...(870): n = A,T,C or G
gggacatgcccagagaagacgtgggagctccatgactctcctcagcatatatcatcctatgcatctctttcatcagtttgaacagaaaagtggtgcagtttttgatgaaattgtagagaactgtggtggtatcatggatacagaaatgtctgaagatatagaccacaactttactcctacccttgacagcatgtcttatggaatgcccgatcaaacaagatctgaanattcattgctggatgaagatgattattttttgaactctggggatcttgcaagaattccagtccttggtagtcatggacgttnnnnnnnnnnnnnnnnnnnnnnnnnnnnnnnnnnnnnnnnnnnnnnnnnnnnnnnnnnnnnnnnnnnnnnnnnnnnnnnnnnnnnnnnnnnnnnnnnnnnnnnnnnnnnnnnnnnnnnnnnnnnnnnnnnnnnnnnnnnnnnnnnnnnnnnnnnnnnnnnnnnnnnnnnnnnnnnnnnnnnnnnnnnnnnnnnnnnnnnnnnnnnnnnnnnnnnnnnnnnnnnnnnnnnnnnnnnnnnnnnnnnnnnnnnnnnnnnnnnnnnnnnnnnnnnnnnnnnnnnnnnnnnnnnnnnnnnnnnnnnnnnnnnnnnnnnnnnnnnnnnnnnnnnnnnnnnnnnnnnnnnnnnnnnnnnnnnnnnnnnnnnnnnnnnnnnnnnnnnnnnnnnnnnnnnnnnnnnnnnnnnnnnnnnnnnnnnnnnnnnnnnnnnnnnnnnnnnnnnnnnnnnnnnnnnnnnnnnnnnnnnnnnnnnnnnnnnnnnnnnnnnnnnnnnnnnnnnnnnnnnnnnnnnnnnnnnnnnnnnnnnnnnnnnnnnnnnnnnnnnnnnnnnnnnnnnnnnnnnnnn

SEQ ID NO: 39121 - DNA, 1459 bp, Macaca Mulatta
  misc_feature (1)...(1459): n = A,T,C or G
tgatttattggtctgaagcgtgatgcatatggaggcctgaaaaataaggatgtggcatacagacaggctctcctggtgttatcaggcatctatacatgtgatgtgcagggagaatttggtggatggaacttaagctggtacgagcggggtgggggaagagctgggaaaggacgccatctgtgcccatgatgacaaatgccatcatggagacttcattcggggtcccttttatatatttagtgaagcagattttccatttcacactttccagatatatttgtattgcacagatgtcagggaaatatcatgtgtgtgaaagaaaaaaaagatcaaaattcacatccatggccagggattgtaattcaatcattttgtcctgaaactgacacccatttaacgtgcatggatgttccctgcttttgcttttgcttttgctttggaagttcaagtcagagcagtttgagaaacagaaatctcagccctacacgttgttaaaattcagagacctaggttaagggggaaaaagatggggagaataaaatttaacatataagaccttgccatcagtgccatcagtaccagagctgatgaaatcaatcagcaagtgattcctcatcctctttcctgtaacacacagatgagctgaagaaaccacaggatgcagtcaannnnnnnnnnnnnnnnnnnnnnnnnnnnnnnnnnnnnnnnnnnnnnnnnnnnnnnnnnnnnnnnnnnnnnnnnnnnnnnnnnnnnnnnnnnnnnnnnnnnnnnnnnnnnnnnnnnnnnnnnnnnnnnnnnnnnnnnnnnnnnnnnnnnnnnnnnnnnnnnnnnnnnnnnnnnnnnnnnnnnnnnnnnnnnnnnnnnnnnnnnnnnnnnnnnnnnnnnnnnnnnnnnnnnnnnnnnnnnnnnnnncagcctccctactaaatgctgagcacctctagattaagggctgtgtcacacttctcttagtattcctgaaaatacttgtcccagtatctgcctcagcaggtacttctttctccgaatgtgaaatgagctcaaggagcaacctaacagttgagaagggctgcatttcgttgcttctagaatgctgtacgccatgtatgtatccacaaaatgcgtaccacaaannnnnnnnnnnnnnnnnnnnnnnnnnnnnnnnnnnnnnnnnnnnnnnnnnnnnnnnnnnnnnnnnnnnnnnnnnnnnnnnnnnnnnnnnnnnnnnnnnnnnnnnnnnnnnnnnnnnnnnnnnnnnnnnnnnnnnnnnagagaatggatcaattaaataagaaaagaagagcgcattgggagtcaggagactgaggtgtggtctggctctgctgctaacttcaagtttagactcaattgatcaagtcccttgataacatggaattaaagtgacttttgaagaacatgagtacctcaaggatcttgctaaaatacagactctgatcta

SEQ ID NO: 39122 - DNA, 673 bp, Macaca Mulatta
  misc_feature (1)...(673): n = A,T,C or G
gggcatgcctgtaattnnnnnnnnnnnnnnnnnnnnnntgggcnnnnnnnnnnnnnnnnnnnnnnnnnnnnnnnnnnnnnnnnnnnnnacaaaccatgtctctactgnnnnnnnnnnnnnnnnnnnnnntgtggtggtgnnnnnnnnnnnnnnnnnnngctcggaatgcannnnnnnnnnnnnnnnnnnnnnnnnnnnnncgannnnnnnnnnnnnnnnnnncagcgcctcagcactctagcctgggtgacagaacgagactgnnnnnnnnnnnnnnnnnnatataatcttaaaagcctgacccagtgttgaacaagactgcagtgaacaatggcacagtgtcttgttgaagtgttcaggaggctggaactgggattcagtggtgagagtggcaaccattgtgagatatgaggcgtctggggacatgagaactggtgacaagcatacaggatggtgttctgccagacatccttcctaattgagagacatctgtcccatccccaacccccaaaaacagaaaggtgtttctacctcatcctgtcctactgcatagagtccgtacttgggttttaacacaaaattacgggtgaattgatctaatctctccaagctaacttttagggtttagggatccaccctcctctatctactgaaccaatactccggaatgctc

SEQ ID NO: 39123 - DNA, 430 bp, Macaca Mulatta
cagggtttcacgtctgaggccctcaccaagtgtgagagtatataagattcaccgtggcattgtttccagaatgttcttgctgtcgttctgttgcagctcttagtctgaggtcctctaacctctagactctgagctcactccagtctgtgaggagacgtggcctccgctgcgagccggccggtgcacgcccaggctcaggctgggagccgctgtgtctgcggtcaggcctcctgcttctgccaggcagcacgcgtggtcttcaggttgagctcggccgtgtgtggaggtgcacatggctgctgatggtcccagcacaggctaccgtgagagccagcgtccaaccccaaacttgcagcgactcggagttataactgtttactgatgtttcccacagtgtggcaggaagttttgaataaacacttttgccttc

SEQ ID NO: 39124 - DNA, 812 bp, Macaca Mulatta
tccgtccccaacgctcacctgctctcactcaggccacccatgggccttggccccgccccctacccatggctggcagattcgtggccccacccatctcgaagcccctcagcccaggaacccaggggaagctgctgccccagcaatcctgacccggacgacagatattacaatggtgaggagttctcattccctcatctggcttcagcacacttctcccgactactggggcaaactgaagggcgcctgggagcccagtctctctgaggttggtcagtccctggggaggatgtgagctgggggagcctctctgacctacctccaccctggtttaggatgtaaggcttgtgtggaggacgaagttgatcccgtgggatctccctttgccctccattctgttgtcctctatttttctgtctctgtcccccgggcctccctccttctctgcagaagcaggaatctccctgtatctggctcagacggcccggggcacggccgccccgggcgagggtcctgtctacagcaccattgacccagcgggggaggagctgcagaccttccatgggggcttcccccaacatccctcaggggatgcgggcccctggagccagtatgctcctccagagtggagccagggggacagtggtatgactccaactcctgaaaccccgtttagccctgaccagggtattcccaaagaggatcctcctccctgaccctctagcacctagcctggcacttccttctgacccgtctcatctctggctctttcctgcctgttgtcccggtgtccccatcctattctcctcaggagc

SEQ ID NO: 39125 - DNA, 167 bp, Macaca Mulatta
tgttctttcttagaaagaaatcctccgtggactaaagggcaaatgccagtaaggcagtgatagggatggcatcccaggacactccctctaaattctggatcaaagcgggctgctcaggcagcaaaggccctgctctaagttgtgcaggcatagattttctgaagcag

SEQ ID NO: 39126 - DNA, 741 bp, Macaca Mulatta
ggactgagtctcaaacatgtaacttgtatcctgtcttctctcttgctctctaaaccttgtttctaattacctatcaaatgtcttcattagacatcccacagtaattttaaactcagtgtgtccaaacattaagtcctcatcttttatataaaatcctttctgctttctaagttttctctttttgggattttccacagatcagggcaacacagaatggctaccttcccagccatgtctctgtagtcatcctgtgtaatcatgttctagtccagtgttgctcaaacagttaaaatccagggtgcttttggtaaacatacaaattctgatatagagtctttgtggcaaagggaatctcaattcctgccccagcccccttgcttatccttacacagctaagatttttatttaacttaacattttagcaagttttattatgaaaatacctttgtgctaagtataaagatttaaattatttttaatatggtttttagaaccacagactatccctctttttagagcatcctgatcaattgcaagtacttccagtgcttccccaaatgtgctttgtgttttcaacctcagtagccttgcacacatcattacttctacatccttctttgtgaccaagtgaatacctacctaccctcttaagattcagcttcagtgattctgtttttcatagggcttttttaaagccccttttcagtcaaattagatgctccctttggttcctgtcccctt

SEQ ID NO: 39127 - DNA, 294 bp, Macaca Mulatta
cttgattgcccaggatagtaaacaagtgagtgacagcatttgggcttatggtcttctctgcctgcttagctagacattctctctgggtctaaaagataatccaaaaagatccagcttcacaatgctgccctgaagagataatgcattaggcggccccgatgcagcgttcactgtcttccagggcaggcttgatcccaagggtttgcctgctcagacgatcgcttagtaaacacatgcctttactctctaggccttttttctagcttgccttgtatcacctgtgccatggatcag

SEQ ID NO: 39128 - DNA, 677 bp, Macaca Mulatta
  misc_feature (1)...(677): n = A,T,C or G
tnnnnnnnnnnnnnnnnnnnggacccaagtgatccatctgnnnnnnnnnnnnnnnnnnnnntgagccaccgcgtctggccagtgttggggttagttttaaggaggtgagcaatttcagtgagcatgaagccagaggactgggaacacctgggaattaaactggagaagtccttcaagttagctttgatgagataagtagaaggggcggtagtctgagaaagcttagaggaggggagcattttcaagataggagagacactgagccagtttcaacactgctggaaagaatatagaagagaagaaggtgggtgggagaattttgtaaaaatgtatttttcaaggaaaaaaatcaggaattatgaaaatgcttgatttgatcagttaactgccagatgggtttcctcagaattgcatgtgttactgagtttagcctgcaggtggcgactttttaagttagtgtttttaagataccttgaaagacttgaaaatgttaaagaattcagtgaagtgatgggtaaatcctaagcattgttattttagtaactaatgaataattttccatttgttcattctactttctaaaatagaggaaaagtatgtgcgtagatcattttagatgccgatgtttggaacgataggcacaaagcacaggaaactaaagctatctaacttgatac

SEQ ID NO: 39129 - DNA, 5056 bp, Macaca Mulatta
  misc_feature (1)...(5056): n = A,T,C or G
gggcagcggcgcttctggtcccccagacttggggctcccgggcttctgagcgcttcgggttccgcgctgccgggagggcttgagggtgccttagagcccgacgcctttttttcaggaaagggcgctgcgaccgcccccgtcccgggcctcagcccctctgctgcagaccctcgggatnnnnnnnnnnnnnnnnnnnnnnnnnnnnnnnnnnnnnnnnnnnnnnnnnnnnnnnnnnnnnnnnnnnnnnnnnnnnnnnnnnnnnnnnnnnnnnnnnnnnnnnnnnnnnnnnnnnnnnnnnnnnnnnnnnnnnnnnnnnnnnnnnnnnnnnnccaggagataacggagagccagcgtgctgcgtgtcacagtccctggatgaacgtttgtggaactggattgaattaaacaagacatgcaaagcaagtggttnnnnnnnnnnnnnnnnnnnnnnnnnnnnnnnnnnnnnnnnnnnnnnnnnnnnnnnnnnnnnnnnnnnnnnnnnnnnnnnnnnnnnnnnnnnnnnnnnnnnnnnnnnnnnnnnnnnnnnnnnnnnnnnnnnnnnnnnnnnnnnnnnnnnnnnnnnnnnnnnnnnnnnnnnnnnnnnnnnnnnnnnnnnnnnnnnnnnnnnnnnnnnnnnnnnnnnnnnnnnnnnnnnnnnnnnnnnnnnnnnnnnnnnnnnnnnnnnnnnnnnnnnnnnnnnnnnnnnnnnnnnnnnnnnnnnnnnnnnnnnnnnnnnnnnnnnnnnnnnnnnnnnnnnnnnnnnnnnnnnnnnnnnnnnnnnnnnnnnnnnnnnnnnnnnnnnnnnnnnnnnnnnnnnnnnnnnnnnnnnnnnnnnnnnnnnnnnnnnnnnnnnnnnnnnnnnnnnnnnnnnnnnnnnnnnnnnnnnnnnnnnnnnnnnnnnnnnnnnnnnnnnnnnnnnnnnnnnnnnnnnnnnnnnnnnnnnnnnnnnnnnnnnnnnnnnnnnnnnnnnnnnnnnnnnnnnnnnnnnnnnnnnnnnnnnnnnnnnnnnnnnnnnnnnnnnnnnnnnnnnnnnnnnnnnnnnnnnnnnnnnnnnnnnnnnnnnnnnnnnnnnnnnnnnnnnnnnnnnnnnnnnnnnnnnnnnnnnnnnnnnnnnnnnnnnnnnnnnnnnnnnnnnnnnnnnnnnnnnnnnnnnnnnnnnnnnnnnnnnnnnnnnnnnnnnnnnnnnnnnnnnnnnnnnnnnnnnnnnnnnnnnnnnnnnnnnnnnnnnnnnnnnnnnnnnnnnnnnnnnnnnnnnnnnnnnnnnnnnnnnnnnnnnnnnnnnnnnnnnnnnnnnnnnnnnnnnnnnnnnnnnnnnnnnnnnnnnnnnnnnnnnnnnnnnnnnnnnnnnnnnnnnnnnnnnnnnnnnnnnnnnnnnnnnnnnnnnnnnnnnnnnnnnnnnnnnnnnnnnnnnnnnnnnnnnnnnnnnnnnnnnnnnnnnnnnnnnnnnnnnnnnnnnnnnnnnnnnnnnnnnnnnnnnnnnnnnnnnnnnnnnnnnnnnnnnnnnnnnnnnnnnnnnnnnnnnnnnnnnnnnnnnnnnnnnnnnnnnnnnnnnnnnnnnnnnnnnnnnnnnnnnnnnnnnnnnnnnnnnnnnnnnnnnnnnnnnnnnnnnnnnnnnnnnnnnnnnnnnnnnnnnnnnnnnnnnnnnnnnnnnnnnnnnnnnnnnnnnnnnnnnnnnnnnnnnnnnnnnnnnnnnnnnnnnnnnnnnnnnnnnnnnnnnnnnnnnnnnnnnnnnnnnnnnnnnnnnnnnnnnnnnnnnnnnnnnnnnnnnnnnnnnnnnnnnnnnnnnnnnnnnnnnnnnnnnnnnnnnnnnnnnnnnnnnnnnnnnnnnnnnnnnnnnnnnnnnnnnnnnnnnnnnnnnnnnnnnnnnnnnnnnnnnnnnnnnnnnnnnnnnnnnnnnnnnnnnnnnnnnnnnnnnnnnnnnnnnnnnnnnnnnnnnnnnnnnnnnnnnnnnnnnnnnnnnnnnnnnnnnnnnnnnnnnnnnnnnnnnnnnnnnnnnnnnnnnnnnnnnnnnnnnnnnnnnnnnnnnnnnnnnnnnnnnnnnnnnnnnnnnnnnnnnnnnnnnnnnnnnnnnnnnnnnnnnnnnnnnnnnnnnnnnnnnnnnnnnnnnnnnnnnnnnnnnnnnnnnnnnnnnnnnnnnnnnnnnnnnnnnnnnnnnnnnnnnnnnnnnnnnnnnnnnnnnnnnnnnnnnnnnnnnnnnnnnnnnnnnnnnnnnnnnnnnnnnnnnnnnnnnnnnnnnnnnnnnnnnnnnnnnnnnnnnnnnnnnnnnnnnnnnnnnnnnnnnnnnnnnnnnnnnnnnnnnnnnnnnnnnnnnnnnnnnnnnnnnnnnnnnnnnnnnnnnnnnnnnnnnnnnnnnnnnnnnnnnnnnnnnnnnnnnnnnnnnnnnnnnnnnnnnnnnnnnnnnnnnnnnnnnnnnnnnnnnnnnnnnnnnnnnnnnnnnnnnnnnnnnnnnnnnnnnnnnnnnnnnnnnnnnnnnnnnnnnnnnnnnnnnnnnnnnnnnnnnnnnnnnnnnnnnnnnnnnnnnnnnnnnnnnnnnnnnnnnnnnnnnnnnnnnnnnnnnnnnnnnnnnnnnnnnnnnnnnnnnnnnnnnnnnnnnnnnnnnnnnnnnnnnnnnnnnnnnnnnnnnnnnnnnnnnnnnnnnnnnnnnnnnnnnnnnnnnnnnnnnnnnnnnnnnnnnnnnnnnnnnnnnnnnnnnnnnnnnnnnnnnnnnnnnnnnnnnnnnnnnnnnnnnnnnnnnnnnnnnnnnnnnnnnnnnnnnnnnnnnnnnnnnnnnnnnnnnnnnnnnnnnnnnnnnnnnnnnnnnnnnnnnnnnnnnnnnnnnnnnnnnnnnnnnnnnnnnnnnnnnnnnnnnnnnnnnnnnnnnnnnnnnnnnnnnnnnnnnnnnnnnnnnnnnnnnnnnnnnnnnnnnnnnnnnnnnnnnnnnnnnnnnnnnnnnnnnnnnnnnnnnnnnnnnnnnnnnnnnnnnnnnnnnnnnnnnnnnnnnnnnncgaggctgaaggacctgcttcccaggacccgtcccctccctccgggtacctaaaggcatttccccacccccgcctcagtgnnnnnnnnnnnnnnnnnnnnnnnnnnnnnnnnnnnnnnnnnnnnnnnnnnnnnnnnnnnnnnnnnnnnnnnnnnnnnnnnnnnnnnnnnnnnnnnnnnnnnnnnnnnnnnnnnnnnnnnnnnnnnnnnnnnnnnnnnnnnnnnnnnnnnnnnnnnnnnnnnnnnnnnnnnnnnnnnnnnnnnnnnnnnnnnnnnnnnnnnnnnnnnnnnnnnnnnnnnnnnnnnnnnnnnnnnnnnnnnnnnnnnnnnnnnnnnnnnnnnnnnnnnnnnnnnnnnnnnnnnnnnnnnnnnnnnnnnnnnnnnnnnnnnnnnnnnnnnnnnnnnnnnnnnnnnnnnnnnnnnnnnnnnnnnnnnnnnnnnnnnnnnnnnnnnnnnnnnnnnnnnnnnnnnnnnnnnnctgtggagactcggggagctctggggtggtgaagagggcccaggctggnnnnnnnnnnnnnnnnnnnaatgtgggagggatggcaagtgccccccgaggagtagcccaggagccccggaggctgccgagagggctggaagtgcagagacgagggacacagggaaggcttggattctcttgccatcttcaatatcagagctcagacagggcaaggcgaggaggggcccggggcgaagacgccacccacattcctccttcccgcgggctgcttctccttctagcccttccttgagagaaaccatctgacaagtccagagtagcggcatccgcagggccatgtctcctgagcaaacactgttttctaggagtccaaggggccttggccatctaggtcaatccctttgcagaacagtggaggaatctgaagcacagagagggaaagcgaagccttctgggtcacacagtccatcggggcagggcatcgacgaacaccaagagaaggaccagcacgagaggacagccctggcagtgattcctcagccaaacccagtgtctacccacatccacacctcacagccaccccatggggaggacaccattgccccttttccaaggtgaggaaacggaggctcagagaagttcagcaacttctcccaggccacacagctgctccgttgtaggactgcagttccaggtgtccccnnnnnnnnnnnnnnnnnnnnnnnnnnnnnnnnnnnnnnnnnnnnnnnnnnnnnnnnnnnnnnnnnnnnnnnnnnnnnnnnnnnnnnnnnnnnnnnnnnnnnnnnnnnnnnnnnnnnnnnnnnnnnnnnnnnnnnnnnnnnnnnnnnnnnnnnnnnnnnnnnnnnnnnnnnnnnnnnnnnnnnnnnnnnnnnnnnnnnnnnnnnnnnnnnnnnnnnnnnnnnnnnnnnnnnnnnnnnnnnnnnnnnnnnnnnnnnnnnnnnnnnnnnnnnnnnnnnnnnnnnnnnnnnnnnnnnnnnnnnnnnnnnnnnnnnnnnnnnnnnnnnnnnnnnnnnnnnnnnnnnnnnnnnnnnnnnnnnnnnnnnnnnnnnnnnnnnnnnnnnnnnnnnnnnnnnnnnnnnnnnnnnnnnnnnnnnnnnnnnnnnnnnnnnnnnnnnnnnnnnnnnnnnnnnnnnnnnnnnnnnnnnnnnnnnnnnnnnnnnnnnnnnnnnnnnnnnnnnnnnnnnnnnnnnnnnnnnnnnnnnnnnnnnnnnnnnnnnnnnnnnnnnnnnnnnnnnnnnnnnnnnnnnnnnnnnnnnnnnnncaattcaaatgctaatcgaatccagaaacactctcacagacacaatgtgtagtctgggcaccccacagtgcatttaagtggacacataaaattaaccatcccaggaagtgaggtggggaagggaagatgggccacaatgggtgtgtctccatgcctgccaccgctgtgggcagctgctggagcacacgccttgaagtcacccctgagggagagggagttggggtatttataccccagctctgtcaggcattgtctgaatgtccacactcctggatcaccagctcctcatgatgtcccatggtcctcatttcaca

SEQ ID NO: 39130 - DNA, 1005 bp, Macaca Mulatta
  misc_feature (1)...(1005): n = A,T,C or G
ggggtgcgcgcaccctctccctcgtccaccgctgccgcctccttcttctgccgctcctggtgctgcttgtgtgctcgtttggtgcggacctggtacctcttttgtgaagcggcagctgaggagactccggcgctcgccatggccgacgaatagcccaaggaaggagtcaagactgagaacaacgatcatattaatttgaaggtggcggggcatgatggttctgtggtgcagtttaagattaagaggcatacaccacttagtaaactaatgaaagcctattgtgaactactgggtattgtcaatgatgacaaatcagattccaaattcaacggggcaaccaattccatgaaaaaggacacaccctgcaacagatggaaatggaaatatgcaatatacaattggatgttgttccaacagacaaaaacggaatgtgtctacctaaaaaatggaaaccctgacttcttttactacccagaaacttctgttttctttttagaatcccaaggtttaccatttcccaaattttcgaaaatctggcatattttgggattaccacccaacacttccttgaataaactatacccgataaataagatattcatcaaaaattcgtcactaattttacccccactttacccccattatctattattaccatanaaaaattgaaagaacaatctggcgtcatcacttatgacacaacactgcaacacttgcacagtttctttcttctttatctcttctagcttacatancaaccccacagggagttagagcttatttaattttggaaacatctaaatgagggtaaaaaccttggatcgcgagagcacagtaacaataaagaggatttcgttgtgtgcaaaagatatacaccaccctgtacctccccaatttcgagaggtacaatgagaaatctatagaaagtcactgcatcacggcgtaatctgcgaatacccgcccctgagaaaacatcttctttgggcgctcatccctctgtctact

SEQ ID NO: 39131 - DNA, 338 bp, Macaca Mulatta
acagaactattgctccattttgtcacatgctcccttaccatcctgcaataaattccacataatataaccaacctattaccctaactaatcacaagacagggacaacaaaggaatgtcacttagccaaaataaaatgtgcttcagtgcgactgcagacaacacgaccaactactcggctgcttctgagttgtgaaaagaaggccaagaacataagggagccaaagggtgggggagccaggaaagccagccaggttccagatccacccagggcctacatggaaatgcagtcccaggctcccttcagacggccctgtgcaatgatcagtccccctgcaaag

SEQ ID NO: 39132 - DNA, 195 bp, Macaca Mulatta
gtcccagctgtcagcgccatttatcacagccatctccagttctagctcagcttgcccacgtccagctcaaatcctccttttccacgaagtcttcccgcagaccccatgaactcttgtggtccgtcttctctgttctgccatcacctctcgcttacctccgactgtggccctcgccaccatctgtctgaggtctta

SEQ ID NO: 39133 - DNA, 814 bp, Macaca Mulatta
  misc_feature (1)...(814): n = A,T,C or G
gggcacgctgtccacatacagaggcttgctacagaagctacagaagaagatggttacatttcaagtgggcaggtgccacatcagacatggttctttgaattttacctaattgtctctaattcttaacagttatttgaggtgatctgcaactctttcaccatctgtaatgccgagatgcaggaagttggtgttggcctgtatcctagtatctctttgctcaatcacagctgtgaccccaactgttccattgtgttcaatgggccccacctcttactgcgagcgtgtccgggacattgaggtgggagaggagctcaccatctgctacctggatatgctgatgaccagcgaggagcgccggaagcagctgagggaccagtactgctttgaatgtgactgttgccgttgccaaacccaggacaaggatgctgatatgctaactggtgaggagcaagtatggaaggaagttcaagaatcgcgtgaagaaattgaagaactgaaggcacactgggaagtgggagcanggttctggccgatgtgcgcaggcgatcgtgcggcaacaatttcggagacggctgtcccaaagatcaagcgcgtagcagcgtgaaaggggctggaactgcgcgcatggagccccctgtgatgcgaagcgtcgggccgtgtttggggagaggagcgggttggggttccaagggggaaggtccgggaagcgaggggaaggcgcgggaagaggggaaagtggtggttgcccgcagggaagacccgcaagcgcccggaagagaaaaagagcggcgtcctagaagcgcgaagacggcag

SEQ ID NO: 39134 - DNA, 263 bp, Macaca Mulatta
gaattccagatttaccttaactggtagaattaatatgacctaagttccacatgtggagtgtcatcactttcttggactgttgcattatattaaatggcctcacatctccatagtgctttaatagtgttggatctgtagtagcagcagaagtaatattagctggcattaactgctttgctaggtcctttatgttctttcatctcataaatgtattacatgtaggagtatgcaataattattcccatcttgcacctctgaagctt

SEQ ID NO: 39135 - DNA, 625 bp, Macaca Mulatta
  misc_feature (1)...(625): n = A,T,C or G
gggggagagggacacaagcaagacagcgtgtgccaaggtgacagctgccatgtcccgagtttccagggcaccttcactcaaaagagtgcaaagaggtggcccttccccctcctctcatgcatcttcttgcagctctccatcagattagctggggacactcaacctttgccatagaaaccaggacagggatggctgattgggacaacccaatggcaccagctcctgaacctctttcctgccttggagctagaaacccttctggaggctgaggccaggagaagggtagaaccacaggaagagactcagaaggccagagctccagattcattttcaccacattcatctccatatatttcctgcttccctggacagaggggcacatgttagcaagaaggaaagagatgttaaagtagccnnnnnnnnnnnnnnnnnnnnnnnnnnnnnnnnnnnnnnnnnnnnnnnnnnnnnnnnnnnnnnnnnnnnnnnnnnnnnnnnnnnnnnnnnnnnnnnnnnnnnnnnnnaanaaannanaanatttggcccccctccccccaaaatcttaaaccctttttttggccggggcctagagaaataaaaggcatactttttcagaactctgtcaaat

SEQ ID NO: 39136 - DNA, 526 bp, Macaca Mulatta
  misc_feature (1)...(526): n = A,T,C or G
tggctcagaatcccagctgctgaaaatatgctctatcgggcttggctgctctgctctgannnnnnnnnnnnnnnnnnnnnnnnnnnnnnnnnnnnnnnnnnnnnnnnnnnnnnnnnnnnnnnnnnnnnnnnnnnnnnnnnnnnnnnnnnnnnnnnnnnnnnnnnnnnnnnnnnnnnnnncctgtggcccctgggctggaaaaggacggaagcgattcttgattagggacagatgtgtgcccttttgcttcactgtcagctgatattcacagcaactaaaaaaatggctgggcctgcacttgccctgctcacggcccaagagctcacctgatttcctgcgatcacacagccagcagctggtgggctgcagcttccacccaggggccctgcccaacgcctatgcatttcccaactcagctctgcacagtgaatacccccatagaaggaagcagaaagacttcaaatcctcccccagtctcctgtactccccactgcctgacatttagccacacctctcccgaagggtt

SEQ ID NO: 39137 - DNA, 769 bp, Macaca Mulatta
ggaagcacactccttttaaaacaattaattaataactagccctgggatttgatgtagaattgtgtatttgtaactgcaatggcagtggttttaaactaccctgtaacaaagaagcaattctaaccagcaaaagaagcagatgtgtttctgtgcaacatcacaggcttgtgaaattgtcctgatattaagatatcaggagtgatataaattggaaatttaaccaaaaatattttccatcagtaaacaaagcctattttaaagtgcttcttgcatttttcagatctttctctttctttctcccaaagtcacattgtagtttctgataaaggaacacactgggaaaactaagcacatatttaaacaatgaaatttaaggtgtaaaaattctgcatttctgacaaatttgatgttcacttttttcttgatttaaatagagcattctaaaaatattactcctataggggacaaatttttatatgcatgttatttttgtttacaaagtgtgggctagtgaagagtgaaaaagaccttggctattgttcttatttcttgatagaaataatagcatcttaatatctggattcaaatctctacttatcacacaacttccatacatttcaaagacaggactttgtattgaatcaaaacaagaaagctgggggcttcctacattttccttggtggtttgtgttccatacagaaatattttattgccataatttctggactttgggcccttaatcctataaatttccttgggctaatttat

SEQ ID NO: 39138 - DNA, 148 bp, Macaca Mulatta
  misc_feature (1)...(148): n = A,T,C or G
tcctgcgcctgcgccggctcctgcaaatgcaaagagtgcaaatgcacctcctgcaagaagagngctgctgctcctgctgccccgtgagctgtgccaagtgtgcccagggctgcatctgtaaaggggcattagagaagtgtagctgctg

SEQ ID NO: 39139 - DNA, 126 bp, Macaca Mulatta
taatcatggccaaaaagaaagagatgcttgagtctaaatctattatcagacctcttactgttgaagaagtcctatatcatattcagtggctagataaaaaccaagaccatataaacttcattcagg

SEQ ID NO: 39140 - DNA, 187 bp, Macaca Mulatta
tgtaccctcaccggagaattgttactggctgccccacctggatctccaggcctggctgaaccaatggatgactgaccatcagaacccttcttctgcctctctcctgtgagaatctggctcacagttggctcctgggccaagccaattgggcatctccccacaggtgagatgtggtgggtaagccacg

SEQ ID NO: 39141 - DNA, 581 bp, Macaca Mulatta
  misc_feature (1)...(581): n = A,T,C or G
gggattcttaacttttcaaacagcccttagcacttttatactaattaacccatttgtgcattgagttttcttttaaaaatgcttgttgtgaaagacacagatacccagtatgcttaatgtgaaaagaaaatgtgttctgttttgtaaaggaactttcaagtattgttgtaaatacttggacagaggttgctgaannnnnnnnnnnnnnnnnnnattattataatgacctaatttattaatctgaagattaaccatttttttgtcttagaatatncnnnnnnnnnnnnnnnnnntgttctagctgtttgcatcaaaggaaaaaaagatttattatcaaggggcatatttttatcttttccaaataaatttgtaatgattgttaccaaaagaatgactccgcccgataaaagaattttgtaaaaataaacctccggccaaaacctttccaaaaaatggaaaccggtttttttttcanccggcctttttgaaaactacgggattgcaagnnnnnnnnnnnnnnnnnnnnnnttcccggggggacaaactttattggccgggcccnnnnnnnnnnnnnnnnnnnn

SEQ ID NO: 39142 - DNA, 831 bp, Macaca Mulatta
ggaaataagaacaatccattcagggaaaattgcttccgtgccttggcccagctgatctgcttccacaagtctactgaacagtataaccacctcggaataggattctggaatccgctggagaaatgaccaccttctcttcctgcccatttgaatgataacacaggagggccagtgggactgtagacagttaagaaacaaccacaggaaaaggagaaaagccatgtcagaaaatggaacagcccaaggtactgacaccaattcccaagacatcacaacctaccccaagcaccactgcctatggatagcaaagatctctgactgtgtcaccaggccctgatggactagagccccatccttgatcatactcacccctaatctaccaccacttcctgcaatgccttcaccgacctgagagcctgatgccttctctgacccatagctatctcctggtttgagtcatcagttccaaggtaatgcaggaaggtgttgctgtggatgctactccaagcttcaggtgtgttgaaactagcaagataggtaggaaggacagcatggggggggtgtgcaaagtgtgctggaatgatgaaaagctgagggaaagaaagagaccgcaaggatccgcacaggcaacaactctcagaacccctccaatattccccataatcccacaaaactagaatggggatgggaatggaacatccccttcggaagggataccccaatggccaaaatcaaaaaccaatcttattttcaatcggggaataccccttccggctaaaaaagccttgggggaaaggaattcccttcaaaatgaacaccggagggaaaaaa

SEQ ID NO: 39143 - DNA, 801 bp, Macaca Mulatta
  misc_feature (1)...(801): n = A,T,C or G
gggannnnnnnnnnnnnnnnnnnnnnnnnnnnnnnnnnnnnnnnnnnnnnnnnnnnnnnnnnnnnnnnnnnnnnnnnnnnnnnnnnnnnnnnnnnnnnnnnnnnnnnnnnnnnnnnnnnnnnnnnnnnnnnnnnnnnnnnnnnnnnnnnnnnnnnnnnnnnnnnnnnnnnnnnnnnnnnnnnnnnnnnnnnnnnnnnnnnnnnnnnnnnnnnnnnnnnnnnnnnnnnnnnnnnnnnnnnnnnnnnnnnnnnnnnnnnnnnnnnnnnnnnnnnnnnnnnnnnnnnnnnnnnnnnnnnnnnnnnnnnnnnnnnnnnnnnnnnnnnnnnnnnnnnnnnnnnnnnnnnnnnnnnnnnnnnnnnnnnnnnnnnnnnnnnnnnnnnnnnnnnnnnnnnnnnnnnnnnnnnnnnnnnnnnnnnnnnnnnnnnnnnnnnnnnnnnnnnnnnnnnnnnnnnnnnnnnnnnnnnnnnnnnnnnnnnnnnnnnnnnnnnnnnnnnnnnnnnnnnnnnnnnnnnnnnnnnnnnnnnnnnnnnnnnnnnnnnnnnnnnggtaannnnnnnnnnnnnnnnnnnnnnnnnnnnnnncggccccctccggccctcgaaaaagctttctaaaccattcgttttgggcgcccggggcccagttaggtaaattgaacaatggtcactaactggtttccctagggaaaatacctgggtccaggaccaaggtgccttgggaattcccnnnnnnnnnnnnnnnnnnnnnnngggggcgggcaaacccgaaagcctgtttctttgaaacccaatattccctaaa

SEQ ID NO: 39144 - DNA, 721 bp, Macaca Mulatta
ggggaagacaggcatctcaaatcggctgattctgcatctggaaactgccttcatcttgaaagaaaagccacccagccccaagatggtgatgctgctgctgctgctttccgcactggctggccttttcggtgcagcagagggacaagaatttcgtcttgggaagtgcacctcgcctccggtgcaggagaattttgacccgaataagtatttcggaagatggtacgaaattgagaagatcccaacaacctttgagaagggacgctgcatccaggccaactactcactaaaggaaaatggaaagatcaaagtgttaaaccaggagttgagagctgatggaactgtgaatcaaattgaaggtgaagcctccccagttaacatcacagagcctgccaagctggaagttaagttcttctggtttatgccatcggcaccgtactgggtcctggccaccgactatgagaactatgccctcgtgtattcctgtgtcagcatcatcaatctttttcgggtggattatgcttggatcttggcaagaaacccgtcatcctccgttcagaaaacaggggacttttctagaaaaatatccccgaacttcctaataaaccattgatggtccaagaaagaatgagcgggcgcccagaatcccgggaagaacctgggccccgcaaggtgtccttccgttaaaagccaagagccttgccaagaaagggggaaaggcgct

SEQ ID NO: 39145 - DNA, 540 bp, Macaca Mulatta
ggagatctggcagtatcctgcataactgttggggtgaggaaattgtctcttaaagatcaaccatgttcgaggaaatgatctctgtttgaacctcactgtcctgtaaggttatccaagtagcttagcctagctaagttctatcagagacccaaattatattttttgaaaatttaacagctggaaacttggactagagctttaataagaaatcttaaattagttgaaattcaagttaaaaatacttatgagatatatttctattacaaagcagtgacaaatgatgccctatgtgacttggagatatctttgacttttaccacaaatcttcatttataaaagaaaaagccaaagtgaaaaaaagttagattgtgtatttttcagtaacagctttccatatcttaagatttttttacagacttaagtttctaattcaggttgtcaaactggccatttaacttcagagatttgcattgtttccattaacaaataagcctgccaccaaaacaaatcacttatcacaatgtgaactgttttccttat

SEQ ID NO: 39146 - DNA, 711 bp, Macaca Mulatta
  misc_feature (1)...(711): n = A,T,C or G
cccattaatggtactagtgtgttttatggtcatgtggccaaaaaagctatgggatccgtaatgctgttgatggcatcagcatccaccncctaatttcgncacatgggagaagaagaagaccctgaagatgctgatgacaatggtgctngtctacacaatcagctggctccctcttaaccttctacctggtgctgctatgcagagaattcatctcaagccacaatggcctctacttcttcctcccactggctggcaattagcagctccttctataaccncctacatccactgctgtctcagcaataacttctggattgaagttcagaaggttatcatggaaattcagaagatgctgctaaataaatcagctgcctgagaggggagcactgctgacccagctctgtctcacccactcaccatcttgactgggtagattccaaacccagaatgctcaaattcccacaattcaaagatattgatgagctacccatcaccctctattccgaggggtggaaatcttctttctctattcacaagtacctagactttaagatgcccagaccgcaatagattctccatcctcaaaatccctgagatagtgtgggacaaaaataaataggattcattcatttctcatggtgtggagggcaggtgaacagaggggtatttgaagagttggggacatgtgagcccccatatttgtgtcactca

SEQ ID NO: 39147 - DNA, 449 bp, Macaca Mulatta
  misc_feature (1)...(449): n = A,T,C or G
ggggtttacagtttctgtggcccatttaagtgtaaaatgcagaagtggctctgtccccccagagttgaggatttgctacactggtcctctggaagcatttaagtagaagaaaaggcttatagtaagaatcactttagtaatcgtcttctggtccttggacttttctgttctgtaatgcttgtaacaatgaatatggtgttgccaatctagtctgatatcatcgttgacctgtacttactttgtggatggttctacctggggttgcactggcacagagccagaacactggactttcaaaagaccattttgacttctacagtgtctacacacatgaatttaaatgcacttgtaactggttaattaccatgaagtaagtctaacttccacttaataaaagtttttgtgtatctnnnnnnnnnnnnnnnnnnnnnnnnnnnnnnnnnnnnnnn

SEQ ID NO: 39148 - DNA, 286 bp, Macaca Mulatta
  misc_feature (1)...(286): n = A,T,C or G
aggatatatacatataaaaccggttgggagccacgntgcaccagtgtgttgatcttggcttgattcagtcagaaactggcgaaggaatatgagaggagtcctctggaaagaaaagaacagaccctgtgctttcatgaaagtgaagatctggctgaaccagttccacaaggttattgtatacatagcctgggtttaaaaggctgtgcccactttgaagaatgtcattgttagactttgctgaaatttctaactgcctacctggatagagaaaataaaatcttttaaa

SEQ ID NO: 39149 - DNA, 792 bp, Macaca Mulatta
gggatacacatcaggaggtggccttgagaagctgagcggagaccagctggactttaatcagagaaaccaagagactgttaccatggcggggaagcccaagcttcactacttcaatggacggggcagaatggagcccatccggtggctcttggctgcatctggagtggagtttgaagagaaatttatagaatctgcagaagatttggaaaagttaagaaatgatgggagtttgatgttccagcaagtaccaatggttgagattgatgggatgaagagggtgcagaccagagccattctcaactacattgccagcaaatacaaccttctacggggaaagacataaaggagagaagccctaattgatatgtatacggaaggtatggcaaatttgaatgaaatgatccttcttctgcccttatgtcaacctgaaggaaaaagatgccaaagattgccttgatcaaagagaaaacaaaaaatcgctacttccctgcctttcaaaaagtgttccagagccatgggacaagaataccttgtttggcaacaagctgaacccggggctggaacttagccctggtgggaacttctctacttatgttggaaagaacctgatctcccagtgtttatctcgcggctatccagttgcgggaaggcccctgtaaaaccaattaacagcaagcatgccccaacggatgaagaaaattatacagacggggctggggcggccccagagggaaactctgtcgccccaaatgcgaaagaacctattataaaggagggcctaagagaaaatgc

SEQ ID NO: 39150 - DNA, 241 bp, Macaca Mulatta
ttatggtttgggaaaacctgtgaagagaaaagcaggttagggagatggcctggttacctcaatgggggaagtatggaaagttcttcaaatgatattatagaagtgattgtcaaggatgagatgatctcagtagaagagagttcagagaatactgatgtcagtaacctccttggtatacatcacaaaattctaagtgagcaaatattctatatatgtgaggaatgtggcaagtgttttgatc

SEQ ID NO: 39151 - DNA, 1070 bp, Macaca Mulatta
  misc_feature (1)...(1070): n = A,T,C or G
gtttcctgctgattttggcactgaccgaagcgctggcatttgccgtccaggagccatctcccagagaatctcttcaggtcctcccttcaggcactcccccgggaaccatggtgacagcaccccacagctctaccagacgtacttctgtggtgatgctgacccccaatcctgatggacccccctcacaggctgcagctcccatgaaaacaccgacaccccgtacagaggggcaccctcctgcacacaccatctccagcatcgccgcgacagtaaccgccccccattctgaaagctccctgtccacaaggcccgctccagcggccacgacaaccacatcctccaacccggagggccgctctccaggccaggctgcccccaccatcctgctgacaaagcnnnnnnnnnnnnnnnnnnnnnnnnnnnnnnnnnnnnnnnnnnnnnnnnnnnnnnnnnnnnnnnnnnnncaggctcttcccgaaaaggggctggtaattcatcacgccctgtcccgcctgcacctggtggccactccaggagtaaagaaggacagcggggacgannnnnnnnnnnnnnnnnnnnnnnnnnnnnnnnnnnnnnnnnnnnnnnnnnnnnnnnnnnnnnnnnnnnnnnnnnnnnnnnnnnnnnnnnnnnccctctaccctcacccccaggaccccactctggggcaactccacttcaccacagccccacacagtggctgcgaccacagtgcccagcaatacctcatgggcaccccctaccacctccctggggcctgcagaggacaagccaggccttcgcagagcagcccaggggggtggttctaccttcaccagccaaggagggacaccagatgccacagcagcctcaggtgcccttgtcagtccacaacctgccccagtgccttctcagcgcccccaccgcggtgacccacaggacggccccagccatagtgactcttggcttactgtcactcctggtaccaacagacctctgtctgccagctctggggtcttcacagctgccacggggcccaccccaggtgccttcaataccagtgtctcagcccc

SEQ ID NO: 39152 - DNA, 381 bp, Macaca Mulatta
atgtcggtttctaacaagctgaccctggacaagctggacgtgaaagggaagccagtcattatgagagtcgacttcaatgttcatatgaagaacaaccagataacaaacaaccagaggattaaggctgctgtcccaagcatcaaattctgcttggacaatggatccaagtcagtagttcttacgagacacctaggccggcctgatggtgtccgtatgtctgactccttagagccagttgctgcagaactcaaatctctgctgggcaaagatgttctgttcttgaaggactgtgtaggcccagaagtggagaaaaaatgtaccaacccagctgctgggtctgtcatcctgcaggagaacctccgctttcaggtggaggaagag

SEQ ID NO: 39153 - DNA, 416 bp, Macaca Mulatta
tctgcaggtctgaagctcactgctctaagctctgaataccagagccctgcagagggtggtgataacgcatcatctctgcaaagaggagcctctgccccggccgccacttcactcaggcttctactgagcagcaaggacagcctgggttccaaatgccgcttcccctgctttagggatctgggtgtcctgataacgtgaccgtgccgaggcaaggtatcaactccaagagtgaatgagtcactgagcgtggcacatgaataaacgtcatgacaaagattctctgagtgaggctaatgccacgtattttacctttgcaaaaaatcaactggcacactgagttctaaccacggatggatgatatctttgcctccacacccagattcatagaaatggctaacgtttcctttctgggggaa

SEQ ID NO: 39154 - DNA, 809 bp, Macaca Mulatta
acttcaactgacagagagattcagagtactttaacggagttactgaatcaaatgggtggatctaatactctgcatagagttaaaatggtcctgcaaacagaccagatacactggatcctgctttgctgcatccaggatgattagatagaaaaatacatactgatttgccatatgaacaagcaagattagacctactgaaaatccatgcaggttccattacaaagcatggtgaaatagattatgaagcaattgtgaagctttcagatggctttaatggagtagacctgagaaatgtttgtactgaagcaggtatgttcgcaattcgtgctgatcatgattttgtagtacaggaagacttcatgaaagcagtcagaaaagtggctgattctaacaagctagagtctaaattggactacaaacctgtgtaatttactgtaagatttttgatagctgcatgacagatgttggcttaacataaaaataaagttaaagaaaataatgtatgtattggcaatgatgtcattaaaagtatatgaataaaaatatgtatgagtaacatcataaaaattagtaattcaacttttaagattgatacagaagaaatgtgtatgtttgttaatgttgcatttattgcagcaagttacaaaggaagagtgtgttgaagattttcgtatttgctgtgtgagcattttgtaaaacactgaaagtggtttgagatagtggtataagaaagcatttcttatgacttattttgtatcatttgtttcctcatctacaaagttgaataaaatctgtttgagtcagttctc

SEQ ID NO: 39155 - DNA, 1196 bp, Macaca Mulatta
  misc_feature (1)...(1196): n = A,T,C or G
gcacagagttgggagcacctccagagcctcctgcaagatgctgctgattctgctgtcagtggccctgctggccctgagctcagctcagaacttacatgaagnnnnnngatgtcggccaggatgaatctccctccctaatatcaggannnnnnnnnnnnnnnnnnnnnnnnnnnnnnnnnnnnnnnnnnnnnnnnnnnnnnnnnnnnnnnnnnnnnnnnnnnnnnnnnnnnnnnnnnnnnnnnnnnnnnnnnnnnnnnnnnnnnnnnnnnnnnnnnnnnnnnnnnnnnnnnnnnnnnnnnnnnnnnnnnnnnnnnnnnnnnnnnnnnnnnnnnnnnnnnnnnnnnnnnnnnnnnnnnnnnnnnnnnnnnnnnnnnnnnnnnnnncctccaggaaagccacaaggacaacccaaacaaggaggcaacagacctcaaggtcccccacctccaggaaggcaacaaggaccaccccaacaaggannnnnnnnnnnnnnnnnnnnnnnnnnnnnnnnnnnnnnctcctccagaacatcaacaaggacaaccccagcaaggaggcaacaggccccaaggtcccccatctccaggagggccacaaggaccaccccaacaaggaggcaagaaacctcaaggtcccccacctccaggaaggccacaaggaccaccccaacaaggaggcaacagacctcaaggtcccccacctccaggaaggccacaaggaccaccccaacaaggaggcaacagacctcaaggtcccccacctccaggaaggcaacaaggaccaccccaacaaggaggcaacagacctcaaggtcccccacctccaggaaggccccagggaccaccnnnnnnnnnnnnnnnnnnnnnnnnnnnnnnnnnnnnnnnnnnnnnnnnnnnnnnnnnnnnnnnnnnnnnnnnnnnnnnnnnnctcaaggtcccccacctccaggnaggaggcaatccccagcaggctcggccacttcctgctggaaagccccagggaccaccatcccctcctcaagggggcagacccgccggacctccccagggacagtctccccagtaatctaggattcaatgacaggnnncaggaaatgaataagaagacgacagtgattcaaatgattcaaatgccgtgacgttggaagaaggtggtcataggtgtaacttcaacataccaataaaatcatcagcttg

SEQ ID NO: 39156 - DNA, 610 bp, Macaca Mulatta
tggcttcctggtggcagggcatgggggcctctgtgtgccggaaatctctacagcaccaggaacagctggaggacagcaaggaactgcagcctttggtcagccatcaggagacctccgccggagccctgagttccctaagcagacagttccaaaggaggctgcacctgagagctgttaacctcagcctccaggcaggacccttctgggaacgcctggaaacaacagagccagggcagcagggcctccaggctgcggctccctcagctaagagtgccttgggtgccaagtcccagacaatccaggagtcctgccaaagcggcaccaaatggctggtggagacccaggtgaaggccaggaggaggaagagaggggcacagaaaggcagtggatcaccaactcacagcctgagccacgagagcacccagctgtctggagccgcccctgcccgctcagccgcagacccctgggagaaggagcatcaccgcctctctgccccataggctcacgtgcccacccagtaaggctgtcgaggtgggaggctgccttccggagcccctactcctcaagagagcccctctgctctcccagtgagtctgacagtgaccgaggg

SEQ ID NO: 39157 - DNA, 584 bp, Macaca Mulatta
acttactctctgatgacgtttgtctgagtgaacaccattataggcaaagacaattataggtaaaagctaaccaaaggtaaacaacaagagcctgcattttagattcatgtgtgtcaagtagaattttgtaatggcttagatatgtggggtaaatgtaaagaatcaaagataacacagtttttgtgcttagaatcctgataaatgttttctgtgagaaattagtcatggtagagaatttgttttatgggggaaagaaatttctgtctctagggtgtttcctttgagttctgaaaaattaaaattctggacatgtagaacttgatggagctttgactaggttactaaattaaaatttttaatgcactgctatctaattgtgtcattatttgctataataaatctctggattttattttcaaatatttgaaaactagagtgtattttatttcttcttacctgaacaaaaaaaatgtggaaaaaaatggttcgggtttcgtcatcgtgttcgtaatctcattatgctacatttttataggtaattgcccatatattagacttttttccccagtgtgttacgtatttat

SEQ ID NO: 39158 - DNA, 2046 bp, Macaca Mulatta
  misc_feature (1)...(2046): n = A,T,C or G
gcagctgctggaagcgggaggcctggccgggctgggcgacctgaatggagccggggccggtgctggtcccagcggccgcgcctcaggggacacggcgcgtaacgggaagcttcaggggctgggagcattacannnnnnnnnnnnnnnnnnnnnnnnnnnnnnnnnnnnnnnnnnnnnnnnnnnnnnnnnnnnnnnnnnnnnnnnnnnnnnnnnnnnnnnnnnnnnnnnnnnnnnnnnnnnnnnnnnnnnnnnnnnnnnnnnnnnnnnnnnnnnnnnnnnnnnnagtgacactacctgagaagcctgttaaactagcttcacataccagagacactacaggtgtatctcagatgttcccttcttcaaaggctagaacaaagnnnnnnnnnnnnnnnnnnnnnnnnnnnnnnnnnnnnnnnnnnnnnnnnnnnnnnnnnnnnnnnnnnnnnnnnnnnnnnnnnnnnnnnnnnnnnnnnnnnnnnnnnnnnnnnnnnnnnnnnnnnnnnnnnnnnnnnnnnnnnnnnnnnnnnnnnnnnnnnnnnnnnnnnnnnnnnnnnnnnnnnnnnnnnnnnnnnnnnnnnnnnnnnnnnnnnnnnnnnnnnnnnnnnnnnnnnnnnnnnnnnnnnnnnnnnnnnnnnnnnnnnnnnnnnnnnnnnnnnnnnnnnnnnnnnnnnnnnnnnnnnnagacttggaagacccgttggcaggacttctctcctatgatgaagaaggaatcaccaagaagccgcctgtgacagagagtaaaacagcttctgacaagagccccagcacagtcagagatcaaggnnnnnnnnnnnnnnnnnnnnnnnnnnnnnnnnnnnnnnnnnnnnnnnnnnnnnnnnnnnnnnnnnnnnnnnnnnnnnnnnnnnnnnnnnnnnnnnnnnnnnnnnnnnnnnnnnnnnnnnnnnnnnnnnnnnnnnnnnnnnnnnnnnnnnnnnnnnnnnnnnnnnnnnnnnnnnnnnnnnnnnnnnnnnnnnnnnnnnnnnnnnnnnnnnnnnnnnnnnnnnnnnnnnnnnnnnnnnnnnnnnnnnnnnnnnnnnnnnnnnnnnnnnnnnnnnnnnnnnnnnnnnnnnnnnnnnnnnnnnnnnnnnnnnnnnnnnnnnnnnnnnnnnnnnnnnnnnnnnnnnnnnnnnnnnnnnnnnnnnnnnnnnnnnnagtaggttcttagcagacagtggcccagaccccaagggagaaccaggctccaaacagagccctccagctgcttccagccccatccagcccaggaagggaggagctgactggctgggcctcaaggacgaggacttggacctgctccctgcctcacccaccagagagggccgtcgggaaagcttggtgcctgccacgccctcagtgcctcctcctgcgagccagcactccacaccannnnnnnnnnnnnnnnnnnnnnnnnnnnnnnnnnnnnnnnnnnnnnnnnnnnnnnnnnnnnnnnnnnnnnnnnnnnnnnnnnnnnnnnnnnnnnnnnnnnnnnnnnnnnnnnnnnnnnnnnnnnnnnnnnnnnnnnnnnnnnnnnnnnnnnnnnnnnnnnnnnnnnnnnnnnnnnnnnnnnnnnnnnnnnnnnnnnnnnnnnnnnnnnnnnnnnnnnnnnnnnnnnnnnnnnnnnnnnnnnnnnnnnnnnnnnnnnnnnnnnnnnnnnnnnnnnnnnnnnnnnnnnnnnnnnnnnnnnnnnnnnnnnnnnnnnnnnnnnnnnnngtcccctgtgactcggaaccatgccgcctcagcactccctacaggttccccaaagaggcgaccagcccctggagacctctcggccactgngagcctgccacctgtttcccgagcacccaagaacccacaaagccttccatgcccnccagcccccgctcccagagtccctagcccggagcctgctaccaggtacagaataccagaagcagctcctggcagcacaggggcagcttcagagtggcaccactgaactccaggccaaactgctacagagccaggcccggctggcagagctggagacccaggtgaggg

SEQ ID NO: 39159 - DNA, 810 bp, Macaca Mulatta
  misc_feature (1)...(810): n = A,T,C or G
ggnnnnnnnnnnnnnnnnnnnnnnnnnnnnnnnnnnnnnnnnnnnnnnnnnnnnnnnnnnnnnnnnnnnnnnnnnnnnnnnnnnnnnnnnnnnnnnnnnnnnnnnnnnnnnnnnnnnnnnnnnnnnnnnnnnnnnnnnnnnnnnnnnnnnnnnnnnnnnnnnnnnnnnnnnnnnnnnnnnnnnnnnnnnnnnnnnnnnnnnnnnnnnnnnnnnnnnnnnnnnnnnnnnnnnnnnnnnnnnnnnnnnnnnnnnnnnnnnnnnnnnnnnnnnnnnnnnnnnnnnnnnnnnnnnnnnnnnnnnnnnnnnnnnnnnnnnnnnnnnnnnnnnnnnnnnnnnnnnnnnnnnnnnnnnnnnnnnnnnnnnnnnnnnnnnnnnnnnnnnnnnnnnnnnnnnnnnnnnnnnnnnnnnnnnnnnnnnnnnnnnnnnnnnnnnnnnnnnnnnnnnnnnnnnnnnnnnnnnnnnnnnnnnnnnnnnnnnnnnnnnnnnnnnnnnnnnnnnnnnnnnnnnnnnnnnnnnnnnnnnnnnnnnnnnnnnnnnnnnnnnnnnnnnnnnnnnnnnnnnnnnnnnnnnnnnnnnnnnnnnnnnnnnnnnnnnnnnnnnnnnnnnnnnnnnnnnnnnnnnnnnnntcattctcacatagtaagcacgaaatttttaataaatccaacattgattccgcagaaacccttttgcctttcaaaaccgtaaaaggtaatttcttaaatcggaaaaacccccctttcctaaacctataaagggaactaaatgggcgggccccccccgccttttttcacccaatttcgaaaagaa

SEQ ID NO: 39160 - DNA, 848 bp, Macaca Mulatta
  misc_feature (1)...(848): n = A,T,C or G
gggccaatannnnnnnnnnnnnnnnnnnnnnnnnnnnnnnnnnnnnnnnnnnnnnnnnnnnnnnnnnnnnnnnnnnnnnnnnnnnnnnnnnnnnnnnnnnnnnnnnnnnnnnnnnnnnnnnnnnnnnnnnnnnnnnnnnnnnnnnnnnnnnnnnnnnnnnnnnnnnnnnnnnnnnnnnnnnnnnnnnnnnnnnnnnnnnnnnnnnnnnnnnnnnnnnnnnnnnnnnnnnnnnnnnnnnnnnnnnnnnnnnnnnnnnnnnnnnnnnnnnnnnnnnnnnnnnnnnnnnnnnnnnnnnnnnnnnnnnnnnnnnnnnnnnnnnnnnnnnnnnnnnnnnnnnnnnnnnnnnnnnnnnnnnnnnnnnnnnnnnnnnnnnnnnnnnnnnnnnnnnnnnnnnnnnnnnnnnnnnnnnnnnnnnnnnnnnnnnnnnnnnnnnnnnnnnnnnnnnnnnnnnnnnnnnnnnnnnnnnnnnnnnnnnnnnnnnnnnnnnnnnnnnnnnnnnnnnnnnnnnnnnnnnnnnnnnnnnnnnnnnnnnnnnnnnnnnnnnnnnnnnnnnnnnnnnnnnnnnnnnnnnnnnnnnnnnnnnnnnnnnnnnnnnnnnnnnnnnnnnnngattattcctatccaccgtttggaagccaataatggctaggtataaataacctggaataatttttccccacggccttaaacccctaatctggaaatccaataacctcacccgataacctaacaagtccaggcctatgcaaagcccaaaccaaagccccatggccactctttcactggtgtaaacccctaccaacggtgatggccttcatggggaaaaggggttaaaaaacagtttaaag

SEQ ID NO: 39161 - DNA, 627 bp, Macaca Mulatta
  misc_feature (1)...(627): n = A,T,C or G
cttggggtctgacttttggccccctcagcctgagaggctcttgctgtcttttgctcatccactttcacaccgcttctgagcagacccccaggaacagcttggctgtcccaccagagggaatcgttgctggactggatttctgcttgagggaagcaccatgaattaaaggcgctagagctccacgcatggaaaagtggcctgttggttcaacgtggtttccttatacttgatcctcctgaaattagagattttcctgagatgactgagtatggagattaccaggcagatgataccgaaatgcttaacggggctgtggctgagcctctagtatctctgctggaggtgagacactctgggaactgatttgacctcaaatgctcctaaaagagaacttgatagcctgacagcaatgaagtattatttggtggggagactgagaaagcctggcttgtattatctgtccgaaaggaagcctcttcatctccgggtgccttggttgactattttggaaataggcatatcaaggttcctgattcagcacttcgctcttttaataacaaatcgtccaaagatctcaaagtagggttttttccnnnnnnnnnnnnnnnnnnncttccagtcttccgc

SEQ ID NO: 39162 - DNA, 441 bp, Macaca Mulatta
  misc_feature (1)...(441): n = A,T,C or G
ggggcacgcagtagtctcaaatatgccagaaatccaggcagtaacataagcacggcaatagtatgcttcacttaggtgattcgcattttttattttttctgctaatgtaatttgaactattaaaattgtttttgatatctttttactccttttgtttttctaatacctgttaatattctaccatcttgctaacattctctagtcttttttaattatctgcaatatatcttttttaataggttagtcttccatctacttgtctattttaactaagaataaagcagcaggctgggtgtggtagctcacgctggtannnnnnnnnnnnnnnnnnnnnnnnnatgggaggaccacttgaggctaggagttagaggccagcctgggcaacatagtgagaccctctctctnnnnnnnnnnnnnnnnnnnnnnnnnnnnnnncttgtc

SEQ ID NO: 39163 - DNA, 778 bp, Macaca Mulatta
ggagccttgtcttccaaagaaatccatcttttttttctaaaaaaagaaaatgcttttgcctttccttccctttccatccgccatatttcttcagcctttcttcttcttcacccgtgtattctttgaccagtaaatggccacacctcaatgatgataaaacagcatcgtcagtaagctatcttatatgcctcatcctgtgagtttgagcttcaggaaacatgagtaaaggtatatgtaatgtatatagtcgtatatgtattctagcaagaaaaacatatttattttaacaaaggggaacactgacttaaattgctgaaggacttgcagctagtgaaaggttctcagtctctgagagtggaccctaattaacataaagactattcatcagcaaatacctactgagcagctctagtgtgccagcacaggccaggcctactagtgagccaggcaaacctgtctttgggaaactcattctacaggggaaggccagtttttttcccttcaattcctcaagtctgggtgggtgacaaagtaggaaggactgggtactggactaccacaagttttaggaaactaagtggtttctcataaacccaaatgttggggtgaaactgggcaacaaacttactcggaaagcaaattattttgcttaaatggaaaagtgtgggagcccactacccctgttcttttgaatccgcccaaggaatttcctcttcaaacttgttggcacaaaaaattgtaacctggggtaaggattcccaacccgggaccgaatttg

SEQ ID NO: 39164 - DNA, 800 bp, Macaca Mulatta
  misc_feature (1)...(800): n = A,T,C or G
gggcttttttgtccgtcttctgacatgtaaggaagtagcattcctctggaggacgcagcattcaagctgccatcttggaagcagagactggatccttaccagtcaagcaacgttccagggccttgatcttggacttcccagccttcataacttctttgatgatgatgattgaatcagaatgttgaatatgcacccctcccccagactgccatcactggaagctgcaaagttgaaaacaacaggtggcagtgacagatatcctcacattctaaagagaggcgccagactctctacatgcaggacttgctaaaagaacatccccgtggaatccagcccattaccacttccacgtgataggtcagaggcctccatgtcaagaggagctacaagcagactggaaaaagatcgcaagattctgaactttgagcctaatgctgtgattagattagacttcgggatgactcangaagtcttcaacaggctgctcactgaagcctcaacatcccaagttcgggccatcctcctacctaagcctcccgagtagctgctactgcagactgccgctcaatctgatcacaccatcgtgtagtcagtggattttgtgtctctgtagagctcatggtctccactccttttgcacatctgtgagaagcctgctgctaaaacgtaccccatttagaaaagcaaaacactttctcttcccgaaactttcccactttagatttgggtttcaattttttataatgatgaaaaagggcatcctgccaataatttttaataaattttaaatcctcaggaat

SEQ ID NO: 39165 - DNA, 1056 bp, Macaca Mulatta
  misc_feature (1)...(1056): n = A,T,C or G
ctaaataaatttatttcatatagattttaaacttctacaattcattaaaaagacataccttcaaaagtcaaactggtaaaaatattcacaacatatgacaatcaaatggttaatttccttttgtaaagagtttataggaataaatgagaaagaagtaaacaaccaaataaaagtagacaaaggtcatgagcagttcatttaaaaagaaatataaatgtctataaacaaatgaaaagataatcaccttaatatcattaaccattaatatttttctcccacatcagcaaaaatctgtatgtttgttgaagctgagtgttataagggtatgatgaaatggacaccatcacacaggatcgcctttcaggaaggttctctgccactggaaaagggcacagcttttctagagggagacaggcaatttctagtaaaatatcaaagacacactcctttgcccttgtacttcaactatttacctgggcttagtacaagttctcctagctacatgtacaagggtgctattgcaacatcatgccttagagaaaaannnnnnnnnnnnnnngtattgtaccaatatcaatttcccagaattgatattatagtatagttgtcaccactgtgggaagagtactcagggactctatgtactacttttgcaacttcccatgagactataattacttcaaaataaaaaatgtttctttgaaaaatcaagatgtataaatatttatggtttcttacaaagtatgaaaaggtaaggacaatccttgtttaattaaattcaaaatgagctggcagaacatatgtaaccagaaggacaaatccacccttcccttttgtcaagcacgtctttgtgaagagaccacaaacaggctttgtgtgagcaacaaggctgtttattcacttgggtgtaagtgggcttagtccagaaagagaatcagcaaagggagatgggaaagaggttgctttgtaggagttgggtaggtaatggaaaatgacagtaaaaggtgactatctattgttagcagaggaggaatcgcaaggtacatggtggggaga

SEQ ID NO: 39166 - DNA, 192 bp, Macaca Mulatta
agttggaggacgagtaagtcgtgaattaaattatactcgccagaagattggagaagaggctatgtttaatcctcaactcatgatacagacccctaaggaagaaggtgctaacgtccttaccacagaagcactcctacagcacctggactctgtgctccaggccagccgtgtccacgtatacatgtacaacag

SEQ ID NO: 39167 - DNA, 648 bp, Macaca Mulatta
  misc_feature (1)...(648): n = A,T,C or G
ggggatgtgccctgagatctctgtggcaaggcccaggactctctctctcctggctcagatctgttcaaaattttatcattaatgtgaataaataaatagaaggcttgctgggccaatttacaggtgatacaaagatggagactgcaaggaatatgataatgagggagtcaggtaccaaggagatggtcaaactgaagagcatccagaatttttgataagaataagagataattcaaagcatgtgaaaattatatagggtggttgaaggagctggaattgtttatcctgngggaatatgataactgtncaaaacaatgaaggatctgagattttacccctacttgccggaatactagttttgcaccgttttcatggatgctggcagaggacacaagaactctgggttcaaaaacaaaagacagttttacctttatagttattcccacccctggattacccgcctttttcttgtgccaattccctaaccccccgtttccccaggccaacccaaaaaaaacccagttggggcttgcgccccaatgggttgcattcagggggggactcttaactttgaaaacccttctttttaaggggcgccaccaccccccccccctttttggaaaggggaactctccctaaaaactcttt

SEQ ID NO: 39168 - DNA, 1086 bp, Macaca Mulatta
  misc_feature (1)...(1086): n = A,T,C or G
ggggcgtggcctgcatgagaagcaaacatcagagatctgaagaagcttataaaatcgcttgggagaggccagtcaccaagacaggcatctcaaatcggctgattctgcatctggaaactgccttcatcttgaaagaaaaggtcccttctccagccacccagccccaagatggtgatgctgctgctgctgctttccgcactggctggccttttcggtgcagcagagggacaagaatttcgtcttgggaagtgcacctcgcctccagtgcaggagaattttgacccgaataagtatttcggaagatggtacaaaattgagaagatcccaacaacctttgagaagggacgctgcatccaaaccaactacttcctaaatgataatggaagagatcaaaatggtttaacgcaggagtttgagaagcctgatggaacctgtgaaaacaaaattgaagaggtggaacccttcccctcagtttaaacaattcgcaagaaacactggtccataaactctgggaaaatattagaagatttgccattttctgtggacttattattgtcccccgattcgagtgacataactccaatctaatacttggggagaaggtactagaagagagacgaaaccaaaaaactccaataaatacactaaatgttggtaaaataaanaaaaaccgatataattatagccccctcaccttctcgcttgagtggagtaaatatgtcacacccatagagatatgcgcgaccacaaggcatgaatcgaagagtgttaacgaaagtataagtaagagtttgtgtacccggtttagtggggggacaatttattaatattacactcttagagagaacaattcgcgtatggggcgaatcaatgagaaagcaagacacgnggatatggctacatctccccacgcctattctacatacactacacgtagtattacctatcacatctcataactgtatcataataaaaatatactccgtatgaagaagagtatctctatgatgtactacacctatttaaacgatcttcgcgatagagaaactgatgaacgagcgatttagactgaaatatcagtccgga

SEQ ID NO: 39169 - DNA, 1354 bp, Macaca Mulatta
  misc_feature (1)...(1354): n = A,T,C or G
ttgcttttcgactgtatgatttggataaagatgaaaagatctcccgtgatgagctgttacaggnnnnnnnnnnnnnnnnnnnnnnnnnnnnnnnnnnnnnnnnnnnnnnnnnnnnnnnnnnnnnnnnnnnnnnnnnnnnnnnnnnnnnnnnnnnnnnnnnnnnnnnnnnnnnnnnnnnnnnnnnnnnnnnnnnnnnnnnnnnnnnnnnnnnnnnnnnnnnnnnnnnnnnnnnnnnnnnnnnnnnnnnnnnnnnnnnnnnnnnnnnnnnnnnnnnnnnnnnnnnnnnnnnnnnnnnnnnnnnnnnnnnnnnnnnnnnnnnnnnnnnnnnnnnnnnnnnnnnnnnnnnnnnnnnnnnnnnnnnnnnnnnnnnnnnnnnnnnnnnnnnnnnnnnnnnnnnnnnnnnnnnnnnnnnnnnnnnnnnnnnnnnnnnnnnnnnnnnnnnnnnnnnnnnnnnnnnnnnnnnnnnnnnnnnnnnnnnnnnnnnnnnnnnnnnnnnnnnnnnnnnnnnnnnnnnnnnnnnnnnnnnnnnnnnnnnnnnnnnnnnnnnnnnnnnnnnnnnnnnnnnnnnnnnnnnnnnnnnnnnnnnnnnnnnnnnnnnnnnnnnnnnnnnnnnnnnnnnnnnnnnnnnnnnnnnnnnnnnnnnnnnnnnnnnnnnnnnnnnnnnnnnnnnnnnnnnnnnnnnnnnnnnnnnnnnnnnnnnnnnnnnnnnnnnnnnnnnnnnnnnnnnnnnnnnnnnnnnnnnnnnnnnnnnnnnnnnnnnnnnnnnnnnnnnnnnnnnnnnnnnnnnnnnnnnnnnnnnnnnnnnnnnnnnnnnnnnnnnnnnnnnnnnnttcattattaaatgggcctctgggatgttgcctctccaggagctttttggtaaccaacatttctctcaaagtatgagaccatcctctgcactccgctctgtcatcaaaggctgctaggtggagataccctttntgaaaggtggccttggtgagaggtatggagtcaagtcttctaggctgcttgcccacatcactctacctctggcctctgattctcaactttgtacctatgtggctcctcttgttagtgcaatgttgactgttaaaaaaaaaacagcagtatgcttacaggtttgcttagtttggggacactgtaactaccagaatggctgctctgacaatatgcctagggactttctcatggcttttattaacaaggaggctgggcaccctataaagcctcatgcattcacacctttgcagcatggtttatgcctcagtgttatgtgcactgcaatgttttccacttcacatttccaagtagaaagattagtgttacggaagtgcctaatatcccagtgcaa

SEQ ID NO: 39170 - DNA, 881 bp, Macaca Mulatta
cacatgctatatgcttatagttccaacatactgtacacgtttttttgatagcaatccaatgaagctgatcatggaccacgaatatgaagcacctacggtttgtcgcagcctctaatcttactgacaaagtaaatacttaggcaagtcagcagagcatgaacctcatacatatgtttttaagattatgtactgcacccacatatatctactcttggtagtaacgtgactctaccctttttgggaatggatttaggtggataactgaaaccgaaaagcagtttgacacaaatacacagaaagcagcattgcggtgcatcatcaatcatctgagtcccgtaactgtaacactttttctcttaaatataaatcggtagttactaaaaatcactttaaaaattttattctgtcttgctgaattaagcagaaatcactttttttagagccctgtttaaatgagtgttaactcgagaggactactgatgatgaagcttctcttgtttttaaagtattgacacatcattgttaagtagttttggaatggaacattttaaagttttctccacagaaagcaacatagtggcacttgttgagtaaatcatcataaaaatgatttaatagcagatgagttgatagtctaactgttaacaccttcttaatgtttgtgatcttggatgccttttccatggaagacattttttaaaagcattggccctctcacaatacacatttcgaaataagctcaggccttgtattacccttggaattccaatttttggttagccttccaaatgagaattcggaaatagccgtattattctgagagacaccgtcttaagacactcaagctttaagccatgtgcgcagtaaaccttaatgttctc

SEQ ID NO: 39171 - DNA, 225 bp, Macaca Mulatta
tagaaacctgattctgggatcctgctgggaaggaggattgggggtctcacgagagaaagtgattttgctggtataggactctggccagagaggctgtaggaaggtttgtcaacgcacagcaaagaccaggggatcatgtgtgaggcagcatggcttcagctgcaggaggaggagtgggtgagtcactctttctaatcacttgtactgatgtttttgtttctaaag

SEQ ID NO: 39172 - DNA, 159 bp, Macaca Mulatta
cctgagagaaaagacctccagtgagaacccaccgacccctctggcatgagggtctgaggttcctggagacacagcttctggcaacgagcacgggagtccccagaggaggtttcccatctagggatacaatgtggctgaaatagctttaaagaaaaaaga

SEQ ID NO: 39173 - DNA, 363 bp, Macaca Mulatta
  misc_feature (1)...(363): n = A,T,C or G
cgactgtgggattgtggaatgctgtgtgtggcaaaggatgaaatgagttcaatgatagtgaaatgtcctttgatatataggaaaatgcatgctgtaagtatggaacataaatatgtattgaaatgcaagtgctatacaccttgctctgagattttatttctgaaaagaagagaaaatgtttactgtttactaagttagtttttagaactgcttaaaaatgatatggttagaaacagattacatgttttataaccagtttcaaatttgttgcctttctagtaaatcatgaacaatgaaaccgttgttcattacaacaggggaaaatttactaggagaaagaaatgactatactttaaaaaanaa

SEQ ID NO: 39174 - DNA, 663 bp, Macaca Mulatta
  misc_feature (1)...(663): n = A,T,C or G
tcagagcgtatctatagctaagaagaatagttacaacccctgaaatcaggagagaaggatgacagacctaaggccctgccagagagaattttccttcgtaagaagtcaggtgtttgtagtagttttactgttagattgaaataatctagaaattacgtgaacagtcgggaaaatacttgttaaagttagctaatttaactctgattataaagaaaacaagaactgagaaatgcctttaaataagtcaaatattgatagtattgggtagcataaagatgtatactcctataacttgttttataacctcaggttgaagaattcaaaagtatacctgccaagagtaacaatgtcattaatgaaacaacaaccagaaacaatgccctcnnnnnnnnnnnnnnnnnnnnnnnnnnnnnnnnnnnngaagttatggatagccttaaacaggaaacacaagggcttcagaaagaaaaagaagtaagatgttttttatcagtgtttattttggtgnnnnnnnnnnnnnnnnnnnnnntaaagatgtttttttcaaaaatatgaaacatgaactggtaagtttggacttttaatgtccaacattcctaaaactagtcaacctagacttagatgactattcgtttaattcctgctgtcctgttttttaaaaag

SEQ ID NO: 39175 - DNA, 595 bp, Macaca Mulatta
gcccatcaaggaatctgagatcactgactttttcctgggggcctctctcaacgatgaggtgttgaagattatgccagtgcagaagcagaccaacactggccagtgcaccaggttcaaggcatttattgccatcagggactacaatggccacatcggtctgggtgttaagtgctccaaggaggtggccactgccatacgtggggccatcatcctggccaagctcttcattctccctatgcacagaggctactgggggaacaagatccacaagccccacattgtcccttgcaaggtgacaggccgctgcggctctgtgttggtgcgcctcatccctgcgcccaagggcactggcattgtctcagcccgtgtccaagaagctgctcatgacagctggtatcgatgactgctacacctcagccaggggctgcactgccacgctgggtggctttgccaaggccacctttgatgccatctctaagacctacagctacctgacacccgacctctggaaagagactggattcaccaagtctccctatcaggaattcactgaccacctcatcaagacacacaccagagtctctgtgcagaggac

SEQ ID NO: 39176 - DNA, 880 bp, Macaca Mulatta
  misc_feature (1)...(880): n = A,T,C or G
tgacatcagaaataggtttccaaactttctgggtattataggactctatgactatctccagcaattacacgagaacccccagtccctaggaacttatctacaggggacagcatctgccctcagccaaagccaggaacgaccaccaccagtaaacagagttcccccattgtcaccctcatctcaggagcccaggtcaggccagcctctccccaaggagtcagtagcaatcaagggaaggtcctcctgcccagctttcctgagataccccacagagaatggtactggaaaaggtggagaccaagatggtgcagggaaaagccctactggacatagcacaaacttgcctgatcttgtctcggggctgggagattctgccaacagggttccatttgttcccttaacctcttcccccacggcagccattcctggaatccctgagcctccctggctgccatccccaccttatccaagatctctgaggccagatggcatgaatccggctccacagttacaggatgagatacaaccacagctgccactgctgatgcaccttcaggcagccatggcaaacccccgtgccatgcaagccctgcggcagattgagcagggtctgcaggtcctagctactgaagcacctcgcctcctactctggttcatgccttgcctagcagggatgggtagtgtggcaggaggtatacagtctagagaagatccccttatgtctgaggatcctctcccaaatccacctcctgaggtgttcccagcactggactctgcagagctgggcttccattcccctccctttctccatatgctgncagatttagttagtacaaatccccagcagctgcagcctgaggctcactttcaggtgcagctg

SEQ ID NO: 39177 - DNA, 817 bp, Macaca Mulatta
gggggcttccctagcggtctccgccggttggggtaaagtaactccggctgctccaccatggcgtctatggggaccctcgccttcgatgaatatgggcgcccttttctcatcatcaaggatcaggaccgcaagtcccgtcttatgggacttgaggcccttaagtctcatataatggcagcaaaggctgtagcaaatacaatgagaacgtcacttggaccaaatgggcttgataagatgatggtggataaggatggcgatgtgactgtaactaatgacggggccaccatcttaagcatgatggatgttgatcatcagattgccaagctgatggtggaactgtccaagtctcaggatgatgaaattggagatggaaccacaggagtggttgtcctggctggtgccttgttagaagaagcggagcaattgctagaccgaggcattcaccctatcagaatagctgatggctatgagcaggctgcccgcgttgctattgaacacctggacaagatcagtgatagcgtccttgttgacataaaggacacccgaacctcctgattcagacagcaaaaaacccacgctgggctccaaagttgttcaacagtttgtccaccgacagaatggcctgaaatttgcttgtgaaatgcccgtccctccccggttaacaacaatatggaaaccggcacaagaattgtttgaacttttgaaagctttatctcaaaagttagaaaagggccaaaaagttgggggcccgggcaagggccttgggaagaggacaacctataaaattttgtgattttaaaaaggggaccctttggac

SEQ ID NO: 39178 - DNA, 626 bp, Macaca Mulatta
  misc_feature (1)...(626): n = A,T,C or G
ggggatggcagcctggtggccttcagacttgcattgggacatcagctctgcagattttggggttgtcagcctccataatcattatctgagtcacctgcaggaccaaaatggaggagacaccacagcattgcctgtccagattgccagacaactctgccctgaagcagcaggagttacccgcccaccggctgtatttcacggccaggagagtcctcttcgtctttttcacaacaggaatattctgcctttgtatgggcatcatccttatattgtctgcaaggagcactcaggaaatagagattaattacacaagaatatgtgcaaattgtgcaaaactgcgggaaaatgcctctaattttgacaaagaatgcacctgctctattcccttttacctttcagganaaatgatgggtaatgtttatatgtactacaaattgtatggcttctatcagacctgtatcgatatgttcgatccagaagtatagacaactggtgggcaagatgtaaaatcgttgagaatgtgcccatttaaaatgtccaacataaacccccacttccttgggggctattgcaaacctgtcatgaccctattttttcccactattctctgtcaatagggcatgtaa

SEQ ID NO: 39179 - DNA, 547 bp, Macaca Mulatta
  misc_feature (1)...(547): n = A,T,C or G
tggcagacgtccagagttgccctgagctttataacagcgacttacagaagtgtgcaggcccattctgaaaacacacgcagtctgaaaaacgtccagagggacaggcctgaaaacgttaagagcacttcaatcctgggggttggttttggggatgcctcccttctctgtggtggtctgcacttgcaatttcactgactgggagtcaggataatgcccgccgncccccaccccccgcaaaatgcccaccttttagtctctaaaaccggtacctatgaccttacatggaacggagaatttgcagaagtgattttggatctcgagaaggggaggttatcctggcttggtgctggtcattatcccagaaaacacaatcccaaaagccaggatccggaatgccaaaatcctgaaaaatccaaatccctaaagtctaaaatccctaacatctgattggatccctaaaacataatgacacatttgggattaggttcgatcaacgcttctaaaagcgcatttcaaggtgttagcaataaagtttgtatatctccat

SEQ ID NO: 39180 - DNA, 800 bp, Macaca Mulatta
ctatgtgatcaatgtgaccagggcagcgatgcctttgcagtcaccagcggtgccatggtcacgggcgttgtgccttgcgagatccagaacagatggaagcctttctacacctgtggccagacggcagccttggagattggaagtccttcagctgccactgttactgtggctgggctggccccacctgccaggagcccaggcttgggcctaaagaagcaatataaagccagggcccctgccactgcctcttcttttccctgctgccacttttccagtcctggagctactctgtcccactcttgctctattcagtttacagtcaaccctcccaagcacacaccccgcttcccttggaatccctgaggggtagaaggggccagaaaaaacgcttataaaaccagaggccctctgagatcatgtgactcctccatggcaaggaagcagttccagggagagtcaggttccagctagttagggctgccagcctagggctttgtgcctacacctcactaggcccatggagaggtcacagaagatgggccgtgcacgggcagatgggcccccaaaaatcttggctaaggtcggtaaagtgttaagctgttgtctgcactgtttcatcataaagtcacttttttccactgcctgaggtttggctgttcctcctgttatcccaagctctaagcccttcccatggtccccagaccgaggagcaggggtaggactcgtcgcgagcgtcccgcggccaagtgccctgagaagccagtcctgccgtggtgctcctgaggggcgcttcggagttt

SEQ ID NO: 39181 - DNA, 518 bp, Macaca Mulatta
gctctcagcggcagtggaaagcacagactagacttctcaccactgcacaccagaatcctgccctgggccttgcctggtctgcctgactctgccatgggctgcaggctcctctgctgtgtggccctctgcctcctccaagcaggttccttggacacagctgtttcccagactccaaaatatctggtcaggcagacgggaaaaaacgagtcccttaaatgtgaacaaaatctgggccataatactatgtattggtataagcaggactctaagaaattgctgaagataatgtttatctacaataataaggagcccattttaaatgaaacagttccaaatcgcttctcacctaagtctccagacaaagctcatttaaatcttcacatcaagtccctggagcttggtgactctgctgtatatttctgtgccagcagcctggacatggagctaacaccactcagtacttcggcgcaggcaccaggctcacagtgctagaggacctgaaaaaagtgttcccaccc

SEQ ID NO: 39182 - DNA, 779 bp, Macaca Mulatta
ggagttgagatctagaaagcatagacattttttacactctggatagactttattcttgaaggtcatcagaaatgaggttggaatttcgaggttttgagcagggggagcatcttatattcacccttaaattgttattaatgcatcccgttttcttcattccccaatagctatctcatttcactgtctcaaaattttgttttaaaataatagaaatgttttgccattattaagtaccactttattcctaacaaaaataagtactcaggacttttttcaatatgaaatatttatgtaatgttttatggtatgtggtagaggaagtgaaatgtaatgttctcagttttgttccatatttgcattccttttatgctttacctgtattttatcatttgtaagcagaactctagctatatggatagaaatgaaatctctgagatgaaacaaaggaatcacacatgataaaatttaggcaaattagttaagaaatggcccttttgaatgttgaagataggaaagcagccatatattcaaatgtaattttcctcctttagttataatgacatcttttccaattgggcttcataaatgtgtttctttcttaatagtatcccatttccagcatatattcaacatgaaattttatcattcttcttcctaatggaatgtccttccttatagaaatgttcatgaccaaattcatttggtttttttcatgtccaataatgtatgccaaaattaaaatgggttttcccgttttattcttgaaagatgtcctttat

SEQ ID NO: 39183 - DNA, 706 bp, Macaca Mulatta
ggggattcacctcatggtttggacactaattcctgagagaaccttgagacgcacaaagtgaaaaaaatgtcaagcaggaatgaaagctctagttttttgcttgttggtatatgtaaatttgtttaaaaagtattcatcctctcctgtcattggtagaagttttgctttgcttgataatagggattctgatgtactcttataacttaggttttcttagaaattaaatagcatttaagatcaatgtaatacagttttaagcaggtacactaattatattattgattctatagaaaactaaaattatagatgaggtatcagaatccattataggttgtaaaaaaattcatgttcttcatagattgagtctaatatttcttctacagattgtatctgatgttcctactacctaaattattacgttcaaagttttgaaaattgaacaaaggtatttttaagtacttaaaacatttctctatatttataattctgtattacatgtataattataagatattgtttgctttgactatctgtactttgttttcctgtgaagtttcaacttacgtgttcttgatttaacttaattgttccatgtagccatgtataatggaaaaaggcagttaatatttgttattgtgttctatgccaggggactgtaccaaactctgattggtacattatttcatgcctttacaattctggggat

SEQ ID NO: 39184 - DNA, 802 bp, Macaca Mulatta
atatatgtaaatgactaatccatcaaagctgcatttgcagaaatatttcttaaaatatagtgacaaggccaggctcaagcccagggtccctgaccccagctgggctctggctctgcggcaggctgggggggcgggcttgggctcacctgaggttgctgaggttctcggggggcaggcggctgcacacttcttggagggcctgcagccgggcccctggctccttcaggctgcggagggagtggagagacctgtcagccagcgcagggctacccctttgcatcctcctcttccccatcccctccctcctccaacatcctcacctggctgccctcatccagtcgtcatagaggtcgaaggtcatcaggggctctggcagctcccgcagataggacttgagggcacctgaagcaggagtgtgggggagggtcagaggcagcccccaccccactctcccactttccctgtagaaggaacctccggcccttgttcacactaatgtgtctagatctgacagtttctttgggctgcaggcccttttgagaaaatgaaggctagccatcatttccccagaaaaatgtacaaacattttggggggctcatgatggatcccacattaagaacccctgagcgtcctcagtctcctcaacagaatatcatgtcttgaagccaggcttatcttgggatcatttcacaccactgcaccccttccccccaacctcctgcccagggctccccggatcaggcacctgccacggcgtgtgggtcggagcagaactcctccaggctgtgggggtccgaggcc

SEQ ID NO: 39185 - DNA, 828 bp, Macaca Mulatta
  misc_feature (1)...(828): n = A,T,C or G
ggattacctgagggtacctgtggggaacagttccttcccatgtggtagtattttgttggaagagaaagtttatacgaaaaatgaaattctaccaacagcagagaaactctaaaaagtttgatagtacctatcaaagtgctgtacttctgtgatagagaacatctgatataccaatttagatctatttctttatactttttctagtcatttgcttgatagtgctttggatcattatcacctttgccacttaaaatatataaataccctttttacttcataaggaagaagaatttttttgataattactgagttcagccttttgtgatgacttatattttggacctatattttaactttaaagaatgtcagatcccttctttgtcttactagttaaatcctcacctattctcttgggtataaatataaatgtgtgtcattgttatattgttcagctagatgagcaagtgtcttagggtagtaggtagcctggtggttttagaagtgtttggtgatttttatggggagagttttcctaagtggtggtttataggtggtatcagatattattagggcagcttttgggggactaatctcaggtcccccagagcagcagcatttttctcattgatataagtaaaattcttaacttttcttatcatacaagatgcatgaatcgaatgtgagaattgaaggcatttcttctgcataaacaaagaaattcaacctgctggaaagaaacctggacagnttctttggaatttgctaaattgcagttttagtatgtccctgattacagagtgacaatatttaatcaagcctttgttataa

SEQ ID NO: 39186 - DNA, 319 bp, Macaca Mulatta
ggctggccagctaaactatgtggatccagctactggctatgtggtgctcacacagattgcccacttgcaaagaggtgaatgttgtggctctgcttgcagacattgtccatatggtcaagtcaatgttaaagattcatctaaaaagaagcaattcaattcatatttttatgtttgacaacaatttcatctctgttctctaactgtgcttgtattttttaaaaaataaagccctaattcagaattgctggattattagttttgaacactagtttaatcctaaatacatatattaaaagaacatcaataaaatgaaaaagct

SEQ ID NO: 39187 - DNA, 464 bp, Macaca Mulatta
gggtgggaacacttttttcaggtcctctaggaccgtgagccgggtgcctggcccgaagtactgctctttgtaggtcgatgtagtattcccgttctctagcactgcagatgtagaagctgctgtcttcaggatgggcattggtcactgtcagagtggagaaggtcaggtttggatggttgatgggaaacttgtcctgcttgacgccttgctcgtatgtgacgccggagccctcattggaagttgccatgagtatgaggctctgtgtctggaactgacgataccaaaacatagttgtggcctgaaagtccaggcaacggcactcgatcttcacagaggttcctctcttacagataaccctgctcggatactgagagacgacagcagcaagcccggagcctgctgtccccagaagcagcagaagcaacagcatcttcggtgatggccccacaccaccttctcgggga

SEQ ID NO: 39188 - DNA, 420 bp, Macaca Mulatta
ctgggccttgtgcagcagctgctggagtcagaggttaaggccacaagcagtgggccaggtgggcccctgcacaatgtggaagaggccaaggagcactcctggagggaagcactcaacttggccatccacctgggccatgaggccatcactgatgtgctgttggccagtgtcaagtttgacttccgccagatccatgaggccctgctagtggcagtggacacaaagcaaccagcagtggtgcattgcctgctggcccacctggaacgggagaagggtcgcaaagtagacaccaggtctttctcactggctttctttgactcattaattgatggctcccgctttgcacctggtgtgactcctctcaccctggcctgccagaaggacctgtacgagatagcacagctgctcatggaccagggc

SEQ ID NO: 39189 - DNA, 784 bp, Macaca Mulatta
  misc_feature (1)...(784): n = A,T,C or G
agggttaccttacaggcccggtattgcccatcnnnnnnnnnnnnnnnnnnccaatagccattcccttttctttttaagatgtactttcattctcttttggtgatggtatttttcaatgtatttaatcggaagcaaattttctcctaatttcacntgtgaggagcctgctacccagaaggttaagaattttggccaaagtcatatggcaaatagtatcaatgaagacactgtagtcaattttaaaacatttcagagtttagccagtaaatactgaatttagtaaacctcagtttgcacatggaaagctggaaataaaacttgtctcctgaccgctgtgttggagctggaaggaatgcccaacttacactatagatgaggaaacatgaaacatgcctgcagcggccactgagatgtctgctctgtcctgtcggttcacgaagctcttttctagtgttgtttactctgaactcaannnnnnnnnnnnnnnnnnnnnnnnnnnnnnnnnnnnnnngagagtctctgttgtccaggtcggagtacagtgatgtgatctcagctcactacagcctctgactcctgggtcnnnnnnnnnnnnnnnnnnnnnnnnnnnnnnnnnnnnnnnnnnnnnntgtgtgccaccatacctgactaattttttgnnnnnnnnnnnnnnnnnnnnnnnnnnnnnnnnnnnnnnnnnnnnnnannnnnnnnnnnnnntgtcaggtgatctgcccnnnnnnnnnnnnnnnnnnnnnnnannnnnnnnnnnnnnnnnnnnncc

SEQ ID NO: 39190 - DNA, 588 bp, Macaca Mulatta
  misc_feature (1)...(588): n = A,T,C or G
gggtnnagggagttaggaaaccnggaaaaatatatatacaagatataccagaaatagatatatataacaaatatatataccgaaaataggtataccagaatagaatgcagctattagaaagattaaggtggccgggcgtggtggctcaagcctgtaatcctnnnnnnnnnnnnnnnnnnnatgggcgnnnnnnnnnnnnnnnnnnnnnnnnnnnnnnnnnntnnnnnnnnnnnnnnnnnnnnnnnnnnnnnnnnnnnnnnnnctagccgggcgaggtggcgggcnnnnnnnnnnnnnnnnnnnnnnnnnnnnnnnacaggagaatggcgnnnnnnnnnnnnnngnnnnnnnnnnnnnnnnnnnnnntgnnnnnnnnnnnnnnnnnnnnnntacagagtgagagtccgnnnnnnnnnnnnnnnnnnnnnnnnnnnnnnnnnnttaaggtgactgtacatacataatgatatggtgttatctctaatatataatggtaagaagcagagtatagaatagggtttatagtatattcctccccctacccccannnnnnnnnnnnnnnnnnnnnnnnnnnnnnnnnnncatgtc

SEQ ID NO: 39191 - DNA, 813 bp, Macaca Mulatta
  misc_feature (1)...(813): n = A,T,C or G
gggatctggtttttattttcaaatgtataaaaagcaaacccagctacaaaggccttttcacccttcttccacttcgtaactaatcccagtctcttctcatcactcctcctcttacagtactctgctattcacgctcatttcattttcttctttcnnnnnnnnnnnnnnnnnnnnnnnnnnnntttgaaatcatggtcctttttttctgctgaatatattctatatattctatatatataaattatatatatatacatatatatgtctggctacctcgttttagtttactttttttctgaagccctggaattctacaagagagatattttgagactgaaacatgtttgtgcctagactggaaagatgcccttgggtttgtccgtctttttgtgttggcttcttccccagcctccatccgtccagtgtgccccacttccacattctggctataatttcctttttctccttgttcattggggatttgaagacctgtttctaaatcttgacttaaattttataccacaaaaatgtggggagcaatgagaagttgaacccgttgttttttggttgaaaaagcaaaaatgtggtctggaaaatgaggaatttatatggcaaatttttgccctaaccctcacccttctttcaagttttcccccaaaaaaagggcaaacaaatgtcggccttccctgtggggaaaaaaggaaccaaaacctggccttagcaaaacccccccgggggcgttgaaataaacctactggccctaaaccccgtctctaataaacaaaaatgggggagttttggggggtttttaaa

SEQ ID NO: 39192 - DNA, 1010 bp, Macaca Mulatta
  misc_feature (1)...(1010): n = A,T,C or G
agcccnttagatatatgtggctgtgactcncnatactcnagggtacctctaagttcnaatgggctatgaaattaagtcttgtacagtatatttttgtaaatgaaagaaagtaaaaaaatcagtgtattgcacttagtaaggataagtgttgttttgtgactattttagttatatatgtaaatgtggtctgattttctgatgactgaccagtaaagaatgtctctatttggcattcttcnactcaggacagatctgtgttttactcagttattttagttcagtttagttgagtattagtttagtcagctaaggtagcagtatgaagctcatggnctttgtaaaaactggcctaaaactgattctttcagctttaggcaggagaattgctgaggacttttgagccttgctagcctgacaggacaaccattaactagcgnggggccctgagcagtcacttaacccttttatgntctaatccccccatatatgggggaaaattttccatacccaaaatanggtcnctgggtcaacccntaagaaaaangggacccagaggcccangaagaaagagtcctcatgccacatatccccggtaacnggacttatcaaaagaactngcngcatgtatgcctatgacagaaangatgccaggaactcctcaaaagcacagcattccagataagcttctnncacaaggacattngtccaaaaacagctacctccaccaangagctaatgccaaccccnncaacaagtcccngtaaccaatggcccttngtttcaaaanggcttacattaatttctcctttttagggtaaaaggcttccccctttccccagcccctcnggaggngtccanggttcaccatancaggatnncaatccctngctattccngaataaactccttttgggaaagtcngtctcngtngttattttaggtngacatataaaactagngacttcttcttactttangaacaangngtggggggngaccaatataaaaag

SEQ ID NO: 39193 - DNA, 1265 bp, Macaca Mulatta
  misc_feature (1)...(1265): n = A,T,C or G
gggggctcaggtgattttcctgtcttggcctccccagaggctgggactacatgtgtgtgccaccatgcccaactaatttttaaattttttgtagagatggcatctcaccgnnnnnnnnnnnnnnnnnnnnnnnnnnnnggcacaagtgatctgcccacctctttnnnnnnnnnnnnnnannnnnnnnnnnnnnnnnntagcacctgacaatttaatttttacgttttttttatatttttttaaagagaggcacactcgtgttcagacatccaagctggcatgcagaggatcagacataagtcactgtgagcataaattcctagggttcaagccaaattatcagccccactttcactatgtaaataaaaaattactggcataggcccaccttaacccaaaccaaaatattttgaaattttttaatatcgagtagggaattttttctatatgaaaatccataagagaataaatttttacagaaaagcgttgtgtgtttggccttcacgaacgctatggttactatttatgcgatattatacatggacggatacggttaaactatatgcacatcactagtcataacatctagttcgacagcaccaattttgcgaccacaacacatnctatagcatggtttgtgccttggttccgcataggggaaactaaaacaaacaaattttgaagaaaccaacgcggatgtaaagaagttagtttttgtctatgacgacgattaaggttaaagcgctctatanaaaatacataaatatatcactctaaaggaagaggggcaaatggagagtaacaaattaatagtggttgatggcggggaaaactcgaaaatnccaaataagaatgagcgcgaaaaaaggaaaaatactgctgtgtgaacgcgttacattacggagggaaaaattgggcggtattaaatttataagcgaatacgnggcataagggttgcagggaggggtaactgcgacggcaggagatttttgtagagaaacattaaaagtatgacctattaacacactagtaatctgggggagggataacacgaagagggggtgtggaaagttgcatatgtgaagagatatagataactatcagaaatcaatgatagtgagagagatgctagagtacctcaaggacagtgtggtaggctcgaaggtctggcggttggcgcttaggcgcgtatcacttatgcgacacaacacacgcatggatcccaccgacacagagatgatgagtcgatgagacgaagtcacgga

SEQ ID NO: 39194 - DNA, 965 bp, Macaca Mulatta
  misc_feature (1)...(965): n = A,T,C or G
gggagccgagattnnnnnnnnnnnnnnnnnnnnnnnnnnnnnnnnnnnnnnntgtctcgtgnnnnnnnnnnnnnnnnnnnnnnnnnnnnnnnnnnnnnnnnnatgcgggtgtgggggcatgcatctgtagctccagctgcagcctcccgagcagctggagcccaggaatttgtggctgcagtgacctatgatcataccactgcattgcagcctgggcagctgatggagacctttcctctaaagattgataaaaaaaaataaacaacaaaaaagtaaacttgtcaggcggcctcggacctctgagaagctttcaagcacctatccaagtgggcccccggcgcccattttggaaagttgaaacaagatccttacctgtttctccctagaaatattcccggaataatgactcagggctatggaaattcaccaccaatttataataaccgcataggtggccaaaacaaaagggatattggatacgatctccgcgaaaggaagtctctggagcgatctcttcgtgggatgcatagacgccacgggagttcctagaggcgaacagccggaatatacaaaattttacacccccccgctccatgactcataactatccagaaaaaaaacgaagttgatgaattcacagtgaaaatatttctccggctctatacagtgttaaaggcacactcacaaattcacgtacattgtacttacactctgcaaaccaatacctatgcgggattatgtattagacccctcttaccagcccactgtggcttgaaatagagccagttcactccagctggtagtttagagaagacaggtgttgccgcgaaccaatttatcctccaccttctaccttngtacaaactaatcatacacagattatccaataatggcgtataaaccatacattatccacgggacacatgccatctcgacacgctacaaagatagatacatcctctcca

SEQ ID NO: 39195 - DNA, 386 bp, Macaca Mulatta
attggctggatagactgaaatgcttaaggcagggatggaagatgaagactgagaaaatgtgtggctgtggtagaatcagaaactttaatatgtactttgaaaccagacctgaaagtgaggtcgcatcactctgctcttgttcagccttgctcagtggcctgatgcaagccaaaaacccacaggaggggaactccgctcagtctctctcctgagagaaactctggaggggtctgacattttgagagcaaggaggaggtttagaatcaagtgtacagaagctctgtttgtcctggaggctctgaaaggctccaggagaactttttgggtgctgctttatattaataaaaccagcatggctgaaagaaaacatattcaaaaagtagaat

SEQ ID NO: 39196 - DNA, 790 bp, Macaca Mulatta
  misc_feature (1)...(790): n = A,T,C or G
gggggaaggtttgagaggaggagaagcagcttccttaaaacaatgattattttgattcaattttaagtttctacaaaaggtaatgttaaagtgtatgtatgccttcagcattaccttgaaggctagaaaaacggcataaatcttcagaaaagtgtcacagtacatgttcaaatttaaacttaaatcctggttcatctttggcttttgttgtgcatttttaatgcttctttgtttttggtacacggaatgcagttgaacttgatcttttaaaattgagacatgtaagctaatcagcaaaagacaaaaacaaaactgcacatctgtaataatcagatagcaattctgctgcacaattcattgattgtaaggtatcctgtaacaagcaatgtttgtctcctattttttgatacctcttaaacttatgtctttcagaaagacagtgcctctgtatgctttttgtatttttactgagtgtaaatatttgttatatttttggttaagagaatgtaaaaataccatttattattatcagatactactaatacattggtggaatcaataaagaatctacattaatcttctctgtacttgattataaatgtatggaacctttgaaataattacaaacttagtcattcaagagtgccaatctgggacctgtgttggtgtgaaggccttattttttaagtatccagaaaaaattggagtggtcccatttgtttgttggtttatggtcaaatcctgtgaaacaaccatagcctgttggttttanggttttaaaatattgngg

SEQ ID NO: 39197 - DNA, 112 bp, Macaca Mulatta
aggcatgtagaagagcctatttacatcattaagttgccagttttgtgtatatacatatgcagatatgcatgcatagtataccataaggcagcttagctgattgtagacctta

SEQ ID NO: 39198 - DNA, 642 bp, Macaca Mulatta
gtgatgcatgtaaattgcttaggtaggcaagaaacaaatctggttattatgtaaaaactaatctaataaagttagtgactttatcactttaaatctttagagtctaaaagtggtgtttaaagtaacactagcacatcagagaaccttgtctggacaaaactagttcactcactgcttctgcaactgcagttgctcccttcagggttatagaaaaaggacccaaatgttacatgtgttgatattataacttgtcagttactgatgtctgtagtatcctaccctcacctctgaaagggataatactgaataattattagaaaactataaaacttcacactttgtaccattaagacctaaaattttaatcctatccttttttatgatggatcagtcagcactcgaacagcagcaaggaaaaaaagcaaatttcattcacatattctgtgttcatctctcttctctacctaattgttcatttaatttcagccttgttccttgataagggattttaccacatgaagtcatccagtgtccctagctcttactgtgaagttagtggagtataattacaaatgttacaacttaaaaatgttacaaaacatttatcagagctcatatttagagtatctagtttgagaaata

SEQ ID NO: 39199 - DNA, 788 bp, Macaca Mulatta
  misc_feature (1)...(788): n = A,T,C or G
gggaggaaaattgtgggcattggttgaacacattataaagcaaatgaaaaaaacttgcttttgggcaagcttctttgggcaatagattatggtgagacatacaattgacctaggaaaaagagcctgggagagagttttttattatttttgttttgaaattaggacaatcagcctcagtgtacagaagggaatttagaaagctgcatgcatgcccagggcaggacatatgttcaggaaagacctaagaagaccataaagtttatcactgtgtgcttgctaggcccagtacaagcagtaagtaaaggccaaggcagagttgtgaatggtatggctaagtcttaaaggaatatcccagcacagcgccagtctgcaaagactaggataagtgcnnnnnnnnnnnnnnnnannnnnnnnnnnnngctttgacatccaaggaaatctctttcaaaatgctggctgaatgcaagctaagccttgattaatcaaaaacagtgaagcgtanggaggtggggagaatctaatttcccaagttaccacgttataatctaatgttttagtatttagttttcaacaagaaattacaaggcatgtgaaagaaaaaagtattgctcnttaaaacaaaaaagaataaatagaacccattccttgagaaagcctggacatttggatttactagataaagattttaaatccattatctgaaatatgctcaaagacataaaggnaaaccatggcccaaagaactgaaggaaattanggaaaataatgttatgaacaaattgagaatc

SEQ ID NO: 39200 - DNA, 841 bp, Macaca Mulatta
taatgaaatgatttgcctttttgtatgcataataagccaaatacttttttacccaaaataatttttagagaaaatgatgtaatgaaaaatgtaccatgaattaggagcgtagtttttttccatttaaatgtcaccattacttaaaagatgattgattgattattgctataccaaatcagatgaaccctgttcatcacttttcttctctgtccccaaacaatttggttcgagactgaaatgtttgtgtcttcagcatattagaatggaagataatacagatatttctgtgggaaataaaataactaattttgaggtaccaaatagtgcaattgggtaaaacagggtttattcagttgcatctgtctccagtgttgtattgacagctctgggtatttttttgggccagcccttttttgacattgcttccagcagtggaaaatgggcatttgatggcaataggccaaaattattgtgtccagagagtacactttttcaaaatgctcacctactggaagtgtgaattacttgacaatgtatggcttagttgtgttcatgttttgtctacagtagaggtctaatccacagggtacacctatgtttggtaagatataagttctctttgtgtaggccactgggtttctcatgccagtaagctttataaaaactcatttgcaccggaccgccacctcatcttgtgccaccgtaaataactgtgtacatccaacaatggtacctacgaaaccgtgcactgactgtagccttcggccatgcattcaccttcatcagcggcacaggaaaatcctgcacctgttaacccttcactcccgccggaaactcacac

SEQ ID NO: 39201 - DNA, 797 bp, Macaca Mulatta
  misc_feature (1)...(797): n = A,T,C or G
ggatttttgtttatattttttctcaaaataactggaccaaaccatacatcctgttatgcaatttaaataaaatattcatcatacattaatatactaaaaaactttatggttcttctcagattcaggcaaaactgaaatgacgaattccaatgtgatgtaatgcaaatgtgtgcaaagtgatggagatacccaagaaaggagctgaaaattgcatcttaaaggatgtcaaaatttgccagggagagaagggcagaaaacatttaccagatataagaaaccactagaaactggccagttggagacctggagaagtctactttgcctggctgatgcggtgtgtgggagggaattcagcangaggtgagcagtgggtggtgggtcctctttctttgacaggcttcagaggatgaaatttgttttgttgacagtggagaacgagggacttcataaaatcaattactgctttattttaaaacaaatgaaactgagtgaccacaatcgagattctactttactcttctgttaaaaacacattttgaaaaattcaaggtgtttaaaaaaatcttcatataccagccaagcacagtctcccaggaactttcctcaggagaatctcatcacctctgcgggaacccttttaaaacacctttttggaagttcttttaatggcctgcccttaatacctaagggcatttccagtaaactcccgccaaaggccaaaattccttgtaaaaaagcccccctggggtaaaaggttaattttgcccccccctctcaaaaaaggaaaaaatttcttt

SEQ ID NO: 39202 - DNA, 792 bp, Macaca Mulatta
  misc_feature (1)...(792): n = A,T,C or G
ggggctcacacggaggaggagggtctcctccagcaaggtcacccttcagatgcagaacagagcggcagaagccaggcggagttccaccctaagcaagagttgctcttctaacaagtgatgtcaactgcgaataagcaaagagtttcagaggttgccagattgtcacagacgactttggagaacccagtttcattcccaaggctgctatcaataaatcttgctgacggccctcttgttttgatttgtgaactgcagccctattagttttcctccccgaccaagactctttggatggcattttggaattcacagggaaagaaaacctatagtggtctatgtctgtcgatgaaatctattcagctaacacatgagcattctgccaggcagcacggaaccctaacctacagagagctgcagagaaacaccacggagaggtggaggaggaggatgaagcacttcttaaacagaggtcgactaaccagcaaattcttctttcttcctttttttcttaaagggatctatattctagcttctaaaaacttgagtatgaccagaaataaaaagagtcgatgnnnnnnnnnnnnnnnnnnnnnnnnannnnnaacatgtcgggccgcctcgggccttcaaaaagcttttttagaccatttcgttttggcgccgcggggcccactaagggtaagtgaaacatgggtcactaacttgttttccataggaaaaatccggggtccatgaacataggggccttgggaattccccacnnnnnnnnnnnnnnnnnnnnnnnnnnnnnnn

SEQ ID NO: 39203 - DNA, 801 bp, Macaca Mulatta
  misc_feature (1)...(801): n = A,T,C or G
gggattctacacccctacagccctgtccactttgaaaagctgctttcagagcttctctctgccatagctttgagttctgagaatggaattttgtaatgaaatggctctgttctctttcctgtagctgagcccccgtattgccctgtgtcgctccttcagggtatttctgactccactagtggaatcagcagttttggacacttgagaaggatccaggaaatacattcccactagagtttgggtagaatagtggaatttttggattccagtgatcctcagtaagatcagagttatttgtccacttatagattctgttattattgagataagaatggaaggttttggtttannnnnnnnnnnnnnnnnnnnnnnnnnnnnnnngctctgtcacccgggctggagtgcagcggcatgatcttggcttactgcaaccttacctcccgggattcaagcgatannnnnnnnnnnnnnnnncnnnnnnnnnnnnngctggcatgtgctaccacannnnnnnnnnnnnnnnnnnnnnnnnncagacggggtttccctggggttggccaggctgggtctaaaactcctgacctcatgatcttgcccgccttgacctccccaagggctgggaattataggggggaagccacccctaacccgggccttgggtttggtatttctttacccgcgcggtcctggggtccgttaactattacgaagggaaaaaagttgaatccgactaatctggggctaaaattggctcgtggtaccctcccccaagcgaaaaaggggccttttttctataggggg

SEQ ID NO: 39204 - DNA, 170 bp, Macaca Mulatta
agggctggggttggggcgcggcactgagaagtttgtagcctcctccgggggtctcctccgggtctacgtctgggtcctgcagctgcagctgagactgcggcggggactgcgcgagctcaagaagaggctggggccgcaggacattcggaagagggcgccggccctcccgg

SEQ ID NO: 39205 - DNA, 215 bp, Macaca Mulatta
  misc_feature (1)...(215): n = A,T,C or G
atgggtctcaaaattctgtgacatatttttggtcaagttgtttccattaaaaagtactgatattaaaaactagtaacttaaaactgccacacacaaaaaagaaaaccaacgtggtccacaaaacattctcctttccttctgaaggttttatgatgcattnnattttcttaaggtaagtgctgacttcattaattatttcttcgtatttcttctgg

SEQ ID NO: 39206 - DNA, 849 bp, Macaca Mulatta
  misc_feature (1)...(849): n = A,T,C or G
ggnnnnnnnnnnnnnnnnnnnnnnnnnnnnnnnnnnnnnnnnnnnnnnnnnnnnnnnnnnnnnnnnnnnnnnnnnnnnnnnnnnnnnnnnnnnnnnnnnnnnnnnnnnnnnnnnnnnnnnnnnnnnnnnnnnnnnnnnnnnnnnnnnnnnnnnnnnnnnnnnnnnnnnnnnnnnnnnnnnnnnnnnnnnnnnnnnnnnnnnnnnnnnnnnnnnnnnnnnnnnnnnnnnnnnnnnnnnnnnnnnnnnnnnnnnnnnnnnnnnnnnnnnnnnnnnnnnnnnnnnnnnnnnnnnnnnnnnnnnnnnnnnnnnnnnnnnnnnnnnnnnnnnnnnnnnnnnnnnnnnnnnnnnnnnnnnnnnnnnnnnnnnnnnnnnnnnnnnnnnnnnnnnnnnnnnnnnnnnnnnnnnnnnnnnnnnnnnnnnnnnnnnnnnnnnnnnnnnnnnnnnnnnnnnnnnnnnnnnnnnnnnnnnnnnnnnnnnnnnnnnnnnnnnnnnnnnnnnnnnnnnnnnnnnnnnnnnnnnnnnnnnnnnnnnnnnnnnnnnnnnnnnnnnnnnnnnnnnnnnnnnnnnnnnnnnaccgccataaaaccccaaattcgggattacaaaaaccttaccccgaatacactaaacggcccggggctataagaatgctccaaaactaagccccatggcctaacctttccattggtttaaccccaaaaacaagggcatggccctttaagggtaaggggtgtaaaaaacaatgaaaaagggaaaatccgggcaaaaacttaaaaccccccgcctgtgtttttccatataaacatctcccccccttggcctttataaagtatttttgagagcacatgg

SEQ ID NO: 39207 - DNA, 619 bp, Macaca Mulatta
  misc_feature (1)...(619): n = A,T,C or G
gggaggacgcgaagaagggaggaattcatcaaggggcaggatcgagcaaggagaaacacacaggtaagcctcgccaacaaaaaacattgcccttgggatttttacacatttttagccaaacagccggaagaaccaatgagaaatacagaagtttacaagataataaagttaaatggtctcatcgtggtatattaaaataagaaaaagcctacctgttcaccaagttacaaatacaataaaactatcttcttatataacatggataaaagaaaaataaggacaagaatatctccaaacaggctgggcgtggtggttcacactnnnnnnnnnnnnnnnnnnnnnnnnnnnnnnaggtggatctnnnnnnnnnnnnnnnnnnnnnnnnnnnnnnnnnntgnnnnnnnnnnnnnnctgtcctaaaaacacaaaaattagccgagtgtggtagcaggnnnnnnnnnnnnnnnnnnnnnnnnnnnttgaggagggagaatcgcttgaacccagaaggcagaggctccagtgagcagagatcgcannnnnnnnnnnnnnnnnnnnnnnnnngagcaaaattccatctcanannnnnnnnnnnnnnnnnnnnnnnnnnncatgtcgg

SEQ ID NO: 39208 - DNA, 752 bp, Macaca Mulatta
ggtaactaggggggaaaatgttacccacttctagtttaattctttttgttgcttggtctgattttgactttaccttaggaaagaaaaaaaagacaagtgtttctaacagaatatatgtaagcggtgcctcaatattgctattgcatatatcaatctgaattattaccagccattcaaaaattgtgctaatgttctaatctaaattcatccacataatgtatatgtgtgtttatacataaacatccacataaataagaatatcaaaagacagatcattcttaattgccagaatagacatctacatcttagagagtgatgtatgaagtaactttatcacattgatgggaaataagatttcgtaggtaaaacaagacccatttgggcaccaagaacaacagaactgcagctggtagccttgtaggtctgatggccagcggaggggagccgctctaactctgccgcctttttagtctgctctgtcactaaaggggcactgggtggggtcagttcgctcactcgtaattgtgttttacagactttctaaagcaattggctcagtcagtccccattcaataaaagtggagagcaagagagagagcacttttgttctattttttacctggaaatatttcattcaccagtctgtcttttttattaccaggacttgactttagccctcccagcctttatttagctcccttttcagcagtttcagtaatggtatttaaaaaaacaccttaactttcaacggg

SEQ ID NO: 39209 - DNA, 420 bp, Macaca Mulatta
cagcacatatcaggtgtgtgcatacacccccgatttgggggctggtttgccatccgaggggtagtgctgctgccagggatagaggtgccagatctgccacccagaaaacctcatgactgtgtacctacaagagctgcccgtatcgccctactcgaaggcttcaatttccactggcgagactggacttaccgggatgctgtgacaccccaggagcgctactccgaagagcagaaagcctacttctccactccgcctgccccacgattggccctcctgggcttggttcagccctcaaagaagcctagttctccctccccagactttcctttttacacacacacccccaagaagcctgggaagcccaccaaaacccggaacttggctcacccccagggtcttaccacctgcatcccctggccc

SEQ ID NO: 39210 - DNA, 1008 bp, Macaca Mulatta
  misc_feature (1)...(1008): n = A,T,C or G
gggggccaccgctcgcttcaatatggccgcccccggggagcgactaggcaaccgtgaaggagcagagcgcggaccctgagtccctcacacatggatcgcagcgcggagttcaggaaatggaaggcgcagtgtttgagcaaagcggacctcagccggaagggcagtgtggacaaggatgtggtagagcttgtgcagtttctgaacacgcgagatcagtttttcaccactagctcctgcgctggccgcatcctactccttgacgggggtataaatggttttgaggttcagaaacaaaactgtggctggctactagttacacacaaaccttgtgaaaaagatgatgtgattgtggctctgaagaaagcaaatggtgatgccactttgaaatttgaaccatttattcttcacgtgcagtgtcaacaattgcaggatgcacggattctgcattccgtggcaatagattctggtttcaggaactctggcataacagtgggaaagagaggaaaaattatgttggctgtccggagtacacatgggcttagaagttccattaagccataaaggaaaaactgatggtggacagaaggaatatattgactttcctgttaaatgtggcaaatccaaaaaatggaggaaaacaagaaaagaaattggagagggttttataaattgccctacatcatgctttgggaaaagggaaaactattgactaacttttcatcccaaggattcaaagagaaaaataactcatcatatactcataagaaacaaagaaaccccgaaaaagcacctgcccagtgtattactaaagaaaatgataaagaacttggaaatgatgatgaccatcttaggatcaatattaccatcttccctgaaggctactaagctttggttctgacgtggccttggtcagtaacctttctagtaaggtttttaaaagctgnnnnnnnnnnnnnnnnnnnnaagtttggttgagtggttccagcccatttataaaaaatagaaagt

SEQ ID NO: 39211 - DNA, 917 bp, Macaca Mulatta
gggccccgtggacgctggtgtggctagtggccaatcgtggaaacgcgtgtgggagccagccaggggtgctgcgtcctgggagacccggcgcaacaaggcagtggtgcatcccaggcagtcgggggagccgatggtgtccatgcaggctgcagaggagatccgcatcctcgcagtgaccactatccaggcgggcgtccgtggctacttggtgcgtcgcaggattcgagtgtggcaccggcgggccacggtcatccaagctacttgggcgcggctaccgcatgcggccggatcctggcacacctctgcagagcaaccacaatcatccaggccgcctggcgcggctacagcacccgccgggaccaagcccggcaccggcagatgctccaccccgtcacgtgggtggagctgggcggaggggccagggtcatgtctgaccgaagctgggtccaggatggcagagccaggacagtatccgaccatcgctgcttccagtcctgccaggcaaaaccttgcagcgtctgccactccctgagctccaggatcgggagcccgcccagcgtggtgatgctagtgggctcagtcctcgcacctgtcatacctgcggacgcaccagcccacccgcgtgttgcagggcatgggccggggtgctggaggccccgggggcagtgtctcaggcctccgcctaccagcgggctgtcccgagtcccaggcagccacgtcgcagggacaaagcggccacagccattcagtcggcctggagaggttttaagatccgccagcagatgaggcaacagcaaatggcagcgaagatggttcaagccacctggcgaggccaccatacccggagctgtctgaagagcacagaggcgctcttgggaccagcggacccctggtccagctcacagcacatgcattgg

SEQ ID NO: 39212 - DNA, 185 bp, Macaca Mulatta
atgggcatccatcttagctaccagaacagtcttcttggtttgggtttctggccagatttttcatacaacttgggtaccctccttgggtcttcctcaggtctatctgggctagaaagctgcataaatctcagagctctcacaagactcacagcaaacctgggtttagcatgccccttaatgctcta

SEQ ID NO: 39213 - DNA, 786 bp, Macaca Mulatta
  misc_feature (1)...(786): n = A,T,C or G
gggcaccattgttgaccattgatgtaactcaacgtgaaaccttcccaaagctctccacatcactctctgttatggatgtgaccagcagtgaacatgaagagaacttatttcatgccttctccaaactatattgtctctttgctaagtccagacctgctttttctacatttataggttttctattttaatcgccatgcaaaattctttatcatattcaatcattttggtttatcttcctgacttcttccttttaacgtccctgctaaagattacactgttgttnnnnnnnnnnnnnnnnnnnnnnnnntacccctttaattggcaaaacattaagggacctgaatagaattactcttatctttttgtgctgatttatgtcaatccatcattctggtcattgatggaagcaaattgcttcctatggtctctaaaccttatgtcccttccatactccatgagtatcacactgtnnnnnnnnnnnnnnnnnngcattgtaggaaaagtatggccattatctttgaggaaatgtgtacctaggcacaatcactaaaaggagttggaggtatcatttggttaacactgttgtcattcttgttgttatcattttggaacttggagaaattgtttgattctctcctagaattagacaaacaaagtgtggtttgggaaataatgatttgttttcctgcccttaaaaaattcatttaacaaaaagctttttattataaggctaattttcctttctggggccaggttatttaatttcctgaattaaggaaatttttt

SEQ ID NO: 39214 - DNA, 720 bp, Macaca Mulatta
  misc_feature (1)...(720): n = A,T,C or G
ggcattgttgaatttaaaccagttttgtgagccttggttttctaaatgatttggatactgtttacttttttgtggtataatatagagagtttacctgctaagttcttaagttcgttgaaggtattagtaagggcatgagaaataacacaggagtatcattaggtggatctgacgtaagctgtatacaagtcaacagagcaatttatttgagttagaggagggctgcggccccagccctcacctttagtttcatatgggccagtttctgatgacaaatggatggaatctgaatttttaattgttttgcgcatttatttttcacaaagttgtctagctttgaatgtatgtagttttcttttaaaatgagttgtttaattatcaaggaatgcaacaaggtatattttaaattataaaatgaaataaagtagaaaacgtgttttaattaaaacagcagtctgcaacaatctttaagaaaataagaatgtggaggacctgaatgacataatttatatttcctgtagctgttaaattccatacgcaaaaaacagaatgttatacctttttagaataactatggaatgctttcaaaaatagtctcatttctgaagaaaaaagagttgaactctngagatctgtttggtagaaatataacgaaaaccaaaagcaactccttagaaaattaaaatcttactaaagaaactccatttggttaaagacaat

SEQ ID NO: 39215 - DNA, 819 bp, Macaca Mulatta
gggggcgcctcgggaccggcagcggcgcgtaaggaaaagtcagtttccgtttttcccgcggattctggtgcctgtggggccggtgacccaataccatgaaggaaacgccactctcaaactgcgaacgccgcttcctactccgtgccatcgaagaaaagaagcggctggatggcagacaaacctatgattataggaacatcaggatctcatttggaacagattacggatgctgcattgtggaacttggcaaaacaagagttcttggacaggtttcctgtgaacttgtgtctccaaaactcaatagggcaacagaaggtattcttttttttaaccttgaactctctcagatggctgctccagctttcgaacctggcaggcagtcagatctcttggtgaagttgaatcgactcttggaaagatgtctaagaaattcgaagtgtatagacactgaatctctctgtgttgttgctggtgaaaaggtttggcaaatacgtgtagacctacatttattaaatcatgaatggaaatattattgatgctgccagcattgctgcatttgtggttttatgtcacttccgaagaactgatgtctctgtccaaggagatgaagtaacactgtatacaccctgaagagcgtgatcctgtaccaattaagtatccaccacaatgcccattttgtgtcagttttggccttttttccagccaagaaacatattttattgggtgggatcccaaatgaaaccgaaaaagaaccttgtggatgggaatgggccttgcctgggtgaatttgccattgaaaaccaaaaccttccgaggaaa

SEQ ID NO: 39216 - DNA, 771 bp, Macaca Mulatta
  misc_feature (1)...(771): n = A,T,C or G
ggcaatatgttgtttttctggaacttgagtatggtaaccttttatttacttttctaatgtaccgggggagtttcgtactgagttgtaaagggatttatatggggatgtaggccgatttccgggtgttgtaggtttctctttttcaggcttatactcatgactcttgtctgaagcttttgagggcagactgccaagtcctggaggaatagtagatggcaagtttgtgnnnnnnnnnnnnnnnnnnnnnnnntaccaatttgaaaaccaaatgaatttgatagagccaaaattgagacaaaatctcagcaaatctgtaagcagtttgtatgtttagttggggtaatgaagtatttcagttttgtgaatagatgacctgtttttacttcctcatcctggatttagttttctaaatgtggaagtttggtgtgtaacctgagggagggaatttttaagtatttttttttggggggtggggccaaaatatggttttgagtttctttttccccataggtcctgactagaatccttaaagggcaaatgactcaagggggttaccgaaaaacagaaaaatcccatttcccgggataatccgaaaaccccccccccgggtttttaccgtttttaagaaaccttaggccagttccccccctttaaaaggtcttgggaaagaaaaatttcattttggaaaaaaggggcggggaagaaaacccctttttttctcccccctttcccnnnnnnnnnnnnnnnnnnnnnnaaaagagggtcctaaac

SEQ ID NO: 39217 - DNA, 684 bp, Macaca Mulatta
  misc_feature (1)...(684): n = A,T,C or G
tgaaaacagaattggtttgcaaactaatgcctggagaaatatatatngtgtgtgtaaatacacccacacaaatacgtgttgatgtgtttgcagctttacccacagactctttgccactggactttaaatacttttctgttttagggacatacacatacacatgcataaatacgttttcagggctatgcatgttaaatcagtgctcacaaatgaattcacttacaaatgnnnnnnnnnnnnnnnnnnnncttgtatgggaagagaataaatgcaggtatgaaggggcaaaaagtttaccccctgggggttggtttggtgccctgtgatttctggaggggctgagccagccagctgtaaaagtgttacacaagacaagagctgggaagtcaacacaaagtcaaaagaaaaagaaaggggttcacaccgcagcgtggcattctccctcctcccctcatcctgttgtgactgcacctgctgcatgtgaccggcgggcactggaagcagccgcagccacacagccttggtgaggagccaccgcagccctgccagctccctcccagctctcattgagaaaaggggagacggagcaggaggagggggaggagacgctccctgcaaagctgnctccccctgcagatccaagagcctcttggaatgggcactcgactgttctgacgtggtgat

SEQ ID NO: 39218 - DNA, 892 bp, Macaca Mulatta
  misc_feature (1)...(892): n = A,T,C or G
taatatttagaaaagagtactggtcntgtgtctgtccctctttcacntantgactttgaaaaaacccatgtctatcttccagtcaagtgacanncatccaaaggcagctcagtttttttctaagaaaggccacgtaaaataggcatgtttggttcctgaaactgataagcagttcttaggtgattaccacactgaaacctctctctcttctttcgagactagatcgccctggccttctaaacgtaggacacattgaaaaaatgcaggagggtattgtgcatgtgctcagactccacctgcagagcaaccacccggacgatatctttctcttcccaaaacttcttcaaaaaatggcagacctccggcaactggtcacggagcatgcgcagctggtgcagatcatcaagacagagtcggatgctgcattgcacccgctgctgcaggagatctacagggacatgtactgagttccttcagaccagccacaccttttccaggagttctgaagctgacagcactacaaaggagacaggggagcagcacaattttgcacaaatatccaccactttaatcttagagcttggacagtctgagctgtaggtaaccggcatattattccacgtctttgttttaaccagtacttctgagcgcgtagaactcaaatgttgggggtaggcggctaatctcaggactgggaagattaaggagagtgatgctcaatgggctgattttaactcacccgatgttagtcaatgcacatggctttagatcacattcgtgatttaccgtttaattaactggtaacctccaaattatggtctgtcttcccctacaccctgcttttgactattgtgctcctttataattcggaaaaataatcagcactttttaa

SEQ ID NO: 39219 - DNA, 799 bp, Macaca Mulatta
  misc_feature (1)...(799): n = A,T,C or G
ggaagcaccccattaataatcgactagctaccattcaacaagacctgactnnnnnnnnnnnnnnnnnnnnnnnnnnnnnnnnnnnnnnnnnnnnnnnnnnnnnnnnnnnnnnnnnnnnnnnnnnnnnnnnnnnnnnnnnnnnnnnnnnnnnnnnnnnnnnnnnnnnnnnnnnnnnnnnnnnnnnnnnnnnnnnnnnnnnnnnnnnnnnnnnnnnnnnnnnnnnnnnnnnnnnnnnnnnnnnnnnnnnnnnnnnnnnnnnnnnnnnnnnnnnnnnnnnnnnnnnnnnnnnnnnnnnnnnnnnnnnnnnnnnnnnnnnnnnnnnnnnnnnnnnnnnnnnnnnnnnnnnnnnnnnnnnnnnnnnnnnnnnnnnnnnnnnnnnnnnnnnnnnnnnnnnnnnnnnnnnnnnnnnnnnnnnnnnnnnnnnnnnnnnnnnnnnnnnnnnnnnnnnnnnnnnnnnnnnnnnnnnnnnnnnnnnnnnnnnnnnnnnnnnnnnnnnnnnnnnnnnnnnnnnnnnnnnnnnnnnnnnnnnnnnnnnnnnnnnnnnnnnnnnnnnnnnnnnnnnnnnnnnnaaacaaccacctcaagaatgacaaaagaaggaaaaatcgttccttgtcgggccgccccggccccccgaaaagcttttttaaaaccattccgtttgggccccgcgggcccccctagggtaaaatgaaacactggtcaaaagacggtttcctaaggaagatccctgggccaggaactaatggccttgggaattcccccnnnnnnnnnnnnnnnnnnncggggggaaaaccag

SEQ ID NO: 39220 - DNA, 287 bp, Macaca Mulatta
acaggggttggctgggagtagcaagaaaccattctgtgaccaaaataccttggtcattttttttttatattgccttatttccctatggctgagccttgttgtgacacatcaagcttttctatagatgttgtcttggcttcccaccagattaagcattcatacgctctgcttttagttcatatatacatccatgatgtttttcctttcttaattttgtctttttatttgggatcagcttcttgcactcctttcctaactcaactgttgccgtctcaccttctctcatg

SEQ ID NO: 39221 - DNA, 556 bp, Macaca Mulatta
ccacccgccgtgcgccttcctctcttccatcacgctgacctccagccccgcagcccgctttctccgccgtcgggccagcggcttgtttccagaacttctctgccccaggaagagttcttgggcaaagcgtgcaagtgagggcggggagccgcgggccacgatccgctggcggagagaaggcttcagagtcgctggcgcgcggcctcggtgaaaacccagtatttgagattccaggggcaatgactgcgctggccgagccccgccgtgccccttgccaggagtgcgggaagccagggccgtggggtgtgcgcattgtcgctcaaacgctcctgaacgccctttctcctactcttctttgacgtgggaaagggaacttgagataggtgcagcccaggagacctgggagctggcagggagggccttctcctcttgcagataaaaccttttgcagaggtccctcagacacaaggccaggccacttatacctatgtctgagcacaggtggagagaaggctaaccgaccactcttggctaaaatgactcatggtgattcctg

SEQ ID NO: 39222 - DNA, 598 bp, Macaca Mulatta
  misc_feature (1)...(598): n = A,T,C or G
cgctgagccaagatagagccactgcacttnnnnnnnnnnnnnnnnnnnnnnnnnnnnnnnnnnnnnnnnnnnnnnnnnnnnncccaatccaagatagaaaacagttactctctgtttccttctacagcttttatggtataatatatatatttttttcatttagacttttaatgcatctggaatttcttctggtgtgaggtgtgaaatcgagattgaatgtagtttttctctaggtgaatatttggttatcccattgttcagtctgtttactcatatagcagtgtcactctgttttaagtattgtagatttataatctgttttactacctgatagggctactccccgccccctcttgcccctcatttttatggtggtgatttttatccccccagaatatcatagctagttttgcttgtcttccattcttcatccatttatctattaattcatcaaaaacccactannnnnnnnnnnnnnnnnnnnnnnnnntgtctgggtgcagtggctgacgcctgtaatcctaannnnnnnnnnnnnnnnnnngggtgaatcannnnnnnnnnnnnnnnnnnnnnnnntgtggtggcgagtgcctgt

SEQ ID NO: 39223 - DNA, 186 bp, Macaca Mulatta
atcaactgcaaatgccatcgacctcctcgaggttcccatgacagaggccacagttcaggtccctcttgcatcactctaatccactgtcaaatgctccctgctggggtctcctggagtctctctccaagccttgggggcttcctagtgcagcctgagcatctttccaaagcacaacgccctcactgc

SEQ ID NO: 39224 - DNA, 579 bp, Macaca Mulatta
tgagaaatttcatcacgctgtgtagggactaacaatggacacccggaaggacattcaaatcccaaagcagcagccaatggcatataactgtagagaatgtcacagataaaatgacatgaagtccagggatccagtcaaatgtggagaacatggttacagaataatatataagaaaaggactgaaatattggtgggttttgatactcagtgaaacctgggaattcagagaatattttcatttgtacttggatttgccattaatgtttctcattgtgtagctttcaatgtaacattcttatctttatgattacaacaatatgcacataaattcattttattttatttttaaaaccatattgtatttaggcctctattaacattttgtataataatttttttctcctagtacatgatttataacttaatattactgtatatataacctgacacacaatgaaggttaaaattacttcccaaatcatatttttaagtcacctagaatccttgttaaaatgaggggaagtggggaagggcatccagaggggaggtccttgtcaaaaatgcagttttctagggccc

SEQ ID NO: 39225 - DNA, 728 bp, Macaca Mulatta
cgaggataaattgcagttgggttatacactctttgacttccttttctcttgaacctatcatagaccagtcttttataaataagtccgttagaggcataatactgaagacattgatggaagtatgggtgctatggctattgcagtgaaatcagtatatgctttcagaatggtaggaagaccaaattaatgaatcacctgaaaccatgttactgttataaaatcaccagctgcaaagaaaataaaaatagacaaatatattgaaaattatttgaaatttggattttagtaaactgtcaatgagtgtaaacttctccattagatataatgtgttttggggacactcaaagttctagttagaaagcattttgtctcaaacaccagttttgaaatgtacaaagactaccatgggaagcattgaatttttaaaagccaagcaggtggatattcaggcaccacagaaacatcatacagggtggtgggagaagaaatttcattgttgcagaagcactgtttataatgttggtttctatttcccaggatagtgatactcaattggtgagacaccaaatcagctgtaaaaacagtcgcaagtgatgttgagtgggacaaagcaaggggaaataatatcttttggggcaactccatcaaatacaacaattcatcagacagtgacagatatgacctaaatggagagcagtgttattatcctgaggtcatgaagtccctga

SEQ ID NO: 39226 - DNA, 905 bp, Macaca Mulatta
  misc_feature (1)...(905): n = A,T,C or G
tctcatggatggagggcctgatttatgtcagcagtactcacctttacttttatcccagccctagtattgctgggcacatgtgggataatggatgagcatccctggagatggtatatttggtaaagaagttctaacatgcattagnacgatgggccttaataatttgttctcttctcagtgtattagacatgactcttctgcatccatcgtctttgacgtagaagatggtagtggtggaaacagtctagggccaggatcctgaaggtttcattgctttaggtgctggtttagagaaagtttctctgtgaagcatgcacacccagtccctgggccaatagataatgagatggttcttttttccttcaggccggacacctggtccctggctccaagcagaggcagtcgggcagagctctgatgacatcaaaggcagaaattctcaggtaacagaagactcatgtctctgaatgtaaaaccaggaattatccttagggggcacagaaatggtaagggtatgctttctccttaacagttttatatttttcctcagactccttttcctcagggaaagccatttggtggacctttgttccaagctagaatgaaacactcaccatttcaaagtctgaagtgtgacaaaaggcagggcttccctggaatcaccactacatacagaagcaagtttagcaactctgacattctgcaacaatcatgccaatcacttctcattcttcctcggttatgatggcctgtgagaaaaactgaataacatgtataaaatataattcagcattctctctcatctatggaatacatggtttcttttagcacacttggagttttttttcccccaccaatgttataatggatattggccaaatttagtcacaattcaagtactagta

SEQ ID NO: 39227 - DNA, 785 bp, Macaca Mulatta
  misc_feature (1)...(785): n = A,T,C or G
ggggcagagactcattcattcataatccaagagagaagtgtgattcacagggattcttttatcgtgtgatacatgataaatacatccaatattatatgtcaatttaaaaagtcatcagtgttctgctggaccgttttcaacccggcctgactttcctggaattccctggatgcttgttattgtttccctgggaatttgttcacttggcattttcttctggaaaactagccttggttgcactgaaaatttggtattacctgggagttaaaagcaacatgatagctgtgccccggatgtgtgaaggctttggatcaggatctctgcctggttcctcacacaataacagaggagatggctgaaacgctgccttctgggagtttataaaccatggtcgctgcctattttcaggaggaaatgctcctggagctgagagggctgtgctgccctgtgaggctcccatccccttagttgccagcccaccatcttccctggggaccacacgctgtgcaaatccaccatccatccattaccgtccattatcagatggaagctttccagccccctggtgagaagccagagagcactaatgtccacatggggacaaaattattgaccatgaactgaggaaatgtatttttttttgcttcttcccactttgatcggaattactaacttgatcaacatgaaaattaaaatgaaaacacttggggcnnnnnnnnnnnnnnnnnnnnnnnnnnnnnnnnccccttgttcggcccgccctccggcccccttccaagaaacca

SEQ ID NO: 39228 - DNA, 820 bp, Macaca Mulatta
  misc_feature (1)...(820): n = A,T,C or G
ggcgtnnnnnnnnnnnnnnnnnnnnnnnnannnnnnnnnnnnnnnnnngggtgnnnnnnnnnnnnnnnnnnnngagaccatccaggcgaacacgnnnnnnnnnnnnnnnnnnnnnnnnnnnnnnnnnnnnnnnnnnnnnnnnatcagacaaaatatacttggagaaaaaaattattactagagctgatggtcattttgtaataatgaaaatgccaatcatcacgaagatagaatgagtataaacatatatatacataaaaacagtgctccaaaatatatgaagtaaaactggtagaattgaagggtgaaatagataatacaataaataatagttggagactgtaataccccacttacaataatagatagaacaactaagcagaagatcaaaaaggaaacagaacatctgaacaacactataaacgaaaatgggcacaacagacagtctaccacagacattctagacataatagcataatagaaccctcctgccgaaaaacagcttaatacacattccttcttgaaacaaacgggcattctacagtcatggtggttagggtcatgaaaacagtccaaaacaaactttaaaacaattaaaaatcctggtagaagtatattccttctaccacaaggggtaaaaagaaatcctttttaaaatgaaccattagggnnnnnnnnnnnnnnnnnnnncaccccaggggcaaattttaaaaaccataccttttgcaaatggaattggaaaaccctaaacctccttttataccccataaacttcatggaatataatagtccttaaaataaagttgctttataaaaggaa

SEQ ID NO: 39229 - DNA, 640 bp, Macaca Mulatta
  misc_feature (1)...(640): n = A,T,C or G
gtaatagacacaggctgtaagcaggcatagtatccagtgagttgttagagtgatcaatttaggctgtaagttgcaccagctcaggattatttgaggggctaatgctgtagtttgtgcctggccagtctccttgttggtttgttttcattttccctcttcctgccgtttccttatctattctttcagtattctttgtaaatcaatccaagaatgaacaaaggcaagagggaaggtgaaacttactgattggcatagctgtgtttgtcaacactcacataaatttgatttgagttaaaactgctaaaaggaggcttgaggattaactgtgcctaacaaatattcaccttctcccagtcccacatctgattgaggcctgactggtgttaccagtgctacaaagagaattctgaggtgggtaagcaagcaggcgagtttacagatctgtcagatgttttctcaggggctgcctgtcaccagctttgcaaatttgggcaagtttgaaattatcacttacttttctgccttagttatgagatctcttgtacctctggcagctntactgaatttgtgccaggttgtaaaataacactgtcttggaattatttcaggcgtgaggtagctcacacctataatcccaaca

SEQ ID NO: 39230 - DNA, 871 bp, Macaca Mulatta
gggggagcctccgcgtcccgctcgctgggagagaggtacctctccttttccctctccctttccctaagagatggggttttgtcatattgaccaggctggtctcgagctcctgacctcaagtgatcctcttgcctcagtctcccatatggctttgactacaggagtggagtcaacatatcaatggagcaagtcacagtcgtcgatgccagcttcttcttgaaatctacccagaatggaatcctgacaatgatacaggacacacaatgggtgatccattcatgttgcagcagtctacaaatccagcaccaggaattctgggaccgccacctccctcgtttcatcttgggggaccagcagttggaccaagaggaaatctgggtgctggaaatggaaacctgcaaggacctagacacatgcaaaaaggcagagtggaaactagcagagttgttcacatcatggattttcaacgagggaaaaacttgagataccagctattacagctggtagaaccatttggagtcatttcaaatcatctgattctaaataaaattaatgaggcatttattgaaatggcaaccacagaggatgctcaagctgcagtggattattacacaaccacaccagcgttagtatttgggcagccagtggagagttcattttatcccagaaggtttgaaagaattaagaaaaccgtgaaggaaaggcccgatccaaaagttttgatcgaaaaacggaaaacttgggaccgggtggatacatcctccaccgaatttggccccggttcctgggcgtatgtccgaaaaagggcctgttgcccaagacttgcgctgaaaccccttatgtgggagagatgaaagaaacctcgcctgcg

SEQ ID NO: 39231 - DNA, 164 bp, Macaca Mulatta
cttctctaaggatgaaaacaccgttacctttagccgtgaaggatccagtgagattttccaggttaacagtgataaccgcctactggtccaacgttcagaactaacaaaggcacctggagaatacacagtagatgtggaaggacacggctgtacatttatccagg

SEQ ID NO: 39232 - DNA, 653 bp, Macaca Mulatta
ggggatgattggtagctcccactcaaaccacagggtggcatgggataggagatgaagcagctcccagaagaagggaacaggcgcaggcaggcagcctattcttctgttcttctcttggggaaggggatatgccaagagttctgtcaatgtccccaaggacttgtagagcttttagtcaaagtgttcttttcatttttgcttaattcccctccatattcccagtgacatacatatgcattcataggtcaggctcatgggaaaacctgagttataattcccactgtatgctcagcctcacctctcccatctggctctacagccttataaccacttctattcattgtatacattttgtgtgccaagccctcaaaatacttaacctacctattaccagcaagggcccagctcagcaggtgggggtaaaaatgcagacacatctgttagtaagtttccaattatttaagtccccacctatattaatcgcacagttcagtgactccatctcaaggcctcaatcctcatcacctctgtgttattcaaaagccctaaggagtcaaacttgcttccaaacaccagtagagtgagagacagaatgttcccgtttaagactagtcctgtctgcctggcgcacccagtcatgcacaggtgtaaac

SEQ ID NO: 39233 - DNA, 634 bp, Macaca Mulatta
ggagggaatgaagagggaaggagaggcccctgggtggaccagacaaccacaccatgaaccctcccagagactagacagagagaggcgctccacaacaccccactctccctctgccgtctctcaccccctcctctgtccacacaggtcagcccaaggccaccccctcggtcactctgttcccgccgtcctctgaggagctccaagccaacaaggccacgctggtgtgtctcatgagtgacttctatccgggaatcttgacggtgacctggaaggcagatggtacccccatcacccagggcatggagatgaccatgccctccaaacagagcaacaacaagtacgcggccagcagctacctgagcctgactcccgagcagtggaggtcccgcagaagctacagctgccaggtcacgcatgaagggagcaccgtggagaagacagtgacccatgcacaatgttcgtaggttcctaaccctcaccccacccacaggggcctggagctgcaggatcccaggggagggatctctaagcatcccaagccatccagcccttctccctgtacccagtaaactctcaataaatatccttcgtcaaccagaaagcctgctccctctcttcttttcttatctctcat

SEQ ID NO: 39234 - DNA, 922 bp, Macaca Mulatta
  misc_feature (1)...(922): n = A,T,C or G
ggaggcatagcaagcannnnnnnnnnnnnnnnnnnnnnnnnnnnnnnnnnnnnnnnnnnnnnnnnnnnnnnnnnnnnnnnnnnnnnnnnnnnnnnnnnnnnnnnnnnnnnnnnnnnnnnnnnnnnnnnnnnnnnnnnnnnnnnnnnnnnnnnnnnnnnnnnnnnnnnnnnnnnnnnnnnnnnnnnnnnnnnnnnnnnnnnnnnnnnnnnnnnnnnnnnnnnnnnnnnnnnnnnnnnnnnnnnnnnnnnnnnnnnnnnnnnnnnnnnnnnnnnnnnnnnnnnnnnnnnnnnnnnnnnnnnnnnnnnnnnnnnnnnnnnnnnnnnnnnnnnnnnnnnnnnnnnnnnnnnnnnnnnnnnnnnnnnnnnnnnnnnnnnnnnnnnnnnnnnnnnnnnnnnnnnnnnnnnnnnnnnnnnnnnnnnnnnnnnnnnnnnnnnnnnnnnnnnnnnnnnnnnnnnnnnnnnnnnnnnnnnnnnnnnnnnnngataaacagccgccagattcttatttctaggagtgccaatatgcggaacgaattagaaggctttaactgacccctccgaaatggtttggggaaatcaaggagacaattcccctaaaatgggggaggccaaccccgaactttaatccaaagggggttctcccgttgtgggttctccaaaagcaattttaaaaaggtccccgacccggtggaaatcctggggagtttgccaaaaacgcggggaagccgaatatcccccaggaaccaggggtattcacaaagtctaaattttagcagccatttttttcctccccccctggttactcaaataaggcggtactataacaggcaagagataaagggggcgcgccgatcgttttccgctcagaaacggcaggccccctgtgcaacggtaaacgatcaagaagtgcgccccgaccaagg

SEQ ID NO: 39235 - DNA, 410 bp, Macaca Mulatta
catctccacacccccatgtacttcctccttagccacctctccctcattgacacattatacatctccaccattgtgcccaagatgctggtagattatcttgtgggccaagggaccatctctttcatcgcctgcactgctcagtgctttctctacatgggctttatgggggctgaattcttcctgctggggctcatggcctatgaccgctacgtggccgtctgcaacccactgcactatcctgtcctcatcagccagcgggtctgctgcatgatcctggccagctcttggttcggcggggctttggacagttttctcctcacccccatcaccatgagtctcccgttctgtgcctctcaccaaatcaatcactttttctgtgaggcacccaccatgatgaggctggcctgtgg

SEQ ID NO: 39236 - DNA, 399 bp, Macaca Mulatta
  misc_feature (1)...(399): n = A,T,C or G
ctgctgctgaaaaggcagtcgacaaggcaggaatatcaggctgaatggactgctccaggtcctgagtacactgctactcagcctgaggttgcagactggtctgaaggtgtgcaggtgccctctgtgcctattcagcagtaccctactgaagactggagtgctcagactgccacggaagactggtctgcagctcccacagctcaggccactgaatgggtaggagcaaccactgaatggtcttaagcgtgtacttgcacgggctcttaagcaacatggaaaaatggtagatagaaaataaacatacagtttctaaaaaaaaacaaaccaaaaactcaacggggggccccgtacccaattcggcctatannnnnnnnnnnnnnnnnnnaacaggccgtcgta

SEQ ID NO: 39237 - DNA, 746 bp, Macaca Mulatta
ggactgaaaattttggggtggctgttgtatacccttttgctacttcaagcaacacatttttgggcgtcaagatctataaaacaacacagagcttggaggaaacattgagtctgtaaactgtggaaattcttgtgtagcttggagtgagacccgtgtgggaatctttggcagccaccgtttaccaccttaacttttctgagcatgttttattatttggtaatatggagctgtagtactccctttcctcagggttgtttcgaacctaatgtttgtaaaattacctgacagacattgctagctctcagccaacagaggtgggattgttgttaattgtttcaaaccaggggtcacacaggaagctgagcctgggtaagaagtccagcttcttgacttctctggggctggttctctccagcacccatgccatattgctggggataaggaagatattttattgagatgagccccagcttctcattagaaactacagtcctgattctttctctagactcgtcaggttgccagttgatccagtaagtaatgtagtaaatgtagtggacccagtaaggagtttggggtttttcatggagtgattttcctaaaatcacctgcagtcagtaaccctgttgacccacatgaagggtggggggaacttgtttcctcctgtgggtggttcaccctttgtattatatgcaaaggtgaaatgggaaccaatcttggccacattaagtttttggaaagttctt

SEQ ID NO: 39238 - DNA, 361 bp, Macaca Mulatta
cgaaggaaccgaaagaacccaaggagaaaaaagagcccaaggaacccaagaccccgaaagcccctaagattcccaaagagccaaaggaaaagaaagcaaaaactgccacgccaaaacccaaatccagcaaaaagtcaaggtaggctgtgggcagaaacaacagttgcaaaacattgagagtacagcaattagcgccaatagttacagcctatgaaatgaggggtgggaggggacacaatgatttttgtcatcattgagcttctttccctaatatccaaactaaaaagctaagacttttacgcattctgaaagttaggatgtattgttgtgaactgttgatatatagatcttactagataca

SEQ ID NO: 39239 - DNA, 192 bp, Macaca Mulatta
gtagttcttaaattgcaatctagagacaactcttttaggctgtcttgctttttctaataattgatgtgtaggtgttccttatatgtcctatttactcattgttgacaattataggttgcaatacctgctcccagatttagtttatcatctttcttttaattgaattatgtgatatataagaaattgcaagtc

SEQ ID NO: 39240 - DNA, 924 bp, Macaca Mulatta
  misc_feature (1)...(924): n = A,T,C or G
gggcttttttttccgcgctacctacagaagggtccatacggcgttgttctggattcccgtcgtaacttaaagggaaactttcacaatgtccggagcccttgatgtcctgcaaatgaaggaggaggatgtccttaagttccttgcagcaggaacccacttaggtggcaccaatcttgacttccagatggaacagtacatctataaaaggaaaagtgatggcatctacatcataaatctgaagaggacctgggagaagcttctgctggcggctcgtgccattgttgccgttgaaaaccctgctgatgtcagcgttatatcctccaggaatactggccagagggccgtgctggaagtttgctgctgccactggagccactccaattgctgggccgctttcactcctgggaaaccttcactaaaccagatccagggcagtcctttccgggaagcccacggggtttcgtggtgggtttacctggaccccccgggggcctggaaccaacaaggcctttttcatcgtgaaggccgatcctttataggttttaacccttaaccgtaactaaattttgccttccttggtggttaaaacacttaggaattttcctcccccctttatggctgcccttaattgtatggtgaaccattttgtcatcaatttccgccaatgggccgcaacaaagaccaaatggggggagagtcttcctaagattatcaaaatgtggggttttttaaactgagtggggaggggaaaaggtcctcgggcctctcaaggggaaaggttttcttggncgtgaaattaaccttgaggtaaacacaattattgccgacaatggaaaaaacgaaactgaggaggggaaaggttcaatgtacccggcaaaaccagctaaaatttcaaaaagaggaaaagttaatctggggaaggaa

SEQ ID NO: 39241 - DNA, 727 bp, Macaca Mulatta
  misc_feature (1)...(727): n = A,T,C or G
gggtctagcagaataattgtcagttaaatacaccaagtccagactaatctgtgctaaagaaagcataatgattagaaatgtgccatgattttcttttatggtctatatcagttgttctcagttgaaagtgattctcagaatctcctagcccatcctagaattttttcttctgtagacatggggtcaagaactggcttccctgtggttcttagttcatcttagttgagaacactgatttccactaatgacttgttttggccccttaaaaaggtagtatttcttatatatatttttattactctaagataatctacttgatcaagcaaatgtaatcacacaaaatagaagtcattcattcatatgccattcactcttattgggcatatactgtatttaggtattatatcccataaagtggtggaggggtggtgggaaagttgccagatgaagtataagatactcagttatatttgaatttcaggtaagcagtgaagtttttagtataactatgtcccaaatattgcataggacatagttatattaaagaatttggctggacatggtgacttnnnnnnnnnnnnnnnnnnnnnntgggaggcggaagtggggctgataacttgaggccaggaattttgtagaccagccctgaccaaacatagccaaaaccctcgttctccgaccttaaaaatataaaaaaatttagcctgggggccttgggttggccacc

SEQ ID NO: 39242 - DNA, 730 bp, Macaca Mulatta
  misc_feature (1)...(730): n = A,T,C or G
aggggagattggactttaggttctctcggtcttgaattgactgatttatacgctagtttaatatttattgagtacctgctgtgtcccaggcacatggtatatacaaaatagtcctagtctttgacttcataggactccaagcttacaatctagttggggagataaacatgtagccaggcagtggtttgagatgtgctatgggtggatgaatcgggccttcaggagcatggagaggaactcccaactcaggcctgagaatcagggaagacttcagaaggaagataagcttacgctggcattcactggatgagtaggagttagccaggggaagagagtggagacatattctggacaaagggaacagaatatgcctggaagcctgagagagcttatgttagagaaacatactaaggtacagctggggtaaggcatatgcagggtagagaatgggtaggtgtaaagcctgagtcctgtctttgcagttgggatatcaggtgaaagttgggactggttaaacaggtctcttcttgccacctgtatgtaatgaaatattaaggctcagtggttaagggctgttaacccggggttcacactgttgctcagcaactttatgacaatgttaagaatcnnnnnnnnnnnnnnnnnnnaatgaaacctatgttataacagtatctatntggtatgtggttgctttgcatattaagtggaatttatttaaatactgcatagc

SEQ ID NO: 39243 - DNA, 775 bp, Macaca Mulatta
  misc_feature (1)...(775): n = A,T,C or G
aagcttttatgcggctgttcacatgggaacagtgactcactgactggccatgacgagcttattgataagaagaagatatgacagcgagatagtgctcagaggtagaaacctcaaaaattattttgtaatattcagaaattactcataatctagtatctgtttttactggcattgaaaagtgaacactggacaagtagactggagagaaaacacgtgacctgtgtgtaggttattcttgttagcggcgaggccttgttcttgagtgtcaccccagcaacctcctaaggccgtgctgctcacacctgcccagagaggcccctctacagacagagaacactcagctcaagatgatcagaggacagagctgaaaaccccacacgaagaaatttccttgaagggccatattttgtattacattttcaagttgattttatatttgactccaaaacgtgtgtannnnnnnnnnnnnnnnnnttggttctgttttgttttgtttttgagatagggtcttgctgtgcnnnnnnnnnnnnnnnnnnnnnnngcannnnnnnnnnnnnnnnnnnnnngcctcctggatgtnnnnnnnnnnnnnnnnnnnnnnnnnnnnnnnnnnnnnnnnnnnnnnnnctgccaccacgcccaggtgnnnnnnnnnnnnnnnnnnnnnnnnnannnnnnnnnnnnnnannnnnnnnnnnnnnnnnnnnnnnnnntaggtgatccgcccgccttggcctcccaaaatgctggannnnnnnnnnnnnnnnnnnnnnnn

SEQ ID NO: 39244 - DNA, 756 bp, Macaca Mulatta
gggtgaatcctttgaaaatgacatggtaattaattttctactctatcaatattttttagaactactataataatttcaattttttgtcttcgtatatcactgctagataatccatcacacccctctgcattaagttcacagaaattagaaagcttgcataaacaaaattcttggcagcaatatattctaacaattgtcattcctaattataacctcaagatactagagaattccaaagtgcttcgtgaagaccaaagaaaatgatattttatcccctagagatttactgtggaataccttttaatgcattcaggagccgtaaaaaatttttaatcaatgcatgatatctaaggtaactttcagataacctgtatatatgatgaatggaatctgtaattttccaaatgttctggatggagaggtttttgtaaaatgaatcctggccctttagaaatctttactcacaaaaaagagcatacaagaattttcacaaattggaaagcactttacatatatgctgggcattatttaaagaacaatttgcagagaacgataacatttttagggttttgtgattgtgttctggctcctactggttaagcgctttatgaaaacatgcatgcggggagcttggggggcgggtggcctcacgccctggtaatcccagggactttggggagaactgaaaacagggcagaattcccgaagggccggggaagtttggaaagacccggtgccgggggccaaccagggggg

SEQ ID NO: 39245 - DNA, 174 bp, Macaca Mulatta
agtcagggagatggttccagaagaaaagaaagtcagttgctttctgagatcaggtgggaagtttatcccgtcagctccaccttcagagtgctagtctctggagccacaaggactgaaactctgcttctgagagccaccactgatgacaaccattaggctcaagaaccaaaaaga

SEQ ID NO: 39246 - DNA, 804 bp, Macaca Mulatta
  misc_feature (1)...(804): n = A,T,C or G
gggccaatannnnnnnnnnnnnnnnnnnnnnnnnnnnnnnnnnnnnnnnnnnnnnnnnnnnnnnnnnnnnnnnnnnnnnnnnnnnnnnnnnnnnnnnnnnnnnnnnnnnnnnnnnnnnnnnnnnnnnnnnnnnnnnnnnnnnnnnnnnnnnnnnnnnnnnnnnnnnnnnnnnnnnnnnnnnnnnnnnnnnnnnnnnnnnnnnnnnnnnnnnnnnnnnnnnnnnnnnnnnnnnnnnnnnnnnnnnnnnnnnnnnnnnnnnnnnnnnnnnnnnnnnnnnnnnnnnnnnnnnnnnnnnnnnnnnnnnnnnnnnnnnnnnnnnnnnnnnnnnnnnnnnnnnnnnnnnnnnnnnnnnnnnnnnnnnnnnnnnnnnnnnnnnnnnnnnnnnnnnnnnnnnnnnnnnnnnnnnnnnnnnnnnnnnnnnnnnnnnnnnnnnnnnnnnnnnnnnnnnnnnnnnnnnnnnnnnnnnnnnnnnnnnnnnnnnnnnnnnnnnnnnnnnnnnnnnnnnnnnnnnnnnnnnnnnnnnnnnnnnnnnnnnnnnnnnnnnnnnnnnnnnnnnnnnnnnnnnnnnnnnnnnnnnnnnnnnnnnnnnnnnnnnnnnnnncatttggaattaatcttttccccatattagaaggcaataagggcctagtaataagttaacacggaaatatttttcctccccctggcataaagccccaaatccggaattcgaaaaccctcacccggatacccaaacaagccaagggccttgatcaggcaacaaaacaaagccccagggcctacccttttaaatggttatacccc

SEQ ID NO: 39247 - DNA, 125 bp, Macaca Mulatta
cagaaaaatcatgtcttcttccagagtgggactccgtttggctgcctgtttactaaacatttcagaagccagaagaaaatacattgttgagaacatagcaaaagcagctcttcttgacaaaaatg

SEQ ID NO: 39248 - DNA, 259 bp, Macaca Mulatta
tgcggcctctggcggccctggtgacccggcgggacctgcgggcgcggcccgaggaccggagggcgagcctgctcctctcgcccgtagggaagcgccttcccgccgtcgtccgcccagggcttggacgcgcccttcttcggaaggctccagccccaggctggccggcccgcaggagccccattctcagagagtgtgtgtgcagagtccctgccgttttaggacagtcagagcgcatcttctgccaagtctgaccccatgg

SEQ ID NO: 39249 - DNA, 591 bp, Macaca Mulatta
tcaagtacttcttcgacttcctggacgagcaggcggagaagcacaacatccaggatgaggacaccatccacatctggaagacaaacagcttaccgctccggttctgggtgaacatcctcaagaacccccacttcatcttcgacgtgcacgtccacgaggtggtggacgcctcgctgtcagtcatcgcccagaccttcatggacgcctgcacgcgcacggagcataagctgagccgcgactctcccagcaacaagctgctgtatgccaaggagatctccacctacaagaagatggtggaggattactacaagggcatccggcagatggtgcaggtcagcgaccaggacatgaacacacacctggcagagatttcccgggcacacacggactccctaaacaccctcgtggcactacaccagctctaccaatacacacagaagtactatgacgagatcatcaatgccttggaggaggaccccgccgcccagaagatgcagctggccttccgcctgcagcagattgcggctgcgctggagaacaaggcactgacctctgacctccaatctccagtgctgccttggggcataggta

SEQ ID NO: 39250 - DNA, 546 bp, Macaca Mulatta
ctgccaccaagtccaaatctccttgttgcatgcccccgatggccacccaatgtgcattcccgattccttttggttctaagtccaatatggcaattctcaaggatcagttgattcataatcttctaaaggaagaacagacccccagaacatgattaccgttgttgaggttggtgctgttcacatggcctgtgccatcagtatcttaacgaaggacttggcagatgaacttgctcttgttgatgtctcggagaacaaattaaagggaaagatgatgaatctccaatatggcagacttttcctaagaaaaccaaagatggtctctggcaaagactataatgtaactgcaaattccaagctggtcatgatcgcagctggggcacatcagcaagaaggagaaagctctctcaatttggtccagtgtaatgtaaacatctttacattcattatttctaatattgtaaaatacagcccaactgcaagttccttattgttttaaatccagtgaatatcttgacttgtgtggcttggaagataagtggctttccc

SEQ ID NO: 39251 - DNA, 584 bp, Macaca Mulatta
  misc_feature (1)...(584): n = A,T,C or G
naaacatccagaaaagaggtcaacaggattattcgacatgttttagttaggtacgtgggattgccaaaatgatgttcatgcttctttaggttatatttttatgaataatgctaatgtatgttctaagagtatatgggatttctaaaattataatgtctaagtatatactctcaatcataattaaggttgttatgttattgtaaaccacagagataaccaaacttctttgtcagttacgtttctgactgtaattatcctggacattttgctattcacagacaattgttgtcttgttttaatccttttcaaacgatggcttataataagctataggactttgacaggtgctctcaaatacaggcttctgtctgataactttggagattgtgacattggaataaagaaaaatgtacaggactcaaaaacagctgaagtgttcatgaactgaagcaaaacaagaactaaatggactgaactcagaaagctgaagcaacctttttgacttttgcttggaatattgttgatccttgttttgcttttcagagtcaaagaaacttactttgaactatttacagcatttaata

SEQ ID NO: 39252 - DNA, 502 bp, Macaca Mulatta
  misc_feature (1)...(502): n = A,T,C or G
atggacaagatcttaggagcatcatttttaattctgtggcttcaactatgctgggtgagtggccaacagaaggaggaaagtgaccggcagcaggtgaaacaaagtcctcaatctttgatagtccagaaaggagggatttcaattataaactgtgcttatgagaacagtgcatttgactactttccatggtaccgacaattccctgggaaaggccctgcattattgatagccataagttcatctgcgagcnnnnnnnnnnnnnnnnnnnttcaaaatcttcttcaataaaagtgccaagaacttctcattgcatatcatggattcccagcctggagactcagccacctacttctgtgcagtctatactggaggcttcaaaactgtctttggagcaggaacaaaactatttgttgtagcannnnnnnnnnnnnnnnnnnnnnnnnnnnnccagctgagaggctctaaatccaatgacacctctgtctgcctatttactgatttt

SEQ ID NO: 39253 - DNA, 677 bp, Macaca Mulatta
  misc_feature (1)...(677): n = A,T,C or G
ggggagagctgcgcgccgctgcggcggaagatggctgcggccgaggtggtggacactcagctgatgcttggagtcgggctgatcgtgaccatctttccaccgtagaaaaggacacaaatggagaagttctgtgggtgtggtgttatccttccacgacagccacattaaggaacctgctgctgagaaaatgctgccttacagatgaaaacaaacttctccatccctttgtctttggtcagtacagaagaacatggttttatatcacaacaattgaagttccagaatcttccattttgaaaaaggtgactcatttttctattgttctgaccaccaaagattttaacccagagaagtatgctgccttcactaggatattgtgtagaatgtacctgaaacatgggagcccagttaaaatgatggagagttatattgcagttctcacaaaggggatatgccagagtgaagaanatggctctttccttagtaaggattttgatgtccgaaaggcctacctggctggctccatcaaagacattgtatctcagtttggaatggaaactgttatcttacacacagcactgatgctaaagaaaagattgtggtgtatcacccaaaatagaagcgtccagagtttaccagactctgctgcctggtgtgcacgacagactggacatctt

SEQ ID NO: 39254 - DNA, 617 bp, Macaca Mulatta
  misc_feature (1)...(617): n = A,T,C or G
aattgtgcagtttcctgtgtttacaaaagtactcaggtcgtctctccttgattacattagaaactgagattataggaaaggcaaatcaagcatgatttttctataacagaaatgtcttaaaatagttttcatgaagccccacgtgaaaattcatttagggtaaactaatttcatttagggttaagtactaggaaatgttcacctgcttaagatctgatatttgtctccctttggatatgaatgaccatgttttcctttttgctttgatttgacttggagccgaattgtatgtttaatcagaatatccatggcctgattcacttggtccaggtctctctctgcctctccttcaggtttctactttctatattctaatttagatgttttgtggtctctggtactacttaccactttgtattgtttaatgcaagctacctcaggtcctttgtggatggggcagagtgtgcacacatgcacacaggtgcattgcacacacacgtatactttcccaatagttgtgacttttttcaagtacattaacagcaatcacgtattggaaatattccattctttgggaatatttcagaacctctgtcctaacataantttagtacctg

SEQ ID NO: 39255 - DNA, 83 bp, Macaca Mulatta
aagtggctattgctgtatcgtgtactccagtgtcacaggaaggctgtgcctgagacatcccactttagtcatatgttttccaa

SEQ ID NO: 39256 - DNA, 763 bp, Macaca Mulatta
  misc_feature (1)...(763): n = A,T,C or G
gggcctaccacagtagcaagaaggagaaagtacaccagaactaggaagagaatccacttcctactgcagtgttccttcagcatctttactggcaaagcttaatattctgcattttggcaaaggagaaatgtttataagggccagttccagtatcacaaagcaagacagagaaggataagtttggaagaaagaagtactgcattgattacagaggggttaggtaaggtagatcacactgattctcggatattttctaaatctgtaccttttggaaaattatttctagtgcatattagatttgttgattaaggaagtagatataaattgcattatcctgggcacaaattgcaaattagccatccttatactgtccagccagtataaactcctgggtcttgctagcattgcttcagagaatggactcagctgcttgtcttgtttatttnnnnnnnnnnnnnnnnnnnnnnatttaaataaacaaatnnnnnnnnnnnnnnnnnnnattttaaataacattattaatttttttcaatggaacaaaagtttattgggtatctcaatataaaaagctactatgacaggcaacatcatgggcagcaacattaatcaaacattgacatggtccctaggaaacttatattaatagtctaatactgcagataatttttaannaatcaactgatccgcattgccaccaaccagatggacattatctttagtaaaagtnnnnnnnnnnnnnnnnnnnnnnnnnnnnnnnnnnnnn

SEQ ID NO: 39257 - DNA, 816 bp, Macaca Mulatta
  misc_feature (1)...(816): n = A,T,C or G
ggggcctgggaagttgaggctgcagtgagccgtgactgtgctactgcattccagtctgggtgacagaatgagacactgtctcnnnnnnnnnnnnnnnnnnnncaccttcctctgtactaatgaattataaaaagatgccatctggacacagcaacactaagcttggtgtgcagtttaggctaaagccccatgctgttgtgtaatgcataaactatacaggtacaagcctgcccccaccttcaaattttgtgcacacttgtagacacagggctagggtttcctgatggtgccaaagagagaagcagaacagaaactgaagtaaacccagacttctgtaacagacctaaagaaaaagaaataggaaaggcagttcttcctaggaggaaaatacaataaactattgtactggtaggttatgtagttcccttactttggtattttcaggtacctcagttcaatatttattcattaccataagaaagaccagagaaaatgggaggagagaaaataataaaaaagnnnnnnnnnnnnnnnnnnnnnaaactaatgaaaactagggggctttcagatggaaaggtccataatgccgagcatgatgaaagaatgtggnnnnnnnnnnnnnnnnnnnntatgaacagtcttgctctgtcacccaancctggattgccggtggttgtgattctcggctcactggcaacctcctgcctccctgggttcaagccaagtcttcctgccctcaaccctcctaaataacctgggaattacaagttgcattgaacaccattgcccaaaaaaattttttgggaatttttagga

SEQ ID NO: 39258 - DNA, 398 bp, Macaca Mulatta
gacttcccagcgagggaaagtcacccgttctggccacccctgatgggcacccattccccaagagcttacaaacttctggtacgtgtcagatgctagcttgtgcaggtgatgggctcagaacacagctgttgttaaaaatgccaggataagggaatgtttgggatggcatgtccaggagcctaagggagatatccggaggccaacagagggaatggagagcaagatgccagtgctctccgtgctccaggagctgtttttttttctccctccctccagggaccaggaacattctgagattggccaaatatctgggctgagatgcccccgtcccatctacagggctccgcctctcccctcaggacacatcgtgcagaaatggattttacggggcgcttacc

SEQ ID NO: 39259 - DNA, 221 bp, Macaca Mulatta
ttataaattaccctgtctttctcctaagagcttctgtggagtttctcttacacctttccttcctcatcatttggcaggctccttgtgaccaaaggaatggattaataagcccctgtgcctggccctgtgctaggagctgttgggtaaagccttcacctttcccactggcttatcaaatccttgagggcaagagctgttaattttacttctttcattatgtt

SEQ ID NO: 39260 - DNA, 764 bp, Macaca Mulatta
ctcgattcccagtccccaccctatccttgcaacttcgcctggtgcgtgacccgagtcacccccaggcttcggctcggacatggtgactctggtgctggccatcgggagaagccggtccctgagacatgtggcgcttggaaggaacttcaacgtccggtgcaagtgagcccccaccccactcctgggcctcccagacaacaccctaccacccctgtcccccacaactgcggcccctgcccctgtacagggagaccctggacgacgtcctgcaccggattgtccagctcatgcaggacgacgactgtgtgagttcacgggaccttgcagggtcctcgggcaattagacccctttggtcctcccttctcttgttccctcagaccctgtgacctgccctcactgacgcctgactccagccatcaatggctttctcttaaccccagcctcttcagtctctgtcggtggctgagtctcggctgaagctgggcgccagcgtcctactccgggccctagccaccaatcctaacctgaccgcgctggatatcagcggcaacgccatgggggacgcgggcgccaagttgctggccaaggcgctccgggtcaactccaggctccggtgggcggggtcagaggggtgggaccagcgggcagggggcgcggtggagaggagggtaccgagctaaggggcgggactgaatgaggcggagcaaatggagcaggtagacgaggcgaacggggaggcggaaggttgggtggggcgttggga

SEQ ID NO: 39261 - DNA, 148 bp, Macaca Mulatta
  misc_feature (1)...(148): n = A,T,C or G
agaacccgtacccataatatatgtatggcatctgactttttctacccaaatatggaaggtgtggaaagccnacatttaacagctctgtcagtgcccgattggaagaggcataaggctaaaatgtgattcatgcttatggaaatcgaaa

SEQ ID NO: 39262 - DNA, 1094 bp, Macaca Mulatta
  misc_feature (1)...(1094): n = A,T,C or G
gggatttattaacattgaactcactgccaacagcactataacttatgcctgaacaaagcttatctcgcacnnnnnnnnnnnnnnnnnnaggtatatcacaatcttcctgagcttaggagcacttgaacactatgctcagggccattttaaacggcgaaattgccagtataaagcataaaaatgtgaaatacattgcaccaaatagtttgtagaaaggacacttgtttatggtttgagaactgaaacaagaaggcaaagtgtcaccttgtttgaccgcggatgggaaatgtgtgctctggacccctcaggttttttcctcctctgcttatgttcatgaacatgaaagcaccactaaatccgattttgagggtacaattttcaattgaatagggcaaattttgcgttatatggaagtcccataaaattatggaaggatcaaaactctaattattgccttttaataaaaaagggtgaacaaataattatttaaaagggataaaattctaaggtaattaataatcttcaattaaccacgaagcatccgcttttgggaaacgaggggtctatgaaaactaacgaaaattgggcaatttatgtggcaacctctcttaaagaaaaatatggggctaaaaatcggagtatcgcggggatatttttgtgcgccatatccccatataaaggggcataatagcgcagccccctatattatttttcaccacgggcgtgtatannnnnnnnnnnnnnnnnnnnnnnncgtaggcacccatggggcgtattttacccagtttgttttattggacgccattctattttgtggtgatgggacaaaagagaagcctacagaggtgtttcaaaataataaaaagcaacggggtgatgggggagaacatatttcttgggggagaaggcctctccattatatgagatgttcctagctctccgcacacatatcaagccacgaccatcataatagagggcctcgaagggttttcttgttacccatggctaaagtaaatgagggctacgcaccgcataacttcactatcaaaagagtagacattaatgttttgcgtggccacctcccatatgaaaca

SEQ ID NO: 39263 - DNA, 850 bp, Macaca Mulatta
  misc_feature (1)...(850): n = A,T,C or G
gggtctcgaattcaaaactaatcttggaaatattttatattcaaaggttaatggcctaaatatgtaaagggcacttaaaaggcaacagaaaatcactaatactctaaaaagaaaaaagaaatgggtatactgaaacagaaaataagaaatgcaaatgacttaaatacatgaggaaatgtttatgtttactatccaaaaaattaaggcaaattaatacaacgctgccattgttgtcaaacaaattgttaagctttacaaaaagtataatttttggccaggcctggtggctcacgcttgtaatcctnnnnnnnnnnnnnnnnnnnntgaggagatcatgaggttaggagttgaagaccagcctggctaacatggcnnnnnnnnnnnnnnnnnnnnnnnnnnnnnnnnnnnnnnnntgtggtggtgcatgtctgtagcctnnnnnnnnnnnnnnnnnnnnnnnnagagaatggcttgaagcccagaggcagaggttggtggtgagtggagatcgcaccatttgaatccaacatgggtgacagtgcaaccnnnnnnnnnnnnnnnnnnnnnnnnnnnnnnnnnnngatttttaaatatatggataaaatggtttaatgctgggcacggactaagggaatgggcactcctaaatggcccaagggcctaaaaatttgggaaagacttttacgggaaccaaatttgggccnnnnnnnnnnnnnnnnnnnnnnnnnnnnncccttatcctatggcctccacttagttccccccttggaaggaaaaactccccgaaatgcgcataaaggcgttttttgaaccccgcccggggctttttgttcgcaacttacttttacca

SEQ ID NO: 39264 - DNA, 1474 bp, Macaca Mulatta
  misc_feature (1)...(1474): n = A,T,C or G
gccagtatggagaatcaaagattgataatgccttctggagagtttgatgcaaaagcgggggaaaaggagggaaagagagaaaaggcattaagactaaatgcacgtgcattagctatatttcattaactaaagtcaggtcagcgcaggtccaaggcgtccaattggaaaaggacagtgttatggcttataaaaaactgaaaccccaccctctaagttgaaccaacctatcacaatgttttctgagctttgcagtaattttctatgaaaactaaaacctttaaaacatacaacctggcccaaatgagaacacaaagatgtggaagacagtgaaacctgagcactggtttgaaccaggcagtgacgcttgatatactttaagccttttcacattccttctttattccctcnnnnnnnnnngtcttgagtttaatttaggtctattttggctgagattagcatacctctgattcacaggatttaataagttatagtattattgaatacataggacatccctctaccccagcctactctttaatttaaaatagaattctaagaccaagaaggatgcaactgctagttttagacataaatagtgttatatactggactttnnnnnnnnnnnnnnnnnnnnnnnnnnnnnnnnnnnnnnnnnnnnnnnnnnnnnnnnnnnntttgtctctgttctgtcatctctgttaagccaggcacctttagattgtttgcaatttgttcaaagtggttgaggatctcaggccctgctcacctgaggtagagagcaggggagctacaggtttccctgctgacctgctcaatgctaccttcccctcaagctaaatacaccttaaagaaaatgataacatgagggatgtgtaacttgttttgaagcattaaaaaccagcagctcttcagtatgttccatattttaaccaaactactgtagactactaaacatagccaagccagaactttccttctgaattaagcctaggccacttgaggggcagccaggcatgatggtgtcaggtgagaatcctgtgtcttgaaggagtggcctttgcaggaagagtgcccatgttttcacctgcggtgttgccaccggagtgtgcactacctcctgcacacaggctcagggtaacctgctccaaaactaggttttgtgttgtatacaaagtcaataaaatagttgctaatcctgagtggcagccagtgatgtgaaggtactattaaagtgaacaaaaactagattgcaacagttttctttgcttgcttgaagtataacacacgctccatttgatcctgcctgaaagaagctaacattatatttgtgacagacagaggctccatcaagccaagcaacaattaacagctcaaatgtaagatttataaacgcctgtgtactcacccttcaattgttaccacccagaggttacaggactctttcccgagcatttaggggaaccaggtttttaga

SEQ ID NO: 39265 - DNA, 884 bp, Macaca Mulatta
  misc_feature (1)...(884): n = A,T,C or G
gggagattctctggataagcgggggaacgaaagatggcggcggaaacggtgctgtccagtgtgttgggactgctgcttctgggactcctgttacccgcaagtctgactggcggtgttgggagcctgaacctggaggagctgagtgagatgcgttatgggatcgagatcctgccgttgcctgtcatgggagggcaggtgagaggcgtataaggggcgagggtccgggcagaagaggaagcgagtaagagatagaggaagaagggcagctcccgagtctggggctggagcctacgggaaatcgggaagagtaggtattgcttttacggtgatccctggggatcgcagactgagacccattctctaggggccaggaattgggagaggtggggcttcccgctgtcaacgttcaggccatttcttcaacccgactcgtccgtgagaatggacgctccgctcccctaataactggaagtcgtgctatctgctcatgatctnnnnnnnnnnnnnnnnnnnnnnnnnnnnnnnnnnnnnnnnnnnnnnnnnnnnnnnnnnnnnnnnnnnnnnnnnnnnnnnnnnnnnnnnnnnnnnnnnnnnnnnnnnnnnnnnnnnnnnnnnnnnnnnnnnnnnnnnnnnnnnnnnnnnnnnnnnnnnnnnnnnnnnnnnnnnnnnnnnnnnnnnnnnnnnnnnnnnnnnnnnnnnnnnnnnnnnnnnnnnnnnnnnnnnnnnnnnnnnnnnnnnnnnnnnnnnnnnnnnnnnnnnnnnnnnnnnnnnnnnnnnnnnnnnnnnnnnnnnnnnnnnnnnnnnnnnnnnnnnnnnnnnnnnnnnnnnnnnnnnnnnnnnnnnnnnnnnnnnnnnnnnnnnnnnnnnnnnnnnnnnnnnnnnnn

SEQ ID NO: 39266 - DNA, 442 bp, Macaca Mulatta
ctatgagaagaaaatgtcctgtgagatatcagaaaggagtcagggccataaggtcctacaggaatctcctagtcttggaccccagagaagtttccagaaatgtgtgattgcagacccaggacaggatcaggaaacatgcagaaagcaggtgtgggtcctggaccaattgccctcctgaggtctgtcctcagcagggaccttcccttgtgacttgtgaatgctgggatcaggtcccatcaccataatcaaggtgataaatctgtccttcattgtaacaggtgctttacaaaagagtaggtgctggcacacagggcccaggctgggtcagcccatgagtgtggatggtgcttcccagtaaccagacagggtacacttctacctggggcttgaaaccctcagtgagacaagaaatcccagaccccactcctcaccccttcctcac

SEQ ID NO: 39267 - DNA, 636 bp, Macaca Mulatta
  misc_feature (1)...(636): n = A,T,C or G
gcaggcataacctgtatctaaagagatgaaccctggggctaacncagaaagtataggcaccctcattattagtttcacttttgttgttttttttgttcttctctccttgttggtctatgtgattcttggaggatgtggtcaaagatttgggtctgtagccactaaattgtagggtatgcaacactcttgctctttctcatgatgccagcctggagtaccatgcagcctaattcacctactagtccagccagcagatgctaccccagactctgccagccttaccttgttttctccagattgtgcctggctctctggtggctggtgacacacccatctgcagaggtatcgctacctgtcagagagcaacttcatccatgaggtagctcagcagtgtcccttcttctgttcagggcagccaggggcgggaggaggctgctctcttgggctgcccatccactctgagtactggtatctcaagtgcgaacctggctaaccccagcttctttagatcccttccttatcaacacctgatggggccttttaatgcagggcttgttaaagacagtaggaaggatgaaccctctgctcagcctctggtcctctaaaccccatgttcctctggaccttccgtctttt

SEQ ID NO: 39268 - DNA, 733 bp, Macaca Mulatta
  misc_feature (1)...(733): n = A,T,C or G
ggattccacagaatttatctcatgggcttaaaataagcagtaacttacaaatgaattcactggaaatctgtgggaggccttgttattgatactgtttttaagggtgacacacacacttatgtatcatttatttcatttatacaaaatatttgcaagttattttcgactagtttagtattcatgaagtactagctgataataagcgagatctattactagtcaatatatattattatatatattgattactttatatattcctgatcaagatacattgattaatattacttttgtttgaaaatacaaataaaattatggaggaaagagaaattatttacggnnnnnnnnnnnnnnnnnnnnnnnnnnnnnnnnnnnnntgtctaggctagagtgctgtggagcannnnnnnnnnnnnnnnnnnnnnnnnnnaagtggnnnnnnnnnnnnnnnnnnnnnnnnnnnnnnnnnnnnnnnnnnacactaccacgcctggctaacctttgtatttttagtacggacagggtttcacccnnnnnnnnnnnnnnnnnnnngnnnnnnnnnnnnnnnnnnnntgcctaccttggcctcccaaaatgctgggattactggcatgagccactgtgcctagccagaaagagaaattattataatttaggttgttttgcttcagttttccccccttggaatggttccttttttcctttcaagtaaatttttgggtaggaaaggaat

SEQ ID NO: 39269 - DNA, 399 bp, Macaca Mulatta
agaccttgactttttcttattgtaagtatatttgaaacttatttatacaactatagtgatgcctcccccttcccagcctcccttagccctggcttctgcctgatgctctactgactgtctcgttcctgcctctcctgcacaggtacacactggcagctcaggacctggtgatgcgtgcccggggtgtgctgaaggacagaggatggcggatatctaatgaccgactgggctcaggagatgacatttctgtatatgtcattcctttaatacatggaaacaagctgtcatgaaaaaggccctggggattgggaggagagaggggaagaaagctgggatgcctcttggcaggacggaactgggaagtaccccagcagagttccaagtgacgcagtctcttcc

SEQ ID NO: 39270 - DNA, 952 bp, Macaca Mulatta
  misc_feature (1)...(952): n = A,T,C or G
gcagccattatagcaagaggtaagaaaggaacaatctnnnnnnnnnnnnnnnnnnnnnnnnnnnnnnnnnnnnnnnnnnnnnnnnnnnnnnnnnnnnnnnnnnnnnnnnnnnnnnnnnnnnnnnnnnnnnnnnnnnnnnnnnnnnnnnnnnnnnnnnnnnnnnnnnnnnnnnnnnnnnnnnnnnnnnnnnnnnnnagatgaacagcagtgttggggacctgggtgttggcggctgcagcctctgggatgaccctgctcgtttcatcgtggtgcccgcggcctatgccttggcgctgggcctggggctgccagccaacgtggctgccctggcagtgttcatccgcagcggcgggcgcctgggccaggccctgcttctctacctgttcaacctggctctggctgatgagctcttcacgctcacgctgcagccgtggctcatctactacctgggcctggcccggaggccgcctgccgcgcggctggggccgcctactacgtgtccacctacgcggtggtcttcgccgcgctcatcagcgtgtgccgctgttgctccgtacgcggccccgggcccggggcgnnnnnnnnnnnnnnnnnnnnnnnnnnnnnnnnnnnnnnnnnnnnnnnnnnnnnnnnnnnntggcgggcctggcccctccctgccaggagcaccgctgggcaagctcggggctggcctccgtcacggtggccttcttcgcggccgccttcctgctggtgctcccggcctacgtgagcctggcgcgggcgctccaggcgccctcgggctcgggcccgggccctgctagcgccggcgcgcacccgcgcgcggccaagaccatggtcctgaggctcctgctggtcttcgccctcagtctggcgccctaccacctgctgctggagcccagggtggccgggtgggacagcgacggagaccggtgtcgcgccgcttccacgc

SEQ ID NO: 39271 - DNA, 946 bp, Macaca Mulatta
  misc_feature (1)...(946): n = A,T,C or G
acaaacagttaattacattcaatgaaaagattttttataactctcataatcagctaaatggtgctaataattctctagcaggtctttgaaatgctagagaaggcttttcatggagtgtctggtaacagtgatgatccatgctcatttgtaacccagaagcagcaattattctttttaattgctatgatttttcaaaagaattcaaacaattcttcttctatctagtatgtcttttaaaacatgtaaattatttaattgcagagttagaaatctggaaaataatttgatggtgggtttgccaacatcaaatgctgcttcnnnnnnnnnnnnnnnnnnncaggggcctaattacttttgaactagaaaaccaaaagttattagcactttaatagttnnnnnnnnnnnnnnnnnnnnnnacatttaaaataatctctttaaaaaataatactggagacttacccttgtgtctatctattttactactatttgctataaaagacatctcctcaggccaactcatatctttgttgcgaactggaaggacagataggaatgtgttaatttcttatctatctaatttacacccactcgattgcttctnnnnnnnnnnnnnnnnnnnnnnnnncatcttattcctaaatcagaagttttaaaatctagttaattttagtacatgcgttgcttaacaatggagttacatcctgagaaatgcatcactaggtgattatgtctttgtgtgaacaacacggagtgtacttacacaaacctaagctatgtacggtataggctgtttctccttggttacaaacttgtacagcatgttactgtattgaacactgtaggcaactgtaacataatggtaagtattcgtgtatctaacgtgttagaacatacaaaaggtacaagtaaaaatatcgtattataatcttatgggaccaccgctgta

SEQ ID NO: 39272 - DNA, 863 bp, Macaca Mulatta
  misc_feature (1)...(863): n = A,T,C or G
nnnnnnnnnnnnnnnnnnnnnnnnnnnnnnnnnnnnnnnnnnnnnnnnnnnnnnnnnnnnnnnnnnnnnnnnnnnnnnnnnnnnnnnnnnnnnnnnnnnnnnnnnnnnnnnnnnnnnnnnnnnnnnnnnnnnnnnnnnnnnnnnnnnnnnnnnnnnnnnnnnnnnnnnnnnnnnnnnnnnnnnnnnnnnnnnnnnnnnnnnnnnnnnnnnnnnnnnnnnnnnnnnnnnnnnnnnnnnnnnnnnnnnnnnnnntgctgtaatttcgtttggactggggagcatggatgcagtgtacagcaggcacagagtagcagtgtagaatctctggatcccttgagcttggggtagcagcattggcgtccccttcagtagcaatgagtgcctgtagattggcatggtggttcccagcttctagggcctggagagattccatctgtttgctaaaacaaatctcatgagcttgcagagggtgggaagggtccccatctggggattgtagcctctacaggactcttccaggtttgtggcagcactcaggtcccttaggctcgggtatatccgaaacattccaggaatagagcactgtgtcaggatagctgcagctgggggcagaaagccaacccaagccccataggtaaggtgcaacccaaggcagaagaaccggagccgctgtggccagcagccggaggccctgctcaatctgcaatattgctaggaatgctttagggttggctaaagcaataagcagatcagaaatctgtgtctgctgcaggaatgtgggcagctgctgcctccactgttcactcagctgaggcatactcatgaacaacataatctgagctgccaggtagggggtgttcacc

SEQ ID NO: 39273 - DNA, 692 bp, Macaca Mulatta
  misc_feature (1)...(692): n = A,T,C or G
cagttagaatccctagagaaagagaattcccaacttgatgaggaaaacttagagctgcgaaggaatgtagaatctntgaagtgtgcaagcatgaaaatggctcagctacagctagaaaacaaagaactggaaagtgaaaaagagcaacttaaaaaaggtttggagctcctgaaagcatctttcaagaaaacagaacgcttggaagttagctaccagggtttagatatagaaaatcaaagactgcaaaaagctttagagaacagcaataaaaaaatccagcaattagagagtgaactacaagacttagagatggaaaatcaaacattgcaaaaaaacctagaagaactaaaaatatctagcaaaagactagaacaactggaaaaagaaaataaatcattagagcaagagacttctcaactggaaaaggataagaaacaattggagaaggaaaataagagactccgacagcaagcagaaattaaagataccacattagaagaaaataatgtgaagattggaaatttggaaaaagaaaacaaaactctatccaaagaaattggtgtatataaagaatcttgtatccgtctaaaagaactagaaaaagaaaataaggagcttgtgaaaagagcaactattgatataaaaacngttggttacactacgtgaggtaaatatgtaagcctaaattaagg

SEQ ID NO: 39274 - DNA, 746 bp, Macaca Mulatta
tcccccagccacagtctcctgtgcacatccaaacccctggggtggccacaaaagattcccgcatcgcctagtgggagcctgaagtggccacggggtatcagctgtgccccctcccagggaactctcctgacctgatatccaccctgtccctagagcgcctcatgaagacgtccaggtctggcctgtgggcacggtttcggaaccagttctttcacacctgggagttggatgatgactctgtgctcaagcatcttagggcctctacaaagaaactaacaaggaagcaaggagacctgccacccccaggtgagctccagtgccgtgtccccccccatgtcaccctctggggcagtcaataataggggagtgcccgagacccgcaaccctactacctgggccttcctcttcaccttttcttcctcctcttcctcctggactctaagaaagtacaggaggcccgccggtcctcacggcaggcgctcagtgcgtgtgtactggatgtgatgtgcccgcaggagggcgatgtgggcaacaccttccaacaagccccctcccacattccacagtgtctctgtctccccatcacaaggccatcaagggcactaaagatgtcagaaccatttgtgggaaaccccgcccctccctgcaagcacccacagcctcagagagcagcagaggccccttacaagtgcacgctcctccaaggtttccaggacaacaagccttgagccagggagacaagggaa

SEQ ID NO: 39275 - DNA, 650 bp, Macaca Mulatta
aattcctctagcaccactggattagagtctccccaaccgagctggtctcagcaagtggtatccatcatgggggctcaaatcctggtcaaagggtcgccagagtgacggttggagaacatggaactagctggaggacagccaagtactcttaaagcaatccccatggtgagtaagaaggggagctcagaagcatcaggataacaatgggacaagtgtggggtctggttcattccaccttggaactttttcacgctgatgatgaggtggaagaagagtataacaaagtaacagaagaggttacagaacaggatttgccagctaaagctaaagtcacagaggagggagaggttcatccctacccttctgcaccccctcattatattttgaagaaaaagattctccagatctttcttttctggaggacactgggcaaaaagtagttgccccagtgactgttcaagcagtaccttgagcaaccgctcttagttctattcaagcaggaattcagcaagctagacgagagggtgatttagaggcttggcagttccctgatagaatacacccccccagatcaacagggaaatattacagctatatttgagcctttttcttttaaattactcaaagaatttgaacaagttataaatcag

SEQ ID NO: 39276 - DNA, 3055 bp, Macaca Mulatta
cagctgctctggtggtctctcccaggctctggtggcggacccatgggaggggctttttgtacaaagctgtaacattgtggggacaggggggccacaatgattcaactctatgggaaacctttacaaaaacctctctggcagtcccaactcccagagtccctcttctttcctcctgggtcacaggtcttaatgcaatttggttcagaatgcctctgcctcactcctgatcacaggtcacaccaagaccatggacaaggacagacccagatgagaactgaagcttcccaagcagagagagctcagacataagaagaatgcctcaggaacctctcaagtggaggactcagggatagtcctgatacccacaaaattgagacagttgggtggaaggttcattggaggtgaccggctctccagaggatttgggaagaagtcagggctacctatagatggagtcataggttctggccttgccgtcctctgcaggccacgccctttcccttttgatggaccctcagagagggagcatgaatggggtgtcctttgagaaagggacctaggaccctgtggatggactctcattctccatggtcctaaaaagcaaaagtcaaagtgttcttctgtgcaatatgcaatacacatacagcacaggaggagatttcttagctcactgtcctccaccctagccagggccctctccccactctatgccttgaatgtgattttcaccttgacccctgtcactgtgtgaacactgaagctttctttggacaaggcaccagactcacagttttaggtaagactttttcaggtacttttgcagatccgtcatagggaaaagtgggtccacgtttcccttttagagtggctgtatccttatgtgctaactatgactacaccttcggttcagggaccaagttaactgttgtaggtaaggctgggggtctctaggaggggtgcgatgagggaggactctgtcctgggaaatgtcaaagagaacggagatcccagctcctgaggccaggttaagggagacgtcatctcatgtcccaggagtgagttcagaggaggctccctgtaagggcaaatccacccaggcttcccagaggctctgagcagagtcagagctgagcccaggctgatggggcagaaaagggaaggggagggtgcctctcctcatagtgccctgagacaggggaggcccagagaaagcccggtgggtagttaatgggtcacaacacctctccatctatctgcttcactaacagaggtcctctgtagattcttcgtatattcttgtgctggattttatagggaaggccactctgtgtctctttttgtcacctgcccgggtcttagcaagctctagaagggaacgcagagtgctggaagcagagctggtatctctgtaagggaagagttccatgaactcccagcctttgcctgaatcccagctgtgctcagcagaggctgcgcggttttgaagtggccctgggaggctgtgttctggaaacaccgtgtattttggagagggaagtcggctcactgttgtaggtgagtaagtcacgactggacagctgggaacttgcaaaaaggggctggaatccagacagagccttgtctccagtgcttaggttaaagcgtatttttatcaggaagacctacgaaggagatgaggaggggatagcctccctctccactattttgtagactgcctgtgccaagttatgttcctctactgagagatgggtagactcagcttggaaggggtcactttgagcatctcctgtctccttgaagggtgccagtcatggccatgacaggtaaaggagcctctgaccttaccaccacggtcctgccatttctctccctcacacagaaaggagaaagtcacagaagagggaacttgggggatcacacggggcctcttgtctgctgaccactgcgtttcggattgtaccattgtccacccctctacctagcagggttaaaaatctactagggaacaggagaggacctggcaggtggacttggggaggcaggagtggaaggcagcaggtggcggttttcctcccagtctttaatgttgtgcaactaatgaaaaactgttttttggcagtggaacccagctctctgtcttgggtatgtaaaaggcttcttttgggatagtgtgttataaggtcggagttccaggaggaccccttgcgggagggtagacactgagaacacagccaagaaaagctcagaaaatgtgggtcagtggagtgtgtggggggccccaggagttctgtgtggaagcagcttctggaaggaagggcccgcaccagctcctctggggtttgccacactcatgatgcactgtgtagcaatcagccccagtattttggagatggcactcgactctccgtcctaggtaagttgcagaaccagggtggtaaggccattgtcccttggaggcgcagttctctgcttctccttccagcactggtgaggaggattgagtgaaatctcttaccccttgggagttccacagagctgtgcctgccttcccttttggtgtgtcttggctgactcctctgtttctcttctctaagtcttcagtccataatctgcctcctcactaccttctcggctcgtcctccctcttacgtgcatggctctgcctctcctaagcctcttcctcttgcacctcatgctgcacagtatgcttaggcctttttcctaacagaatccctttagtccagagccgtgaatccaggcagagaaaggcagccatcctgctgtcagggagctaagacttaccctctggctggagatctccaggtgggttttatctaagcctctgcagctgtgctcctataattcgcccctctactttgggaacgggaccaggctcactgtgacgggtatgggggctccactcttgactcgggggtgcctgggtttgaccgcaattatctgttgctgggaagggaattggatgtaagaatggaggtcagggtcaccccttcctacctggagcgctgtgccctctcctcccctccctggagctctt

SEQ ID NO: 39277 - DNA, 757 bp, Macaca Mulatta
  misc_feature (1)...(757): n = A,T,C or G
gggagactgtgtttctttagttgagaggaaacttcattgagtagctgtgatatgttcgatactaaggaaaaactaaatagatcacctttgacatgctctgtagagtgggaataagagagggctttttattttttcattcatatgaatattgatgaagatgatactaaatgctaaatgaaatatatctgctccaaaagtcatttattttgacttggagatgcaacaaaaacacaataaatggaatgaagtgatactcttcatcaaacagaagtgactgttatatcaaccattgtgttaaatcctagacagaaaacaaaaaagatcatgactaaaagacacttgcttattaactggcttggaaagtagaatataggagaaaggttannnnnnnnnnnnnnnnnnnnngtattcattcattctacaaatatatttgggtgccagtaggtacttggtataaggtttttggccccagagacatgggaaaaaaaatgcatgccttcgcagagaatgcctaatactttccttttggcttgttttcttgttaggggcatggcttantccctaaataacattgtgtggtttacttcctactccatatctcttctaccactctggccactacaataaacaagtagcctgggtttttgtagtgaagcttggctctcctttaaggccggagaggaactcctccctttataaataaaaaactttcattttttctctaagccccattcccccttcattggaaaaaaatggc

SEQ ID NO: 39278 - DNA, 663 bp, Macaca Mulatta
cccaaaggatgaaaatgaattctggaactgtttctggaatacatttccttttaccaaaatgggaattctaagagtggggcaggaaacgtaaagcaggagagaaagaagcgggctcgcagcagcctttcccctcctcggattcgggaacgaaggggcacgattgtcccactctggaagtggctcatatcgcacagttcatccaaagctccggaacacgttcaacatcccgtctgccccgcggcacctctgacatcgatctcaacccaaacacccacccctctcatgagtcccttcgttcacgggcagcaaatgaaggacatcccacttccctgtccctgctgcatgtagtgagagcaggggtttgagtttggaggactgtggagaaaagccccaggcaccagtgtcaattcaagggctgagactttgaggtttagcaattcacatgtttcagcttcccagtgcacaaaggtcaaagattgcagttatagaaggaaaaggatcagaaaaaaaaacatagaaaataggatctggttctgtaagcaggaaagagttgcaggaaacaattcagaggaaaagaggcaaaaagtaaactggcactacaagctggggtgtcttattcaccaagaagaggcaagaagcagatggacagcacattttgtgggg

SEQ ID NO: 39279 - DNA, 214 bp, Macaca Mulatta
cagaaggtctgcggccgctacctgcagcagcaactggatgctgccaactgcctgggcatctgtgagtttggggagcagcaagggctgctgggcgtggctgccaaggcctgggccttcctgcgagagaattttgaggctgtggcacgtgaggacgagttcctgcagcttcctcgagaccggctggtcacttgtctggccagtgacctgctgcagg

SEQ ID NO: 39280 - DNA, 1415 bp, Macaca Mulatta
  misc_feature (1)...(1415): n = A,T,C or G
gaaggctccagtcacaaaggatgcccggctccacactcaagtctaacgctttcctgagctagtgtgtttggtcctcagaacacccctgagacaccagtgagaatgtcctcatttcacaaatgaggacacgggacccagagagtctttaaggaaaaaagaaagagaaatctagttctaggaagtcctggagctgaggctgggagccaggactctgannnnnnnnnnnnnnnnnnnnnnnnnnnnnnnnnggctccagaactccctgctggggcacgtctgtcctgccgcacccagcacaggtctaggattcacgggtgttagggcaccgtgcttaaggcagtgacaggactgtcagcagcctgagtgtggccgctaagtcaactcaggactccataccccgaggcacaggggagccctcagcattgcctgtgcaagggagggccaagggaaggagcagggaaggacggaaggaacgcaccgctgagtgtgctctgcatggcaggcaggcttcagagcctgctctttgcaagannnnnnnnnnnnnnnnnnnnnnnnnnnnnnnnnnnnnnnnnnnnnnnnnnnnnnnnnnnnnnnnnnnnnnnnnnnnnnnnnnnnnnnnnnnnnnnnnnnnnnnnnnnnnnnnnnnnnnnnnnnnnnnnnnnnnnnnnnnnnnnnnnnnnnnnnnnnnnnnnnnnnnnnnnnnnnnnnnnnnnnnnnnnnnnnnnnnnnnnnnnnnnnnnnnnnnnnnnnnnnnnnnnnnnnnnnnnnnnnnnnnnnnnnnnnnnnnnnnnnnnnnnnnnnnnnnnnnnnnnnnnnnnnnnnnnnnnnnnnnnnnnnnnnnnnnnnnnnnnnnnnnnnnnnnnnnnnnnnnnnnnnnnnnnnnnnnnnnnnnnnnnnnnnnnnnnnnnnnnnnnnnnnnnnnnnnnnnnnnnnnnnnnnnnnnnnnnnnnnnnnnnnnnnnnnnnnnnnnnnnnnnnnnnnnnnnnnnnnnnnnnnnnnnnnnnnnnnnnnnnnnnnnnnnnnnnnnnnnnnnnnnnnnnnccaggataacttcagagaggcatctcacataatgtcagtcgctttaccatctatataagtactaatcattatcatgactgtttaagaggcaggtcttgctctgttgcccaggctggggtgcagtatcatgatcactgctcactgcagcctcgaactcctgggctcaagcaatcctcctgcctcattctcccaagtagctgagaccacagacatgtgccaccatgaccagctaagttttatttatttagttatttattttaagacagagtctcgctctgttggacaggctggagtgcagtggcacgatctcagctcactgcaacctccacctcctgggttcaagcgattctcctgcctcagcctcccaagtagct

SEQ ID NO: 39281 - DNA, 211 bp, Macaca Mulatta
  misc_feature (1)...(211): n = A,T,C or G
gcatctggatggcaatactgagccaggacttacattaggaggctatttctgtccacagtgtcgggcaaagtactgtgagctacctgttgaatgtaaaatctgtggtnggtcttactttggtgtctgctccccacttggcacggtcttaccatcatttgtttcctttggatgcttttcaagaaattcccctagaagaatataatggagaaag

SEQ ID NO: 39282 - DNA, 757 bp, Macaca Mulatta
  misc_feature (1)...(757): n = A,T,C or G
tgggcttgaggaaattgaanctgagcaaaggttggagcaagacagtctgttgtgaggtgggaaggtttaggcaggtatattaaacgtgttcttgtattatctgataaatttcctaaaagatgtaggagaggcaccatgaagggcagaggaagaaaacagtatggtttactttacaggcaagaagcatttcggacagaggattggcaaatgcaaaggcccagtcataaaagcattcagggaaatacgaaacattttgttcttggagcttagaaatcagaggtggaaatggtgggcagagttgagatttgaggagcaggttgggaccaggtaggaaagggaggtatatgtcatgcctttagactctattttaaagacagtctagagttaataggaaccttaagttgggcagaatcaccaggattatttgtgggggggttttgtttgttttcggtggtggnnnnnnnnnnnnnnnnnnnnnnnnnnnnnnnnnttcgctcttgttgcccagagtggagtgcaatggcatnnnnnnnnnnnnnnnnnnnnnnnnnnnnnnnnnnnnnnaaaattgtcctgtnnnnnnnnnnnnnnnnnnnnnnnnnnnnnacatgtgccaccacgcccagttannnnnnnnnnnnnnnnnnnnnnnnnnnnnnnnnnnnnnnnnnnnnnnnnnnnnnnnnnnnnnnnnnnnnnnnnnntgcccgccctnnnnnnnnnnnnnnnnnnnnnnnnnnatgtgagccaccgcacc

SEQ ID NO: 39283 - DNA, 741 bp, Macaca Mulatta
  misc_feature (1)...(741): n = A,T,C or G
gggtaaatagcaaggtcaggatttgaatccaggtctcactctagagctctttgtattgcacagactttggtatggaagttagaaagctcccaactcaatttctggtgaattatagtaattttctcagctcttgctttctctgtctgtaaaatgagacgattgagctgaagttctaaagtcattactggttgtaacattctgtgattcctggatgctttttcagattcaagcagagaatatatagagcttctactcttctctttgtgagcagccagttgggtttgtatgttagcctgatgatgttatgacaccatcaccctgtgcaggtgtagaaaaggcatagaaggagtatgggttaaaagaaggtacactgtgtcaactgttgatttctaaaagaaaacctgaagtttttgaactgccaattcacaaaagaaaacttgaaagtacctgagcatcaaagcagcatggcaagcttgggctggagagtgtgtgggtggaacctggtattaattattgtctttagacaccaacatccttcaccttcaaagggctcttgtgcctgaatgagtgtgtttctgtgtgtgcatctgtctccaagcatcgggggattgtgctagatggtacagtggatgacttcantttcagttcctttcagggtcatataacatttccaattaaatgggtagaccgaatggttattgggaagggacaccatgaattatttgaccatagggagagcct

SEQ ID NO: 39284 - DNA, 800 bp, Macaca Mulatta
  misc_feature (1)...(800): n = A,T,C or G
ggtacaaatgtttatctcacacaaaggcctgggggacatccttgtttaactgataagtctctaaatggtacaatttcgtcggtcttctggatagatttgcataatgaatacatgttcttcttactaatacttttcatgttattatgaagaaagtaccagactagcaaacatctgaattctagcgcaaattctgccactaatctcaactcacctcaccaacctggcctttgtttcttctttcataaaatgaaaaccgatgctaaagcagactcttcacacatccagcattccaggatactaagattctgtggggtttcttctgacctgcacttgaaactgttccttttgcttggtagatggcttggccactgctatgtcctcaaccaaaaatttggcagttggggaaaagcaggatcctccctgaatctagaaaagtcaaaggaattttggttcccttatgttttcagtgtctgtacctgacctgccttttcccaactaagatttcctcatgataaaaagtgtgaaaaagtatgatgtagctcttaaacattttcctattaaagtggctgtgttccctgctaaattaatgtttacgggatttgactgttttgtgagcaatttaaaacataattttgaggttactatcaattttcctcataaaaagtaccatggttatggactaaaaaaaaataccggattatgaggctacgggggcatagacccttnnnnnnnnnnnnnnnnnnnnnnnnnnnnnnnnnnnnnnnnnnnnnnnnnnnnnnnnnnnnnnnnnnnnnnnnnnn

SEQ ID NO: 39285 - DNA, 881 bp, Macaca Mulatta
  misc_feature (1)...(881): n = A,T,C or G
gggggtcctgcagcgggtccttccggggggtgacattcagccggccgttctgggagacggacttcgcatcctagaaccatggcccaatttgtccgtaaccttgtggagaagaccccggctctggtgaacgctgctgtgacttactcgaagcctcgattggccacattttggtactacgccaaggttgagctggttcctcccacccctgctgagatccctagagctattcagagcctgaaaaaaatagtcaatagtgctcagactggtagcttcaaacagctcacagttaaggaagctgtgctgaatggtctggtggccactgaggtgttgatgtggttttatgttggagagatcataggcaagcgtggcatcattggctatgatgtttgaagaccaatctttaacatctggttatatttgatttattatttgagtgttgttggaccatgtgtgatcagactgctatctgaataaaataagatttgtcaaannnnnnnnnnnnnnnnnnnnnnnnnnncttgtcggnnnnnnnnnnnnnnnnnnnnnnnnnnnnnnnnnnnnnnnnnnnnnnnnnnnnnnaanacccccnnnnnnnnnnnnnnnnnnnnnnaannncccttgggggggcgcctttggccccnnnnnnnnnnnnnnnnnnnnnnnnnnnnggggcgccgcgggcccccnnnnnnnnnnnnnnnnnnnnnaaaaaactgnnnnnnnnnnnnnnnnnnnggcataaaaaaagggggtgtgggttccccnnnnnnnnnnnnnnnnnnnnnnnnnnnaaaacaaaagttnnnnnnnnnnnnnnnnnnntggggggnnnnnnnnnnnnnnnnnnnnnnnnnnnnnnnnnnnnnnnnnnnnnnnnnnnc

SEQ ID NO: 39286 - DNA, 3760 bp, Macaca Mulatta
  misc_feature (1)...(3760): n = A,T,C or G
agtatggcgactatgaccccagtgttcacaagcggggatttttggcccaagaggaannnnnnnnnnnnnnnnnnnnnnnnnnnnnnnnnnnnnnnnnnnnnnnnnnnnnnnnnnnnnnnnnnnnnnnnnnnnnnnnnnnnnnnnnnnnnnagggatgaagctgaaatggaatatctgaagatagctcaggacctggagatgtatggtgtgaactactttgcnnnnnnnnnnnnnnnnnnnnnnnnnnnnnnnnnnnnnnnnnnnnnnnnnnnnnnnnnnnnnnnnnnnnnnnnnnnnnnnnnnnnnnnnnnnnnnnnnnnnnnnnnnnnnnnnnnnnnnnnnnnnnnnnnnnnnnnnnnnnnnnnnnnnnnnnnnnnnnnnnnnnnnnnnnnnnnnnnnnnnnnnnnnnnnnnnnnnnnnnnnnnnnnnnnnnnnnnnnnnnnnnnnnnnnnnnnnnnnnnnnnnnnnnnnnnnnnnnnnnnnnnnnnnnnnnnnnnnnnnnnnnnnnnnnnnnnnnnnnnnnnnnnnnnnnnnnnnnnnnnnnnnnnnnnnnnnnnnnnnnnnnnnnnnnnnnnnnnnnnnnnnnnnnnnnnnnnnnnnnnnnnnnnnnnnnnnnnnnnnnnnnnnnnnnnnnnnnnnnnnnnnnnnnnnnnnnnnnnnnnnnnnnnnnnnnnnnnnnnnnnnnnnnnnnnnnnnnnnnnnnnnnnnnnnnnnnnnnnnnnnnnnnnnnnnnnnnnnnnnnnnnnnnnnnnnnnnnnnnnnnnnnnnnnnnnnnnnnnnnnnnnnnnnnnnnnnnnnnnnnnnnnnnnnnnnnnnnnnnnnnnnnnnnnnnnnnnnnnnnnnnnnnnnnnnnnnnnnnnnnnnnnnnnnnnnnnnnnnnnnnnnnnnnnnnnnnnnnnnnnnnnnnnnnnnnnnnnnnnnnnnnnnnnnnnnnnnnnnnnnnnnnnnnnnnnnnnnnnnnnnnnnnnnnnnnnnnnnnnnnnnnnnnnnnnnnnnnnnnnnnnnnnnnnnnnnnnnnnnnnnnnnnnnnnnnnnnnnnnnnnnnnnnnnnnnnnnnnnnnnnnnnnnnnnnnnnnnnnnnnnnnnnnnnnnnnnnnnnnnnnnnnnnnnnnnnnnnnnnnnnnnnnnnnnnnnnnnnnnnnnnnnnnnnnnnnnnnnnnnnnnnnnnnnnnnnnnnnnnnnnnnnnnnnnnnnnnnnnnnnnnnnnnnnnnnnnnnnnnnnnnnnnnnnnnnnnnnnnnnnnnnnnnnnnnnnnnnnnnnnnnnnnnnnnnnnnnnnnnnnnnnnnnnnnnnnnnnnnnnnnnnnnnnnnnnnnnnnnnnnnnnnnnnnnnnnnnnnnnnnnnnnnnnnnnnnnnnnnnnnnnnnnnnnnnnnnnnnnnnnnnnnnnnnnnnnnnnnnnnnnnnnnnnnnnnnnnnnnnnnnnnnnnnnnnnnnnnnnnnnnnnnnnnnnnnnnnnnnnnnnnnnnnnnnnnnnnnnnnnnnnnnnnnnnnnnnnnnnnnnnnnnnnnnnnnnnnnnnnnnnnnnnnnnnnnnnnnnnnnnnnnnnnnnnnnnnnnnnnnnnnnnnnnnnnnnnnnnnnnnnnnnnnnnnnnnnnnnnnnnnnnnnnnnnnnnnnnnnnnnnnnnnnnnnnnnnnnnnnnnnnnnnnnnnnnnnnnnnnnnnnnnnnnnnnnnnnnnnnnnnnnnnnnnnnnnnnnnnnnnnnnnnnnnnnnnnnnnnnnnnnnnnnnnnnnnnnnnnnnnnnnnnnnnnnnnnnnnnnnnnnnnnnnnnnnnnnnnnnnnnnnnnnnnnnnnnnnnnnnnnnnnnnnnnnnnnnnnnnnnnnnnnnnnnnnnnnnnnnnnnnnnnnnnnnnnnnnnnnnnnnnnnnnnnnnnnnnnnnnnnnnnnnnnnnnnnnnnnnnnnnnnnnnnnnnnnnnnnnnnnnnnnnnnnnnnnnnnnnnnnnnnnnnnnnnnnnnnnnnnnnnnnnnnnnnnnnnnnnnnnnnnnnnnnnnnnnnnnnnnnnnnnnnnnnnnnnnnnnnnnnnnnnnnnnnnnnnnnnnnnnnnnnnnnnnnnnnnnnnnnnnnnnnnnnnnnnnnnnnnnnnnnnnnnnnnnnnnnnnnnnnnnnnnnnnnnnnnnnnnnnnnnnnnnnnnnnnnnnnnnnnnnnnnnnnnnnnnnnnnnnnnnnnnnnnnnnnnnnnnnnnnnnnnnnnnnnnnnnnnnnnnnnnnnnnnnnnnnnnnnnnnnnnnnnnnnnnnnnnnnnnnnnnnnnnnnnnnnnnnnnnnnnnnnnnnnnnnnnnnnnnnnnnnnnnnnnnnnnnnnnnnnnnnnnnnnnnnnnnnnnnnnnnnnnnnnnnnnnnnnnnnnnnnnnnnnnnnnnnnnnnnnnnnnnnnnnnnnnnnnnnnnnnnnnnnnnnnnnnnnnnnnnnnnnnnnnnnnnnnnnnnnnnnnnnnnnnnnnnnnnnnnnnnnnnnnnnnnnnnnnnnnnnnnnnnnnnnnnnnnnnnnnnnnnnnnnnnnnnnnnnnnnnnnnnnnnnnnnnnnnnnnnnnnnnnnnnnnnnnnnnnnnnnnnnnnnnnnnnnnnnnnnnnnnnnnnnnnnnnnnnnnnnnnnnnnnnnnnnnnnnnnnnnnnnnnnnnnnnnnnnnnnnnnnnnnnnnnnnnnnnnnnnnnnnnnnnnnnnnnnnnnnnnnnnnnnnnnnnnnnnnnnnnnnnnnnnnnnnnnnnnnnnnnngcaatccttctgcctcagcccctcaagtagctgggactacannnnnnnnnnnnnnnnnnnnnnnnnnnnnnnnnnnnnnnnnnnnnnnnnnnnnnnnnnnnnnnnnnnnnnnnnnnnnnnnnnnnnnnnnnnnnnnnnnnnnnnnnnnnnnnnnnnnnnnnnnnnnnnnnnnnnnnnnnnnnnnnnnnnnnnnnnnnnnnnnnnnnnnnnnnnnnnnnnnnnnnnnnnnnnnnnnnnnnnnnnnnnnnnnnnnnnnnnnnnnnnnnnnnnnnnnnnnnnnnnnnnnnnnnnnnnnnnnnnnnnnnnnttggagagcagaggtggtctctggcaattccgtctggttttgagaaactgagcggctcacagagatcctgtcttcttcncactatcaggctgacctaacggggtcgggctgctcagcacctgcttgggccaccttgccccaaggaaaccagccctgggtgccgcacagccacttagggtctgcagggtgggactgcagacctagagcgcaagtgtggatgctgtggccctgtggcttctcctagtctggcccagctaggaacagaagcttcaggcgtttgtaaagtgaggtctggctctgtctcctnnnnnnnnnnnnnnnnnnnnnnnnnnnnnnnnnnnnnnnnnnnnnnnnnnnnnnnnnnnnnnnnnnnnnnnnnnnnnnnnnnnnnnnnnnnnnnnnnnnnnnnnnnnnnnnnnnnnnnnnnnnnnnnnnnnnnnnnnnnnnnnnnnnnnnnnnnnnnnnnnnnnnnnnnnnnnnnnnnnnnnnnnntttgaggtggtgtctcgctctatcgcccaggctggagtgcagtggcgcagatctcagctcactgcaacctccacctcccaggctcaagtgattctcctgcctcagcctcccaagtagctgggattacaggcgtgtgccaccacacctgtctaatttttgtatttttagtagagacgggttttcgccatgttagccagactggtctggaattcctgacctcaggtgatccgcccgccccggcttcccaaa

SEQ ID NO: 39287 - DNA, 806 bp, Macaca Mulatta
  misc_feature (1)...(806): n = A,T,C or G
nnnnnnnnnnnnnnnnnnnnnnnnnnnnnnnnnnnnnnnnnnnnnnnnnnnnnnnnnnnnnnnnnnnnnnnnnnnnnnnnnnnnnnnnnnnnnnnnnnnnnnnnnnnnnnnnnnnnnnnnnnnnnnnnnnnnnnnnnnnnnnnnnnnnnnnnnnnnnnnnnnnnnnnnnnnnnnnnnnnnnnnnnnnnnnnnnnnnnnnnnnnnnnnnnnnnnnnnnnnnnnnnnnnnnnnnnnnnnnnnnnnnnnnnnnnnnnnnnnnnnnnnnnnnnnnnnnnnnnnnnnnnnnnnnnnnnnnnnnnnnnnnnnnnnnnnnnnnnnnnnnnnnnnnnnnnnnnnnnnnnnnnnnnnnnnnnnnnnnnnnnnnnnnnnnnnnnnnnnnnnnnnnnnnnnnnnnnnnnnnnnnnnnnnnnnnnnnnnnnnnnnnnnnnnnnnnnnnnnnnnnnnnnnnnnnnnnnnnnnnnnnnnnnnnnnnnnnnnnnnnnnnnnnnnnnnnnnnnnnnnnnnnnnnnnnnnnnnnnnnnnnnnnnnnnnnnnnnnnnnnnnnnnnnnnnnnnnnnnnnnnnnnnnnnnnnnnnnnnnnnnnnnnnnnnnnnnnnnnnnnnnnnnnnaacccncnnnnnnnnnnnnnnnnnnnnnnnnctgtcgggccccctcggcccctccagaagctttcttagaacactttctttttgccccgggcccagtagtaggactgtcaactgttctaggatctgcagaatgtgatcccaaaaccggacagttaatcatgttgagttgttangaccggcatatgcccgcctaagttt

SEQ ID NO: 39288 - DNA, 683 bp, Macaca Mulatta
  misc_feature (1)...(683): n = A,T,C or G
ctcatgcnacacgcagtaacanggaaatggctcagaacataaaaagattgcaatttcccagatgagcacaaaatgctaaatttttgaccattcaacattggtctgaaaccccatgaactagatgacaaatgcaatgtttgggaactcttaattatccatgctaacgaaggtcatggcagctaggataacccccaagagcaaacacctcgtctccattgcgccaaattttggcattcactatgtaacccacctgcttttagcaataaatctcatttcctacttagtgaaatcaaaattttaaaatggaattggatgttgaacatcattcaatgcagtctttattttcccagtgaggagccttcagatctcagcaacagagtgagaaatagaacctgggttttctgatctccagtttaaaaagatttctactctgttttagattggcatcatgaggtcaaggaagaaattgtgtattttgaggataaaatgtccaggcaaaagagaattcaaatgaccagtgaggagaaaatggaagagaaagttgcatagaatgggttttcagtgaaattagatgtgtaaaagcattcacagtctacagtgcaaatagctatagaccaagcatgttgcaatgctaagtactgggtgtgttctctgtaaaagcaacaataatttccattctctaa

SEQ ID NO: 39289 - DNA, 734 bp, Macaca Mulatta
  misc_feature (1)...(734): n = A,T,C or G
ggatgttggtactgagtatgaaacttcatactcctagaatgccaatttcaaatttagatgtcagccatgatgataaggttttataatttgtgctttaaagcaactttaatcttacaagtgggtctcaatatataaagaataaaattgttcaatgcttttaaggaatgttgtacacatattgtggtcacaatatcctaaaaagaaaatgttgataaaatggaaagtaaacacaatagagtgattaggaacgcggactctggaatcaaaccttagtttgagtctaggtctttcttgccacttattagatgtttaatctttcttaacctcatcctccctcctccatatatactataggagtaacaatataatacctgtttcatagagacattgtgatgattaattgagatgatgcatgtaaaggctttaggctggtacattgtgagtgctcaataattactagctacaattaataatagaaataaatattaagggtaccacccttaacatctcgaatttataaccttcctgaaaatgcagagggattaatttctgttgttgttttgatgttgatattgtagaacatacccaacttttgtcctggagacacatgggagatgtcagtaatgtgtcctgaaaaatgtattactggggaagtgacattttttaatggaattttttaaagggatttttaacacccttccttgattaattgannnnnnnnnnnnnnnnnnnnn

SEQ ID NO: 39290 - DNA, 535 bp, Macaca Mulatta
  misc_feature (1)...(535): n = A,T,C or G
atttgtgaaagaagcaaaaataaatctgtggaactgaaggagcggatcagagagtatttaaagggnnnnnnnnnnnnnnnnnnnnnnnnnnnnnnnnnnnnnnnnnnnnnnnnnnnnnnnnnnnnnnnnnnnnnnnnnnnnnnnnnnnnnnnnnnnnnnnnnnnnnnnnnnnnnnnnnnnnnnnnnnnnnnnnnnnnnnnnnnnnnnnnnnnnnnnnnnnnnnnnnnnnnnnnnnnnnnnnnnnnnnnnnnnnnnnnnnnnnnnnnnnnnnnnnnnnnnnnnnnnnnnnnnnnnnnnnnnnnnnnnnnnnnnnnnnnnnnnnnnnnnnnnnnnnnnnnnnnnnnngagctagctcatgagctggggtatccctgggttgaatactgggaatttctgggctgttttgttgatctgtcttcccaggaaggcctgcaaagactagaagaatatctcacacagcaggaaataggcaaaaaggctcaacaagaaacaggagaaagggaagcctcctgccgagataaagccaccatgtctg

SEQ ID NO: 39291 - DNA, 853 bp, Macaca Mulatta
  misc_feature (1)...(853): n = A,T,C or G
ggatgtatttatgnnnnnnnnnnnnnnnnnnnnnnnnnnnnagagacaaggtcannnnnnnnnnnnnnnnnnnnnnnnnnnntgaacatagcttactgcagcctggaagtcctgccctcaggcagttctcccacctctgcctccggagtagctgggacagcannnnnnnnnnnnnnnnnnnnnnnnnnnnnnnnnnnnngagacggggtctcgctgtgtttcccangctggccttgaacttctggcttcnagcaatcnnnnnnnnnnnnnnnnnnnnnnnnnnnaaattataggcatgacactgtacagggcctgagtttcttaaggtgcacttttatgtgtgtgtactctggaaataccttgattacctgaagggtggccaggttctttacatctaaaacactagcccctgtacacttgaaacacacttatatgtatgagttttgtgtggttctgtggctatcacccttgtcgtctgagactcccgggtggtaaaaatcgtatggactttttctgggctcattttccgtctcaggtaatttcaaaatatttcttggggaatcgattgggaaaatatgtttaaaatggctctcgcccggtaaatccccggaacttttggaaagccgaggcacaaaaggatttttcggagggcccaccgattaggaaacatatccgggggcaaggcaaactggaaaaaccattcnnnnnnnnnnnnnnnnnnnnnnnnnnnnnggggaaagatgggcgattataacccaggtttaccccancttcgccagggagagccttaaaacctgggaggtatattctatctaatatcggaattgggaaagaacccgcccgagagacgtca

SEQ ID NO: 39292 - DNA, 218 bp, Macaca Mulatta
taggacaccagcttggaagtgatgtacaattattagcatggataaagcaccactgccgtgaatgggtgacaagtcctaagcctttggataaacctgcagctactgttttcaaaaaggaatttcctatggtttctgctggtacagaaaagtacagcttagccccttcctctagccttcagtcaatttttaagtactttaaaaaagctttaaaagccaga

SEQ ID NO: 39293 - DNA, 518 bp, Macaca Mulatta
gggtgggaacacttttttcaggtcctctagcactgtgagcctggtgcctgcgccgaagtactgagtggtgttagctccatgtccaggctgctggcacagaaatatacagcagagtcaccaagctccagggacttgatgtgaagatttaaatgagctttgtctggagacttaggtgagaagcgatttggaactgtttcatttaaaatgggctccttattattgtagataaacattatcttcagcaatttcttagagtcctgcttataccaatacatagtattatggcccagattttgttcacatttaagggactcgttttttcccgtctgcctgaccagatattttggagtctgggaaacagctgtgtccaaggaacctgcttggaggaggcagagggccacacagcagaggagcctgcagcccatggcagagtcaggcagaccaggcaaggcccagggcaggattctggtgtgcagtggtgagaagtctagtctgtgctttccactgccgctgagagc

SEQ ID NO: 39294 - DNA, 777 bp, Macaca Mulatta
ggatcccactagcatatcacctatactttagaagatggtttattcatagtgaacttccctatgctatttagtaaaatgagaatcatttttgtcttatacccttgtgatactaaataaatcattatgtagaagaccgtatttactgaattttgtttatactgatagtcgccactgtgtactaaacactgtacttaagcactttaatacagcctcatttgagatactgtctcttatctctgttttacagagacagaaacagaggcttagggaggataaatgatttaccccagaaacatacatagtaaaatggtagagccagaacttgaggtcagttctgttgactacaaaggctgttttaaaattcagccttacctcagtaaatattgcaaaatctgttctaatgtatatatattttaaatttatatttaaactaggtctggcatctagagtattagctttgctcagatttgattatttttctttttatagtttgattttttttaatgtaacagtagtttgaatggaaaagaagatttcctaaatgtcataactcaagatcctggttaactagaaaaattctacaaagaaacacatcaactgatgcatggtttaacttcatctagcatttctatgagcattattatctgtaatttctttggggtttttttctgaatcatagttttttcacctatctttgggaatttaaaagtaatctggcacattaagttaattttgatacctttttctttagaatcaggcaacatttttattctgtaa

SEQ ID NO: 39295 - DNA, 822 bp, Macaca Mulatta
  misc_feature (1)...(822): n = A,T,C or G
gnnnnnnnnnnnnnnnnnnnnnnnnnnnnnnnnnnngcgtaaacctgggagttgnnnnnnnnnnnnnnnnnnnnnncgnnnnnnnnnnnnnnnnnnnnnnnnnnnnnnnnnnnnnnnnnnnnnnnnnnnnnnnnnnnnnnnnnnnnttttctgatggtttggattccaagctggtttcccattcttctgaactcaataacaagagttgggccttaatcatttgattgtggaggtatatatctgcaagctaatggctgatcttagccctttagtcacaaagaaacctgcatctatctgctcagtttgttgttagtctccatgagaagttgacctgaaattgagttgctgctttggctgtggaccctaagtggagttttaactaggccaagccttcaggtgagttgagggagggtttgggggctcctactttgactgttctccaaaataactttcagcccctgaccagaggcttacagtgaagaagtaggcctacaaagagcacaaaaatgaaacatctgtctgtgggacaccattagacaagaccccaacatggtctgataggtccaccagtgtttgccacctctctattaaagaaaagacccttggcggtgccttcaaaatcaaggtagaaaggccactgttttgcccctttttcagattaatgggcgttttcatttttcctatgggacaaagcatttgtgggaaggaacgtccgctggcacggctaggggctccgggcccccctaacccttttcagtggaaaactgtttacgtttcaatacacagagttgttctccacccgatgtgcgcgcacttttttaa

SEQ ID NO: 39296 - DNA, 2114 bp, Macaca Mulatta
  misc_feature (1)...(2114): n = A,T,C or G
ctggtgtttcgcagaacaccaccttcctaacatcaggctctattctcagacagctcatccctacagggaaacaagtgaatgggattccgacctacacgctggcccccgtgtctgtcactctgccggttccccccggaggccttgcgactgtcgctccaccccagatgcccatccagctcctaccgtcaggtgcagctgcaccgatggccggctccatgcccggcatgccgtctcctccagtgctggtgaatgctgctcagagcgtgtttgttcaggccgccgcccctgcagcagacacaagccaggtgctcagacaggccaagcagtggaagacctgccccgtctgcaatgagctctttccgtccaacgtctaccaggtgcacatggaggtagcacataagcacagcgagtccaagtctggcgagaaacttgagcctganaaactggcagcgtgcgcaccatttctaaagtggatgagggagaaaacggtgcgatgtctgtcttgtaaatgcttggtctctgaggaggagcttatacaccacttgctgatgcatggtttggggtgcttgttctgtccatgcacctnnnnnnnnnnnnnnnnnnnnnnnnnnnnnnnnnnnnnnnnnnnnnnnnnnnnnnnnnnnnnnnnnnnnnnnnnnnnnnnnnnnnnnnnnnnnnnnnnnnnnnnnnnnnnnnnnnnnnnnnnnnnnnnnnnnnnnnnnnnnnnnnnnnnnnnnnnnnnnnnnnnnnnnnnnnnnnnnnnnnnnnnnnnnnnnnnnnnnnnnnnnnnnnnnnnnnnnnnnnnnnnnnnnnnnnnnnnnnnnnnnnnnnnnnnnnnnnnnnnnnnnnnnnnnnnnnnnnnnnnnnnnnnnnnnnnnnnnnnnnnnnnnnnnnnnnnnnnnnnnnnnnnnnnnnnnnnnnnnnnnnnnnnnnnnnnnnnnnnnnnnnnnnnnnnnnnnnnnnnnnnnnnnnnnnnnnnnnnnnnnnnnnnnnnnnnnnnnnnnnnnnnnnnnnnnnnnnnnnnnnnnnnnnnnnnnnnnnnnnnnnnnnnnnnnnnnnnnnnnnnnnnnnnnnnnnnnnnnnnnnnnnnnnnnnnnnnnnnnnnnnnnnnnnnnnnnnnnnnnnnnnnnnnnnnnnnnnnnnnnnnnnnnnnnnnnnnnnnnnnnnnnnnnnnnnnnnnnnnnnnnnnnnnnnnnnnnnnnnnnnnnnnnnnnnnnnnnnnnnnnnnnnnnnnnnnnnnnnnnnnnnnnnnnnnnnnnnnnnnnnnnnnnnnnnnnnnnnnnnnnnnnnnnnnnnnnnnnnnnnnnnnnnnnnnnnnnnnnnnnnnnnnnnnnnnnnnnnnnnnnnnnnnnnnnnnnnnnnnnnnnnnnnnnnnnnnnnnnnnnnnnnnnnnnnnnnnnnnnnnnnnnnnnnnnnnnnnnnnnnnnnnnnnnnnnnnnnnnnnnnnnnnnnnnnnnnnnnnnnnnnnnnnnnnnnnnnnnnnnnnnnnnnnngtgtggaaaattgatgtggcttcattttttggaaaaagaaggtatatttgcatgaaagcaataaaaaatcacaagccttctgtacttntaggctntgatatgtctgaacttaaaaatgtgaaacatagattgaactttgaatatgaaccataaaacttnnnnnnnnnnnnnnngtaactctaaagtagtagatagattttttcggttgaaatttcacagtgttttcctcactgtgttggtgaatccacctcagtggtcgctgtgctgctctgcagagttacttcaggtgctggagagacccctgttaccaggaagccagtagttatttcacatctattgtttcctgcagtttgatttgtaacaattgttttcaggtttttttctctgtcatgtaaatgaaatcttttgatatttcatgcacgccttgttttcccagtagtgtcagtatcgtatgataagaaactgaaatctataaataatttgctttttcgtttaaggacatttcagcctttttcagaatacttgatttaactgcgagaggaagcatcgatttccttcagctttccctgcagcagcggatggtacagtgagtgttcagagatgtgggtacaaatccctgtg

SEQ ID NO: 39297 - DNA, 1111 bp, Macaca Mulatta
  misc_feature (1)...(1111): n = A,T,C or G
atagcacattacagtttgcaacagattttcacttctattggccccttgctccttggaacagccctgagatgtgggctgcacagaaacccacattgcgtgtttgaggaaactgaagacacacggaggttaagtgacgtaagtacnnnnnnnnnnnnnnnnnnnnnnnnnnnnnnnnnnnnnnnnnnnnnnnnnnnnnnnnnnnnnnnnnnnnnnnnnnnnnnnnnnnnnnnnnnnnnnnnnnnnnnnnnnnnnnnnnnnnnnnnnnnnnnnnnnnnnnnnnnnnnnnnnnnnnnnnnnnnnnnnnnnnnnnnnnnnnnnnnnnnnnnnnnnnnnnnnnnnnnnnnnnnnnnnnnnnnnnnnnnnnnnnnnnnnnnnnnnnnnnnnnnnnnnnnnnnnnnnnnnnnnnnnnnnnnnnnnnnnnnnnnnnnnnnnnnnnnnnnnnnnnnnnnnnnnnnnnnnnnnnnnnnnnnnnnnnnnnnnnnnnnnnnnnnnnnnnnnnnnnnnnnnnnnnnnnnnnnnnnnnnnnnnnnnnnnnnnnnnnnnnnnnnnnnnnnnnnnnnnnnnnnnnnnnnnnnnnnnnnnnnnnnnnnnnnnnnnnnnnnnnnnnnnnnnnnnnnnnnnnnnnnnnnnnnnnnnnnnnnnnnnnnnnnnnnnnnnnnnnnnnnnnnnnnnnnnnnnnnnnnnnnnnnnnnnnnnnnnnnnnnnnnnncaccatagagacatgctggaccccggttcccatcccaagcacccaccctgagagcccagttggccgccaccaccacagttccccttacccatatgcccacgtccacattcagagcaaaatacacggtgatgacaatgatgtcagccacgcttagctgcgtcccgggagcatggacgtcgctggtggagttggcggccatggctgtcctgccgcaggcactaggtccaagcccgaggggctgaggggcaaaccaggtcagaaaggacttcctgacagggagctaattgatcattaaaccgagcggacagtggcatctccagcccatggtgtggctgcgtgcagggcagctgcgtcaccatgccgttcggcttcctcatcccatagtggggagcagatctcaga

SEQ ID NO: 39298 - DNA, 826 bp, Macaca Mulatta
  misc_feature (1)...(826): n = A,T,C or G
ggggagagaagagaatgcaatggtatagactcctaatgtttgataaaatactattttcagagtggtagagaggttttatttgcctaaatagctgtcattaaatggaataacaaccacattaaaccaaattaattgcaaacacagcagcaacctgtggagaagttgaaactccagttttgtggattacagttttgagttttacgattgacatttttaagtcccctatttaaggggtcacaattttataacaatgtgtgtcttattaagttcctaggtcattgtgagcacttgataaatatttgctgaatgttgtttttttgaatgaatttaagatggaaacaaaaacttgtcatccagttaactagagtgaatatagggagaatttttttgctgtaacatggagagtttattttcaaaatgaggaaagagaaaaaaatattcagactcgtacctggtgaagtgcattctctgtatactttttgatggagaaattgatctatagagctgcttaattttttgaggcatttagacagcaatgaaaggtagttctccacaggacaccaattcaaagggagagatcagactctggccttatcccagtcatttgaacagctatctagtcctgcactgacatgacagcggctagaaacacacctgcccatagatcgaatgaccagnnnnnnnnnnnnnnnnnnnnnnnnnnnnnnnnnnnnnnnnnnnnnnnnnnnnnnnnnnnnnnnnnnnnnnnnnnnnnnnnnnnnnnnnnnnnnnnnnnnnnnnnnnnnnnnnnnnnnnnnnnnnnnnnnnnnnnnnnnnnnnnnnnnnn

SEQ ID NO: 39299 - DNA, 815 bp, Macaca Mulatta
  misc_feature (1)...(815): n = A,T,C or G
tcttctaaaaaccctttctttctcccggaaatcaaatctttggacaatacggttttagggggggaaaataaatgaagggaggaaacggnnnnnnnnnnnnnnnnnnnggggaaaaatgtgggaggcttccaaaagagagagagagatacttaagtgaaaaagagtataatgggatagtcaagagagcatgctttggatgtggactacttgtcttcaagtatcaagctgctgcttatttgctataaaatggagatatatagctcctaacagggcctccattcacagtccctgttttaaagaatgatatgcttttcattgtcaaaactgagtctgttatttatttcagatagcagaacttgtagcaagtgaattttttgatcaaggagacagagagagaaaagaactcaacatagaacccactgtaagtatgaaaccttgttcgtaggaattcaaatgcattgttttaaagttgtagactcctttttatggtcctatggcatctttccttaggaccacaatttctgattttatttgttaaaacttttttctcattggaagaattatacatattcattacagaaagcaaaaccaataaaaggcataaaaaaaagacacttggggtcatcatattgtatcactgttttttttgtaatttgttttttctgcttaagtattataaaccacttttcattttaacaaatattcttatgtactatcatgattacatgaaatagatgtaaccataatttacctacttcccttggtgtaatgtttgcaatgttcactattacaaacagcactgtgataaacatccc

SEQ ID NO: 39300 - DNA, 784 bp, Macaca Mulatta
  misc_feature (1)...(784): n = A,T,C or G
ttattatccataggcattggaaggaaagagggatcttcttaaatacgagaagttttaaacagtctttaatgtgcttttgttgaagtacctttcagaatgtaaggtgcagcagctccggtttctattatggtgacttgaagttcagattcaaggaattggctttgactttttgtaatctaggagcagcagtttgtgagaggtttattaaaaatgttaaagagcctgtttttctaccaagcaaggaagaaaaaaaaatgtaataatgttagttgctacttcttaatagccgaagcctggaaattatctgaatttccaaaacgctaaaactcgtgctataatcatacaattggatactgcataataatagaaaataaggcacacttgctatgtgaaacagtatggaccaatctcaacatggtgattgaaattaggtagaaatgagtacaaactgtatggttcaattctgaagttcaaaagcagtaaaaacttgtctatggtgattaacggtagaatagtagatacctctgtagaaagaaaggnnnnnnnnnnnnnnnnnnnnnaggatgcttgagaagtgacatggggaagctttaggaatgctgagttttctttatcttgacacttgataaatacataattcatatagctatatgcttcacatttttatagtttactgtatatatgctattcttaaataaaaataagaaagcaattaggacactattgtagttagtcaggcaagggacagtgatgccttggacctgcatgtgagaagtagaaatga

SEQ ID NO: 39301 - DNA, 751 bp, Macaca Mulatta
  misc_feature (1)...(751): n = A,T,C or G
gnnnnnnnnnnnnnnnnnnnnnnnnnnnnnnnnnnnnnnnnnnnnnnnnnnnnnnnnnnnnnnnnnnnnnnnnnnnnnnnnnnnnnnnnnnnnnnnnnnnnnnnnnnnnnnnnnnnnnnnnnnnnnnnnnnnnnnnnnnnnnnnnnnnnnnnnnnnnnnnnnnnnnnnnnnnnnnnnnnnnnnnnnnnnnnnnnnnnnnnnnnnnnnnnnnnnnnnnnnnnnnnnnnnnnnnnnnnnnnnnnnnnnnnnnnnnnnnnnnnnnnnnnnnnnnnnnnnnnnnnnnnnnnnnnnnnnnnnnnnnnnnnnnnnnnnnnnnnnnnnnnnnnnnnnnnnnnnnnnnnnnnnnnnnnnnnnnnnnnnnnnnnnnnnnnnnnnnnnnnnnnnnnnnnnnnnnnnnnnnnnnnnnnnnnnnnnnnnnnnnnnnnnnnnnnnnnnnnnnnnnnnnnnnnnnnnnnnnnnnnnnnnnnnnnnnnnnnnnnnnnnnnnnnnnnnnnnnnnnnnnnnnnnnnnnnnnnnnnnnnnnnnnnnnnnnnnnnnnnnnnnnnnnnnnnnnnnnnnnnnnnnnnnnnnnnnnnnnnnnnnnnnnnnnntcgggcggaataacactattcatcatcgcaaaaacatttcttcctttgtcggccttcttcctgagccattttaccactcaaggcatttgctccaaaaacccctggcttaagagggcccgttgaacccacccaacagggcattcacccccctctataaacct

SEQ ID NO: 39302 - DNA, 437 bp, Macaca Mulatta
gacagctgcaaccctgataagagggctgccacaggcagaggaaatgaagcactggtgcaggagatttcagagcgagcgtgctcaaggctgcagatgcgagacagcactggtaaggactcttagctgaggtttgggatatacaccgaggcgtggaaccataaatataacagtggtaatagtgcgtgggcaggtaggaggtaggatgtttcctagaccatttggggtccgaggagaaacaggctggggcctcgagaaggagtcactcagacaagccatatttgtagaaagtagtctactgatgggagaaacagttatgggggtgctgggggaagagaagggacttttccttgtgaagagccccacagctgcccgtttactgacttgggagaagtaaagtcagaaagaactaacgtggggggaaaaaatctcagttgtca

SEQ ID NO: 39303 - DNA, 669 bp, Macaca Mulatta
  misc_feature (1)...(669): n = A,T,C or G
ttttgtattcnnnnnnnnnnnnnnnnnnnntggtgctagccaggatggtctcgatccggacctggtgattcatccgcctcggcgnnnnnnnnnnnnnnnnnnnnnnnnnnnnnnnnnnacactcagccaaatattcttaatataaaaagactttctacacactaatacaaagatagatcattacctcaacagaaaaaaaggacaagaaattaacaaaaacaagtttttaagggatatataacaagttgcacaaagaaatgcaaataaaaataagttaatttcctcgcaattgatgaagacaaaaaacacggacaatatccagcagtggcaagagcatggtcattcatatgttatcatgtatcactggcgaaaggcaaactggagcatctcactgagtggtaatttagaaatatgattcaaaatgttaaatgcacttaatctttgacccaacaatttcacttgtaaaacttatactgaaaagacaagtgcacaaaaatttatatacaatgatcccacttacaacattacttattggaaacaatctaaatggttactattaagaaattaattaagcaaattatagtacatctactcaatgaagtttattaagtagtcatttaaaaggatgccataatgccacaattattgaccaaggaacacctgtgatgt

SEQ ID NO: 39304 - DNA, 411 bp, Macaca Mulatta
atgctccttgaacgtttattaataatcttgtggatgcagttgacatgggtcagtggtcaacagctgaatcagagtcctcagtcattgtctgtccaggaaagagaggatgtctccatgaactgcacttcttcaagcacatttaacacctttctatggtacaagcaggaccctggggaaggtcctgtcctcttgatggccttatttaagcctggtgaatggacctcaaatgggagactgtctgctcagtttggtataaccagaaaggacagcttcctgaatatctcagcgtccgtgcctagtgatgtaggcacctacttctgtgccgggcaggggggagtggaggttagcaactataaactgacatttggaaaaggaactctcttaactgtgaatccaaatatccagaacccc

SEQ ID NO: 39305 - DNA, 509 bp, Macaca Mulatta
caggaaagggtaattactggactctggatccgaactgtgagaaaatgtttgacaacgggaacttccgtcggaagcgaaagcgccgctctgaggccagcaatggctccacagtggctgccgggacatcaaagtccgaagaagggctctcctcaggattggggtctggagtgggtgggaaaccagaagaagagagcccctccactctgctgaggccttcccactccccagagcctccggagggcaccaagagtactgcctcatctcctggaggacccatgctcacctccaccccttgtctcaacactttcttcaacagcctcagctccttgagtgtcagcagcagtgtgagtacccagcgggctctccctggcagccgccacctagggatccagggggcccagctgccctccagcagcatgttctccccgacctccatctcagaggcctcagcagacaccttgcaactgagcaatagcaccagcaataaagcggccagagatcttcctatt

SEQ ID NO: 39306 - DNA, 399 bp, Macaca Mulatta
attctgtactggggaaagcatgaatccaggtggtgctcaactggactactgtgaggatggcgtgactccatatgtgattttctttaagaatggtttagaaatcggaaaatgttaacaaatttggcaattactttggatgtatcacctgtcattgtaactgactgtagcttgtcatccacacaacaggacttaagaaaatgggactgatgtcaacttgagctcttcatttattttgaccatgctttggaatggaggcattgttttaagaaaaacatgccatgtagcttgtctaaaaataaaatgcatttaaactcaaaaaatctaagcaaagagatcataagggcattaatttggggagcagggacatgtggttaagatgctttttgataacagtgtgaa

SEQ ID NO: 39307 - DNA, 526 bp, Macaca Mulatta
  misc_feature (1)...(526): n = A,T,C or G
gccagggagctgtgaggctgtgcgctctcgttcttgccatctggactctttttcccctactgagattcgtctggtnnnnnnnnnnnnnnnnnnnnnnnnnnnnnnnnnnnnnnnnnnnnnnnnnnnnnnnnnnnnnnnnnnnnnnnnnnnnnnnnnnnnnnnnnnnnnnnnnnnnnnnnnnnnnnnnnnnnnnnnnnnnnnnnnnnnnnnnnnnnnnnnnnnnnnnnnnnnnnnnnnnnnnnnnnnnnnnnnnnnnnnnnnnnnnnnnnnnnnnnnnnnnnnnnnnnnnnnnnnnnnnnnnnnnnnnnnnnnnnnnnnnnnnnnnnnnnnnnnnnnnnnnnnnnnnnnnnnnnnnnnnnnnnnnnnnnnnnnnnnnnnnnnnnnnnnnnnnnnnnnnnnnnnnnnnnnnnnggtgaaaagcaatgacagtgttaaaagaagacacgctgaaatgatgcaggctgctcctatgttggaaatttgttcattacaattctcccaataaagctttacagccctctgcaaa

SEQ ID NO: 39308 - DNA, 87 bp, Macaca Mulatta
  misc_feature (1)...(87): n = A,T,C or G
attgtccttactcgatccccagagtgtcaaacatgctctacgtgaaatcaaaattattgagacagactttgaccatngataacatat

SEQ ID NO: 39309 - DNA, 882 bp, Macaca Mulatta
  misc_feature (1)...(882): n = A,T,C or G
ggggcggccgccatgttctctgtgtgtctttgtcttttgtgtgttctttcattctccaccacccccggcacggaccccaacaagtggcgcagcgagcagggtcagcacgggctctactggcagagcaacagagcagaacagcacagaaggagnnnnnnnnnnnnnnnnnnnnnnnnnnnnnnnnngcagcttgacttcagagggacaacttgacagcacgactttggacaagagttcccctggggatggaactaacctggccgaaatctccagggaacactacctttcccctccatccttctcaattcatccccttttccagctgcccctcctgctggagagtccctcttcctctgaattacacgccgccgcctttttccaacccctttttccctccgtgcctccccgcatatacgcttctttcggatcgagcgtccccctctccactttaccgctatcccacccattttccttctttcccaccctcgccgctaactcataacatttccatccccccttcctcatacttttttcaccgcaaagcgactccccgaatcctcagccgttgcccccttgttccctccctcttcccccctattaccacccctcactctccccattcttcccttacctcccctatacattcacctcatcgttcacgcattcccctcctgccctttctattaactccaccgccccgtacgcactttttccatgttgcttcatccaacaacccccgccccacccacctattggtcatatctccctcccccgctatccgacgcccccccttccatatggtttaccactaccgacaacacttaattcttcacaattgcctatctcactcattctatcaacctctgatcccattctttccct

SEQ ID NO: 39310 - DNA, 783 bp, Macaca Mulatta
  misc_feature (1)...(783): n = A,T,C or G
ggatagctctatgtataactttnnnnnnnnnnnnnnnnnnnnnntatatctttgtatttttattcatgatattcatgaacacatctatgtataattttaaagctaaattatttactgatgtgctttccataggtgataataaaattattagtttcagtaatcttttctttgcaaaatggattgatcattaccaatcagtaatgagcttttaattccatattttattagcactctgttgcagtgtggctgtttcttacattcnnnnnnnnnnnnnnnnnnnntttatatatgatagttttttccttaattcttctttctagtttcttcagctagtacaaaactgctttgtatattagtttattttctacaaattaaacctttctttcctttgttcttttcatgtagtttctgagaaggtgttttgttcaagtcatgatgatggtctaaattttctgtttattagaagccattgctgaatataagcttgttttgctatatgacacttgtcacaacttaataccagaaactgtgaggagagcgttgtttctggtttgtacctttaaatgtgtaatagaaaagaggtctgttctttgtgtgaaaactgttagaaaaaaatgaactgaaatttgggttttagtaaagtatatgaaagaatttaataacactctagattcattcaacgtaaaaaccgtaaattaaaatactgggtttagagacatataatttgcacttgtatttctcaggttttttgttccccttgtggaatggactgtttgtgaaaaa

SEQ ID NO: 39311 - DNA, 751 bp, Macaca Mulatta
ctgcactcatagatctgagcaacagagcagactccatcactaaaaaaaaggctttctggttttcttgtgcagcaggaagttgtctggcaaataataccaatcgtctttgagtttcagaacaaaattaaaggggtccattggtatactgtactggaaaatgtagagaaaattatgtaatcctacaaaactatgaaaggcactttcacttacttcccacatgcggatcatgcatttgggtattatctataacaggagtctgcagactttttctgtaaagggccagatagtaaatatttgcagctatgtggacataggtctctgttgtagctgttcaactctgcctttgtagtataaaagtagccatagacaatatactggattgggcatggctgtattccaacaaaacttcatttactaaaacaggaggccagatttaacccaaagactacagtttgcagattcctggccaaaagctttgctactttaagtgtgatctgaagaccagtagcatcgctatcacctggaaacttgttaggaatgcagaatctcaggccccagtcgcagacgtggtggaccagaatctgcattttaataagatcctttattgattcatatatacattaaagtttgagaggcactaatctatagtttttaattttaggccagttttctctggttccagtttatttaactagtgtgtcttaatttgtcttaacaattaatcatgacatttttcaaaagccatcaagtc

SEQ ID NO: 39312 - DNA, 1058 bp, Macaca Mulatta
ctcctgaccatgtcctctctcctccccacagccgtcaagggattctggaccacctgcccttccttctccaccttctacttcctctttgccatttttgtagtgtccaccatctttcactgccaccagcgcctggctctggtgcccgcgccctgggcatactcagcccatgtggtcctggcaccgagacacctcccccgagaggggctgttcactatcaactccaagggccgcctggggaaccagatgggtgagtacgccacactgtatgccctggccaagatgaacgggcggcctgccttcatcccagtccagatgcatagcaccctggcccccatcttcagaatcaccctgccagtgctgcacagcgccacggccagcaggatcccctggcagaactaccacctgaacaactggatggaggagaagtaccgccacatccctgggcgctatgtccgtctcacgggctacccctgctcctggaccttctaccaccacctccgccacgagatcctccaggaattcaccctgcatgaccacgtgcgtgaggaggcccagaagttcctgcggggcctgcaggccaagtgggcagggcaggcgaccttcgtgggggtccatgtgcgccggggggactatgtccatgtcatgccgcgtgtatggaagggggtgctggccgaccggggctacctgcagcgggccctggactggttccgggcccgctgccgcctcccggtctttgtggtcaccagcgatgacatggcctggtgccgggacagcatcaacaactccactggggacgtggtgttcgctggcaatggcctccagggctcacctgccaaggacttcgcgctgctcacacagtgcaaccacaccatcattactgtgggcaccttcggggtctgggccgcctacctggcaggtggggacaccgtctacctggccaacttcaccctgcccaactcccccttcaacatggtctttaggccgcaagcggccttcctgccagagtgggtgggcattgcggctgaccttggacaggctggacagaacggcctctagcc

SEQ ID NO: 39313 - DNA, 847 bp, Macaca Mulatta
  misc_feature (1)...(847): n = A,T,C or G
ggcgtgannnnnnnnnnnnnnnnnnnnnnnnnnnnnnnnnnnnngtgtggaatggtcaggagattgagaccatcctttcaacaaggtgaaaaccctgtccnnnnnnnnnnnnnnnnnnnnnnnnnnnnggggcagtgnnnnnnnnnnnnnnnnnnnnnnnnnnnnnnnnnnnnnnnnnnnntgtnnnnnnnnnnnnnnnnnnnnnnnnnnnnnnnnnnnnnngtgnnnnnnnnnnnnnnnnnnnnnnnnnagagcaagactctgtcttaaacaaaacaaaccatacaaacaaaaaaccaaaccaaacaaaccaaaaacaatcctggctgggcatcnnnnnnnnnnnnnnnnnnnnnnnnnnnnnnnnnnnccgaggtgggtagatcacttgagctcagcattttgagactagccctgggccaacatgaatgaaaccctgtcactaacaaaaatataaaaaaattagcctgttcatggtggcacaccaactgtaaaccccatcctactcggggaaaattgctggcaaggagaaaatttgccttgaattctgggaaaggcaaaaggtttgctattggaaacccccatattcttgcccaacttggactcccaagcctgggggcgaacagaagggaactcaaaacctcttgttccccccaagaataataaaggggaacataatcgtacataatttataactaattatagtttgaataatcatttatatataatctctgttttggccctacctttacgcccctcttataagaaaaatttctttataagaaacatatattcattcttgagaccccccagtgtccccaaattataggttaaatgctgaaaactt

SEQ ID NO: 39314 - DNA, 840 bp, Macaca Mulatta
  misc_feature (1)...(840): n = A,T,C or G
ggnnnnnnnnnnnnnnnnnnnnnnnnnnnnnnnnnnnnnnnnnnnnnnnnnnnnnnnnnnnnnnnnnnnnnnnnnnnnnnnnnnnnnnnnnnnnnnnnnnnnnnnnnnnnnnnnnnnnnnnnnnnnnnnnnnnnnnnnnnnnnnnnnnnnnnnnnnnnnnnnnnnnnnnnnnnnnnnnnnnnnnnnnnnnnnnnnnnnnnnnnnnnnnnnnnnnnnnnnnnnnnnnnnnnnnnnnnnnnnnnnnnnnnnnnnnnnnnnnnnnnnnnnnnnnnnnnnnnnnnnnnnnnnnnnnnnnnnnnnnnnnnnnnnnnnnnnnnnnnnnnnnnnnnnnnnnnnnnnnnnnnnnnnnnnnnnnnnnnnnnnnnnnnnnnnnnnnnnnnnnnnnnnnnnnnnnnnnnnnnnnnnnnnnnnnnnnnnnnnnnnnnnnnnnnnnnnnnnnnnnnnnnnnnnnnnnnnnnaacaacgattgaaaaacaacgaatcaagcccctactcatcacaatcccacttcggcacctattttcacccgacctacaaagtctcacaaatacttgtaagagaacccttcaccattctccgaatgggcaatctacgggttcaaacattccttaatttcccacagggcttttcatgggaatccaacgattaatttattggaaatcccacattcccccttttgggccggccttcaatcggacaaacataaagtacacccactcttcacatatgtaaagcagatagtcttggggggctatggcaagagcggcccgctatagagaatatacgacacacttacttgggaaatgttatattttggaaagaaaacccctgaccaagaga

SEQ ID NO: 39315 - DNA, 825 bp, Macaca Mulatta
cacaccttggcaagtctttcccaagccattctttgtccctgcagcttgatggtttctccttgccccattcctgccccaccagatctttgttcctttcccttggaggactcccatcccttggggtctccaggatcctcatggaaggggaaggtgagacatctgagtgagcagagtgtggcgtcttggaaacagtccttagttctgtgggaggactagaaacagctgcagggcgaaggccccctgaggaccaccactctagtgacagtgggattgggacctgggggatacaggggccccaggaggaagctgccgaggggcagctcagtgctctgcagagaaggggctcgggaagaagcaggatgggcttgatgggcaggagggatccccgcactgggagacaggcccaggtatgaatgagccagccatgcttcctcctgcctgtgtgacgctgggcaagtctctccccctgtctgggccaaacaggagggtaagacaatccatgctctaagatccattttagatcaatgtctaaaatagctctatcgctctgcggagtcccagcagaggctgtggaatgtttctgccgccctagggcccagagagcccaaccctgagtccctcagaggccccctgagtgtaccccttggcctgagccccttccccattcctgcagctagggagagacctggcctcagccctggcagggctctctcttcaaggccatatccacctgtgccctagggcttgggagaccccatagggccaggactcttgggttagcctggccactggcttctctctttttctctgtttcattctgtgtgc

SEQ ID NO: 39316 - DNA, 116 bp, Macaca Mulatta
ccagtgctacatgttggagtagacctatgcgtgtgctttgccattgaagtaagattttgcctgtatggtactgttttgtttgttaataaagtgcactgccacccccgaaaaaaaaa

SEQ ID NO: 39317 - DNA, 638 bp, Macaca Mulatta
ggccaccccaggagcagctgcccgcgcgggacagcactatgggcttctcttcggagctgtgcaccccccagggccacggggtcctgcagcagatgcaggaggctgagcttcgtctactggagggcatgagaaagtggatggcccaacgggtcaagagtgacagggagtatgcaggactgcttcaccacatgtccgtgcaggacagtgggggccagagccggggcatcagccctgacagccccatcagccagtcctgggcggagatcaccagccaaactgagggcctgagccggttgctgcggcagcacgcggaggatctgaactcagggcccctgagcaagttgagcctgctcatccgggaacggcagcagcttcgcaagacctacagcgagcagtggcagcagctgcagcaggagctcaccaagactcacagccaggacattgagaagctgaagagccagtaccgagccctggcacgggacagtgcccaagccaagcgcaagtaccaggaggccagcaaagacaaggaccgtgacaaggccaaggacaagtatgtgcgcagcctgtggaagctctttgctcaccacaaccgctatgtgctgggcgtgcgggctgcacagctacactaccagcaccac

SEQ ID NO: 39318 - DNA, 363 bp, Macaca Mulatta
  misc_feature (1)...(363): n = A,T,C or G
tgcctgtcctgcacgtccatggttctgaagggcatctggggactcttgatcatcttgtcagtatcatcgtcttggngtctattattctggtcatctagccactgctcaagaaaagcaatctccaatgaaaaaattcaggnnagggaatgcagtcggatttttggtgaagatggtctgacgttgaagctctttcttaaaagaactgctcccttttctattctatggactttgactaattacctttatttactggctttaaagaagctgacggccactgatgtctccgctctgttctgttgtaacaaagcctttgtcttcttgctgtcatggattgtgctgaaagaccaggttcatgggagtgag

SEQ ID NO: 39319 - DNA, 209 bp, Macaca Mulatta
  misc_feature (1)...(209): n = A,T,C or G
taatgattatcatcaatatgaattaagatttggtttttaatttcgaagatttaatgatttacattgtagtaatattctagttatctacccaagcagatctgtangtggttcccaaagttttacgacttacctcaataacaaggctacaatgttattccatgattttatttgaaaagcctcttggaatgataatatagtagctcaggagt

SEQ ID NO: 39320 - DNA, 444 bp, Macaca Mulatta
tggaatgtttcggatatacccgagcttaagggacctgagtgctgccacaaacctggaacagtcctgtagaggctacaatccccagatggggacccttcccaccttctgcaagttcatgagattcgttttagcaaacagatggaatctctccaggccctggaagctgggaaccaccatgccaatctacaggcattcattgttactgaaggggacgccaatgctgctacccacaagctcaagggatcccagagattttaaccaccatgcttatttttttgcttgccacctgcctgttgacccacctgaccatttcatatgccttttccacttttcttaatgcttccagccaagagaagtcctggaataagagttatcaaccagtgtgtcttgtactgaataatagatcactggttatggctggaacatctgtcaacaaaatggcta

SEQ ID NO: 39321 - DNA, 629 bp, Macaca Mulatta
  misc_feature (1)...(629): n = A,T,C or G
gttttgttggtcgccgcgttgcgttattgggtggaaaggcatcatcttagagtcacccttctttggaaaccactgtatcggagaaatccctccaagacacaggtaattagagagggtatgtgaaccaaggagccaatcaaattctcccacataagaatttgggacacagaagatgaagctgaggaccacaaggatttagatactgatgcttaggtctcaacaatgggcttaaaatattcagtaaattggatttgctgacaatatggccgaataggaacagctccggtctgcagctcccagccagatcaacacnnnnnnnnnnnnnnnnnnagaagcagagggtcagcagatgttgaaggaggtataatcaagcccatactccattatacagagagcaaactaagagctggagagatgaagagacttgctcaacatcatacatgagaaaatttaagaccaaacagaaaattcaagcatgtcatacattgtctgtatctttcagccaagttgcctaagaacaacagttgattagaactgcacgtcttccttcaaacactgtctactgcagaatggaaataggaacctctgggaatatctatgaagtctcgctccgtcacccaggctggagt

SEQ ID NO: 39322 - DNA, 808 bp, Macaca Mulatta
  misc_feature (1)...(808): n = A,T,C or G
gggggcctggcagggctgggtacagcccgcaagcgctgggctctgggcaagtctccactctcaactctgagtatctgtcatccaagcaaggctgactgatgctcacttgggagttagaaggatgggctgggggctgcacaccaccctgccctgaacacaagtgctccctgggttccagaccccacacaagtgtggccgaggtatcaggagcaacctgaggatgaggctgggggcagcggctgagcgcttgcagatgtgtttcggcaaatggtctgagagtcacagcctcaggtgctgaggacgggattggggcggaaggcctgtgcgctgtcctcccactgagaagggatcctggggcagtgtggaaggggcaggtgctgaggacgggattggggcggaaggcctgtgcgctgtcctcccactgagaagggatcctggggcagtatggaaggggcagctgtacctgtttgttanattcatgtgtgtaaaataaacggacagacggctgnnnnnnnnnnnnnnnnnnnnnnnnnnnnnnnnnnnnnnnnnnnnnnacgggcgnnnnnnnnnnnnnnnnnnnnnnnnnnnnnnnnnntaacacnnnnnnnnnnnnnnnnnnnnnnnnnnnnnnnnnnnctagcccgggcgaaagtggcggggcgccctgtgggtccccagctaactcgggaaggcctgaaggcagggagaatgggcgttaaaacccgggaaaggccggaactttgccaatagaagctcgaaaatcccgggccacgtgccacctccaaaaccctggggggcgaaaaaaaac

SEQ ID NO: 39323 - DNA, 633 bp, Macaca Mulatta
  misc_feature (1)...(633): n = A,T,C or G
ggccattgtagtcccagctttacatgggtatcttttgtaagattacctgccttaggcaagctctgagctttagagtcatcagaggtagaagtcaaggtctccagggtttggcagaaaaattcagggaacaagcactttgtctcagtatttttggttgttttgaggatttaagtattctattcaacatcttagttttttcagtgtggaagtcattcagggtgtcatttgctgtacttccaaaaacagaaatttgctccttattttttttaatcatccttactgtgtagccttttttaaggtctgcatatgttttttcctaaagacagcttttactgtaaccttatccctgttttacagaaattgatctatacaaaaccaaagacttttaagattacacagttgtaagttaatcaagctaatagtggctagaaacagctttcacttcttacaaatcacctgtgcactgagtttgttctgcttagatcaggacaaaactaatggccttactaattttaagtagtcctaaatgagcaggatttattttttgaagcagtcttgcctttctgctcatttagatttgaaaatatagactatgtnnggannnnnnnnnnnnnnnnnnnnnnnaaacatgtc

SEQ ID NO: 39324 - DNA, 856 bp, Macaca Mulatta
tgaattcattctcctaggactctccaaccaggctgaacatcaaaacctcctctttgtgcttttcctgggtatgtacctggtcactgtggttgggaatgggctcatcattctggccatcagcttggatacgtaccttcataaccccatgtatctcttccttgctaatctatcctttgctgatatttcctccatttccaactcagtccccaaaatgctggtgaatattcacaccaacagccaatccatctcttatgagagctgcatcgcacagatgtacttttctattgtgtttgtcgtcactgacaatttgctcttggggaccatggcctacgaccgctttgtggcgatctgccaccctctgaattacataactctcatgcgacccaggttctgcattttgctcactgtcatctcgtggctcctgagtaatattatagctctgacgcacacccttctgctcattcaattgctcttctgtgaccacaacaccctcccacacttcttctgtgacttggcccctcttctcaaactgtcctgttcaggcacaatgatcaatgagcttgtgttgtttattgtgggtttatcagttatcatcttcccctttgcactcatcttcttctcctatgtctgcatcatcagagctgtcctgagaatatcatccacacagggaaagtggaaagccttctccacttgtggctctcacctgacagttgtattactgttctacggaaccattgtaggtgtgtactttttcccctcctccactcaccctgaggacactgataagattggtgctgtcctattcactgtggtgacacccatgatgaaccccttcatctacagcttgaggaataag

SEQ ID NO: 39325 - DNA, 995 bp, Macaca Mulatta
  misc_feature (1)...(995): n = A,T,C or G
ggcactaatttgtacactaatttatttcttgtttagtctaaaaatagtaatttgtttgcaagtcactaataatcattaaataaattattttgttggccatagcccataattttgtaattagtactaagtgtatacgtatttttgccactttttcctcagatgattaagtcaacagcttattttaggaaactataaaataatagggaaagagatttcactatttgcttcatcaatggtagggggcggtgactacaactgtgttagcagaaattcacagagaatggggatttaaggttagtcagtagagaaacttggaaagttctgtgttaggatctggctggcagaattaactttttgcaaaagttttatacacagatatttgtattaaatttggagccatagtcagaagactcagatcataattggcttatttttctatttccttaactattgtaatttccacttttataataattttgatttnnnnnnnnnnnnnnnnnnnnnnnnnnnnnnnnagtcaaaaaatctttgctgtcgtagtctgcaacctctaaaatgattatgttgcttttaggattgatcagaaggaacactccaaaaatcgaaatgaaatgtttggtgcagccagatataagtaatacagttaaccaagcaaaaaagagtgctgcccacctcctttatgaatcgtttttctaagttgaagaaaacatttgggctgccattcacgttagacctgtatgttttgttttcagttgaaaacttgcctccttgggcaatattcataaatgaagcagaatttttttctcttttttccgaatatgttagtttcgttcttgtaagatgtatcatgggtattggtgctgtgtagtgaacaatgaattttaattagcatgtggttcagaatatacaatgttaggtttttaaaaatatcttgatggttcttttctatttataatttcagactttaaataagtgtaccaagaatttcataaatt

SEQ ID NO: 39326 - DNA, 827 bp, Macaca Mulatta
ggggacacttggggacagatgtgtccatgctattctctaaccccaagtctaagcttaagaggagatcaggattcaggaaggttgtatttggtttccagcaactcacccaccacaaatttcaaaatctctcttcatctggaacacagaaaatgatttgcagtcctcggatggttacaagggtactggtttttgccaagtcacattatttgacagaaatgggccgtgaaatgcctgctaattgctacaagatttaacagggagagactgaaaacaggaggcggggaagtgcattgtcagtctttcatgtggggagctggggagctggggataacaagacataatgagccttcttctctgagctccaaattaccaggatcattttatcctgttgaaagaaggatgaagctttttaaaatgggcaattatgacattttttcattgttgttgagaaagctaaacccccaagatcccagctatttttgaggggttttcaaaaggccctcatgccattgttgagctcatcattctcccccaggctccagggagaggtttcttttgccatgaaaaatcctgccttgatcccctctctcccatacttgaccaagtcttttgcagtggtttccttttcacacgattctaaataactgcccctggaaatcagaaccaggggggccccttggacccaacttgtaaggaaaactggttaccaaaaaaaccacctaaattgccttctggctgaaccctttaaaaaattttaatggcaaattgcccttgaaaaccaacaccttggtggtccctctttgctggctcgaaaccatggggggaaa

SEQ ID NO: 39327 - DNA, 775 bp, Macaca Mulatta
agtgttccttctatttgctgtggggagttgtttcaatccagttagatgcatagtcagtgtggacagcaaattacttcatttctttgcactgagtaaattagaattgatgaaggaaggttggaatcaatgctagctggacttctggctggatttcctgaatgtagtgaagatcttatcagtagttaagttgctgttggtatttaattggtattggcatttaaatgctgaggcaaaggatttactaatgttggcaatttgaattggattaatgagtcttttgcttcaaaggaggatgacgcatccagataagggcgtagaagaaaagcacgtgttgggaattaattcagtcctgtgtctttagagtctcttgctgggggaaggtttccagttgtaaaagatgtaagagctgttgctgacggaaatgaagcaagaattttctcatgttgtttaccaggtggctgtttactctgttctagttcatcgtttagccttgcatcttcccgcaaggtctcttattttcttttggtattgtactccattttcattttaactccgtcccttaccttctcacacatattaaataaaaaccaatctgagtatgaatgtggtgtaaaaaggtgattttttttccccaaatgggtctttcagactcacatttgaaacagtaaatttacattagactggtttcagaaattaagactcgatcatttttccagattgctttctgcccctcctttcttcttgtgaaatcaattttacttctttcacttttctt

SEQ ID NO: 39328 - DNA, 713 bp, Macaca Mulatta
  misc_feature (1)...(713): n = A,T,C or G
ctttaagcggcccttatatcttaatcaacataataaaatttttactgggagagaaactctagaaatatgaagaatgtggcaaagcctttgaatgatccacaaacctgaatgaacataagaacatttatactggaaataaactctacaaatgtgaagaatgtggcaaagcttttggatggtccacaatcctgaatgaaaataagagaattcatactggagtaaaaccctacaaatgtaaagaatgtgggaaaaccttcaaacagtcctcatacctgaatcaacagaagaaaattcatgctggagagcaaccctacaaatgcgaagaatgtggcaaagcttttggatggtccacaaccctgaatgaacataagaaaattaatatgggagacaaaccctacaaatgcaaagaatgtgggaaagcctataaacagccctcacccatgaataaacatgataaaattcataatggagagaacccctacaaatgtaaggaatgtggcaaagtcattacgtcatcatcaaactctgctaaacataagagatttcatactggcgagaaaccatataaatatctagaatgtcataaaacctttaatagcttcacaaccctaattaaacataggacgattcatactgngagagaaaccctacacatgtgaagaatgtggcaaagcctttagacagtccggaaacctttatgtacacaggagaaa

SEQ ID NO: 39329 - DNA, 826 bp, Macaca Mulatta
gggttgcttcacttttcgtttgggtagaatatatacagtccaagttatagattccctataacttagaatttactaacacttcctttaaacaagtatatgattatccaaaatgtatctaggctgttttgattccagttttataaaacaagtcactaatccaatgttgtgttttaagtagaaacttttctgtttgtaatttcagttggcattcattatgtatttacttaatgtgggcatctcttttcagacttatttatggtcgtagaccctatctatatttctacatctacctgaatatagaaaaatacactgtttttaaaattgttatcatcctaaaatagtggtctgaagcttgcatttttgaacttaaaatagtgtctttaacttattttcaagtatgaaattatgagcattccatagcatgagtgtatgtttaatccttcttatattgatgaacatttagtttattcaaatttcttgggattacattcaatgatgcaataaatatccttggctaagatctttacattctctgttatgggataaatttctagaagcaatattgtcaggtcatatgatatgtatatattggtaaatattacagcctccaaataattatgcacatttaccttcccaagcatatgttagaatacttatttcccccatattcctatcactactatttaatgcccatcctttaaagcttttgctaatgtggaaggggcagatatgaattaaccattttggggaaggttccatccgtaaacgttcttttcagctttaattattaacgcctggcccctaatcggaaaaaatcggttggccc

SEQ ID NO: 39330 - DNA, 725 bp, Macaca Mulatta
  misc_feature (1)...(725): n = A,T,C or G
gggtttgcgggagccccaacctagaactctttccaaagaacactcacgctctacccaagttgccaccacctgtgggacccaggtgagttttagaacatccgtgacccggaaacagttactctagtgttaaatgaaccaaaggatttggtgcacatgggaccagtttcaggatgactaacccaacctaagtgaactcttcagccacaaccctcctcaccttccctcccttaccacaagcaaggccagtgctggagcagccattgcctcaggatcaagggagtaacagcaagtatcaggctggagaaaacaggataaagccattcctccttccacctagatggattgccaatcctctgccatcaattttgggaaacctgccttggtgcctccgaggctgcttttcctcagcatagctgatgtgtcatagttgatgaggtctgggctggagcagcagggacccaggctttttttctacaagtaatgatgtaggttatttgcagtctctgtaaccaccatccagaccagtatgcagtattcagctggggaccaaaggacgggattccctgctctaagaaaatacctttttttaattattattattttttgggtgaaagaagtggggactccatctccaaaaaaaataaaaatgatggtgggaaatcaaaaanaaatnnnnnnnnnnnnnnnnnnnnnnnnnnnnnnnnnnnnnnnnaccaaacaaacca

SEQ ID NO: 39331 - DNA, 784 bp, Macaca Mulatta
ggtacatgtatatatacacacacttgtatatatgtctatatcagtatatgtacatccacacataatatatgtatattacaatatatgtaagtatagctcaaatgttatcttaaatattctttgaggagcttaaccattctactggcacccttattaagtcaaatacacctttgatccatgtctattctacatttgtgtaacagtcatgttttaataaaattattcaaagttatttacttgctcttccccaggtgagagtttccatgtacactcttcaaccctcttaaaacaggtcaccgaaaaaaaatttctgcataaatgtattgatttagagctacattactgccactagttacctcttccctgctgctacatatgtcctcatttattatgatcatgaggtggctcaggacaatatttatgagcagttatcagtggtgacagaacatagatggcttaacctttgcaaagttaaatagtttgagcttatgatgaacacacaagttgaatgtgtcataagctttcacagcttttaagcagctatcagttggcaaaaatccttttaacattttacacttttaaagaaaatcactttattaaggaaaattaatatttgctcacttatcaaatattaccccttaagggaatgaaaacagatttcaatcctctagattaataaattgggggtggggggaaataatatgaatttaacactatttttatcaagttagtcccatttttttaaacatttgtcccccttttttggtggaatgccaatccacaa

SEQ ID NO: 39332 - DNA, 826 bp, Macaca Mulatta
  misc_feature (1)...(826): n = A,T,C or G
gggcatgtgcagttcattatagggttccagatctcatgagaatgtaatgccaccactgatctaacaggaggaagaactcaggcaggaatgcttgctgccccaccgcccacctcctgctgtgcagcctggttcctaataggtcacagaccagtatcagtccatggccaggggaccagggtaatatgacctaatttcagggaaaagaaaaagttaataattgcctaaagggctggggtattatcagagcctaagggacctgatagaaagggaatactcaactccagtcaactctagctttccatatgagagaaaggaaatacccagctctagcgtatgctagccatcctctcctacctaatataannnnnnnnnnnnnnnnnnnnnnnnnnnnnnntaatttagaaaactggtaaacacttgtgaaattcataatctggaccataggctcacaaaaagactgagacctaattaactttgaatcactttcattctctcccacactttcaccagcagacttctacaggcgtatttacagcagtttcgtttcagccattatatcctatccagcttaccaataaaaaattacccagccttggccaaaaggcaaaaaaacacaattttgaaaagaccgaaccaggcctccctaaaccaaacatgggccaggggatatttgggaattaatcagaaccagggaaatcctaaaaactcactattggaataaattacccctggtaaggtttcttcctggaagttataaataaaacttaccttgcccaggaaaacaggatttgtgggaaatgtttaattccacgagattaatatagaa

SEQ ID NO: 39333 - DNA, 513 bp, Macaca Mulatta
taggtggaagaggtctcaggccaagtgcatctggaagccaatgaagatgaaaatgcttcccctaatgctgtcctcgcctctgcctcctggaaagtccttgtattcccatgtagaagccgctgccctgggtaggggttaatgtgagtgttttcttcctttcagatttttgactttgagttgactccagaagacatgaaagccattgatggcctcaacagaaatctccgatatgataagttacaattgtaagtgatgcttgtagattctttcacaggctgttttctgtagtatgcagggaaatgggggaacaaatcttccccctatcaggaagacatgcccaaattcaagcatgggataaaataggagatgccctatagccctcagaccagaggtttcctccaggactcaatatctgacccagcagaaatgtgtctgtaagtgaaactgccagtgtctgcaccattgtgaatccaattcttgaatacccttactatctgtgcctgggtctagcac

SEQ ID NO: 39334 - DNA, 761 bp, Macaca Mulatta
  misc_feature (1)...(761): n = A,T,C or G
ggaccacacctagctaatttatgtattttttgtagagacactnnnnnnnnnnnnnnnnnnnnnnnnnnnnnnnnnnnnntgctcaagtaatttgcccaccttggcttccaaaagtgctggcattacaggtatcagccactccacctggtccctagtagggtatttttaacttggcaaaaaggatgttaatcggaaacatacactatccatcactgagtattattattgattttgcaatataagaatttcaacgtatttgtctgacagaaggtgtaaaagtgctggacatgctgcagagagaaacaggaaaagtacctttctgcactctaaaaaaatggaaattttaatgtgccttccaacaaatacaaggaaaccaagagagtaaggtatcatacaatgactgggatgtattgataatgctacaatgatccattaacagctcttgttcaggtactgctcgcaatcctgggaatgtgtgttacctgttatgtcttgagtccattatcttggctgttcttctaaaagtgatccgtctgtcattgtaatctggcattagagtcatgtcacaatattagagcatactggttttgccctctaaagtcgaggtgaccatctggtctttcttgctctgtaagagtttaagtccgggnnnnnnnnnnnnnnnnnnnggctttaattacccagtttaaatcccgttcgtttggccgaaatgggtcctgggaaaaaaagggatttaggagattccggtaaaaaaaggatgg

SEQ ID NO: 39335 - DNA, 785 bp, Macaca Mulatta
ggaagattaaacatttattatttcacagcccataagtcaggaatatgggagcagctaagttgggtggtgctgacttggggtctcttatgaagctgcattaagatgtcagctggctctgcactcatctgaagggtttactgaggctggaagacgcacttctgagatggctcactcatatggctgttggcaggaagtctcagtttctccccagctgttattagcaagaggcctcttcaactgagctgctttgaatgtcttcacgacgtagcaggtggcttcctccagagcaagtgatccaagataaaatacagtgctttttatgacctagcctcagaagttacatttattcagtatcctatttattacacaagtcagtgttactcagtgtagtcagggttttcacaagggcttagatactaggagttatgtatgatcgggagccagcctcctgtttttagcagtagtttttagttcaactttgttagagagattttttaaggtgggatttttttttccttgtatactaagacttttattttaaagatagatattttattccattatttttctattactatttactaaagttgcttgtggacaatggttttctctttaaaaggggtaaaaattttctttccgggctttttattttattggaatgggaaaactgtgggggccccaagaattctaccccttttgccattggaaggggggcaatccagggcttgaaaactttgagggggggttgctattgcctaaaaagagtggggaacggaatcaattcg

SEQ ID NO: 39336 - DNA, 721 bp, Macaca Mulatta
tggcgcgccggccatggtagcgctcccgaggcgctcttggccctgctgcagcagcggcagcagcgcgcgcgtcatcagggacaccgagccggggtacacgagccagcggcccagcgagtgggccagcgcgtaactagcgagctggccgggcagctcgcggagctgctgcaagagacactgcgcctggctgcgcaccccacgtggaggccgccccagcgcgtccccgcccagcgcctcgtcccgcagcagccacacgcctgccgcggcggccgcgcaggtcagcgcccggtggctgctgctcccgcccgcagcgcgcacatcatcccagcggaaggccacgggccagccgcggaatgtgtaggtgtagctggcggtcaggtagatcttgaacacgtgcaccagcgccttcacgaagcagatgacgcacatgggtggtggccccaacgcccagccactgggccggggtcgccacgagaggctcagggcagtgttaggggataccggctcccagccaggccctgatggcctttgtgacctggccttccagggccgagggaaggctgcatcctgttgctaggtggtggggcacaaagggttcccagagatgatgggcccaaggttctgcccctcccccaccttcgccaagaccccaccggccaaacgctcccaggcccagctttcccacccattatttgagcagctactctctccctctttctta

SEQ ID NO: 39337 - DNA, 995 bp, Macaca Mulatta
  misc_feature (1)...(995): n = A,T,C or G
aggctttgtgtggttcctaggaaggggcagtgatgtcatcatgcatgagatccgctgtgccataagaagtcgctcctttgggatttctggtccactgcagggaggtgaggcccagcctcatgtcaacacatgcccatcaaggaaagctgtggctaatgcttacaaaacaagtgaaaatcttgcacccagacccagggccacatctcattccatgccagctgctgagggagggaacagactgcaggacaatgtctcctagttcccactcagggttacatggctactcagaatgaaagagaaagtgtcaggcccgttgcaannnnnnnnnnnnnnnnnnnnnagatggagtctcgnnnnnnnnnnnnnnnnnnnnnnnnnnnnnntnnnnnnnnnnnnnnnnnnnnnnnacctcccgggttcaagcannnnnnnnnnnnnnnntnnnnnnnnnnnnnnnnnnnnnnnnncgtgccaccgcnnnnnnnnnnnnnnnnnnnnnnnnnnnnnnnnnnnnnnnnnnnnnnnnnnnnnnnnnnnnnnnnnnnccctgacctcaaatgatccacccnnnnnnnnnnnnnnnnnnntnnnnnnnnnnnnnnnnnaccacctcacccggccccgttgcaatcttattccactttgttttcacagcagtcccgtgacatgcctattattaggcctatttgatagatgagactgaaactcaatcggggtcacaagcaaagaccatggcacttgaaggctcagatccagccagtccgtctctggtggatcactgttgaataagctaatcgtttgggacaatgttaaacaaacttaatcgcatcccctcgatgtagtcccccacaggggcgacgggttggaacaacagggcgggaaaaggcacaaatcgggggaactttgttctgctcgtctccctcttctctcctccttgtccgtacagcagagacaacacgacagatagcaagaaacagtaacaaaaataaaagaga

SEQ ID NO: 39338 - DNA, 956 bp, Macaca Mulatta
ggtctgatccctctgctggctctggccaagggccagacagaccttcacagatgcctacttttggcctcatctctgcctgacaaggccagcacccaaagggttaatatttaacctctttttaaggacattggggtttgtttttggaaatgttctttagatggtggcacattcctttgggtatgttaacctaggcagtgggaggtaaatgggatgggatgtgagctgggagaagggctgaaccctcagcctcaactgtgtctagagcctcttgggaaaggggcacctctcttgaaccccaaatgctctctcttcttatcccccaaacccatggctctatttcttcttcacatccattgtctcttcatgtccattccattcccttccctttggccacacagacaggtggaaaaactgagacaggcagtttcagagatggacagagaactttattttggattgtggatgtggattttttttgtacataaataagaaaaaccaaaatactccaaagatgacttcccctgcctcctactcccagtatgacagaggaggatgtaaggccttagccatgatcccccagtggtttgggagtcaggcccggcctattgcttgggtctctctctatttatatatttaagttcacagtgtttcttattctgcccttagcttctagaggctcatggcccctgtggttaggcctggctcattctgcaccttttcaggggaggtagggaagacccctgtgcccctccttccccagtcctcttttttaaggctcatccaaggccctgaaaacctgtggttgtaaattttaccttttttattccccaaaagttggtaagtggaagcttcctcaccacaataataaaagagtttggtggaatggttccaaaaaaacaaaaaagagatgttatccagggaaaaaaagaagactattgtgtcggggcgcgccccta

SEQ ID NO: 39339 - DNA, 146 bp, Macaca Mulatta
  misc_feature (1)...(146): n = A,T,C or G
nagaactttgttatgtaaccttgttgagatcaaattgggatgctatgagttagaaccaaataaaagccagtctgctgaagattatcttaagtcttttatggagacggaggtgaagcccctgtggcctaagggctggatgcaggcaa

SEQ ID NO: 39340 - DNA, 166 bp, Macaca Mulatta
ttgattccccttcatggaattaagcataaacttaggtatattgatctacatagtaattgtatagatagtatccatcacttacttcagtgtacgataggattgcacttcctgaccaatcttattttggagaaagatggagatgataaccctgtctgtcgactaccag

SEQ ID NO: 39341 - DNA, 531 bp, Macaca Mulatta
  misc_feature (1)...(531): n = A,T,C or G
acagcacatatctgaatgagaagtcgctccaactgacggagaaatgcaaaaatctgcaatatggcattgagtctttctctaacaacacgaaagggtannnnnnnnnnnnnnnnnnnnnnnnnnnnnnnnnnnnnnnnnnnnnnnnnnnnnnnnnnnnnnnnnnnnnnnnnnnnnnnnnnagagcaaaacttgcttcctgctgtgatgctgttcaaaactttgttgtttctcagaataacactccagttgggactaacatgagttatgaggtggaaagcaaaaagaaaatcccaattaaaaagaacatttttcatatgtttccagtnnnnnnnnnnnnnnnnnnnnnnnnnnnnnnnnnnnnnnnnnnnnnnnnnnnnnnnnnnnnnnnnnnnnnnnnnnnnnnnnnnnnnnnnnnnnnnnnnnnnnnnnnnnnnnnggtgtaacctccccccaaccacaggagatgttagtaaagatgttggcagtaaaacaaatcttgtgactataaatcctagtatcataactctgaan

SEQ ID NO: 39342 - DNA, 526 bp, Macaca Mulatta
  misc_feature (1)...(526): n = A,T,C or G
ttagtagagaaggggtcacatgttagnnnnnnnnnnnnnnnnnnnnnngccnnnnnnnnnnnnnannnnnnnnnnnnnnnnnnnnaggattataggtgtgagccaccgtgcctggcctactattggttgatcttaaaagataccttgactcttatcactgaaacttatagattataatgtgattggtgacatttggagttgtgtaatattctggtcctgagaagtgactaaaacaataaacaaaacagcatattgtactttagatgctctattgctgaagaggcagtagaacttaggtgtctcagcaaatataagtatgttttccacactgtcaattactcttcccttaactttgttgtatcatttcattaaatcaccttatgagagtagtttttggagtcagactaacatgtatcagcttggtaagttgcaaatattccacattagttttggtattattattatcatcatcaacattttaattctgtggttgaaatccgtagaactaataaagtgccagatttag

SEQ ID NO: 39343 - DNA, 612 bp, Macaca Mulatta
gattctatcctcactgtgtcccatgtttccctctctgtgtctggggagagtctgtgggctacgatactggggtggacaggggttccatgggctcccctcccaccctcctttccccagtctgtgactcgtcagccactcccagtcacttagccaatgcttggacatctgtgagcagcaaagatctgggcccagggacgcctgcatgactcccacatgaaagcctctgaggcttctgttgcgagggccttggcgaaggcggaaagagctgtggacagccataagcatgaggatttctgttagcagatggcaggtactggttagtgctttggatacatcattagctaggtctcaaaagttggacattcccagtttctggtaggcatgagtatcaccagagtgttgcagaaatccttcccagagggagtagtggatggagtgagctcattctcatatgcacccccccagcccacccccagttgcaatggagaatattggtcataggtcctaaataattgctaaaatctggactatatttttggctttcaatttccttgtcaccaaagcagtaaggaagaggtgatgatctcttcctataagtcacacatcttccct

SEQ ID NO: 39344 - DNA, 127 bp, Macaca Mulatta
aaccaaaataactgtcaagcccctcttttcatggcaccgaccaactgtttcgaaacgtgtttacattcagccaaaataacttgtgaatattgtgttttgaaatgagagaaacatcgcctgacatcag

SEQ ID NO: 39345 - DNA, 2205 bp, Macaca Mulatta
  misc_feature (1)...(2205): n = A,T,C or G
ggagtgtctctgaagatacagtccaaagaaagttctccaaaacaaggagagcagtctgaagctggggatggcgacagcannnnnnnnnnnnnnnnnnnnnnnnnnnnnnnnnnnnnnnnnnnnnnnnnnnnnnnnnnnnnnnnnnnnnnnnnnnnnnnnnnnnnnnnnnnnnnnnnnnnnnnnnnnnnnnnnnnnnnnnnnnnnnnnnnnnnnnnnnnnnnnnnnnnnnnnnnnnnnnnnnnnnnnnnnnnnnnnnnnnnnnnnnnnnnnnnnnnnnnnnnnnnnnnnnnnnnnnnnnnnnnnnnnnnnnnnnnnnnnnnnnnnnnnnnnnnnnnnnnnnnnnnnnnnnnnnnnnnnnnnnnnnnnnnnnnnnnnnnnnnnnnnnnnnnnnnnnnnnnnnnnnnnnnnnnnnnnnnnnnnnnnnnnnnnnnnnnnnnnnnnnnnnnnnnnnnnnnnnnnnnnnnnnnnnnnnnnnnnnnnnnnnnnnnnnnnnnnnnnnnnnnnnnnnnnnnnnnnnnnnnnnnnnnnnnnnnnnnnnnnnnnnnnnnnnnnnnnnnnnnnnnnnnnnnnnnnnnnnnnnnnnnnnnnnnnnnnnnnnnnnnnnnnnnnnnnnnnnnnnnnnnnnnnnnnnnnnnnnnnnnnnnnnnnnnnnnaattcatactggagagaaaccttatctatgtatccactgtggaaaaaattttaggcgcagctctcaccttaatcgacaccagagaattcacagccaggaggagccctgtgagtgcaaggagtgtggaaaaacctttagtcaggccctactcctcacccaccatcagagaattcacagtcactccaaaaaccatcaatgtaatgagtgtggaaaagctttcagtttgacctcagaccttattcgacaccacagaattcatactggagaaaaacctttcaagtgtaacatatgccagaaagccttccgactaaactcacaccttgctcagcatgtaagaatccacaatgaagaaaaaccctatcagtgtagtgaatgtggagaagccttcaggcaaaggtcaggtctttttcaacatcagagatatcaccacaaagacaaactggcttgatgaggcgttctctccttgtagaacgtcagagagggcgcattgactatcaaacagcactttaggaaaagtcaccatagcccactgtggcatcagaaaattcttgggggctnnntgggggctccctgcctctattccttctcctttgctttccttgaagtcagctttggaccccaataatttcatcctagatgatatgataggatcaaagttaaccagcattcttcactgcaggacatctcaagagcttttaacataactgcatgattatatactctaagcaacagagagcttcatgactgagtaagggttttgaagtcagcagtgaatcnnnnnnnnnnnnnnnnnnnnnnnnnnnnnnnnnnnnnnnnnnnnnnnnnnnnnnnnnnnnnnnnnnnnnnnnnnnnnnnnnnnnnnnnnnnnnnnnnnnnnnnnnnnnnnnnnnnnnnnnnnnnnnnnnnnnnnnnnnnnnnnnnnnnnnnnnnnnnnnnnnnnnnnnnnnnnnnnnnnnnnnnnnnnnnnnnnnnnnnnnnnnnnnnnnnnnnnnnnnnnnnnnnnnnnnnnnnnnnnnnnnnnnnnnnnnnnnnnnnnnnnnnnnnnnnnnnnnnnnnnnnnnnnnnnnnnnnnnnnnnnnnnnnnnnnnnnnnnnnnnnnnnnnnnnnnnnnnnnnnnnnnnnnnnnnnnnnnnnnnnnnnnnnnnnnnnnnnnnnnnnnnnnnnnnnnnnnnnnnnnnnnnnnnnnnnnnnnnnnnnnnnnnnnnnnnnnnnnnnnnnnnnnnnnnnnnnnnnnnnnnnnnnnnnnnnnnnnnnnnnnnnnnnnnnnnnnnnnnnnnnnnnnnnnnnnnnnnnnnnnnnnnnnnnnnnnnnnnnnnnnnnnnnnnnnnnnnnnnnnnnnnnnnnnnnnnnnnnnnnnnnnnnnnnnnnnnnnnnnnnnnnnnnnnnnnnnnnnnnnnnnnnnnnnnnnnnnnnnnnnnnnnnnnnnnnnnnnnnnnnnnnnnnnnnnnnnnnnnnnnnnnnnnnaacttcagccctcagcctctgcaatccatatatatcctggtcttgggagtccatagaatactgtttccttctaataaaggtttcaaac

SEQ ID NO: 39346 - DNA, 733 bp, Macaca Mulatta
acatgatggtgtatcaccttggctactatgagacagtgaagtattcatcattcatttgatcttatgttaatcagtaagttctctttgaaattattctgattattggtaactttctcggttaaagcagtgaatatgattttgaaagagaaaatgacattgaaaggaatttttgttcccaacttcgcctgaatagatattattttaaaattgatttacatcactgaaataatttaaaattaatttaagctcacctaagtacagtatgttaaaattttgctgcaaaagcattatgagaactgtacatgaaaagtgtccagtactattcaatataggatatgagatgctaagactgaaaagtgctatcatttgccatttgaaatagtgctgggaaggaatcgggcataggtcaagggttaatattaatgtttctattaatgtcatttgcctgatttttagcttttatcaaagctgaaaattttaaatgaagtttcagtatagtttgggctactaggtagaaatagaattgttaaaatattgaatttaaatagtcttaaaacaggttttaactaagtaggcatatagttatgatgtacactaacaaatttaactttatatgtcagtgtattgaagacttaaattcaccaaagctttcacaaaacaagatgtgaacagttacaggcatagcatccattggcttatgaaataatcttaagctagtgattgacagttaact

SEQ ID NO: 39347 - DNA, 341 bp, Macaca Mulatta
tcttctccttagtaatctaaaatgtttaaatagtagtttatatttgtttctataactcagtggaatatattgaccaaccccactgatcaggttgaaggctaaaaagttaacacttgcttctaaatgatagattaacttcctctgttaaagttatagttttgatgatttgaataaggagatatttgagaggctaatataaggtgcctagagacagggctttctgttacattacattgtccatccccacagtggtgatggttagaattatctcatggccacatcctgtttggctattatcacctctgtttcattgcttcttggatcacagtcttttcaaatct

SEQ ID NO: 39348 - DNA, 642 bp, Macaca Mulatta
ggctcctttagattctcatcttaaacctctttggaacatgtttgaattccagaagtgaatgaacttcattcattctctcctccagatttcagaagggactgaagtgaatggaggctttttcactccctggcatgccaagagccacgatccctagctctgtgcctgcccagtgagtcttcagaatttggccatcgcatcctctgctagtatcatttccaccaccctcctcatcttctgtcgtctttatttcattcttatcgtttatctctacctccagttcagatgccatgctggctgtggctgttcatcaccatcagactgagacgtagatgtatcccggcctgcttatgaagactgataatacatgataatttttttccatgtggaggggtggtgctgtcctagtgattcacatatatgtgtaatttttgactccttacaataattctgggatgtgggtgttacccccatctaaggatgtggaaaccaaggctctgatgactctgtaatttgcccagggtcacactgctaggaagcaagttgctaatctgctgggttgcaaagtcacctgtctttttcctctgagcacatttctaagccactgcttagaagctcttgagataaagttggcctagctcaggt

SEQ ID NO: 39349 - DNA, 783 bp, Macaca Mulatta
  misc_feature (1)...(783): n = A,T,C or G
gggtcagaatcctttgctccattagaagggaggctgggaccaggctcctgaattgatttgcatacttccactttacctagctcagacaacatatggccatgtggagcacttggatttatttctgtttcctcaaattaaattcctgaaaaattggagaactccacagtttgttttgtgttacaaaaaattttagttccttttttgatcagcaaagcaacacaattttggnnnnnnnnnnnnnnnnnnctggattactttaaaaagagaatgttgatttgatttgcttccccccttctcttacccctttnnnnnnnnnnnnnnnnnngttgaatcttaaaacactgcatcatgttgcaaaatgtccatttaggcacactgaatagaaagtatcatcgagtcatttttattcttgtaattcagtaattttgtatcttttgcctttttctttttccttaatgttaattgtgtaactaaatgtctcaaacttgggacttttcactttacacatccctgtgtaaaaatacgtagagtcagatagaaaaaaataagactcagtgttaatagatcagtgaggtgggggactatacttacagtagtatgttgacatttccaatagccagaagagacaattcaatattcttaactaaagataatatgtagggaagctcatatcaatgactctatagcatcctgctatatgtcnnnnnnnnnnnnnnnnnnnnnnnnnnnnnnnnnnnnnnnnnnnnnnnnnnnnnnnnnnnnnnnnnnnnnnnnnnnnnnnnn

SEQ ID NO: 39350 - DNA, 750 bp, Macaca Mulatta
ggagatgatattgataatattataattaatagacataaccactctctttgtgattcatttctcacatctgtaatatggagaaaatagctgccctttctgttcagccaggatactctaaagacaaagtgatctattttgagtaccaatccagtaactcttcagtctcttctgcaattctccaggaatatgcttgtgaaaagtcaagtatgtcccttaaaataagttttgatattaatatctttcttttctgaaccttgatttcttcttccaaaccttgaagttgtctcaaaaggatacagcgttactcttgactgagaactcgttgctcgtatctacttttagatccagttcgttttacccaagagaacaaaatgtcaggatccttttaaagctcttcctgggcaatagtgaagtccctgtgccttgaatgtggattgtttgcctgtaaattgcattatctgtgcacaaggattagggtaattagcagcaacagcagcaacacacaacacaacagagtctgcgctttcagctcccactgtcagattcgaagctcccagccctgcttcctctggaggggattgaacgctcaggcgtcgatttcccagctgaccactagaagcgcgccttgtgcctgcaccgcaaggtgctgccatcgggaacttggaaagctgaatgcccccttcttggggggaaagtattgaaagacttgaaaacatgtggttttcattttcattggaaaaatgaaaaatc

SEQ ID NO: 39351 - DNA, 613 bp, Macaca Mulatta
ggggcgtccagggcttcggcagcctgaacacccggtgtgaaaggaaggtggcagccgtggagcgatgcgcatgcgcagcagctcactctgctgaagggctgagaggcgcaccggggccgccagctggggtcggagcggagcggggtcaggatggacgaggacgtgctgacgaccctgaagatcctcatcatcggcgagagtggggtgggcaagtccagcctgctcttgaggttcacagatgatacatttgatccagaacttgcagcaacaataggtgttgactttaaggtgaaaacaatttcagtggatggaaataaggctaaacttgcaatatgggatactgctggtcaagagaggtttagaacattaactcccagctattatagaggtgcacagggtgttatattagtttatgatgtcacaagaagagacacatttgttaaactggataattggttaaatgaattggaaacatactgtacaagaaatgacatagtaaacatgctagttggaaataaaatcgataaggaaaatcgtgaagtcgatagaaatgaaggcctgaaatttgcacgaaagcattccatgttatttatagaggcaagtgcaaaaacct

SEQ ID NO: 39352 - DNA, 795 bp, Macaca Mulatta
  misc_feature (1)...(795): n = A,T,C or G
gggaagaacaacatgatggttctcacatgtgtgtacgggtacgtgcacattcactcctatcgttactaaagtaagtcacctgaacgacatggcgcaaaaacaaccgcaaaccatttttagttatgtttcctagatgcctgaatcctttttcagattcttttctattagacaagtcacagtttgattatctttgaaagtcattgttatgtattgtgtggcgtatgtgtttatacatggaaaaggggcaacattaatccatcattttgggaaggcactgaatataatgttaaattttttgcaaacgtaatcatactttagatattctacaattattgcaacgtttttaaaaaacaaggttaaaggacatggttctttttagtgccactcagtatgctgtttcagtactaataatgcttgctttcctgcttggctttaaattccgcttaaggaaattgtgaaaaattgaattcactctactttggttagaaagtgtagaaatgttcatacatgggaactttcactgcctgctagaatggaaattcattggggagggggaaccatgtcgttttactacctaagagctgttgacacagtccctgcatctttcaaaggcatctttcatgccacacgggcaaactgtagccagcngaagaaacagaaagagcccttctcacaaatgtcaatctcaaaaaacttgcacagcagctgtgctaggtactgatgaagattactaccgaccccggtgcagggttttatgtgactaaagagacaactggctttctcagggaagcactt

SEQ ID NO: 39353 - DNA, 525 bp, Macaca Mulatta
cacgtcgcccacgcgcccgtacttctcgaacacgcgcctcaggctgtcgggagaggtccgtccccagttctcgaggacaacgaccacgaccacaaccacgaccacgaccacgaccacgaccatgaccacgaccacaagaaccccagctttcagtggaagggagaagaacctgggctgatttccccaggcccacctgcacccaggtgaaataaacagccttgttgctcacacaaagtctgtttggcggtctcttcacatgaacacgtgagacatttggtgccgaagacccgggtcagcgggactccttcgggagaccagtcacctgtcctcaacctcactctgtgaagagatccacctatgacctcaggtcctcagaccaaacagcccaaggaacatctcaccgattttaaatcagatttctagccatatgaagacaccctagctggacaatcagttcttgttaagaatctgatccctcaaactctacaacctcgatggaccggaacctacttagtcatctatagg

SEQ ID NO: 39354 - DNA, 392 bp, Macaca Mulatta
  misc_feature (1)...(392): n = A,T,C or G
ctgagctgctgcttctgtgctggggcagcttcctctgctacgccacacgggctgtgctctcggccttccacgagccacgctacatgtttattgccctgcacaatgagctgctgctttccactgccttcnnnnnnnnnnnnnnnnnnnnnnnnnnnnnnnnnnnnnnnnnnnnnnnnnnnnnnnnnnnnnnnnnnnnnnnnnnnnnnnnnnnnnnnnnnnnnnnnnnnnnnnnnnnnnnnnnnnagttctggaagctgggggctcctccccgagaggagatggtggatgaggtgtgcgaggacgagctggacctgcagcactcgggctcttacctcggcagcagcatcgcctcagcctggagcgagcgcagcctggaccctggagacattcgg

SEQ ID NO: 39355 - DNA, 860 bp, Macaca Mulatta
ggtattagccgtactcctggccctcggcccctcccgagtcccacccatcgctcaacctttggcccagccatcgccgagattcgagggtcaactggaggtggcgttggtgctccctgtggacttgcgttggcacccagaggccttggagggacaaggcactgggcagtgtgactggtcacggcacttgctggccctctggccggaggtcctcctagaagcccctactttcagtgcctggctgtagtggtgctagccaggctggggtccggcacctctcgccggtgtctgtgtgagtgagcgcgtgcgcacatttatgagcatctacttgcggctgtgctcagggccatctgaacccagtgcagagttatctcgaggaggaggccccgggtctccagcccctccggctcccctggggtttggcatatttgacgtggagccccatgccaagggatgcagctgttggtgtctgtccagtccattcaaggctagcctgcccacgcactgtggcaggggttggattggagggagagaacagagttgggaaaaacaacaggtttgagtcctataaagccataatttaactccagtacctgatgtcagacaagcttgtcctgtgtcctgtttgagtggcggcagcgccagtgcagcaagaaggctgggggtcgtgaagactgtccccagaccttgcttgcactatttggagaacccagggggctgccttgggccctctggccagagggaagggagcagctctagccctggagattgtggtcacattggggctcgtttaggagtggagggccaggtcacctccccagccacccttctctcctctgggaccccccactttagggtgactt

SEQ ID NO: 39356 - DNA, 683 bp, Macaca Mulatta
  misc_feature (1)...(683): n = A,T,C or G
gggnnnnnnnnnnnnnnnnnnnnnnnnnnnnnnnnnnnnnnnnnnnnnnnnnnnnnnnnnnnnnnnnnnnnnnnnnnnnnnnnnnnnnnnnnnnnnnnnnnnnnnnnnnnnnnnnnnnnnnnnnnnnnnnnnnnnnnnnnnnnnnnnnnnnnnnnnnnnnnnnnnnnnnnnnnnnnnnnnnnnnnnnnnnnnnnnnnnnnnnnnnnnnnnnnnnnnnnnnnnnnnnnnnnnnnnnnnnnnnnnnnnnnnnnnnnnnnnnnnnnnnnnnnnnnnnnnnnnnnnnnnnnnnnnnnnnnnnnnnnnnnnnnnnnnnnnnnnnnnnnnnnnnnnnnnnnnnnnnnnnnnnnnnnnnnnnnnnnnnnnnnnnnnnnnnnnnnnnnnnnnnnnnnnnnnnnnnnnnnnnnnnnnnnnnnnnnnnnnnnnnnnnnnnnnnnnnnnnnnnnnnnnnnnnnnnnnnnnnnnnnnnnnnnnnnnnnnnnnnnnnnnnnnnnnnnnnnnnnnnnnnnnnnnnnnnnnnnnnnnnnnnnnnnnatccaattcccttttgcctgcccaatccgcaaatattaaccactttcatatcaaaacttaatttggtttaaaacccccctttgaattgaacctccgggaattcaccgaaaccccccctattctggcctttgggaagattccaaaaaaaaaaa

SEQ ID NO: 39357 - DNA, 633 bp, Macaca Mulatta
  misc_feature (1)...(633): n = A,T,C or G
aataagatatttagctcaagacagtaaagacttctttttacttgaccaatagcgagctgctttgaagtcgtgagtatgaaattgtaattaaaatgtgaaggttccactcatctgtcatagtgacattacttcatggtattttacttcaaaggggctgatatgcatatggtaactattttcttttccaaagatgtatttgccgtaagtactgataacatgcatgtcatttttatgccaaatattacaagatactgctcatcagtattttcataccaaagaccattaaaatatataggttagcctgtaagtaaagatgagcagatttgaaataaatttatttagaggctgatagagaatctagctttagtagcaaaagatatcaaaggcctaagtttacataattaaaagcaatacaattatattggtatttatcagtgtttttattcaagtactttttatcagcaaattaaaaggaaaaaaccaaagatatttaaggttacctctgcatataggcaaatttagttgtacattaaactgttgtttcttgtttttatgttaaaccaaacatgtctcttcagaacccagtctgtatacnaataacatgcatggggacttgtcatttaatctgctgat

SEQ ID NO: 39358 - DNA, 668 bp, Macaca Mulatta
  misc_feature (1)...(668): n = A,T,C or G
ataaagggcatatacaaacaggatagaatatgagcatttaatgatttatataggcaccggaaatccaaaagcccctgtaaccttttctattcagagactttatccttctcttattcctacagttatagtctttcacagatatgttgaccttgtaaattaaagtgtaatttgattgcnnnnnnnnnnnnnnnnnnnnnnnnnnnnnnnnnnnnnnnnnnnnnnnnnnatacccaattcnnnnnnnnnnnnnnnnnnnnnnnnnnnnnnnnnnnnnnnnnnnnnnnnnnnnnnnnnncnnnnnnnnnnnnnnnnnnnnnnnnnnnnnnnnnnnnnnnnnnnnnnnnnnnnnnnnnnnnnnnnnnnnnnnnnnnnnnnnnnnnnnnnnnnnnnnnnnnnnnnnnnnnnnnnnnnnnnnnnnnnnnnnnnnnnnnnnnnnnnnnnnnnnnnnnnnnnnnnnnnnnnnnnnnnnnnnnnnnnnnnnnnnnnnnnnnnnnnnnnnnnnnnnnnnnnnnnnnnnnnnnnnnnnnnnnnnnnnnnnnnnnnnnnnnnnnnnnnnnnnnnnnnnnnnnnnnnnnnnnnnnnnnnnnnnnnnnnnnnnnnnnnnnnnnnnnnnnnnnnnnnnnnnnnnnnnnnnnnnnnnnnnnnnnnnnnnnnnnnnnnnnnnnnnn

SEQ ID NO: 39359 - DNA, 370 bp, Macaca Mulatta
  misc_feature (1)...(370): n = A,T,C or G
caggggccatttgtagcagcctttgcttcatcaaacctaggagatgtgtcccccaacattctcggcccacgttgcatcaacacgggagagtcctgtgataacgccaatagcacttgtcccattggtgggnnnnnnnnnnnnnnnnnnnnnnnnnnnnnnnnnnnnnnnnnnnnnnnnnnnnnnnnnnnnnnnnnnnnnnnnnnnnnnnnnnnnnaggaactgtatgcctctgcctcccaggaggtaacgggaccactggcttcagcacaccagtgggtggatatgacaaatgtgaccgtctggctcaattccacacatnnnncaaaaacatgtaaaccagcactgggctacagtttgcggctggcactat

SEQ ID NO: 39360 - DNA, 699 bp, Macaca Mulatta
  misc_feature (1)...(699): n = A,T,C or G
aaaagagaggcgagagcagagggagggggaggaagagagttcaaaccgaagtggatggaaggggactggggtttctgccgcgcagggagccgtgagccagggcgatggcgctaaggacggcgcggagcagctgcgctcccgaaaacgcgtctcctcgcagaagactagcaggcgtcgggaaggtctgcgccaacgggaaccaacttgtggctccaaaatgtacccaacgcagctggaaatgagatcaaagctgcagttgcatttgagaaggatgagaagaaccagcgattaggnnnnnnnnnnnnnnnnnnnnnnnnnnnnnnnnnnnnnnnnnnnnnnnnnnnnnnnnnnnnnnnnnnnnnnnnnnnnnnnnnnnnatttgcctaccaccccgtctgtcccctcacttcatcctccccatttgaaataaaagccccagtctcaacttacatcaccgccgcgcccccggagccactgccggctgatggaggagaaggggacccgggggctggcaggggccaccggcgagggaccgcatcccgcgtctccccggtgatcccggccccgaccgcggagttctgcaacacctggaggatctggaccgggtgcnnnnnnnnnnnnnnnnncagaggaaggaaaaggcaccccgagccttannnnnnnnnnnnnnnntagcggggggaggaatgggtttcttct

SEQ ID NO: 39361 - DNA, 602 bp, Macaca Mulatta
  misc_feature (1)...(602): n = A,T,C or G
gggattccagcggcggacagcacccgggccgagatgtctcgctcagtggccttagccgtgctggcgctactctctctttctggcctggaggctatccagcgtactccaaagattcaggtttactcacgccctccaccagaaaaatggaaagcccaaatttttcctgaatttggctatgggggtccggggatttccctcccatcctgaaattttggaaattttgaaatttacctgnnnnnnnnnnnnnnnnnnnnnnnnnnnnnnnnnnnnnnnnnnnnnnnnnnnngcccatttttttcccaaaaaaacctttgtggggcccccttttttttccccgccgcgnnnnnnnnnnnnnnnnnnnnnnnnnnnnnnnnnnnnnnnnnnnnnnnnnnnnaaatnnnnnnnnnnnnnnnnnnnnnnnnnnnnnnnncattaaaaaacacacctgtgggnnnnnnnnnnnnnnnnnnnnnnnnnnnnnnnnnnnnnnntagtgttgtggnnnnnnnnnnnnnnnnnnnnnnntttggtggggggctttttttttttttgtcccccctttctttgcccgcgtggggggggggggtagagaaaaacccccc

SEQ ID NO: 39362 - DNA, 629 bp, Macaca Mulatta
  misc_feature (1)...(629): n = A,T,C or G
ggcctaaggaagacaacttgcttttcttaaaagtaggtttttaagcaatgcttaacacaggcagtattaacttcaccttttgttcaggccaccaacatgtattgttaaaattactgcacatcccccctcagatatcaagtatacactgttcatgttagggnnnnnnnnnnnnnnnnnnnnnatgtatgtgtgtatgtacgcacgcatgtgtccccaatcttggnnnnnnnnnnnnnnnnnnnngaaatggtgatcgtggttttgggaaaaataccctgaaccaggggttgnnnnnnnnnnnnnnnnnnnntaaccccttaacaaaattnnnnnnnnnnnnnnnnnnnnnnnnnnnnnnggcttttcccttggaaaacttttggggannnnnnnnnnnnnnnnnnccctttgggannnnnnnnnnnnnnnnnnnnnnnnnnnnnnnnnnnnnnnngnnnnnnnnnnnnnnnnnnnggnnnnnnnnnnnnnnnnnnnnnnnnnaactcccccccgggggggcccccaaaccccnnnnnnnnnnnnnnnnnnnnnnnnnnnnnnnnnnnnnnnnnnnnnnnnnnnnnnnnnnnnnnnnnnnnnnnnnnnnnnnnnnnnnnnnnnnnnnnnnn

SEQ ID NO: 39363 - DNA, 682 bp, Macaca Mulatta
ggaatccaagctgcacagaaatcaaatggaaacatatttacttagtgtcaggaattgttctacagttttaaggtgaatgagattcttttcatgcaattgaatctatgccatgagaagtctaccctacccatcactgaggatgtacaaaagtcccagggaagctggtgatagttgtactcaggaaacttgcctttgacctccaaatacatctacagttgctgaaccatgagctactacagcagctattatggaggcctgggccgtggttctggaggctttggtggctgggtctatggctttggctgcggttgtggcagcttccgcaggctgggctatggctatggctatggaggctatggattcagctgctgccaaccattatactatggatgatatggattatctagcttctactgaagagtgaactcattctttggatcactagaatctgtgtatcatcctgacttaattctcctttcaggtctttttaccccctctgtcaactgcacagccactttcttgataaaccagacaaagcagcaaagggtgccttgtgaactcttcagagtgaagactcaattctggcaacaaacacaacagaaacagtggcagcagcaaggggaacccttcctgtagaatgacctagaatctcacctttcaagctaagaatccctctcttccc

SEQ ID NO: 39364 - DNA, 1268 bp, Macaca Mulatta
ttcttatctgtaccctgcttgcttgagagtatacttggataagaagtactgctattgagggagctataagagaaggatagttcttccagaagtaaataactcatctttagagtacccttaaatgaattttgtttttctttcttattttgaggtggattggtcttctcttttttgggtttccagctctttgacactctcagaccttatctttccagctcaaacaccattggtttaatgccctcattctcattagaatgcagcctgctgagtatgtgggtttcactgccggagtccgtccattagccagtatacatagagggtctgcttcaaatcaaggcaactggtgaagggctcagcatgttggcagcagtatccaagagattgaatctatttccattttcctcatctaggataacagctgcttgaagccagggctcttagccctttgcattcctctttagagaggaagccacactgcctttctgtgtctggttcagagctcttcttggcatgttttctggactacatgcacatgggcagctattgattaatctgcaaaacccagatcacttgcctacccataatatctgggaaggcgtggtatttgttttcaaagaaacgtttctttgggagggcagtttctgtctggactttgaggtggacttagttatccctacagttcttttaactctcagcttttaataaaagatgaaatcagatattgatgcagttgggtcacaattctttaggatgcttctaccccagggctgcttcctgttcctagtcatggttttccagtttagtagtggagtttcttgaggctaacttagagaaatttctcactgaaaactttaagagttattgatacttacttgttttttcagttaatcatttacatcacctttcctactctctggaatttaaatttatttctctaggctggtcctggaagttgataaccttttggcaaagcttagatttaggagaaggcttatgagtccctgtccagagggtctgtagattctctttgcttatgactctctgcctgcagccctggcagaacatactgtatgtcatggatacccagtggcaatattactgagatgaaacacattcccagggtatctaactctcatctgcaacttctaaggtgggagttgcaaagatgtgatgtgatatcttggcaatgaatttcaaggagttgcgggtaaacaacctgacttgaatcgactacaattcttgcggtacttccaaatttaacgaggtag

SEQ ID NO: 39365 - DNA, 543 bp, Macaca Mulatta
  misc_feature (1)...(543): n = A,T,C or G
acgaggctggtcgctgtactcgtgagctccagcgatccacccgccttnnnnnnnnnnnnnnnnnnnnnnnnnnnnnnnnnnnnntgcacgtagccctaagtaatttttttcaactgaccttattaatgacttcaatattttataccccaacagtctcgctaggagatcatttgcagtttacaaaatattttcattctactgtctcatcctagcttcataacatctctgcacgatagacaagagaggtcctagtaacctcattttattgacgataaataaagtttcagaaagattaagtgacctcccctgtaatgtgactactaagaaccaaaaactaaggtgtctggacttctgtgctttctacctcccatactgttattctgtagtgctcagaacgtgaaggtcttttcatgttataacactcaagttggcctgactgaacttccttacctcgagctcacttaaaccgcgggtgtcatcatggcaaggcctatacctctgctgcaaggcagtccatttatttgaaggcagctgctttgcgtc

SEQ ID NO: 39366 - DNA, 185 bp, Macaca Mulatta
tagcccctctgttgggtagagaggcactttcagggacttccctccagttgcctcttcatctgggagtgagctaagcaaggctgagcctcctcccgttgcttgaaataatggtgatataaaggccggatttggagtttgtatcccctggtccctttgggatgctcattaaaaccttcccacccctt

SEQ ID NO: 39367 - DNA, 436 bp, Macaca Mulatta
agatattggtatatatgacctaaaatataaaaaaaaacagagatgttgttttatgtacaagaattttggatgtaatttataatcatatacaatatgctggtttacaagtagtatttatacttatatatttaaatttatgttttgataaaatctaagcaattttagagattgctatgtattttaagtattttttcctctcctataaaagaaaaactgaaaatttattttgtacttttaactttcccataaacatatcaattctgtttcaagagaggcaatatctcattgcaacatcagaaagaataggaaaatgtctggaaaatgataactggcttcgacatgcaaaataaatgttcaaagatagaatcaaagggcaaacatcaaggtaaatacgaagaaataagctacacacagataataaagataatccacaaaa

SEQ ID NO: 39368 - DNA, 759 bp, Macaca Mulatta
  misc_feature (1)...(759): n = A,T,C or G
gggttttaattggtgtgtttaaggaaacctgtctttcaaaaaaatttcaaataaattttgtgttaggatataaaacatagaatagctatttaaatggttcgctcttctgtacttcattttatttctattgaaaaggctctttgaagtatataaataatttcaatggtttctaacagtattcttctaataggtgtaggttaaaaataagtagtttggcccaggaattaacttttaagagagctcaatatttttttaaaagaatgttttacaaaagtgttttgtttaatttttggtaaacaactagttatttgatatgtagaatttcactttacactcagattctcagaaatatttttgtttcatagaagtgagttctaccagtatagtgctttttaaattaattattaccagcttactagtagaccttgaattttcagccacagtgttagtcatgtgttttgggtagcccagctacctgtgtgtaagtggcacagctacttaaactcagtcttaattatgggcaagtctaagtctatctgggcctggagttcagacattttaccatgtttagaaatgttgtttcatgattttaatatttaaaaagtgcacatgccaaanatattaatatttaggttatttaattataataggaaatccaggggttcagaatctngtgtttaaatagaaatataccttatttctgttttcatagagctgatcaacagacatttaataacaatggctcaaattgatcaagcc

SEQ ID NO: 39369 - DNA, 846 bp, Macaca Mulatta
ccagggagcccagtctgtgtattcagatgaaattgtgaaaaacatgagtgtgtgccatggccagcgtgtctacacacagccactattgttcctgtgggctagcccccagcaaattaaaacactggcacggcccagcaaggccgttatgagctcctaaatagaaaacttctctgatggtaggaagatgaagagccaagatgctggtgaggcaggtgcagtgaggatccaaggcaaggaattgccctgagagaggtggctgcatatggagaaagggagatctctgtgggcaaggccagcttgcttcaggctgtagggggaatttggtctgaagcaacagggcacaaactgtcactttgagctgccaggttgtcttcatctcagaactttcctatcctggcactctagttacctttcttctatacattggcctcagtaactgcagtccaaaacaagttacagctgccttaatccactgagattctctatgagggggtgcagaaaagttttcctctagtttgcttatatgctcttttcatgttagcaaagaatatgagttagaatgttactgtggtagatctaaaggagaatgaacagaaggtgctggaggacctgttaaatgatctctggctgttaaaaaacatcaagatgagaattaagggtatatcctgatatacttggctgcttgcacatgaggctaggagatcccatgcctgttgaagttaactctagccctgacctctgttgatcttttaagaatgagggctgatttgaaggtgctgatgcaggatttcatttagctgctccccgttcaagtgacctatcgcgaggactgcagctgtatccacc

SEQ ID NO: 39370 - DNA, 219 bp, Macaca Mulatta
cttgaataatttggactctgattcttggactctcttcagttgagtccccagaatctcagggttccagaaataatgtctcactatatgaatccttatatagccccagcctttcttaactttcccagtagaagtagttcagtgcacactgcactgctccatttgaattctgcaacattctaagtagtagaaaattctatgtatttatccaaattagttgac

SEQ ID NO: 39371 - DNA, 778 bp, Macaca Mulatta
  misc_feature (1)...(778): n = A,T,C or G
ggaagccaggtggggtggcccatgtctgtagtcccagcagctcaggaggctggcttgagcccaggaattcaagaccaacctgggcaacatagccagaccccatctctaaaaatagaaaactaggtcatgtcacgtctggcactgaagcttaaacgacctccttcccattttcaggattaagaaggcttaagaggcctcccctccctctcttacgcacaaacacgcacactcaattctctcagattggatcccatagcttgctttctttttttgttggtgttgttttgtttgttttgagacagggtctcgctctatcacctaggagggagtacagaggtgtggagtacagaggtgtgacctcagcttactgcagcctagagcttctgggcttaagcgatcctcccaccttaccctcccaagtaactgggaatacaggtgtgtggactacacctagttnnnnnnnnnnnnnnnnnnnnnnnnnnnnnnnnnnncnnnnnnnnnnnnnnactctgcnnnnnnnnnnnnnnnnnnnnnntgcaaaccccatcttccagcgacactctatgaatcgggttcacacgatttctgctgtccacttactttcgacgtagcnngggaaggaccgtccagataggaaacaaaaaaagaaggaagaaaaaatgtcaatttttagaaaagaaaaaaaggagtatacaacgcaatttaaagaaaccatattattggagcaaggtagagtgtttatttagaactctcttatataatatctatacgaattaan

SEQ ID NO: 39372 - DNA, 631 bp, Macaca Mulatta
agccccaagcaggtcctggggaaagttgctctggagctgcttctgtgggctctctggagcaccggagcaggccctgagcccagcagagaaggctgcgctagaacagaagctgacgagcattgaggaggagccactctggagacatgtctgcaacatcaatgctgtcctcttgctggccatcaacatcttcctctggggctattttgcatgattccccagacctggcttcagtgtaaacagactaacaaagctcaagtctgtcagccacagaaacaggctctcctcttactttgctgtctaaactggagaccacagaagtcaagactgcaagatcccctgaggagaatccaactcaacctgcacacttgacgagtggagaaacagaagcccagagagagcactgggtttgttcagggccacccagcaggagtcacacggggtttccccactctttctgatacattgccttacagacctacctcaaacacactgtttccatcctcttgttgaatgtattcagtagctttactgaatgtgtgtcttgaggttagaaaagtggaggatacaagaaaaggagcagcaagaaatttgcaaaaatccaagagcacttttgctccccgttatcctcctt

SEQ ID NO: 39373 - DNA, 850 bp, Macaca Mulatta
  misc_feature (1)...(850): n = A,T,C or G
ttacatctatagaagatctaatagtcctagaaagggtggatggactggaagaccatcatgtagcagaagccattccaacaatgacagagttaaacactgaaatcgctcttttgcaagatctaaatccaattcaagatcaaggtccaagtcccagcccaagaaataaatgaaggctaaaatcatgttctaggcctgcattgcatgtcaaaactagaggcacctcttaaacagattccaaaacacattacaagtcttgctcaagacataaaaaggaatcaaggaagaaagaactgccttgctccaaatcccagtcaaggtcacagtctaggtctaggtcaaaatctagatcaagatcttggactagtcctaaatccagtggccactgatagtacaaaccatgatcatttttaggcacatatcattcatttgttcatagattcgttgacttaaattatcaggaatacaatgttgcaatgatgtttaacaaacacttgttagttttccctgtaccaggcaatggttatattaaaatgacatgctgttgagaagccactcttaagagtccagtttgtttaatgatatgggcagctaccaatttgttatgtctgtgtatatttttgtaaagattctcatttttatgcttgaagtatttggtgaaagatgttgaccgaccataatttgcaacattcttactaaaaataaactttcgtattcatatttcatagaactgttaacctagaannnnnnnnnnnnntaagatagaatgttacaaaagtgaagttgtagccacagtacaacactgattgctcagacacatttaggttcagcgtggacctttctgtcttatcaa

SEQ ID NO: 39374 - DNA, 801 bp, Macaca Mulatta
  misc_feature (1)...(801): n = A,T,C or G
gggggaccaggcacaaatcggtgcaggcaaagttttgctgcagtaggtccttgctctgtcagtgaaggtctcaactgaaaaaggccgaggctagcagtatgtggcaagatactctttcactatgctgggcagcagcaggagccacagctcacagtcaaccacaggatcacaaaggttgaaccaaagagaagttgttctgaggaaacaacttttcagaggcagaatgatggtcactgttgataaagagagtcaagctctataaactatttgaagaaatttattctgagccaaatgtgggtcatgctgtttcaagaagtggtctcccacagccatgggaagctctgcccctgtggcttttcagggtacagtccccatggctggctgatttcccgggctgacattgagtgtctgcagcttttccaggctcatggtgccagctgttggtggatctactattttggggtttggaggactgtggctgtctgtttcacgcaccactagggaatgccccagtaatgactttggtggggggggctccgggccaagttgcgcagcaggagtgcactgagggggagggccccaggaaggggcgtcacccccgacagagaaaatgagtaacagagaagggccgcagaagggtcccgggcgattcgcgggaaagcccgagggaagaggggggacggaagggagaaaaagaaaggaatgtaaaagggacggcggagcgggaaggaaggcggaagaccagaggaaaagccgcgggagacaaggcaaacaagaacagggggcgggggaaaccgccan

SEQ ID NO: 39375 - DNA, 625 bp, Macaca Mulatta
  misc_feature (1)...(625): n = A,T,C or G
atttgacagagttctgaaaaagtatgccttttatttctctaggccccggccaaaaaaagggtttaagattttggggggaggggggccaaatnttntnntttnttnnnnnnnnnnnnnnnnnnnnnnnnnnnnnnnnnnnnnnnnnnnnnnnnnnnnnnnnnnnnnnnnnnnnnnnnnnnnnnnnnnnnnnnnnnnnnnnnnnnnnnnnnnggctactttaacatctctttccttcttgctaacatgtgcccctctgtccagggaagcaggaaatatatggagatgaatgtggtgaaaatgaatctggagctctggccttctgagtctcttcctgtggttctacccttctcctggcctcagcctccagaagggtttctagctccaaggcaggaaagaggttcaggagctggtgccattgggttgtcccaatcagccatccctgtcctggtttctatggcaaaggttgagtgtccccagctaatctgatggagagctgcaagaagatgcatgagaggagggggaagggccacctctttgcactcttttgagtgaaggtgccctggaaactcgggacatggcagctgtcaccttggcacacgctgtcttgcttgtgtccctctccccc

SEQ ID NO: 39376 - DNA, 1031 bp, Macaca Mulatta
  misc_feature (1)...(1031): n = A,T,C or G
gggaggcattgaggcagccagcacaggggtttctgctgaagtggcaggcgcagcttgaggaacccgcagataagttttctctctttgaaagacagagattaatacaactacttaagaaatgtagtcagtagcttactaagattttgcttagcattaggttcttaacgtaatttgaataagattttaagagaaaatatgaagagttaaaagtgtagcgtgagnnnnnnnnnnnnnnnnnngtttctaaaacatgacggaggttgagacgaagcttcttcaagaagtaaaaaaatgtatttaaaagaaaattgagagaagggacgccagagccctgaattaataccagtagaagggcagtgcttttaaattaaaatgaaggtgatttaaacaaaagcttaatacgttgtttgaaaagttagtaaggtgattaaaaaataatttatgaaggccgattcattttggaaaatggagaatttaaaatccggaaggggtctatttaaaaaaagaaacgccttggaaaacttcccagtggaaccctcaaagggggaaggaaagctatgtccccattcccatattctataaaaaggcccccctaaaagcgtgttaaaaatttctccatataataaaagggcatcaattttttttgggccctaaaaaataatcggtgcggcagaaaactctgataacaaagctatttgaggggtaacgaaaggaagtctttaagattattggggggaaaaggtagggggctctaaggggggattggtaaaaacccgggntttctctgtggaaaaaaagagagaattttatctcaaaaattttttattgaaaaaaactttggtagaaaaaaaccactaaaatatacccctcgagaaggttatacagcggtcaaaagtggcgggcaaatcaaaaaaaaattcatattatcaagataagaagaaataagaaggggaaaaaaacttcggacgaaggaattgtggaagagtccagtttccctcttttttaggataagaaacgaaacatcctcaata

SEQ ID NO: 39377 - DNA, 646 bp, Macaca Mulatta
  misc_feature (1)...(646): n = A,T,C or G
catgnnnnnnnnnnnnnnnnnnnnnnnnnnnnnnncgaggctgaggctggaggattgcttaagcctgggaagtgnnnnnnnnnnnnnnnnnnnnnnatgaccctgaatgccagccagggcnnnnnnnnnnnnnnnnnnnnnnnnnnnnnnnnnaaagagttccaaagacagtaatacttatttttctttaccttttatatattagaagagaccttaaggattccaaattttctagaaacagtggttaaataacaaagtcgctcctaacaccaaatatgtaacttgttctatcaaaccaagtcttgaaatacaactacttcaaaagaaaatatgtgcttggcattcaacaggccttccataattgttcactgaaggttccatatctccaaatttctaaaagcttctgcatttggagaacatttttcaccaagattactcatttctttatcttacattatagccaggaagtatatttctccctaatacatgttttctcctaaactcaacagaactatatattaagatgctaaatacatgaatcataatgcttaagcaccaaaagcaattctaaatgtaaatgcaatctattactacaacaaaattagacaaaaatccttgtggtgaaaatgtatatatttttttaccc

SEQ ID NO: 39378 - DNA, 805 bp, Macaca Mulatta
  misc_feature (1)...(805): n = A,T,C or G
ggatttgtataagtaattgtctttcaattcatttcatgcttataagtttctgctatgtagtagtcattatgtcaggttattttttgctcttaggtggcccctagctatttannnnnnnnnnnnnnnnnnggacattagtggaatgccaaaaatggtgagtacaagcagctgtggatggtcactgtatcttctgtaatttttgcttcaagtataacggggaaaatagttaaactgtcagagtattaacatcttattcatgtctctaaatttccccaagattgtgtataccattgttacatgtaaagtaagtgatagcttgcttttctgtgaaagaatttctcttccctttgggttgggatggttagtggcaggaaatgttgaagaaaggaaaaagtgagatagtgtcttagtaaaacttgtaagagattttatttataatttattaattgagccttttgttctattaacattctttttacaggtttagtttataccgtttagagttgaccaatagtttattagtttaaaaagtactcttagccaggcaaggtggtgcgtgtctgtagacccaactgcttggggagactgaggtaggtggatcgcttgatcccaggaattcaagaacagtctggggtagcatgatgagaccctcgtctctattaaaaaccagcaaagtactccttactagtggttgattttgaaccctgggcctttgatcccaaagccagttctttgtcttcaatcctcaactcgaatttgatttaataaattttttgaaaacccttgcagcaacaaatttgggcac

SEQ ID NO: 39379 - DNA, 782 bp, Macaca Mulatta
  misc_feature (1)...(782): n = A,T,C or G
ggggctttgccatgttgcccaggatgctctcaaactcctggggctcaagtgttttgcccaccttggccctcccagagttctaggattacaggtgtaagccactgtgcctggctgagccattaacaggtgtttaaaagtggaaaaatgcagtcttaaatgaattatgggaaagcactaagtgtccaaagggtgaatactacactgcttatatcacatcaaatgcattaatattttgtttagannnnnnnnnnnnnnnnnnnnncattgcagctaatgtttccaccccaaacctcttaaatttttataatctggaaagatacatagaatgcactaaacatttcaggtattttgctaaattagtagttttatcaagcccttaaaagttttaattgctgagtgaatcaagttttttaaaggagatatatatacattttacctgaaaaaaagaagtgtttgttcatatcaggcagaaatggaacttttctatgtcataccccatgaaagtgcccaacttgatgtctttaggattggcagcttgtattttgacaatccctatatgtcaagttacagatgtcgtggttttaaattgcttttgccaaatgacttgggtttcactttttaaagggtggtttctttttactttgttttggtttgcctacccccatttacctttaaaaaaattgaatggctaaagtttgttttacggaattgaaaatcaaaaatatttttggccacacacccaattcttttaaaaaaatatctttttattataaaaaaaactt

SEQ ID NO: 39380 - DNA, 246 bp, Macaca Mulatta
ttacaccgttttgtgctgcttgataactgtcttttaaaattgatcacaaggagtgaaaacaaaataaaatgagggggcaaagggtaggagtattgggggaggggagagcaaagctatcgaatgcatcttagaattttgctcagaagtcactgctccctctcaagtgttgcattgtccctgcctaaaccaagaaggcccaacaaagcccctcctgtttgaattcttaaggtaagaaaattctaagct

SEQ ID NO: 39381 - DNA, 5530 bp, Macaca Mulatta
  misc_feature (1)...(5530): n = A,T,C or G
gccgcgcagggagccggctccctagggcccggcagcccgattcgggccggcgcgtccattccctcctccggcgcggcgtctcctcggggcttccccttgggcctcagcgccaagtcgggcggcggggccgggtcggtcccgaggcaaaggactagcgaagagctgcgggacgccacctccttgctgacggggggcgagggcggcttnnnnnnnnnnnnnnnnnnnnnnnnnnnnnnnnnnnnnnnnnnnnnnnnnnnnnnnnnnnnnnnnnnnnnnnnnnnnnnnnnnnnnnnnnnnnnnnnnnnnnnnnnnnnnnnnnnnnnnnnnnnnnnnnnnnnnnnnnnnnnnnnnnnnnnnnnnnnnnnnnnnnnnnnnnnnnnnnnnnnnnnnnnnnnnnnnnnnnnnnnnnnnnnnnnnnnnnnnnnnnnnnnnnnnnnnnnnnnnnnnnnnnnnnnnnnnnnnnnnnnnnnnnnnnnnnnnnnnnnnnnnnnnnnnnnnnnnnnnnnnnnnnnnnnnnnnnnnnnnnnnnnnnnnnnnnnnnnnnnnnnnnnnnnnnnnnnnnnnnnnnnnnnnnnnnnnnnnnnnnnnnnnnnnnnnnnnnnnnnnnnnnnnnnnnnnnnnnnnnnnnnnnnnnnnnnnnnnnnnnnnnnnnnnnnnnnnnnnnnnnnnnnnnnnnnnnnnnnnnnnnnnnnnnnnnnnnnnnnnnnnnnnnnnnnnnnnnnnnnnnnnnnnnnnnnnnnnnnnnnnnnnnnnnnnnnnnnnnnnnnnnnnnnnnnnnnnnnnnnnnnnnnnnnnnnnnnnnnnnnnnnnnnnnnnnnnnnnnnnnnnnnnnnnnnnnnnnnnnnnnnnnnnnnnnnnnnnnnnnnnnnnnnnnnnnnnnnnnnnnnnnnnnnnnnnnnnnnnnnnnnnnnnnnnnnnnnnnnnnnnnnnnnnnnnnnnnnnnnnnnnnnnnnnnnnnnnnnnnnnnnnnnnnnnnnnnnnnnnnnnnnnnnnnnnnnnnnnnnnnnnnnnnnnnnnnnnnnnnnnnnnnnnnnnnnnnnnnnnnnnnnnnnnnnnnnnnnnnnnnnnnnnnnnnnnnnnnnnnnnnnnnnnnnnnnnnnnnnnnnnnnnnnnnnnnnnnnnnnnnnnnnnnnnnnnnnnnnnnnnnnnnnnnnnnnnnnnnnnnnnnnnnnnnnnnnnnnnnnnnnnnnnnnnnnnnnnnnnnnnnnnnnnnnnnnnnnnnnnnnnnnnnnnnnnnnnnnnnnnnnnnnnnnnnnnnnnnnnnnnnnnnnnnnnnnnnnnnnnnnnnnnnnnnnnnnnnnnnnnnnnnnnnnnnnnnnnnnnnnnnnnnnnnnnnnnnnnnnnnnnnnnnnnnnnnnnnnnnnnnnnnnnnnnnnnnnnnnnnnnnnnnnnnnnnnnnnnnnnnnnnnnnnnnnnnnnnnnnnnnnnnnnnnnnnnnnnnnnnnnnnnnnnnnnnnnnnnnnnnnnnnnnnnnnnnnnnnnnnnnnnnnnnnnnnnnnnnnnnnnnnnnnnnnnnnnnnnnnnnnnnnnnnnnnnnnnnnnnnnnnnnnnnnnnnnnnnnnnnnnnnnnnnnnnnnnnnnnnnnnnnnnnnnnnnnnnnnnnnnnnnnnnnnnnnnnnnnnnnnnnnnnnnnnnnnnnnnnnnnnnnnnnnnnnnnnnnnnnnnnnnnnnnnnnnnnnnnnnnnnnnnnnnnnnnnnnnnnnnnnnnnnnnnnnnnnnnnnnnnnnnnnnnnnnnnnnnnnnnnnnnnnnnnnnnnnnnnnnnnnnnnnnnnnnnnnnnnnnnnnnnnnnnnnnnnnnnnnnnnnnnnnnnnnnnnnnnnnnnnnnnnnnnnnnnnnnnnnnnnnnnnnnnnnnnnnnnnnnnnnnnnnnnnnnnnnnnnnnnnnnnnnnnnnnnnnnnnnnnnnnnnnnnnnnnnnnnnnnnnnnnnnnnnnnnnnnnnnnnnnnnnnnnnnnnnnnnnnnnnnnnnnnnnnnnnnnnnnnnnnnnnnnnnnnnnnnnnnnnnnnnnnnnnnnnnnnnnnnnnnnnnnnnnnnnnnnnnnnnnnnnnnnnnnnnnnnnnnnnnnnnnnnnnnnnnnnnnnnnnnnnnnnnnnnnnnnnnnnnnnnnnnnnnnnnnnnnnnnnnnnnnnnnnnnnnnnnnnnnnnnnnnnnnnnnnnnnnnnnnnnnnnnnnnnnnnnnnnnnnnnnnnnnnnnnnnnnnnnnnnnnnnnnnnnnnnnnnnnnnnnnnnnnnnnnnnnnnnnnnnnnnnnnnnnnnnnnnnnnnnnnnnnnnnnnnnnnnnnnnnnnnnnnnnnnnnnnnnnnnnnnnnnnnnnnnnnnnnnnnnnnnnnnnnnnnnnnnnnnnnnnnnnnnnnnnnnnnnnnnnnnnnnnnnnnnnnnnnnnnnnnnnnnnnnnnnnnnnnnnnnnnnnnnnnnnnnnnnnnnnnnnnnnnnnnnnnnnnnnnnnnnnnnnnnnnnnnnnnnnnnnnnnnnnnnnnnnnnnnnnnnnnnnnnnnnnnnnnnnnnnnnnnnnnnnnnnnnnnnnnnnnnnnnnnnnnnnnnnnnnnnnnnnnnnnnnnnnnnnnnnnnnnnnnnnnnnnnnnnnnnnnnnnnnnnnnnnnnnnnnnnnnnnggggaaaaaatctatgcacttaacctacaaatctctggtgatgacagttgtattgttgctattacatggcataatgatctattatgtggtaggaaaatatagcctgctaaatcctacttaagttgatccactttaaactgagtaaccgtataaaacatctattgaaaattctttcccttttgacttagattctgccttatattaatttttgcatttttggtaacaaacctactacatatgactctaacctgataaatacttggtctctaatggctcttaataaatccttgaaatcacctatttcaattttatcagactattaccagagtaaaacttccttctgtagcaggcctctcattttttattatgaggtctgtttttaaatccttaatttgaacagctctaagatattgtcacttaggtcatctaaaaacttttagatatttgaacgtaagttcatttcctgttcatcaaagacattccgtaagttggcaaaagaaattggaagagagaaaatggaaggcttgatattcatgatggcattaaggttgataggttgaaagaatgataaaaacttaaaaccaggacctccattctgtcatgactgacaccatggtagtctgtcaacttgaccagtggaaagtcattcatttagcacaagcagctggagattgaaactgccagtactatgtatttggtgtataacgcaaagaagaaactttatccttgaatttgagggtgatggggtgggtcaggaaaggatggcgcagaattctacatgataatgaactaaaaaatgttgcttttcaaaggaagataaagcatnnnnnnnnnnnnnnnnnnnnnnnnnnnnnnnnnnnnnnnnnnnnnnnnnnnnnnnnnnnnnnnnnnnnnnnnnnnnnnnnnnnnnnnnnnnnnnnnnnnnnnnnnnnnnnnnnnnnnnnnnnnnnnnnnnnnnnnnnnnnnnnnnnnnnnnnnnnnnnnnnnnnnnnnnnnnnnnnnnnnnnnnnnnnnnnnnnnnnnnnnnnnnnnnnnnnnnnnnnnnnnnnnnnnnnnnnnnnnnnnnnnnnnnnnnnnnnnnnnnnnnnnnnnnnnnnnnnnnnnnnnnnnnnnnnnnnnnnnnnnnnnnnnnnnnnnnnnnnnnnnnnnnnnnnnnnnnnnnnnnnnnnnnnnnnnnnnnnnnnnnnnnnnnnnnnnnnnnnnnnnnnnnnnnnnnnnnnnnnnnnnnnnnnnnnnnnnnnnnnnnnnnnnnnnnnnnnnnnnnnnnnnnnnnnnnnnnnnnnnnnnnnnnnnnnnnnnnnnnnnnnnnnnnnnnnnnnnnnnnnnnnnnnnnnnnnnnnnnnnnnnnnnnnnnnnnnnnnnnnnnnnnnnnnnnnnnnnnnnnnnnnnnnnnnnnnnnnnnnnnnnnnnnnnnnnnnnnnnnnnnnnnnnnnnnnnnnnnnnnnnnnnnnnnnnnnnnnnnnnnnnnnnnnnnnnnnnnnnnnnnnnnnnnnnnnnnnnnnnnnnnnnnnnnnnnnnnnnnnnnnnnnnnnnnnnnnnnnnnnnnnnnnnnnnnnnnnnnnnnnnnnnnnnnnnnnnnnnnnnnnnnnnnnnnnnnnnnnnnnnnnnnnnnnnnnnnnnnnnnnnnnnnnnnnnnnnnnnnnnnnnnnnnnnnnnnnnnnnnnnnnnnnnnnnnnnnnnnnnnnnnnnnnnnnnnnnnnnnnnnnnnnnnnnnnnnnnnnnnnnnnnnnnnnnnnnnnnnnnnnnnnnnnnnnnnnnnnnnnnnnnnnnnnnnnnnnnnnnnnnnnnnnnnnnnnnnnnnnnnnnnnnnnnnnnnnnnnnnnnnnnnnnnnnnnnnnnnnnnnnnnnnnnnnnnnnnnnnnnnnnnnnnnnnnnnnnnnnnnnnnnnnnnnnnnnnnnnnnnnnnnnnnnnnnnnnnnnnnnnnnnnnnnnnnnnnnnnnnnnnnnnnnnnnnnnnnnnnnnnnnnnnnnnnnnnnnnnnnnnnnnnnnnnnnnnnnnnnnnnnnnnnnnnnnnnnnnnnnnnnnnnnnnnnnnnnnnnnnnnnnnnnnnnnnnnnnnnnnnnnnnnnnnnnnnnnnnnnnnnnnnnnnnnnnnnnnnnnnnnnnnnnnnnnnnnnnnnnnnnnnnnnnnnnnnnnnnnnnnnnnnnnncagagttacttcatttatgcgattttacttggaggaaatttatagtttactctaaattgactttttcttggaactttttcacctgctgtgaattgatatctagttagaaaaagctagcatttgcctacatcataactatatatgatatctagttagaaaaaacaagcaaaaagctattgcgagtttccaagagggacgattaatgtattttcatgccaaatgcaaatatttaggtgatcacgtatattttttcttgtgtgaatgaaaaatcaagaactgtacactgtttaatgaattctccatattcctttaggagatatttgctttgcaattacatgttacaattagaataattaccattaaaataatattacatgttacaattagattaatactgatgagagggggaaaaaagacacccttctgtttttttctctcaagccagtctaaagacttgaagagccatttaaaattaaatgtcactatacttgtattataaatcaatacatgagaaatttaaatctgttacatactcagtgcaacagaagaacccatatggaggttcaaccactaatgtattttgaatgatcctaaatataagtcttgggtggctaaattggccctctgcttaccagtctgaaaatgaaaccgattatactcatcggccttatttgctgtaatacaaattggttaaaaactgtgttaactgaatgccagtttcaaacaaattatctacattaagtcatcttaatgttttctctttaaaag

SEQ ID NO: 39382 - DNA, 148 bp, Macaca Mulatta
agtggaccatggtgggctggccgaggagaatggcatcaaggtgggggacaagttcctggcggccaacggtgtcaggtttgacgacatcagccacagccaggccgtggaggtgctgaagggccaaacgcacatcatgctgaccatcaag

SEQ ID NO: 39383 - DNA, 365 bp, Macaca Mulatta
  misc_feature (1)...(365): n = A,T,C or G
gggttgaactctctgagcttgtttcctcatctgtaaaatgagaatgaatcctatgctgcccaccttgccatgttgagtttcagtgagacaagagaaaacactaccaaaaaatcattccacagacttctgagaacagaaagtaccctcactcaagcttctcttgtaaacacagagaaggtgtctggatattaacatagagcagaggctaccaatttttgtttgttttaaatcaaaaatcctgcatgtgaaggcagtattcatgtcataattacaatttcaacatctgtgggtgtgaaatttttcaaaataaagagttgaggaaatatttcnnnnnnnnnnnnnnnnnnnnnnnnnnnnnnnnnnnc

SEQ ID NO: 39384 - DNA, 362 bp, Macaca Mulatta
tttaatcacctacttgatccactggcaggtatcctgctcatctcagtcatcatcttcatcagcccagccctggattcccccatgtacttttttctgtcctgtttgtccattagagatgttttctactcttcttccatagcccctaaaatgatctttgacttgatctctgaaaagaacaccatatccttcaatggctgcatgactcagctcttcgcagaacatttctttgcggcagctgagatcatcttattaagtgtcatggcctacgaccgctatgtggccatctgtaagcccttgcactatgcaaccatcatgagtcaccctatgtgtggattcctgatgggggtggctgggattctggg

SEQ ID NO: 39385 - DNA, 758 bp, Macaca Mulatta
  misc_feature (1)...(758): n = A,T,C or G
ggaagnnnnnnnnnnnnnnnnnnnnnnnnnnnnnnnnnnnngtttactccaggtatccttgtgttataactagaaattcctggaatcaaggtttcattttcttggcaaattagccccctgtaccaataaagctcactgtaccagtgtaacagatggccatctaaatcagagatccttggagcatatcagcttctgcatatagatcagcaagcaaaagggctgagaggagcgggccaaaaatggagtttgggtataagatagtttggaaagcattgtgttaacatctctatgcaagtgggaactgttttgggaaaacaagcttttctccctctgtcattccatgataagtagccactttggagagcagctcaaagatgttgccatctggttcacatatgttgtcacgtttgggggacaaaccctccattctgccaaagaaagtcataattttgtgtatttgtgagtgcagtgaaagggtgtaaatttaatgcagggctcatgtggctccatcagcagattcatgtgaaaaactggaggaactcggccaggcgtnnnnnnnnnnnnnnnnnnntcctgcactttggaaggccaaggctggcggatcacctgaagnnnnnnnnnnnnnnnnnacnnnnnnnnnnnnnnnnnnnnnnnnnnnnncaaaattatccccggcgtgggtggcacnatgcctgcaatccccagctactcaggaaagccgaaagccaggaaaatccccttggaaccccaggaggtgg

SEQ ID NO: 39386 - DNA, 784 bp, Macaca Mulatta
  misc_feature (1)...(784): n = A,T,C or G
gggaaggtccccaagacgggaggggacacatgtagccctgtcctccaggactcggctcttcctttttcaccttccaaggagctcaggttatcaatttcctttgtgtttttctgccagtgtgaacaggagaaatattagcctttagagatttctttacagttccttgaaagctggaggggtgaaatcagccagagaattatataacagcaaagctcatttaaagcaacagtgtctttctatagggctgtggtgattccttaccagtttttgttactaactataaggaaaaggaggctaattttgtgtataaagtagaggggcattcccttccctcattactttctgtttgttcattggacggacacaattcctagggtgttgannnnnnnnnnnnnnnnnnnnnntctgaagcctctttcaaggaagactaggggaaatcatgtacattaacctcaggcagacacagcctacttattcttgttagaaatcagaagaaaaaaaataaagagaaaagctttctaaagcatttgtttattttaatttaagagccatggagaattttataaatactcggctaaattcttcaaagggagccatgttctttaaatttaagcactaagctgggcgcaatggctcacaactgtaatccccgcactttggggaggctgaaatgggcccgatcacctgaagtcatgaagtaaaagaacagccctggcccaccagaagaaaactcccgtctttaccttaaattacaaaaccttaaccccggccccggtgggcatgg

SEQ ID NO: 39387 - DNA, 199 bp, Macaca Mulatta
gcatacccacctagattaatgagctagcccctgatctcagtggagattctttcttgtctttctgctgccttctcctccattcctctgctcagaacgggaactgtgtcagcagatcagggctggctatttgaggcttttggaagagtaaatccaagtcacagcttcctgtctctctgcgctgggcaggaccaaggctagg

SEQ ID NO: 39388 - DNA, 635 bp, Macaca Mulatta
gggggctgccgcggatgaaggcacactccacaacttttttccggccaggcccagacatgtccgtcctcgtaagataaaagcttccgtgggagccttccttcctaatcaagcctcgtggtggaacatcggacccttcaagaggaaggatgaaagctctacataggaacacgatgtgaatggaagaaacctgtcattatgcaaataatacgacactctgaacagaccctaaaaacagctctcatctcaaagaacccagtgcttgtgtcacagtatgagaaattagatgctggggaacagcgtttaatgaatgaagccttccagccagccagtgatctctttgggccgattaccttgcattctccatcagattggatcacctcccaccctgaggccccccaagactttgaacagttcttcagtgatccttacagaaagacaccctctccagacaaacgcagcatttatatacaggccattggctctctaggaaacaccagaattatcagtgaagaatatattacatggctcacgggctactgtaaagcatatttctatggcttgagagtaaactcctaagaacagttcctgtttccccaccaggtgttcctttagatcaatgagacacccaaacctcg

SEQ ID NO: 39389 - DNA, 2014 bp, Macaca Mulatta
  misc_feature (1)...(2014): n = A,T,C or G
ccgctggtgccgccgggtcaggcgctgacgggaccgggctgcggcaatcgttagcgggtcatgtcggccgcccagggctgggacaggaaccgccggaggggaggaggcgccgccggcgctggtggcggagnnnnnnnnnnnnnnnnnnnnnnnnnnnnnnnnnnnnnnnnnnnnnnnnnnnnnnnnnnnnnnnnnnnnnnnnnnnnnnnnnnnnnnnnnnnnnnnnnnnnnnnnnnnnnnnnnnnnnnnnnnnnnnnnnnnnnnnnnnnnnnnnnnnnnnnnnnnnnnnnnnnnnnnnnnnnnnnnnnnnnnnnnnnnnnnnnnnnnnnnnnnnnnnnnnnnnnnnnnnnnnnnnnnnnnnnnnnnnnnnnnnnnnnnnnnnnnnnnnnnnnnnnnnnnnnnnnnnnnnnnnnnnnnnnnnnnnnnnnnnnnnnnnnnnnnnnnnnnnnnnnnnnnnnnnnnnnnnnnnnnnnnnnnnnnnnnnnnnnnnnnnnnnnnnnnnnnnnnnnnnnnnnnnnnnnnnnnnnnnnnnnnnnnnnnnnnnnnnnnnnnnnnnnnnnnnnnnnnnnnnnnnnnnnnnnnnnnnnnnnnnnnnnnnnnnnnnnnnnnnnnnnnnnnnnnnnnnnnnnnnnnnnnnnnnnnnnnnnnnnnnnnnnnnnnnnnnnnnnnnnnnnnnnnnnnnnnnnnnnnnnnnnnnnnnnnnnnnnnnnnnnnnnnnnnnnnnnnnnnnnnnnnnnnnnnnnnnnnnnnnnnnnnnnnnnnnnnnnnnnnnnnnnnnnnnnnnnnnnnnnnnnnnnnnnnnnnnnnnnnnnnnnnnnnnnnnnnnnnnnnnnnnnnnnnnnnnnnnnnnnnnnnnnnnnnnnnnnnnnnnnnnnnnnnnnnnnnnnnnnnnnnnnnnnnnnnnnnnnnnnnnnnnnnnnnnnnnnnnnnnnnnnnnnnnnnnnnnnnnnnnnnnnnnnnnnnnnnnnnnnnnnnnnnnnnnnnnnnnnnnnnnnnnnnnnnnnnnnnnnnnnnnnnnnnnnnnnnnnnnnnnnnnnnnnnnnnnnnnnnnnnnnnnnnnnnnnnnntggtcgtacctagcctgctggaactggcatgggagaagctgcttgcggccttccctaaccttgcaaacctctcccgaacacagcttctgcatcttggactcacacagggactcatcgaacgcttgaaatgaggatttctggactgttcattgatactggaaatgttaatttaaagagactcctttatttatgggcagtgtagaatgtgctacaaagaggattggttaccctgatcaaggccttatttagaaaatacatcagatgcctttctgtaaattggtttttcagtttatggacatctcactttcccacgtgcttccttctttgcttctcttcctcctgacccattacatgcacatgtattcacatactccctcttccttctcgatggagttaagggaaagcctgaaagtaccttaataatgtttttaatcaagacagattcatttttaaaggaattctgaacagttccatgtcatacaatgttctagaaattaaaacatcaccaacataaacaaaaatgaaatttaaaaatttttacatctagcaacagcaacaaccacaagtttaagggaagctgagaaggctaaccttgggaatcttgcaggttatacttaaacctagatgtttaacttagtgttttcaagatgtgtctaattgactagtagctgggtctgatggcagcagtggttgccatcttgttgcatagataactcaaacctaccctttggctttgaaggaaggttaagcagcccagcacctcttggttagtgatttctttctcatcctcatggtgccagcagtgggtagagttggctgtcaaaggactcatatgtgtgtcgtggttgtgctctttgttgttgctcttagaaattatagcatcaagaatgtttcaaatggaaacacttgtggtggccaaagttcttcattctggcagttttgaaact

SEQ ID NO: 39390 - DNA, 814 bp, Macaca Mulatta
  misc_feature (1)...(814): n = A,T,C or G
ggtgctcagtcataaagaaagtctcaatacattcaaaaaattaaaagttttttgagcacattcttcaacaaaagtgcaataaaaatagaaatcaataccaaaaagagttcttaaagccacccaaaacatggtaattcaacaacttttcctgaataattcttgatttaagaattaaattaaaagagttttttgaaattaaatgaaagagagacatacctcaccaaaatctttgggatctatctaaagtagtgttaagaggaagtttaccatgctaaaggccttcatcaagaaggcggagagatttcaaattaacaatttaatcttgcacttacactaaccagaaaaaaaaaaggacatcccccaagcaaactgaaaataaataaataaaatcggagaagaactgaatgaaattgtgatgcaaaatgtagacaaaagataaataaaaccaagagtttgttattcgaaagaatataaaaagtttagactgttaactagattaacaaataaaaaaaggagatctaattaagcacaatcagaaatgacaaagatcacattacaacagctcccaaagaaatgcattatgaatgcctctgtgcacacagatttagaaatctagaggaaatagagtcattcttggaaacaacttccgaaagataaatcagaaaaaaagtgaaaaccctgaataggatgatnacaagttatcaaattggaattagtagtaaaaaaacttactgaccaaaaaaaacccctgggacaagaatggaatctccagcccaaattccaacaaattccaaaattttattttatatcccaa

SEQ ID NO: 39391 - DNA, 370 bp, Macaca Mulatta
tgtctgcaagcttccttcccttcagcaaatgctcagaatagctccattagcgttcatggaaattctgcacatgcatcaaggagaaaacagccacaaataacacagcctgctttccaaatctccaaagcacatctctgcaatcattctactttccaactatcaccactgaaggctttcagccagagagcaatttgttttcaacttactctgggttcctaagttagcagaactctttcgttttttaaacatgaggcttgctacttccagtctccctatcccggcttctcttccacatagcctattaatacaaaactgagcagttcctgctttgaatcagtctaatgccttctcctgatgctcaagacccttc

SEQ ID NO: 39392 - DNA, 818 bp, Macaca Mulatta
  misc_feature (1)...(818): n = A,T,C or G
ggggggttcatatattgcactaaatttgttgaacctgtggtaggcacatctcttaggataaatgcaaccaatacagtccacagattaaactttttaaatgtgtttcattatgaaaagacaaaatgtcatcaaagtgacagataaaattgtcttatgtagcaatgtgcattgatctcaatgagatatttctattattctcttacatgagaatattacagcaggaagaattaagtttagtttgcttcaccatgttaatacatgatcacaaaatgtgcatgagtgttactgacttatcttgtacagtactaggattcctgtaaccannnnnnnnnnnnnnnnnnctgtattgaaactggttcagtgttaaccaggcaaacatagttattcacaggttatttactttatgtttactaattctgcttagttattgttgaatatgttctgttccagattatttttattgttttgatgtttaaaacattttgcatactgtttatcataagacttcatgaagtaaataattttgcatataattgcaataagcactgacttttgaactgaaaagaaggaaagtgttttttgtgcagtgcatctgaagttcatataatagtcttgtactataatgtgctttactacacgataaatgacaaaaacaagccctgtttcatggtttcatttagtgcaaaaaagtcagaattcccccagtgtttttttttggcctggttgtaccctgcctgaaaactaccggtaagttggaaatattggcgggtagacatttttcaggttnnnnnnnnnnnnnnnnnnnaaaaggtggcttc

SEQ ID NO: 39393 - DNA, 647 bp, Macaca Mulatta
  misc_feature (1)...(647): n = A,T,C or G
tcatggaactttgctaggannnnnnnnnnnnnnnnnnnnnnnacagagtggagttagatgttcttaccatagaattttacagggttatatacagctttctttactgcattatatgtaggagtgtggtgcagtgcttttatctgtagcatataattttttttaattttccatttttcaagagtagtttctgctttgttaatatttatacacaggctacttgttgaagtaattaattaaaaatataaccaagtgcctaagtctttcagctgatgtactagatattaaattctcctaagttatgcagaatcgtttttacaattttgataaattatgcactaatgtaatggcagttttttaaaatgcagatttaagcctgtacattattgaatctgatgacttggcaaaagaatcaggtgctttcagctttcttgagaaaaccctgtatgtagcgtttgcactgactaacaagatggtattgctgggtttttaatttaaactaattaatttggatgttcattgcattatcttggttaaatattgtttattgttacttcatgttgggatttagttaatcttgttttttgactgttaggttgataagactatgaaccatgtaatagtagaacattggctaacatttattcata

SEQ ID NO: 39394 - DNA, 986 bp, Macaca Mulatta
gggggctctcggccttagcgccatttttctggaaacctctgcgccatgagagccaagtggaggaagaagcgaatgcgcaggctgaagcgcaaaagaagaaagatgaggcagaggtccaagtaaaccgctagcttgttgcatcgtggaggccacaggagcagaaacatggaatgccaggcgctggggatgctggtacaagttgtgggactgcatgctactgtctagagcttgtctcaatggatctagaacttcatcgccctctgatcgccgatcacttctgagacccaccttgctcataaacaaaactgcccatgttggtcctctgccctggacttgtgacattctggactatttctgtgtttatttgtggccgagtgtaacaaccctaaaataaatcacctcttccgctcttttagctgaagaattaacataggtacattcaaaaacagacaaaaaaatatgcaacagaccaacaccttatttacagagtatattagaagataatatataattacactcacgagatatcaccaataatttgccgtagcactcgtgaacgattcccacaataggaccctttgtctagtaacgaatactgcaccactgtcaactatcaagaacgtgtggattaataataaagacagagtggcacaaatgaggaacatcccgcttacactgatctttatcgtaggtacagcctcactcaagagtcgcccagtcataatatgacgcaaataatagatgggtaacaaagatatcatagaggacttttggtactattattgtataaaacacaaactctatgatgaacatacctgtagacaacacaaatagtggcacagcagaagtgtaaattgtgttcgcaaaacttctaaattacgcagaagatatcaactctatatagtctcgatcgctcgcattaaagcaagatcctgaaacgaataaagtttcccataagtttgccgatagagcgcttaaactgagca

SEQ ID NO: 39395 - DNA, 717 bp, Macaca Mulatta
gggtagaagctgagaaaagagacttaattagaaccaatgagagactatctcaagaacttgaatactcaacaggtatgaagaagtgcttttagcttttagttccattgctttatttttcttctgataatgctaggagttaatactcagcccatttctgttgctaatatttttttgttatggttgagtatagagttgtaatatcctattatttctcatactcatttatctttaaatcattatcaagtgtttaaagaagtgtctagaaagtgcaagaaatgaagaacatctcaaagaagtagtaatttggaccaaattttccatgcaaagatttttactataatgctatacataatatcagattggaagcactttaaatgttcatttgcaaagactgaactactgttcttcatttcatatggacatccttgctatataataagcatgcaatataagaacctatactcagctcatatttataaacaaattgaaaggagacaggggacttaaaataccttaaccataggactataggtatataaataacaactggatgtaagtcagggtggaaacttggacctctgaaagcaagttaaatggggtaagaaagttttcccttttgggtgggcctgggggccttggggggggcctccatggccctgggaaaatcccccagcacccttttgggggaaagggcccaaagggccccgggtggggaac

SEQ ID NO: 39396 - DNA, 791 bp, Macaca Mulatta
agaaattgtttcttacaggttgaaagactcatgggcatcacaaattaacatttactcctaatgcacatctagaatgtactttaaatacttattaagaagaatgaaaattctttggttgttttatatataaataaggcctatataatgacactgtgttccttgagggagcaggccctgtgagaatcaattcagtacagtattttttttgtcctttctccatccttgatcagagataaactattaaaactttaaaaaacactcaaaaatatttaaggtttttggttgaacctttagatttgctcataatgtttaacataacaacatttatttcaaattactgaattcatgaagatgtggacgcacttggtttgctctatttttgtttatgtatggtagtggttctgtcatcatcattcatgttttttaaggcctggtcataaaactttaaattttactggtgttacttgatgtatattctaaaaagagaatgcagtaactaatgccctaaatgtttgatctctgtttgtcattactttttcaaaattattttttttctgtaaagtataatatataaaactttttgcttaaattgaatttctatattagtggttaattgcagtttgttaaagggatcattatcagcaatttcatagcaagtgttctagtattttgtgtttttaaaacagaattaggaatttgagatatctgattatatttttcatatgaatcacagctgttgacaatgtcctatatatttaagaaattatatcatactgatactatttgtaaca

SEQ ID NO: 39397 - DNA, 872 bp, Macaca Mulatta
  misc_feature (1)...(872): n = A,T,C or G
gaactacgaggaaaatgttaaggatttctatatctggcaattaaaatacaggatttatacatttaatgctttatttccactaacaccactataaactatacaggactaatcctaaatgcacatgatttgggcaactcaaacagaaaatctgttttgcatttagttaaagacatggaaaaaacagtatttcacctccctaacatctaagtgtgctgagggcaatttgtttcaattattagcagcttacactatcacaaaaaattatactattacatgaagataagtactcaataatataacacaatgttagaaacatagatgataatgagacttttaattatggttaatcaaataaataacatgaaggtatcgaaagaaaccattaattttcaaatattactgctattatgaaacatgaacgcgttctaacacaacaaaggtcatataagtgtaaggtgatgttaaacttagcttcatgttatatgaaataaaatcctgagatgacacactgctttaatgtgtgaggtgaaagccaggctttcagtgctgnnnnnnnnnnnnnnnnnnnnnnnnnnnnnnnnnnnnnnnnnnnnnnnnnnnnnnnnnnnnnnnnnnnnnnnnnnnnnnnnnnnnnnnnnnnnnnnnnnnnnnnnnnnnnnnnnnnnnnnnnnnnnnnnnnnnnnnnnnnnnnnnnnnnnnnnnnnnnnnnnnnnnnnnnnnnnnnnnnnnnnnnnnnnnnnnnnnnnnnnnnnnnnnnnnnnnnnnnnnnnnnnnnnnnnnnnnnnnnnnnnnnnnnnnnnnnnnnnnnnnnnnnnnnnnnnnnnnnnnnnnnnnnnnnnnnnnnnnnnnnntatcctcccacctcagcctcc

SEQ ID NO: 39398 - DNA, 776 bp, Macaca Mulatta
  misc_feature (1)...(776): n = A,T,C or G
ggcaacctcccaggctcaagcaatcctcccacctgagcctccctgttttgtctattattgaattttaagtataaccaaataagatgtacttttttgtgtctggctttaattcggcataaatttttgagagttatctgtgctgatgcatctatcaataggtggttctttttgtattttttctgagtaggaatccattaccacaattcgtttatccatgctgttaatagctatgtgggtgtgttctagtttgggttcttacaaatagacctgctgtgaatactcatacacaagtcttttggtggacatttgcagtatttcaccaaggaacaaatctgaaactagaattgttaggccataggggagccaaacagtttacaaaactgaatgcatatgtgtacacttttgctagcaatagagttgtagttgtagtgcgcattttcatcagcacctgatattgttagtctttttcactttaagccctctggtgggtttgaggtgatatctcatggcttcatggtctcatggttttcatgtgcatttccttgatgatttcatgacttttctgtttatcttttaatgctgtcttgtggtgttttaatgaaatccagtttatcagtttttttatagtttgtttttttgtcccattttaagaaatcttttgtctaatccctcaatcaagaaagatatcnnnnnnnnnnnnnnnnnnnnttttaataatccgttgaccccaattcccattcacatctattcctcaaaaattaaatttttcccggggc

SEQ ID NO: 39399 - DNA, 819 bp, Macaca Mulatta
  misc_feature (1)...(819): n = A,T,C or G
ggggtcctttcttcggtccgtaagtccgaaatgacaaagaaaagaaggaacaacggtcgtgccaaaaagggccgcggccatgtgcagcctattcgctgcactaactgtgctcgatgcgtgcccaaggacaaggccattaagaaattcgtcattcgaaacatagtggaggccgcagcggtcagggacatttctgaagcgagcgtctttgatgcctatgtgcttcccaagctgtatgtgaagctgcattactgtgtgagttgtgcaattcacagcaaagtagtcaggaatcgatctcgtgaagcccgcaaggaccgaacaccccctccccgatttagacctgcgggtgctgccccacgtcccccaccaaagcccatgtaaggagctgagtccttaaagactgagacagactattccctggagaaaaataaaatggaaattgtacttaatatcgcatgttaagtgtatctgtgccagatagggtgggggttttgtgtgtgttagaccaggtgtgatgtgacacgtactactttgatggggaggaaagtttatttgnnnnnnnnnnnnnnnnnnnnnnnnntctgttggccaaggctgaagtgcaatgggtgcatctcagctcaattgcaacctccgccttcccaggttcaggggattccttctgtctcaacttcctgaattagctgggaattaaagggggtctggccaccaagccccggctaaaactttggaatttttgggtaaaaaacagtttcacctaattttggcccaaggcctgatcttgtaactttttgaacctcaatttaaacccccctggccttg

SEQ ID NO: 39400 - DNA, 935 bp, Macaca Mulatta
agacacatcctgtcaggtggatacctcctgccaggtggacctgcccttgaaccaggaagtggactcctcagatagtgaggtggctattactctcatcgatacttctcaacccggagacccactgagtctacatgaacccataaaaattgttatcacgatgagcagtaccccaaactccatgacagatttggaaagctccctccacctgaaggtggttggcatagagaagaccggtgtaaagtctgacgctgagccaactaacccaggggcggccagttctcccaatgccgagcagatctcaattcccgtgatcaccctggacctgcccgagggtgggggaggaggtgttccctgttctgaaggcaatggaagtgaaaggactccagagagactgaaggcaagggtatccaccaatcagtgttctggctatggatctggggaggggggaagtgccaccaaggatcacagttcttcctcacgggaaccctgggaatcagcgtcccggcttacacctgatacagcctctgagtctaaggtggggaaggaaggcctgactaaccttgacccattgtcttgtaagtccagccatgaaaagaggcatgcccgggtgctcagtgtggacagtgggacagatgtcttcttgagtaaaagttccgcagaaattgttaatgatacagagaaaacaatgccaacttccaaatctgatctagaggctaaggaaggacaaataccaaatgagtccaacttcctggaatttgtctccctgttagaatccattaatacttccaagatggccgcatccaatcaattgaatggctcagcagagcagaatgaagaaagtgggcttctccaaggtgcgattccacatcagttccgttctgatgatgacatagaaggcaatatgcctctttgccatttgccttctgtgatttgat

SEQ ID NO: 39401 - DNA, 641 bp, Macaca Mulatta
gccttatattttaccaaacaaagtgatgcatgcccattatagaaagtttgggaaattcagaaaataataggaaggaaaagaaaatcacttttaatttgcccctactctcttccctaaaataaatattgctagcattttgggtggttttcttttttaagtttttctttgcattaaataaatgataaagagacccttaacattcacagagttaatgttcacaatttctaatattcccaagcagcccggaaagtttgtgacatgtattaaattataattttgctgaggcacgtatttgaattgctcatgtcatgctgcaaatctggggtttgcaagtaaaacacttaactggcaagtgacctacccagctgtcctgagttcccgtttcaataaagctttgtggtgcttttacaataacttttgtgggggtctgaaaattacattaaaaattcatctgtaccttgctgtacttttggaagaagtggtaagataaggtatcttccatggatgtcaaaggccaattggacctttatgtagattttcgtagcccacattttcagataccattataacgagcgtgcctcccacacttgtaaaaaatgttataaatatttttcatggctgcataccattttatcatgtac

SEQ ID NO: 39402 - DNA, 596 bp, Macaca Mulatta
cgttggaggccgagtgagttaggtaagagcgttagcagccgccttaccagttgggccaggggcccctttcaggggcgccctctagtgcgtctttttcacacagcggccttttgggggtccccgggccgtgtggtgcgtgctggctcggctgagtagcgcccttacaggtttaggagctgacgtggctggaaactgggaagtctgttagaagcagtttacccctctgtagcctctgttttctaagctcgttgcaagccctcaggcgatcacttgaggcacaaactcgacgaattgcgtaggggtctgtagttattcacaaacgacaccgcggcttccagcacattgctcagtttatgaaatgagagggagaagatgccaaagtattggagttgtgcccggcttccctggagttgccaccaccttgcttatttctagatggtagacagtccctagctgtggaatcacgagtagttgaattaattacaatcatggaaggtcgcagccagatggaacccctgtcgctctaaggtattattggttaaataaacaaataaacaaagaccaataattatcggaaatttaacttcactaaccgc

SEQ ID NO: 39403 - DNA, 842 bp, Macaca Mulatta
  misc_feature (1)...(842): n = A,T,C or G
ngttcctggagtttgaggctgaggaggagatgcagattcagaaatcgcaactgatgaaggggccccagtgcctgcctcctccggccccaccgaggcttgaacctcaaggacttccagcccctgaggcggaaaagcagccannnnnnnnnnnnnnnnnnnnnnnnnnnnnnnnnnnnnnnnnnnnnnnnnnnnnnnnnnnnnnnnnnnnnnnnnnnnnnnnnnnnnnnnnnnnnnnnnnnnnnnnnnnnnnnnnnnnnnnnnnnnnnnnnnnnnnnnnnnnnnnnnnnnnnnnnnnnnnnnnnnnnnnnnnnnnnnnnnnnnnnnnnnnnnnnnnnnnnnnnnnnnnnnnnnnnnnnnnnnnnnnnnnnnnnnnnnnnnnnnnnnnnnnnnnnnnnnnnnnnnnnnnnnnnnnnnnnnnnnnnnnnnnnnnnnnnnnnnnnnnnnnnnnnnnnnnnnnnnnnnnnnnnnnnnnnnnnnnnnnnnnnnnnnnnnnnnnnnnnnnnnnnnnnnnnnnnnnnnnnnnnnnnnnnnnnnnnnnnnnnnnnnnnnnnnnnnnnnnnnnnnnnnnnnnnnnnnnnnnnnnnnnnnnnnnnnnnnnnnnnnnnnnnnnnnnnnnnnnnnnnnnnnnnnnnnnnnncagctagtggagaagcacctcctacccttgaaggagaaagagcatgcgagggcagcccctagtcatggcatggcctggttggactcaagttcttctaaatttgcagctggccaaggagcagagagagacgtccctgacccccaacaaggggttggcatggaaacctgcccaccccagacggcggaccgggaccctcagggacnag

SEQ ID NO: 39404 - DNA, 776 bp, Macaca Mulatta
  misc_feature (1)...(776): n = A,T,C or G
ggggagtcacgtgtcagtgcctgaggcagagactgcgaggaaaaaaacgcgcttcattccttcttccaccgccatactgtattttatactaaatctcatttttattacaacattttactcccgctcggtgagtaccttctcagtggcattcttgtcctattcttttttttgtcnnnnnnnnnnnnnnnnnnnnnnnnnnnnnnnnnnnnnnnnnnnnnnnnnnnnnnnnnnnacttctttgattattgtttatatttgggaaagctggaggagcatgattttgagccttttcctgaatccaagtttttctagcatgcgatcgttctgtagacaaggcgctgtgtctcggagtccgcggcgaccgtgcccgctgggagcgtctcccaagtccagcaaaatgtgcaactggttttatggaaaaagcgatgtgaagtatggtgccnnnnnnnnnnnnnnnnnnnnnnnnnnnncatgtttctaactcttttttttgcatactctttttctgataacatttttgtataggtgggattttacggcagtgtttacaagtttgtggtcttgcaatactggtgcaaaccactgagcaaagacattaattttatatttttgtgccctttttggaaaccggtgagaacaaatttcgtttttttcccctcctgttttttgatacccatttgataacctgaaaactttttccttaacagctggtggactgggggatnnnnnnnnnnnnnccnnnnnnnnnnnnnnnnnnnnnnncnnnnnnnnnnnnn

SEQ ID NO: 39405 - DNA, 1922 bp, Macaca Mulatta
  misc_feature (1)...(1922): n = A,T,C or G
gttatcaagaatactagagcaggcagtccagggctgatacagctgctccaatcgccagagatgcaatctcctactagatgtcttcacatctacctttctatgtcacatgtgcaagatggctgctctgccttcagacatcacatctacattccaggcagaaaggaggaggaaagagcaaaagatgtgttccaaccaaatccatcttaaaaacaaacaaggggaggggtggcaggagcaaattnnnnnnnnnnnnnnnnnnnnnnnnnnnnnnnnnnnnnnnnnnnnnnnnnnnnnnnnnnnnnnnnnnnnnnnnnnnnnnnnnnnnnnnnnnnnnnnnnnnnnnnnnnnnnnnnnnnnnnnnnnnnnnnnnnnnnnnnnnnnnnnnnnnnnnnnnnnnnnnnnnnnnnnnnnnnnnnnnnnnnnnnnnnnnnnnnnnnnnnnnnnnnnnnnnnnnnnnnnnnnnnnnnnnnnnnnnnnnnnnnnnnnnnnnnnnnnnnnnnnnnnnnnnnnnnnnnnnnnnnnnnnnnnnnnnnnnnnnnnnnnnnnnnnnnnnnnnnnnnnnnnnnnnnnnnnnnnnnnnnnnnnnnnnnnnnnnnnnnnnnnnnnnnnnnnnnnnnnnnnnnnnnnnnnnnnnnnnnnnnnnnnnnnnnnnnnnnnnnnnnnnnnnnnnnnnnnnnnnnnnnnnnnnnnnnnnnnnnnnnnnnnnnnnnnnnnnnnnnnnnnnnnnnnnnnnnnnnnnnnnnnnnnnnnnnnnnnnnnnnnnnnnnnnnnnnnnnnnnnnnnnnnnnnnnnnnnnnnnnnnnnnnnnnnnnnnnnnnnnnnnnnnnnnnnnnnnnnnnnnnnnnnnnnnnnnnnnnnnnnnnnnnnnnnnnnnnnnnnnnnnnnnnnnnnnnnnnnnnnnnnnnnnnnnnnnnnnnnnnnnnnnnnnnnnnnnnnnnnnnnnnnnnnnnnnnnnnnnnnnnnnnnnggtgtggtggctcacatctgttatcccagcactttgggaggccaacatgggagaattgcttgagtcaggagttctagaccagcctaggcaacatagtgagacctcatctctacaaaagtttnnnnnnnnnnnnnnnnnnnnnnnnnnnnnnnttaaacttagctaagcgtggtggtacacttgtagtctcagctacttaggaggctgaggtgggaggggccccgctctggctgtgactgctttatcacagggagtgcctatctgtgggctgctttctacacatcaaagtattttcagaaagagccaacatcagccttggaaaaaaggaggaagggccatggagagtctccctctatcttacccttatctgtgatgtgagagtgcacatgcccgtgtgcacatacactgcccgtcccacacacacacccacaggcacatagggtcgagaacctgctgggcagagcttaagccactgaatgtttcagtaggaatcatgatatctaaaaatagaatagctgataggttaagggggttctcactactcacagttcctggaattatatgcaattgcatcttggaaactcaacaaataaacagttagtatggaattaaggaatcaaagtttggtgaagttcaaagaagctgatgttactcacaagagtaaacagagaggagtccgggcaaaaagcttcacgcctgtaatcccagcactttgggaggccannnnnnnnnnnnnnnnnnnnnnnnnnnnnnnnnnnnnnnnnnnnnnnnnnnnnnnnnnnnnnnnnnnnnnnnnnnnnnnnnnnnnnnnnnnnnnnnnnnnnnnnnnnnnnnnnnnnnnnnnnnnnnnnnnnnnnnnnnnnnnnnnnnnnnnnnnnnnnnnnnnnnnnnnnnnnnnnnnnnnnnnnncacgccactgcattccagcctaggcaacagagcaagactccatctc

SEQ ID NO: 39406 - DNA, 838 bp, Macaca Mulatta
  misc_feature (1)...(838): n = A,T,C or G
ccgatgatcgagttcgactgcaagtagttcatcactatacagtgtataccaaccaaattttcttttaacttaataatttactatttttcttttcctgattatcacagaaaatttaaaagatacaaaaattccaaagaacaaaatgaaaattacctataatcccataaatcagagacagtcgttattaacatactgctctaagactctaaactctttaataataatagataacatggtggtgactgtgtctctggcccgtttaaatactttacattcagccgggtgtggtggctcacgcctgtaatcccagcactttgggaggccaaggcaggtggatcacgaggtcaggagatcgagaccatcctggctaacacggtgaaaccccatctctactaaaaatgcaaaaaattagccgggcgtggtggtgagcacctgtagtcccagctacttgggaggctgaggcaggagaatgacatgaacctgggaggcggagcttgcagtgagctgagatggcaccactgcactccagcctgggcgacagagtgagactccatctcaaaaaaaaaaaaaatactttacattcatcaattcagtttaatcctcataataacccgcgttaggtatttatttatttatttgtttacttattcaagacatgtttttcagcccccattatgtgttgngtccttagctaggtgcttagtatgcattagtaaatcaaacgaataaaaatatctgtcttctttgatttcacattctagcaggggaaattgctactaaacatatgataaataggttaattatatactacattagaagatgttagtgactaatgagg

SEQ ID NO: 39407 - DNA, 984 bp, Macaca Mulatta
  misc_feature (1)...(984): n = A,T,C or G
tacctgaagcggttcaaggtgatgaagcccaaggttctccgcagctggtgccggcagatcctgaagggcctgctgttcctgcacacgaggacgccgcccatcatccaccgagacctgaaatgcgacaatatttttatcaccggaccaactgggtctgtgaagattggcgacttgggcctggccactctcaaaagagcgtcatttgccaaaagtgtgataggtanaggtactcccgagttcatggcgcccgagatgtacgaggaacactatgatgagtccgtggacgtctatgcctttgggatgtgcatgctggagatggccacctcggagtacccctactcggagtgccagaacgcggcccagatctaccgcaaggtcacctgtgnnnnnnnnnnnnnnnnnnnnnnnnnnnnnnnnnnnnnnnnnnnnnnnnnnnnnnnnnnnnnnnnnnnnnnnnnnnnnnnnnnnnnnnnnnnnnnnnnnnnnnnnnnnnnnnnnnnnnnnnnnnnnnnnnnnnnnnnnnnnnnnnnnnnnnnnnnnnnnnnnnnnnnnnnnnnnnnnnnnnnnnnnnnnnnnnnnnnnnnnnnnnnnnnnnnnnnnnnnnnnnnnnnnnnnnnnnnnnnnnnnnnnnnnnnnnnnnnnnnnnnnnnnnnnnnnnnnnnnnnnnnnnnnnnnnnnnnnnnnnnnnnnnnnnnnnnnnnnnnnnnnnnnnnnnnnnnnnnnnnnnnnnnnnnnnnnnnnnnnnnnnnnnnnnnnnnnnnnnnnnnnnnnnnnnnnnnnnnnnnnnnnnnnnnnnnnnnnnnnnnnnnnnnnnngcaggatgtgggcagcccggacagaccaggggtccgccggtgcccctgcaggtccaggtgacctaccatgcacagactgggcagcccgggccaccagagcccgaggagccagaggccgaccagcacctcctgccacctacgttgccgaccagcgccacctccctggcct

SEQ ID NO: 39408 - DNA, 3227 bp, Macaca Mulatta
  misc_feature (1)...(3227): n = A,T,C or G
ggtgcgtgggtcccaaggtgcgctgcagatggagaatcagaatcccttgggcatcactgggcggggcacgtccctgtccctcggctcccagacccaggctagccgctaccaggactcgtatcgagagctcttcagatactttgtcagaacccttaaaggtgggtgacgttctcaggaggaacctgggatgttccgatgctcaacgggtagatgccttccaggctgcagtcagtgcagatgatatgccaatttcaggtggaaaattgcattccagatactgggttcagatttgaaattgtccatctcagtgatcatttgtgttgcttgtactcgaggaagattctgagagacgctcctttggggttctgtgcatgtaccatgttgcctggcaagtcctaagaaatcttctagaactccgaggtttataaaatgatgactacttctgaactcctgagatctagtggataccacgtgtcctggagataggacgccttctaccctctgtcagtcctgggggtgactgggaaccagggaggtggaacagaattccgggacctgggttgggcttgtccaagaggggcaggtgggtctctctaggaccagtgtcccaccccgaggccagtggcccattcacatgtcccaacaagaatactgtctggctccgatgtgttgggttttatcctgaatctgtgcaaatcttcaagggaagaacctcctgaaatcaccaaagagcagttcctcaaaggcttccgggcggccgtggccnnnnnnnnnnnnnnnnnnnnnnnnnnnnnnnnnnnnnnnnnnnnnnnnnnnnnnnnnnnnnnnnnnnnnnnnnnnnnnnnnnnnnnnnnnnnnnnnnnnnnnnnnnnnnnnnnnnnnnnnnnnnnnnnnnnnnnnnnnnnnnnnnnnnnnnnnnnnnnnnnnnnnnnnnnnnnnnnnnnnnnnnnnnnnnnnnnnnnnnnnnnnnnnnnnnnnnnnnnnnnnnnnnnnnnnnnnnnnnnnnnnnnnnnnnnnnnnnnnnnnnnnnnnnnnnnnnnnnnnnnnnnnnnnnnnnnnnnnnnnnnnnnnnnnnnnnnnnnnnnnnnnnnnnnnnnnnnnnnnnnnnnnnnnnnnnnnnnnnnnnnnnnnnnnnnnnnnnnnnnnnnnnnnnnnnnnnnnnnnnnnnnnnnnnnnnnnnnnnnnnnnnnnnnnnnnnnnnnnnnnnnnnnnnnnnnnnnnnnnnnnnnnnnnnnnnnnnnnnnnnnnnnnnnnnnnnnnnnnnnnnnnnnnnnnnnnnnnnnnnnnnnnnnnnnnnnnnnnnnnnnnnnnnnnnnnnnnnnnnnnnnnnnnnnnnnnnnnnnnnnnnnnnnnnnnnnnnnnnnnnnnnnnnnnnnnnnnnnnnnnnnnnnnnnnnnnnnnnnnnnnnnnnnnnnnnnnnnnnnnnnnnnnnnnnnnnnnnnnnnnnnnnnnnnnnnnnnnnnnnnnnnnnnnnnnnnnnnnnnnnnnnnnnnnnnnnnnnnnnnnnnnnnnnnnnnnnnnnnnnnnnnnnnnnnnnnnnnnnnnnnnnnnnnnnnnnnnnnnnnnnnnnnnnnnnnnnnnnnnnnnnnnnnnnnnnnnnnnnnnnnnnnnnnnnnnnnnnnnnnnnnnnnnnnnnnnnnnnnnnnnnnnnnnnnnnnnnnnnnnnnnnnnnnnnnnnnnnnnnnnnnnnnnnnnnnnnnnnnnnnnnnnnnnnnnnnnnnnnnnnnnnnnnnnnnnnnnnnnnnnnnnnnnnnnnnnnnnnnnnnnnnnnnnnnnnnnnnnnnnnnnnnnnnnnnnnnnnnnnnnnnnnnnnnnnnnnnnnnnnnnnnnnnnnnnnnnnnnnnnnnnnnnnnnnnnnnnnnnnnnnnnnnnnnnnnnnnnnnnnnnnnnnnnnnnnnnnnnnnnnnnnnnnnnnnnnnnnnnnnnnnnnnnnnnnnnnnnnnnnnnnnnnnnnnnnnnnnnnnnnnnnnnnnnnnnnnnnnnnnnnnnnnnnnnnnnnnnnnnnnnnnnnnnnnnnnnnnnnnnnnnnnnnnnnnnnnnnnnnnnnnnnnnnnnnnnnnnnnnnnnnnnnnnnnnnnnnnnnnnnnnnnnnnnnnnnnnnnnnnnnnnnnnnnnnnnnnnnnnnnnnnnnnnnnnnnnnnnnnnnnnnnnnnnnnnnnnnnnnnnnnnnnnnnnnnnnnnnnnnnnnnnnnnnnnnnnnnnnnnnnnnnnnnnnnnnnnnnnnnnnnnnnnnnnnnnnnnnnnnnnnnnnnnnnnnnnnnnnnnnnnnnnnnnnnnnnnnnnnnnnnnnnnnnnnnnnnnnnnnnnnnnnnnnnnnnnnnnnnnnnnnnnnnnnnnnnnnnnnnnnnnnnnnnnnnnnnnnnnnnnnnnnnnnnnnnnnnnnnnnnnnnnnnnnnnnnnnnnnnntcctggcggcatctttcccttttgccttggtcttttcaatcgttgtttaaggccaatttctaaaaagactgaggcctccnnnnnnnnnnnnnnnnnnnnnnnnnnnnnnnnnnnnnnnnnnnnnnnnnnnnnnnnnnnnnnnnnnnnnnnnnnnnnnnnnnnnnnnnnnnnnnnnnnnnnnnnnnnnnnnnnnnnnnnnnnnnnnnnnnnnnnnnnnnnnnnnnnnnnnnnnnnnnnnnnnnnnnnnnnnnnnnnnnnnnnnnnnnnnnnnnnnnnnnnnnnnnnnnnnnnnnnnnnnnnnnnnnnnnnnnnnnnnnnnnnnnnnnnnnnnnnnnnnnnnnnnnnnnnnnnnnnnnnnnnnnnnnnnnnnnnnnnnnnnnnnnnnnnnnnnnnnnnnnnnnnnnnnnnnnnnnnnnnnnnnnnnnnnnnnnnnnnnnnnnnnnnnnnnnnnnnnnnnnnnnnnnnnnnnnnnnnnnnnnnnnnnnnnnnnnnnnnnnnnnnnnnnnnnnnnnnnnnnnnnnnnnnnnnnnnnnnnnnnnnnnnnnnnnnnnnnnnnnnnnnnnnnnnntgagcccctcggagatggaggtttagtcatgagaaccagtcattggaacatacactttattatgttacaaaaacaaaaatccccactgaaacacagctaaaaaaataacacattntcccaagattacattaccaaaaacagttgttacgtcattggagggcgtccattaatactgctcggagaagcaccagcctacatggacacacagatggggtcgcgtgtccaccctaaagcattcaagtgctttaactgg

SEQ ID NO: 39409 - DNA, 728 bp, Macaca Mulatta
  misc_feature (1)...(728): n = A,T,C or G
gggtcacgccttgaaatctggccaatttgctgtgcatctctaaccctaatattattatcatttttcctgcaggtcagtgacttatcattaacttgtcactttaaatggaactgtgtacacatcccaggaagtaatctgcgtctataccntgnntattgtatttctgaagaaaagttattcaggagcaaagtatgaaatgaatatgttcagaggaaatctatgattgctgtttaccattattaccaaatgaaaatctgaacatttgtcagaatcagaaatataagaaactataatctcattaaacatttagtaatgtgtgctcattcataattatgggattttcctaatgatgaaaaaattttggtgnnnnnnnnnnnnnnnnnnnnnnnnnnnnnnnnnnnngcaattaccccccgtttcccctttttccaaaaacccccaagtttttcccagggtttgggnnnnnnnnnnnnnnnnnnnnnnnntnnnnnnnnnnnnnnnttattcccccgggnnnnnnnnnnnnnnnnnnnnnnnnnnnnnnnnccccccctttttgaaannnnnnnnnnnnnnnnnnnnnnnnnaaaannnnnnnnnnnnnnnnnnnnnataacacccnnnnnnnnnnnnnnnnnnnnnnnnnnnnnnnnnnnnnnnnnnnnnnnnnnnnnnnnnnnnnnnnnnnnnnnnnnnnnnnnnattgtatacaanaacacacccccccc

SEQ ID NO: 39410 - DNA, 593 bp, Macaca Mulatta
aaccagcccctagtgagcaaagtgacagaagctgccccagagtttgggaggaagatagaggcaaaagatgtagaaggaagctgtaggggtgggagtgatgcctcaggagcaaaactgaggaattccctaacggagccagtccctgggaaaagaggctcccctaaggctcttcttgtctagccccacacctggtggagcccagtacccagcctcgccccacacctggtggagaggccctgttgattacacgctgtcagcatcctcaaacccagcactaattgcacaattttcctctcttctagtgagcaagagcctgaggaagtagcagaaagggatgtgggcccatgtgcagttctgggaccctggcaccttggctcagggaagacctgagctcctttcactgctgaccctctccagggactggggagagggctccggagaacctggttcttgcttactgttctccctttgggccctccttcccaagtgcaaacaatcctggtccattcagcatcaggcccaatggacatagtgaagcagtgattatccctcccctgcctctccataggctggtctttgccctcttctttgct

SEQ ID NO: 39411 - DNA, 807 bp, Macaca Mulatta
  misc_feature (1)...(807): n = A,T,C or G
ggtgatgggaatttgttcaacatttttctttaaagtgatcttaaaaatagagattgatataattagttgatgttaaaatgaagccaatctctcttctatttgcttatgatagcagctaaagtctatgaagattccagtgatctcatgcataaagcaaaccagtgccataatgtgcttactgcgccaaaatcaatgccatatatttttgattggtttataaaatgtataaccaagtaatatagcaaatagcatcataattaaagtcagaagaagggttaagaaaatatttatagtaatgtgacaagatattatatctctagtatgcaaagaatttgtacatattgtgaagaaaaggacaaagtaccaaaaggataaatggctctaggctatgaatacatacctcatagaaggaggaaagtaactggctaataaatgtatgaaaaatacattaacaagttacaaaagactanaatgactaattttcatttgatagcattttatttttcagattggcaaaaataaagaatctttataatgttgagggatatggacacttccaaatattgctgatttgagcatcagttggtacaactttttttgggggaagtgtaggcaaatgtttaatctcctaaaataaaaacatgcttattgtttggcacagcaaaacacctttgggggaactccccccattagaaatggaaatatttaatatggaaggaaataattaatatttccaagggatgctatttacacccagggttttggtaaacccaaaagacccggaaaaccacctaccttttacccttg

SEQ ID NO: 39412 - DNA, 572 bp, Macaca Mulatta
tgtttacccatctggagagcctaaacagtaaatacagaggatatcaatgcccagaatagttagagtattttgatgaaatcctatttttagatgataaatttcaagatgtgtctatagtatattgtttaaaacaaagacatttgagacgtacataaagtagacatttttaatttagggaaacttatatgcccttttataagaagccattctaataaaataatctgactacttggcccaaaatacagtaagtatcaatttctaacggagaccaaagggaagctgagagcctttctttttatgtactgctgttggatcgctgaggccgcctcttgtaacgcccgacagaacccggcgaggctctgtgggcttcccgcggccctcagggaggctgcagaggcccctcgtccacatcaggaggccgccgtcccacaccccccccaaagcctgtcctcgcctgcggtttttgcagagctcgcggttggaggtggaaatttagaagctctgtgttgcaggcgaggccgtagcacccccaggcagctcttagcagggacagaccaatcccgtctcgctgg

SEQ ID NO: 39413 - DNA, 326 bp, Macaca Mulatta
gtcattgactcctaaggtcttcagtaaaaaatgttatagaggatgaataaatcaggatatcctttgacagatgcagttgaaggtataactataatgcatgtttttcaggcatgtccttatattactctcaagtacgaaaagctgtagacaacattttaaggcaccttgataaagaagtaggaaggtgtatgatgctgactaacgtacaaatgttaaacaaagaaccagaagacatgatcacgtgagtacagtaaagactaagttatcaatgaaagattaaccagaagacacaagtcgagagtattctcatttattctgtattttgg

SEQ ID NO: 39414 - DNA, 411 bp, Macaca Mulatta
tggacataccggttccctccatcttgatcgacatcagccaggactggcggctgtggtgttttgtcagctgggtatgttatgaacgggaggtgaccctgctggagcgatggatcgaggacctgcgcacaagagtggtgctgaggattggcagtgcccacttctatgccatcgtgtgggtgaatggggtcgacacgctggagcatgaaaggggctacctccccttcaaggctgacagcagcagcctgttccgggtggggtccctgccctcctgcctctgcgtcactgtcgtcatcaacaacatgcttgcccccccaccctgccaccagggaccatgtgtacatgaccgacacctccaagtggataccatcctgcctccactgcacgcacccaccttcccaccccaccctgtgg

SEQ ID NO: 39415 - DNA, 672 bp, Macaca Mulatta
ccccctagtccaggagactaataaggagccccctcagatggtgaacccgatttgccatctcccagaaaggtgaacaaaacccaaccaggttgcccccttcaccttcttgcaacctcttcccctttccccagaggtcctgtcctccactctagattattcctgtagtctagagctgggaagggaagcagatatctctgaaggagataggaagccagacttcactgcttacatttccatgatccctcagtgcataaaggaggaagtcactccctcagataatgatagtggcatctgtatgagcccagagtcctatctcagctctccccagtacacctccaggggctctccgagtaggagcctgccatctccaggtgtcctctgtggctctgcctgtcccaaaccttatgaccctcctggggagaagatggtagcagcacaagtaaagggtgagaaactggataagaagctgaaaaaatggagcaaaaacagaacagcaggaactaggtatcaccagaagaagagggtggagtaggaggtcctcgctggtgagtgcaaagccctggaaaagaagaacgaggcactgaaagagagggcagattccctggccaaggagatccagtacatgaaagattcgatagaagaggtctgcaaggcaagagggaagaaaagggt

SEQ ID NO: 39416 - DNA, 4473 bp, Macaca Mulatta
  misc_feature (1)...(4473): n = A,T,C or G
aggaggagtgtcggcgggagttgctgtcctgggtgcctgtccgtcagcctccgagggaatcctgcctggacctcctggtagaccagcgccacagcctcctgagtatcctggatgcccagacatggctgtcccannnnnnnnnnnnnnnnnnnnnnnnnnnnnnnnnnnnnnnnnnnnnnnnnnnnnnnnnnnnnnnnnnnnnnnnnnnnnnnnnnnnnnnnnnnnnnnnnnnnnnnnnnnnnnnnnnnnnnnnnnnnnnnnnnnnnnnnnnnnnnnnnnnnnnnnnnnnnnnnnnnnnnnnnnnnnnnnnnnnnnnnnnnnnnnnnnnnnnnnnnnnnnnnnnnnnnnnnnnnnnnnnnnnnnnnnnnnnnnnnnnnnnnnnnnnnnnnnnnnnnnnnnnnnnnnnnnnnnnnnnnnnnnnnnnnnnnnnnnnnnnnnnnnnnnnnnnnnnnnnnnnnnnnnnnnnnnnnnnnnnnnnnnnnnnnnnnnnnnnnnnnnnnnnnnnnnnnnnnnnnnnnnnnnnnnnnnnnnnnnnnnnnnnnnnnnnnnnnnnnnnnnnnnnnnnnnnnnnnnnnnnnnnnnnnnnnnnnnnnnnnnnnnnnnnnnnnnnnnnnnnnnnnnnnnnnnnnnnnnnnnnnnnnnnnnnnnnnnnnnnnnnnnnnnnnnnnnnnnnnnnnnnnnnnnnnnnnnnnnnnnnnnnnnnnnnnnnnnnnnnnnnnnnnnnnnnnnnnnnnnnnnnnnnnnnnnnnnnnnnnnnnnnnnnnnnnnnnnnnnnnnnnnnnnnnnnnnnnnnnnnnnnnnnnnnnnnnnnnnnnnnnnnnnnnnnnnnnnnnnnnnnnnnnnnnnnnnnnnnnnnnnnnnnnnnnnnnnnnnnnnnnnnnnnnnnnnnnnnnnnnnnnnnnnnnnnnnnnnnnnnnnnnnnnnnnnnnnnnnnnnnnnnnnnnnnnnnnnnnnnnnnnnnnnnnnnnnnnnnnnnnnnnnnnnnnnnnnnnnnnnnnnnnnnnnnnnnnnnnnnnnnnnnnnnnnnnnnnnnnnnnnnnnnnnnnnnnnnnnnnnnnnnnnnnnnnnnnnnnnnnnnnnnnnnnnnnnnnnnnnnnnnnnnnnnnnnnnnnnnnnnnnnnnnnnnnnnnnnnnnnnnnnnnnnnnnnnnnnnnnnnnnnnnnnnnnnnnnnnnnnnnnnnnnnnnnnnnnnnnnnnnnnnnnnnnnnnnnnnnnnnnnnnnnnnnnnnnnnnnnnnnnnnnnnnnnnnnnnnnnnnnnnnnnnnnnnnnnnnnnnnnnnnnnnnnnnnnnnnnnnnnnnnnnnnnnnnnnnnnnnnnnnnnnnnnnnnnnnnnnnnnnnnnnnnnnnnnnnnnnnnnnnnnnnnnnnnnnnnnnnnnnnnnnnnnnnnnnnnnnnnnnnnnnnnnnnnnnnnnnnnnnnnnnnnnnnnnnnnnnnnnnnnnnnnnnnnnnnnnnnnnnnnnnnnnnnnnnnnnnnnnnnnnnnnnnnnnnnnnnnnnnnnnnnnnnnnnnnnnnnnnnnnnnnnnnnnnnnnnnnnnnnnnnnnnnnnnnnnnnnnnnnnnnnnnnnnnnnnnnnnnnnnnnnnnnnnnnnnnnnnnnnnnnnnnnnnnnnnnnnnnnnnnnnnnnnnnnnnnnnnnnnnnnnnnnnnnnnnnnnnnnnnnnnnnnnnnnnnnnnnnnnnnnnnnnnnnnnnnnnnnnnnnnnnnnnnnnnnnnnnnnnnnnnnnnnnnnnnnnnnnnnnnnnnnnnnnnnnnnnnnnnnnnnnnnnnnnnnnnnnnnnnnnnnnnnnnnnnnnnnnnnnnnnnnnnnnnnnnnnnnnnnnnnnnnnnnnnnnnnnnnnnnnnnnnnnnnnnnnnnnnnnnnnnnnnnnnnnnnnnnnnnnnnnnnnnnnnnnnnnnnnnnnnnnnnnnnnnnnnnnnnnnnnnnnnnnnnnnnnnnnnnnnnnnnnnnnnnnnnnnnnnnnnnnnnnnnnnnnnnnnnnnnnnnnnnnnnnnnnnnnnnnnnnnnnnnnnnnnnnnnnnnnnnnnnnnnnnnnnnnnnnnnnnnnnnnnnnnnnnnnnnnnnnnnnnnnnnnnnnnnnnnnnnnnnnnnnnnnnnnnnnnnnnnnnnnnnnnnnnnnnnnnnnnnnnnnnnnnnnnnnnnnnnnnnnnnnnnnnnnnnnnnnnnnnnnnnnnnnnnnnnnnnnnnnnnnnnnnnnnnnnnnnnnnnnnnnnnnnnnnnnnnnnnnnnnnnnnnnnnnnnnnnnnnnnnnnnnnnnnnnnnnnnnnnnnnnnnnnnnnnnnnnnnnnnnnnnnnnnnnnnnnnnnnnnnnnnnnnnnnnnnnnnnnnnnnnnnnnnnnnnnnnnnnnnnnnnnnnnnnnnnnnnnnnnnnnnnnnnnnnnnnnnnnnnnnnnnnnnnnnnnnnnnnnnnnnnnnnnnnnnnnnnnnnnnnnnnnnnnnnnnnnnnnnnnnnnnnnnnnnnnnnnnnnnnnnnnnnnnnnnnnnnnnnnnnnnnnnnnnnnnnnnnnnnnnnnnnnnnnnnnnnnnnnnnnnnnnnnnnnnnnnnnnnnnnnnnnnnnnnnnnnnnnnnnnnnnnnnnnnnnnnnnnnnnnnnnnnnnnnnnnnnnnnnnnnnnnnnnnnnnnnnnnnnnnnnnnnnnnnnnnnnnnnnnnnnnnnnnnnnnnnnnnnnnnnnnnnnnnnnnnnnnnnggagacctccgaggaggctgaagacaggccctgtcagcccaagagcttccagcagaaacggaactatttccagaagatggnnnnnnnnnnnnnnnnnnnnnnnnnnnnnnnnnnnnnnnnnnnnnnnnnnnnnnnnnnnnnnnnnnnnnnnnnnnnnnnnnnnnnnnnnnnnnnnnnnnnnnnnnnnnnnnnnnnnnnnnnnnnnnnnnnncagtgccgtcccctcctcctccccccatcatgaagaagccattgaagcaaggtggggccaaagctgcaaaagaggctgaggctgagccagtcaaggagacagcggccaagggcggtggccaagggccagcccaaggcagggggatcgtggtgcgcagctcagaccccaagcccaagcggccacaacccagcagggaaattggcaacatcatccgcatgtaccagagccgcccgggccccgtgcctgtgcctgtgcagccatccagnnnnnnnnnnnnnnnnnnnnnnnnnnnnnnnnnnnnnnnnnnnnnnnnnnnnnnnnnnnnnnnnnnnnnnnnnnnnnnnnnnnnnnnnnnnnnnnnnnnnnnnnnnnnnnnnnnnnnnnnnnnnnnnnnnnnnnnnnnnnnnnnnnnnnnnnnnnnnnnnnnnnnnnnnnnnnnnnnnnnnnnnnnnnnnnnnnnnnnnnnnnnnnnnnnnnnnnnnnnnnnnnnnnnnnnnnnnnnnnnnnnnnnnnnnnnnnnnnnnnnnnnnnnnnnnnnnnnnnnnnnnnnnnnnnnnnnnnnnnnnnnnnnnnnnnnnnnnnnnnnnnnnnnnnnnnnnnnnnnnnnnnnnnnnnnnnnnnnnnnnnnnnnnnnnnnnnnnnnnnnnnnnnnnnnnnnnnnnnnnnnnnnnnnnnnnnnnnnnnnnnnnnnnnnnnnnnnnnnnnnnnnnnnnnnnnnnnnnnnnnnnnnnnnnnnnnnnnnnnnnnnnnnnnnnnnnnnnnnnnnnnnnnnnnnnnnnnnnnnnnnnnnnnnnnnnnnnnnnnnnnnnnnnnnnnnnnnnnnnnnnnnnnnnnnnnnnnnnnnnnnnnnnnnnnnnnnnnnnnnnnnnnnnnnnnnnnnnnnnnnnnnnnnnnnnnnnnnnnnnnnnnnnnnnnnnnnnnnnnnnnnnnnnnnnnnnnnnnnnnnnnnnnnnnnnnnnnnnnnnnnnnnnnnnnnnnnnnnnnnnnnnnnnnnnnnnnnnnnnnnnnnnnnnnnnnnnnnnnnnnnnnnnnnnnnnnnnnnnnnnnnnnnnnnnnnnnnnnnnnnnnnnnnnnnnnnnnnnnnnnnnnnnnnnnnnnnnnnnnnnnnnnnnnnnnnnnnnnnnnnnnnnnnnnnnnnnnnnnnnnnnnnnnnnnnnnnnnnnnnnnnnnnnnnnnnnnnnnnnnnnnnnnnnnnnnnnnnnnnnnnnnnnnnnnnnnnnnnnnnnnnnnnnnnnnnnnnnnnnnnnnnnnnnnnnnnnnnnnnnnnnnnnnnnnnnnnnnnnnnnnnnnnnnnnnnnnnnnnnnnnnnccaggctggcagtttggctctgccgggggccgttccggactctttcctgcggacatagtgcagccggctgccgctcccgaattttcgttctccaaggagcagaggagtggctggcacaagggtcagctgtccaccggggaaccagggctggctcggtgggacaggtcctcagaggtgaggaagatggcaggagaaccacaggcaaggcctgcctgagactgaggaaggaaaggggtttgaccgctcccgaggctgccatgcagtg

SEQ ID NO: 39417 - DNA, 371 bp, Macaca Mulatta
acttaatattttcaataagtccctttactggccaggcagggtcggtcacacccataatcccaatattttgtaaggctggggcaggagcacccaggagttcaagaccagtctgtgaaacacagcgaaactccctctacaatgaatgaaaaagttagccaggcattgtgaagctactcacaaggctgaggtgggaggatggtttgagtccaggagttccagattgcagtaagccatgatcctaccactgaactccagcctggacaacagagtgagactcccactctacatacaataatattaaaaataacaatttttctattatctgaaaaaaatcattttaagtttctgtttatcaaggtctattctacttt

SEQ ID NO: 39418 - DNA, 354 bp, Macaca Mulatta
gaggccctcaatcatcctgagcccagattgctttgcctctatgaggaagccctggagcctgacctccccatggctagactctgggacctcagcccataggctgtctgcattcttccaggggacagatctcaccatgctgcaaaaactgaacagtgtccacgccaacaacaaggccttcctacagcccaagaacatccacgatgcaagatttggcattgcccattttgccggcgaggtgtactaccaagcagaaggtgggtgcagctcctctcatgccccctccaaatttaaagtgggttccagggagaccgtggaaagcaggctcagtgaatggggctattttgcagctctagc

SEQ ID NO: 39419 - DNA, 1006 bp, Macaca Mulatta
  misc_feature (1)...(1006): n = A,T,C or G
ggattatatggtggtatcctaattagacatcctttcattattgcataggttggcaaaacacagacctacgggctgttttgtacagcccgtgagctaagaatgcttttttacatttttaaaaagtgtgcaacacaggataaagcgagaaagatctaaaatcgacacactaaaatcacaattaaaagaactagagaagcaagagcaaacaaattcaaaagatagcagaagacaggaaataactaagatcagagcagaactgattgagatagagacacgaaaaacccttcaaaaaaaatcaattaatccaggagctggttttatgaaaagattaacacaatagatagaccactagcccagnnnnnnnnnnnnnnnnnnntaaagatccttggtcggccagcctcagccctcaaagaaacttacataaaccaattttattttgctacccggggcctcaattaggttaaatttgacaactgggtccaataaccctgttttccccagaggaagaatccatgggggactaggaacataggcggcctctgtggatattccctcctcacaaatttaacaataaataggtgcctcctgggacaggagacactactccgcagagaatcgcgattttttaggggaaaaagcacaagaattccaccccacaaatcgggtggaagtttctcttcgtgaaaaaaatgtccaattatacatgggggggcgatcccgtgattctccgaaacccccggtcgagatcattacaaagccgcccccacatcattcctcgccagtagagtagaggtaatagtgaattatacagtcatatctagcactgtatcacctctctacctatctgcatcaaaatgatagtctagaatagtaacttactcgtttcggagtgcaggatactcattctccatacgccacccaatcaccgaaaatagaaccaccaattccgagacaaaatcacgggccctcgtagttgtgaaaatccctctactctatttcacgcgag

SEQ ID NO: 39420 - DNA, 134 bp, Macaca Mulatta
aggtatttgacaatgaggactttgactgccggactcccagagagtggatcaacatgggtttggagccagggtctctggacaggaaacctgtcccaggaaaagccctcctgcccactgatgacttcctggggcat

SEQ ID NO: 39421 - DNA, 619 bp, Macaca Mulatta
  misc_feature (1)...(619): n = A,T,C or G
ggggtacattttattttatactccagcttgttctaaaaaatgttgtgagatctttactctgaattgatttggagtatatacttgattatgacttgttaaattcatgttcttaaattttactctgtttatacaaaggagaatagttatattagaatagcgtatggtagcttttttatgaaaatgcccttatttatataatttaaaagttgtggcagcacggtgtctcacgcctganatcccaggactctgaggctgagacagaangattgcttgaacccagaggttggagaccagcctgnngcacatggncagaccctctctttacaaaaaaatgttttaataactagatgtgntggcgtgtannnnnnnnnnnnntnnnnnnnnnnnnnnnaagtgggagcatcttttgacccccagaataaaagctgccatggactccaatatgcccctgcctcccacctggggggaaaagtccaactttttcaaaaagggaaaaaagtttggggaaaggggttttaatttaaggtttttaaccccgttttattttaaattattttgggattacccggaaacccggagttagggcgggcccccctagaaaacaaaatttatttttttt

SEQ ID NO: 39422 - DNA, 201 bp, Macaca Mulatta
tgcaactcaggcaaagggccgagcactttttgagcaagcagcaaattcagtttccctccctctccttaggcagagagcagggacacagtaccactctatggtcaccttgaccagctagtgactatatgactagctacagaaatggttcagtgtcagaagatgaataaagcttgtaatctgtcacgctcagcaagaatatgc

SEQ ID NO: 39423 - DNA, 844 bp, Macaca Mulatta
aggaccctttcttgcctacagtttcgagaggcctgtgccatgagaccgcctggggtgagcacggtggcctgggcagctgtccgaagatttggcctccgcgggacccctgtttccttcccgcagtgtctgcgtccgcacaggatacccagcttggacctcctaggacagaaatgcgagcgaacccttgctgggaacagttgaggctgaagttcttggaaggctcccacccaggtgccccgctggaaagcagatatttcctggacccagcgcggcctcaaccagggcgggaaaagagtgattatttaagtacttaaagtttcattaaaattaaaatcagaaagttctgaagctgttaaatgagttggggagggaaccctgactctccttagccactgtcccaactccatccacgcgcagaccacccctctccacttgcccttctgtcctgggtgagttacatttagctagctgctgttaattggttctcccaaatcaaaatgtaatgtatttattcaccaaaccaccaccctggctcctgcttctagctcggaagtataaggaaggaacattagggtgcatttcactcacgccacgtgtcacagaccggagctgaaggaggcaggccgtcctttggcgtgggcttgggagctctgtgcggtctctgcagctctccggggggattcggagctgggtggcctgaggaaggaggtggcacatccactgcagatgaaggttgctttcacatcgcacttgcaacaagtcctttcttgaggatgctgggtccagaagtctctgtattgcccttcttcagcctaggcaggtatgagagctagggctgcctggc

SEQ ID NO: 39424 - DNA, 1176 bp, Macaca Mulatta
  misc_feature (1)...(1176): n = A,T,C or G
ctttggtggaagagaaagtcctctgcagagtgcattatgactgcatgctggataatttaaaaagagaagtagaaaatggnnnnnnnnnnnnnnnnnnnnnnnnnnnnnnnnnnnnnnnnnnnnnnnnnnnnnnnnnnnnnnnnnnnnnnnnnnnnnnnnnnnnnnnnnnnnnnnnnnnnnnnnnnnnnnnnnnnnnnnnnnnnnnnnnnnnnnnnnnnnnnnnnnnnnnnnnnnnnnnnnnnnnnnnnnnnnnnnnnnnnnnnnnnnnnnnnnnncaggtgtggtttcagaattgtagagcacgccacaagaaacatgtcagtcctaatcactcctcctccaccccagttacagcagtcccaccctccaggctgtctccacccatgttagaagaaatggcttattctgcctacgtgccccaagatggaacgatgttaactgcgctgcatagttatatggatctcattcaccaacagctcttggactccagcccttgttacccctttcaatgacacaactgccaataagtcatacctaattcttttttcagggatagacttgattaaggatataagttcatcatttattatgtataaaataccattgaaaagatattgctgttaattttttatttaacacctaaagcatttccaacatcactttgctgcccaggtatgtatctatagttggcctgcaagacacttttattgattcttcaattttggtaaaacttatgtttacaagaagaaaacaaatcaaaacattttttgtattgtctggaaatagttcactctagtgtgtatctgttaatttatttgtcatcaaaagagcactttgcctaaaagaaaggactgacaagtgtgcaaaatgtttacagtcttttgtgaaattgtagtttatcattagtttgtacctgtaagttattgttataaatattacctgtattttttgttacatacaactttatactttgaagcttgtatctgtgaattcgcaactgaaatttattttgccaatgttttctgaatgaactgaataaagcttctgttgtagcatgccatgcaaacacattattgtgtttgtggttgatgaattatggctgtaaataacactatagtttaataagcccgccattctgagtttattaaacattttccattctcatgaaaatttcaa

SEQ ID NO: 39425 - DNA, 606 bp, Macaca Mulatta
ataactggaagcacttaattatttttgtttaatttcaacttaaggatattgagggtcagggaagtaaggtttatttcttgtttatgttttctggaatttatagggtgtttgtagaagggataaatgggttacctaatgagccgttcctctgggctctctaaggtatgcccttttggctaggatattttacaataatttgcaagcttttaatattgtgctttgtaaaaattaacgatttttaaaaataatttgcaattgatagattacacttaaatttttaaagtatccaattttaagtttcttttccatttggtcattgttgcttattgtctattgtgtaggggacacaatcctaagatatttcattgttttgtttcttggggcagtattaaccagtggcctttgtatgtacattcattgcttacatttattgtttatgtggtagagtagcatttttatgaacttccctgttcagtattagtgaaattaacagatgcatatatgtaaagatagaaaagaaatgaatacaattaattttttatttgttgagtcctatttatttgttttggccctggatcttttctaatcacaattatatttctttac

SEQ ID NO: 39426 - DNA, 793 bp, Macaca Mulatta
  misc_feature (1)...(793): n = A,T,C or G
ggggtagaaaatgaagttaattgtatgagactggaaatacattctaggggctcacattgcttatacatcaatttcaaatagtctttggtaatgaggatttgagggtatattctcatgaacaaacacagtgtgagatgaatacgggttcaatgtattttctgtcattgcatgctttgtcataaggagtgaggaagacaaaaagctaagagaaaatgtttgtgtcataaaacaggaacaggtccttggagttcatcttatccatcctgtatctttagcagttctgcccattggctgtgtgaagctacacaagaatcaaccccataactatgctggctaggtgatagccaagtaggagaaggagcaaggggctatcaggcaggcttggtagtgttacaagcttcttaaattatattcacgtttcagatgactcttataaggttgaggtagattctgatgctgttaatattgattttaattttctttcccctttccttcgctgcttgggataaaatgttaattaactctcacctgtgaaacttgggtgactcatattgcttgtttaatttaaaattacagcccagggggcaaggctccctttcttttctctgccantgctaagggacctcactggcgaacctggcttattaatcactaagggatttataaaccccggatgtttttgctcacaatcatggggcctgaattgcccttactccaaaaatggataaccttttaaattccctttttcgcttccacacaaagtgttatttttgcctttaaagccccgctaaga

SEQ ID NO: 39427 - DNA, 849 bp, Macaca Mulatta
taaaaccgtggacgttataacctcctcccagacctggtaaccaccttctactttctgtctatatgaatctgattactctagttatctcatgtacgtagtgtcatatatagtatttgtctttctgtgactggctcattatacttagcataatgtcctgcaggtaagttatctgtataattaaaataagaacaacacaaactctgtaggtaactgggtaaagacatgaacagtcacttcgtagttgagtaatgcatgtataaataagtgcaaaattatttgaaatgcacattaataaaaactttttggttatcacactaacaattctaaaaattcctagtactcagtgatggtactgaaactttaaaacacaatctgactcactgcaactgggaatataaattggcataatctttctgacaagtaattggacagtatatatcagaaacttatgtgcactaagtctacttcttggaagctagcctagaaagtactcacacataagcaaaaatttatgttcagagattttcattacaaagttatttattaaatagttattctagttagaaacaacataagtatttaagtaaattattatacatctctatccatgattataaatggggtgcgtagcaaagggctgtacctgaattccacgacgggcatattagtcgtataaatcatactgtaaaatgccatcaatagaatagtttaccgatcaacatcaagaactgcccactcatgtcttgaaagaaatgccttaaacccgaatccatatattttgcattacatttctcagtcccaaactaacaataaccattagacggtaacatataatctctgccacgttac

SEQ ID NO: 39428 - DNA, 787 bp, Macaca Mulatta
gggtactatttttaaagccaaacagcagtatcttcctggttgagttcacagaggtggtaggatgagaagcagatacatttcctcctcagttggtggcacactgttgtcctggggatgaagggaaattggcttggggggtgtgtcggggttcttcggatagcatagaccttcccctgatgatagagtagactttggtctgatagagtagctgatagagtagatgatagagtagcttgccccaccctgccctgctcagactcaggcctttgcttagtaacattagagccctctggagcgactgcatggccctggtggagataaggagggcacaggaaggatgatgcaggtggagggctgcaggaggcgggtcccatcacaacgagtgtgtcaggctgtcttggggcctttgcaggcaaagctgggctcatttgtgcccaggacaggcctgggggggggggcaaaggcgatctccggccggcacgggagacccgacggcatcgggcgagcaaacagaaaagccggaaaagaggggagggcggaggccgacgggaatagatgggggagaaacccaaacgacagagtgggggagcgacccgcggcgtgaaaaagaagagaaaatggccccttaaaaggagggtccgcaacgcggaagtcccacgagaacacggagcaaaaggagacgacgcaagcgcaccatgcgagcacgagaacaaccagacaaaagaaaaggaaggacagaacaaccaagtaacaagcaggaacccgcaaaaacacgccagaaaacaag

SEQ ID NO: 39429 - DNA, 779 bp, Macaca Mulatta
  misc_feature (1)...(779): n = A,T,C or G
nnnnnnnnnnnnnnnnnnnnnnnnnnnnnnnnnnnnnnnnnnnnnnnnnnnnnnnnnnnnnnnnnnnnnnnnnaagaccatcnnnnnnnnnnnnnnnnnnnnnnnnnnnncnnnnnnnnnnnnnnnnnccagccaggcatggtggcgggcnnnnnnnnnnnnnnnnnnnnnnnnnnnnnnnnnnnnnnnnngcgnnnnnnnnnnnnncgnnnnnnnnnnnnnnnnnnnnnngcgccactgcaccccagcctgggcgacacagcgnnnnnnnnnnnnnnnnnnnnnnnnnnnnnnnnnnnnngagagtttctaatggaacgtaatttgtagatgcaccaaatgtgaagaaatatttaggctaaaattaagactgtacatcagaggatttacagtaaaaaaactaaggaactaatacttcagactttaaaataaatcagagtattaagtataacagaagttgaacctgttagaaaatttctttgcatataagttaaaaagtaggttttttgaagagattatattcaaagtatattttttcacttaaaagtataaattttttgaaaagcaaataattgaactctgaaattatgctaatttcaacatttctcatttatgttgaaagcatgtgatgaaactgttcgctgccactggaagatatggggaaaattccttttggcatcaagtggggccatttatttcatggaaccttgccttgnnnnnnnnnnnnnnnnnnnnnnggaaacgttgaagggaaaatctttaaccgaaaaaggcctttt

SEQ ID NO: 39430 - DNA, 775 bp, Macaca Mulatta
  misc_feature (1)...(775): n = A,T,C or G
nnnnnnnnnnnnnnnnnnnnnnnntccagcattttgggaggccaaggcgggcggatcacctannnnnnnnnnnnnnnnnnnnnnnnnntnnnnnnnnnnnnnntnnnnnnnnnnnnnnnnnnnnnnnnncacctgggcgtggtggcagnnnnnnnnnnnnnnnnnnnnnnnnnnnnnnnnnnnnnnnnnnnnnnnnacatccaggaggcnnnnnnnnnnnnnnnnnnnnnntgcnnnnnnnnnnnnnnnnnnnnnnngcacagcaagaccctatctcaaaaacaaaacaaaacagaaccaannnnnnnnnnnnnnnnnntacacacgttttggagtcaaatataaaatcaacttgaaaatgtaatacaaaatatggcccttcaaggaaatttcttcgtgtggggttttcagctctgtcctctgatcatcttgagctgagtgttctctgtctgtagaggggcctctctgggcaggtgtgagcagcacggccttaggaggttgctggggtgacactcaagaacaaggcctcgccgctaacaagaataacctacacacaggtcacgtgttttctctccagtctacttgtccagtgttcacttttcaatgccagtaaaaacagatactagattatgagtaatttctgaatattacaaaataatttttgaggtttctacctctgagcactatctcgctgtcatatcttcttcttatcaataagctcgtcatggccagtcagtgagtcactgttcccatgtgaacagccgcataaaagctt

SEQ ID NO: 39431 - DNA, 746 bp, Macaca Mulatta
  misc_feature (1)...(746): n = A,T,C or G
ggggaccataaagcttgacttttgcattggaactgtgctgtcattaataaaggatatcccatgggattgtaattgtaatcccaattacaatctaagattgcaattgttactatctgagaagtagtgtgacacctttcttttgttgttacattaagctgaaaacataatactaagagacaactaacagtttgcttatcaggcacatcaactaaggcaccttgccccatgctaagtttctcctggatatatggaagttggttgtttcccagttcaaaaacttgctaagaaaacctgagcccatattgtttttattttcttagctagaatctcgtagcatgtgtcatatccttattcccactaaaaataactacatctatgtgagaggaatattgtttgtgggagctgtattaaatactattataggtgttacagaatctttaaataaatggacatggaccaaccttccatcttagtgtatgatctatatagtgcatgtcagtagcagaaaatgcagtcttagttagcattagcctgtctaatctgaatagtttactcaaaagtacttctttgtgttaattatgcagccattgtttttagatctagttaacaggttnctgtttaatgtgctgcaacatttactgnaatggtggagtgaaagaactgatgcatattgngaaatatcttgccattttttaaagatatgttacattagaaagacactttagaatatagcatgtgatcttact

SEQ ID NO: 39432 - DNA, 791 bp, Macaca Mulatta
gggggaagcgaggaggcactagtgcttcggcgaccgggcggctgcggcgtctgtgtcagaggctgtggctgtgcctgtgtctgtggcggtgacggcggcgggagcaagcgctgccctcgcggagcagcctctgggtcgcaggccgctcgcgggggttgtggaggggcgggccggacgctgagcggagcagctgcgccacgggtggcattgtgtgtcccagagtgccggagcgagtcccagaagagaggcgaggctaagcccagagcgctgggttgcttccagcagggaagactcccttccccctgcttcaggctgctgaagcactgagcagcgctcagaatggaagccatcgccaaatatgacttcaaagctactgcagacgacgagctgagcttcaaaaggggggacatcctcaaggttttgaatgaagaatgtgatcagaactggtacaaggcagagcttaatggaaaagacggcttcattcccaagaactacatagaaatgaaaccacatccgtggtttttttggcaaaatccccagagccaaggcagaagaaatgcttagcaaacagcggcacgatgggggcctttcttattccgagaagagtgagagcgctcctggggacttctccctctctgtcaagtttggaaacgatgtgcagcacttcaaggtgctccgagacggagcccggcaagtacttcctctggggggtgaagttcaattctttgaatgacctggtggatttatccagatcttcttctgtctcccaaaacccggcagatattcccgcg

SEQ ID NO: 39433 - DNA, 288 bp, Macaca Mulatta
  misc_feature (1)...(288): n = A,T,C or G
agcggcttcgtgttcgactttgagtaccactggcccaggaagcccttggcgacccccatcggcaccgtccacaccaaccaaccctcccagcctcagctttgggacaaagatcagccacacagcaaaaaccaggtgctgacctccaccaatggggagctgaatgtggacgaccccatggccggccagtcccgcgcctattacggcgcctgcagagatggaggngaggcccttggggcccacccacagcagcccagggccagagtctggctggaagccgggacgcagact

SEQ ID NO: 39434 - DNA, 752 bp, Macaca Mulatta
  misc_feature (1)...(752): n = A,T,C or G
gctagttgtgccctcctcaagcaaaactttggtagtaagataaacttcagtgtcattcctgtccctggggttcttnttagatactgggagaagagcagtgagcaaaacggtctccttgtatcatggagagagactctgtcaagcctaaagtgagcctcggatcttcctaatgacctcctgctggcccagctggatgcaagacaagctcatttaagcctctgctgacctttcactcctccactgcaagaaccacaccagtcatttcccccgtcttcagaactgtgtaccaaatagaccacaaagcttcatggctgatgaatgattgccttttcatgatgcaaagagatttttacaaatttctattgacgggagttaacattaagtctcttgtggaattataacttctgttgcacatacataatgcttctatatagctcttatttttaccttcctcataaaggaacaatctactgttcttgccagcattatcttgaaaattcaggccaaaatatctgagcagaatgcacatattgattgcaccagtggtatttttcatgatgagaccactttgaaagggtcttcctgatttccacgtccctcagaatctatctgaccttctcacagactttattggtatgaatctttcttatatgtaactatttatttgagaggctcatttttgtagcccatcttctgtttttaaaaaacataggctgttctctacccagaagagggtggtaagaccatacatg

SEQ ID NO: 39435 - DNA, 833 bp, Macaca Mulatta
  misc_feature (1)...(833): n = A,T,C or G
ggnnnnnnnnnnnnnnnnnnnnnnnnnnnnnnnnnnnnnnnnnnnnnnnnnnnnnnnnnnnnnnnnnnnnnnnnnnnnnnnnnnnnnnnnnnnnnnnnnnnnnnnnnnnnnnnnnnnnnnnnnnnnnnnnnnnnnnnnnnnnnnnnnnnnnnnnnnnnnnnnnnnnnnnnnnnnnnnnnnnnnnnnnnnnnnnnnnnnnnnnnnnnnnnnnnnnnnnnnnnnnnnnnnnnnnnnnnnnnnnnnnnnnnnnnnnnnnnnnnnnnnnnnnnnnnnnnnnnnnnnnnnnnnnnnnnnnnnnnnnnnnnnnnnnnnnnnnnnnnnnnnnnnnnnnnnnnnnnnnnnnnnnnnnnnnnnnnnnnnnnnnnnnnnnnnnnnnnnnnnnnnnnnnnnnnnnnnnnnnnnnnnnnnnnnnnnnnnnnnnnnnnnnnnnnnnnnnnnnnnnnnnnnnnnnnnnnnnnnnnnnnnnnnnnnnnnnnnnnnnnnnnnnnnnnnnnnnnnnnnnnnnnnnnnnnnnnnnnnnnnnnnnnnnnnnnnnnnnnnnnnnnnnnnnnnnnnnnnnnnnnnnnnnnnnnnnnnnnnnnnnnnnnnnnnnnnnnnnnnnnnnnnngcccaacttcatcctttatattcctggggcctaaaattttaacctttcttttccacaaaacttttccttggcccggtcccggaaataccccggaacgctactcttgaattttccccgaaagcccttaaccttacattgaaaaattccccttttctcttttattggggctccctttatttctcccctaggtggccagggaaaatttttaanaaaaactcccaccgga

SEQ ID NO: 39436 - DNA, 158 bp, Macaca Mulatta
aggttttgaaactaacatgaacctaagtagtcgggatgaccctagtacatcagaaattacttccgagactcaagatagaaatgcaaataaccatggaattcagttatctaattcactatctagtgctatcactgctgaaaatggaaattccatctcaa

SEQ ID NO: 39437 - DNA, 628 bp, Macaca Mulatta
  misc_feature (1)...(628): n = A,T,C or G
agtcagacagtatctgctgctggtacagatttagatagtgatgaaattaaatagaaataaaagtaagagaaggtaagggctagaaagaatgaattaagatacaaatttagtggtagaaacactatgccatatacagttatgacttgctgatttaaatccaagaaatgtgttattaatgatgcataaaaatcaaacnnnnnnnnnnnnnnnnnnnnncttattatagttcatttaaaagacccattatatcaaagccattgctcagaggtattattatggacttggaatgctggcctaattgtatagtgagagattttgaaacaagaccttcttgtaaataggttacagcagagcacagattaggaagcctctgggatcccaaatggtttctctaaagctttttagaaagtcgactctaggcagtaggaaccagggcttttagttagtacagaaagatacagaaaacatgaaatagatttttgttacagttattttactgttgactttggtttgtaggagaggaaaaatatctttttccttctactctttttggtccttgattgggtctctaacaaaggatagattaacaagagaaaagcttacaaatttatttaatgtaagttttaag

SEQ ID NO: 39438 - DNA, 763 bp, Macaca Mulatta
  misc_feature (1)...(763): n = A,T,C or G
gggaaaacaatcatccctcacagatacgtacttggaaatggaggccttatagaccccctgaaaagttcatggggaccatcagagtggcgtctgtggagcacactatggggacactgctttaaaatattatcaaaagtgttacattttaataattagtatgcatgtaataaaatgaaaatctagtttttgcatatgtattatgttgatgtctatatttgattttagcttcatgtattatggaggactttccctaacttttggatttgtaattacattatggcaaaattgtaatcagaaaccgaaatcattttttaaaatttatggagtggattagagtataaatttcaacaggataggaattgtgaacagatgttatactgaaaaaccaatagaaaataaattcaaataggttattattaatttagtaattgtaatagtatgaaataattctgtactccaagagaacatttatcccattaattctttaaaaaatcaagatcctcaaccatctgtttatctttcaccatctttcccaccctcactccacctccttcttgcatttacttcctcttctttaaccttcgttcaataaatatttattgaccctaccctataccanttggggtaaccactagncttatgtaacaaagagattaaaaaaatgtataatggttcagacacaatgaaagtttatttcttgcttaactaacaatgagcatatttctgccttggagtagtggctgctcattttataagtgggcta

SEQ ID NO: 39439 - DNA, 767 bp, Macaca Mulatta
  misc_feature (1)...(767): n = A,T,C or G
ggggcctttgcagcctccgtacactagcgatggctccctggtgtctcacctttttctctctcactgtctttttctcaatcttttgactctgcaggactttgtcacccccacaacctggtgttgggtctgatcaccccaacagacacttcttgctgctgccatgtgaagaaggacatgtttgcttcccctttcgccatgattgagtttcctgaggcctccccacccatgctgaactgaacaccaaatggtactctgaatgtcattaatataatatgcaaatgatctgtttggctcctgcttctccgtttggggtaaccttgtcaatcagcctgtttgcactaatgagctgtctgatgaaagctagcccagctgctgagaggtcactgaaaatctcgaccttcctcttcttgcttaggccgacatgacaatatttgatggaaaaggaaagagctttgattgacatttatgtaaaatcacctgagtggtaatgaangactgtcagagatcttattgggctatttcctcaaacacaaagagcatctatgcttttcaaatgagctcattgttctatttaaagtttattattagatatgatttcagggtgggttcttgaagtggggaattgagaagggtatactagaatcatacaggttgtgtataaactacatttaaatttttagaaaacattggcaggcattaataatgaaacaattatggtccaatttttttccttggggggaattcctcccggtttaaataatcccttt

SEQ ID NO: 39440 - DNA, 202 bp, Macaca Mulatta
  misc_feature (1)...(202): n = A,T,C or G
gctaaaagcaaggaatgggcagggctgcacgcgttctggaggctccagggcagagtccattctcttgcctgnncnngctttcggaggccgcctgcatgccttggttcatggcctgtcctctgtctttagagccagcaatgttgcttctctgaccactcttcttccagcatgcccctctctcagcacagcagggagaccttca

SEQ ID NO: 39441 - DNA, 626 bp, Macaca Mulatta
  misc_feature (1)...(626): n = A,T,C or G
agaatcatagctgttgattgcctgctttcacccttacctctgagcttgcttggtttgggttccatgtaagaagtgtagcttgaaacggttaaaggcagtttgtttggtggctattgtggagcctggagacttgttcctctcccaggtacttgtttatagagaactgttcaagtcctgccattagtcatttctttcatcaggtggtgactgcattctggtaaacgaatgagctaaatgcataccccagctcaccagtttcaggggcaccagttccttggagcaggtaccggtcccccgccctcctgtctaccttagtcctcagctcccaggtccaggcagcaatagtacccattctgcccccaggacatccgtctctactcctgctctgttaagataccaccacccaacctccacccgtttcttcttttgttaaagtccacatagtccaatagctgtgataacgctgccaattcatctctgcctccccatcctacttacaagtgttgacactgttttttaggttgggattttgtcaggattttcgttttttcctaaactcttacacaacagaattgtaatgtttttatggattttctgataacggcttagaacncatggtgagtgcc

SEQ ID NO: 39442 - DNA, 908 bp, Macaca Mulatta
gtctctgctgtatcctggtggctctctcctggatgggcggcttcattcattctataatacaggtggctctcattgttcgacttcctttctgtgggcccaatgagttagacagttacttctgtgacatcacacaggttgtccggatcgcctgtgccaacaccttcccagaggagttagtgatgatctgtagcagtggtctgatctctgtggtgtgtttcattgctctgttaatgtcctatgccttccttctggccatgctcaagaaacattcaggctcaggtgagaataccaacagggccatgtccacctgctattcccacattaccattgtggtgctaatgtttgggccatccatctacatttatgctcgcccatttgactctttttccctagataaagtgatatctgtgtttcatactgtaatattccctttacttaatcccattatttacacactgagaaacaaggaagtaaaggtagccatgaggaagttggtcaccaaatatatcttgtgtaaagagaagtgaaagataaattatacattttatagtcctcctgaggatcgttgtcctaaagcaggaagtatttgcagtaataatgctgcattcacttcctcctttcatttgtgttctttaaattttactataatttttctctattaattcctctttatattgaaaaaatagaggaattaagatgaacataaatttactcacacccaccctgaaattcctggcagatcattattagaattttgagatataataataatctgctaaagtacattttaactaattgttaattgagtaactattctgcagaggctctgactttgaggagaacgtgttgagaaaaataaataagacatggagacgtgtccattaaaaatatgaagtaaacggcaagca

SEQ ID NO: 39443 - DNA, 654 bp, Macaca Mulatta
  misc_feature (1)...(654): n = A,T,C or G
gggacaatatatgctgaaaaccatctcttccattccttcctctctgctttcctttctttcttccatacattccttctctcattcctttcctcttggtttctttatgcctcttttgttaccccttattcttacatgagtgcatacgcaactcatttatgcctcttttcccttgttcccttatagttgacctctagattttctgaattttgttgaaaaaattaatacccttattagatgcatctactcaaatctgacattctgaaaacagttacctttttactttttttcatctttaacaattttttctgaagatcaagttcttcagttaacctgaaaatttcagaaatatgtttcttctttagaagtaaaataagacaaactatagttttgttctgtcgatactgacacttggctgcacacacacagtctcagaaaaggaaaagagaagtagtgtgcagattaattcctaacacttggccatgcacacacacagtctcagaaaaggaaagagaagaagtagtgtgtagattattcctaancagataatcattcctcaaaataatacatgagatgtctacatttctgatccatatattatttttaaaattgatacctgtactggtagattatnaattgatcctgacatgtactcgc

SEQ ID NO: 39444 - DNA, 678 bp, Macaca Mulatta
agctcagctcgaaggcgtaccctctaagaagttttcccttgatgcccaaaattaagccagttcctacatgactcctctccattcttcacactccaattttccagcatttattacaactgtaattcaataattgtaaaattattatttaatgtctacatcttctgttagggtgtaaactccttgaaagcagagacagtctggctgttttattcctcaaacatagtgctagtccctgaaatttcctcagagccgaacagagttcactgcatgcattgattactcaacaactatttgttgaatgagaagtatgatagaaagaataatctcccaccacctcccaagttcacatccgagcccccagtaattgtctgttaccttagacagcaaaaggaatttagggggtgtaatttagttaaggattatagatggagagattgtcctggattatctgggtgaggctgatgtgatcacaagaatccttacaagaagcgagcattaggatcagagcgagagaaaaaaatgtgacaacagaggcagcgttcagagccgtgaagccatcaccactaaagacttagaagaggcaaggaatgggtactcctgggaacctacaaaggaaccaactctgtagacccttgatttagccctgaattctgacttcagaatgtaaaaatatcatgt

SEQ ID NO: 39445 - DNA, 894 bp, Macaca Mulatta
  misc_feature (1)...(894): n = A,T,C or G
ggatgtttgttcacctactcttatagtcaatgtgttcatcatttcagcttaaaaataacagtctgcccctttagccagttttcatgtctgtgcaagacctttcaataggcctttcaaacaataattcctccagaaaactagtctaagagtgaggacccccaactctagcctccccttgtcttgctgtcctctgtttctctctttttgctttaaattcaataaaagtgacactgagcannnnnnnnnnnnnnnnnnnnnnnnnnnnnnnnnnnnnnnnnnnnnnnnnnnnnnnnnnnnnnnnnnnnnnnnnnnnnnnnnnnnntgtcaggcccccttcggccctcgaagaagtttttcaaaaccatttcttttggccgcgggggcccacagtaggtaaagggaaacagggccaaaacctggtttcccaagaaaaatcctgggtcaggaaaaagggccttggaattcccccccataaaaaaaacccgccggggggaaaacaaaaggttttctaaaaaaaattcccgaagggaagctcctaacggcaatttatgggggaattaattacaacggggtttccaaagggaaatttctctataataaattatacgcccccccgcccttggcacatttattcaaaaaaatacggtgtggtaagattccattaaagactatttttgggccgaaactggggataaccccttccctcaaaccgggctgaggtaagaaaacccataaatatcccccaagacagagaatataatacccccttttttcaacccctnnnnnnnnnnnnnnnnnnnnnnnncccatggnnnnnnnnnnnnnnnnnnnnnnnnnnnnnnnnnnngcccaataatgtggccccacctttatatnnnnnnnnnnnnnnnnnnn

SEQ ID NO: 39446 - DNA, 536 bp, Macaca Mulatta
gtcccagctgtcagcgccatttatcacagccatctccagttctagctcagcttgcccacgtccagctcaaatcctccttttccacgaagtcttcccgcagaccccatgaactcttgtggtccgtcttctctgttctgccatcacctctcgcttacctccgactgtggccctcgccaccatctgtctgaggtcttagtcacttatctacttgactgtgtccctcgctagatcaggacctccagagtgagccgttcaatcatctttgtgtccctagtacagagcctgtgcagaacggccactcaacagtgtcttctgaattcactgaattcgtgccgtgcgctctggggagctgcaaaagggcaggacgcgtctgggctcccctaggcaaaggtcccagcactgcagcccaaggcgtcctctatgtctcctactagggatcccacttctcactcttgatgtggcctcccctcgctgcctgttcatcccagctcactccatggtcctgcactgggggccggaacacagacttcctcggg

SEQ ID NO: 39447 - DNA, 2280 bp, Macaca Mulatta
  misc_feature (1)...(2280): n = A,T,C or G
ccgggcgccgtccgcccgcgcgtcggttcatgtgccctgggccccatggagctgcgggtcagcaacgccagctgcgagancggnnnnnnnnnnnnnnnnnnnnnnnnnnnnnnnnnnnnnnnnnnnnnnnnnnnnnnnnnnnnnnnnnnnnnnnnnnnnnnnnnnnnnnnnnnnnnnnnnnnnnnnnnnnnnnnnnnnnnnnnnnnnnnnnnnnnnnnnnnnnnnnnnnnnnnnnnnnnnnnnnnnnnnnnnnnnnnnnnnnnnnnnnnnnnnnnnnnnnnnnnnnnnnnnnnnnnnnnnnnnnnnnnnnnnnnnnnnnnnnnnnnnnnnnnnnnnnnnnnnnnnnnnnnnnnnnnnnnnnnnnnnnnnnnnnnnnnnnnnnnnnnnnnnnnnnnnnnnnnnnnnnnnnnnnnnnnnnnnnnnnnnnnnnnnnnnnnnnnnnnnnnnnnnnnnnnnnnnnnnnnnnnnnnnnnnnnnnnnnnnnnnnnnnnnnnnnnnnnnnnnnnnnnnnnnnnnnnnnnnnnnnnnnnnnnnnnnnnnnnnnnnnnnnnnnnnnnnnnnnnnnnnnnnnnnnnnnnnnnnnnnnnnnnnnnnnnnnnnnnnnnnnnnnnnnnnnnnnnnnnnnnnnnnnnnnnnnnnnnnnnnnnnnnnnnnnnnnnnnnnnnnnnnnnnnnnnnnnnnnnnnnnnnnnnnnnnnnnnnnnnnnnnnnnnnnnnnnnnnnnnnnnnnnnnnnnnnnnnnnnnnnnnnnnnnnnnnnnnnnnnnnnnnnnnnnnnnnnnnnnnnnnnnnnnnnnnnnnnnnnnnnnnnnnnnnnnnnnnnnnnnnnnnnnnnnnnnnnnnnnnnnnnnnnnnnnnnnnnnnnnnnnnnnnnnnnnnnnnnnnnnnnnnnnnnnnnnnnnnnnnnnnnnnnnnnnnnnnnnnnnnnnnnnnnnnnnnnnnnnnnnnnnnnnnnnnnnnnnnnnnnnnnnnnnnnnnnnnnnnnnnnnnnnnnnnnnnnnnnnnnnnnnnnnnnnnnnnnnnnnnnnnnnnnnnnnnnnnnnnnnnnnnnnnnnnnnnnnnnnnnnnnnnnnnnnnnnnnnnnnnnnnnnnnnnnnnnnnnnnnnnnnnnnnnnnnnnnnnnnnnnnnnnnnnnnnnnnnnnnnnnnnnnnnnnnnnnnnnnnnnnnnnnnnnnnnnnnnnnnnnnnnnnnnnnnnnnnnnnnnnnnnnnnnnnnnnnnnnnnnnnnnnnnnnnnnnnnnnnnnnnnnnnnnnnnnnnnnnnnnnnnnnnnnnnnnnnnnnnnnnnnnnnnnnnnnnnnnnnnnnnnnnnnnnnnnnnnnnnnnnnnnnnnnnnnnnnnnnnnnnnnnnnnnnnnnnnnnnnnnnnnnnnnnnnnnnnnnnnnnnnnnnnnnnnnnnnnnnnnnnnnnnnnnnnnnnnnnnnnnnnnnnnnnnnnnnnnnnnnnnnnnnnnnnnnnnnnnnnnnnnnnnnnnnnnnnnnnnnnnnnnnnnnnnnnnnnnnnnnnnnnnnnnnnnnnnnnnnnnnnnnnnnnnnnnnnnnnnnnnnnnnnnnnnnnnnnnnnnnnnnnnnnnnnnnnnnnnnnnnnnnnnnnnnnnnnnnnnnnnnnnnnnnnnnnnnnnnnnnnnnnnnnnnnnnnnnnnnnnnnnnnnnnnnnnnnnnnnnnnnnnnnnnnnnnnnnnnnnnnnnnnnnnnnnnnnnnnnnnnnnnnnnnnnnnnnnnnnnnnnnnnnnnnnnnnnnnnnnnnnnnnnnnnnnnnnnnnnnnnnnnnnnnnnnnnnnnnnnnnnnnnnnnnnnnnnnnnnnnnnnnnnnnnnnnnnnnnnnnnnnnnnnnnnnnnnnnnnnnnnnnnnnnnnnnnnnnnnnnnnnnnnnnnnnnnnnnnnnnnnnnnnnnnnnnnnnnnnnnnnnnnnnnnnnnnnnnnnnnnnnnnnnnnnnnnnnnnnnnnnatcccaccatcaccccttccccctctacttacatcctaaggagtcagtcactgagacataaaggcagtaatcgcagaactggaaacaaaacaataacagaaccacagccaaactctggtggccaaacccagtgttttcattttgtcttactctgaaaaaagaacagcaaattcactgcttcaaagcggcctggctgccaagctagaatttggcagaatgtacttttctattcctcaaggagtcaaccaacttatgatctggggaggtgggaagaggatgaggagcaaagttgggataaaacagaagacagtcccaggctgtctggatactaggggc

SEQ ID NO: 39448 - DNA, 712 bp, Macaca Mulatta
  misc_feature (1)...(712): n = A,T,C or G
ggcacagtgactgnnnnnnnnnnnnntnnnnnnnnnnnnnnnnnnnnnnnnnnnnnnnnnnnnnnnnnnagnnnnnnnnnnnnnnnnnngaacatggcgaaaccccgcnnnnnnnnnnnnnnnnnnnnnnnnncgagcatggtggtgnnnnnnnnnnnnnnnnnnnnnnnnnnnnnnnnnnnnnnnnnnnnnnnnnnnnntcaggaggcggaggttacagtgagctgggattannnnnnnnnnnnnnnnnnnnnnnnnnnnnntgcaaccccannnnnnnnnnnnnnnnnnnnnnnnnnnnnnnnnnnaatcagtgtaactcaccacattgtaaactaaaacagaaaagccatatgaccttctcaatacacacagaaaaacactaaacaaaacccaacattcattcctgnnnnnnnnnnnnnnnnnnctccacagagaacctactaaacttgataaacggcatatatgaaatatgatgacataagactgaatattttccccataggatcaaaaatgagacaaggaaatccactcttatcacgattgaaactgcctttgcaaaattatgactgagctacagtgagagatctcacttaatcaaccccatcttgctttctaacctcccagatgtccttgctcattcctgggtgtagactgaaactaactttggggagaaacttagttttataggttttataagtttaaaaccaac

SEQ ID NO: 39449 - DNA, 543 bp, Macaca Mulatta
  misc_feature (1)...(543): n = A,T,C or G
aggacaccagccatgccctttgcttcctatggcctccaccacactagcctcctgaagcgacacatctctcatcagacgtctgtgaatgcagaccccgcctcccacgagatctggagnnnnnnnnnnnnnnnnnnnnnnnnnnnnnnnnnnnnnnnnnnnnnnnnnnnnnnnnnnnnnnnnnnnnnnnnnnnnnnnnnnnnnnnnnnnnnnnnnnnnnnnnnnnnnnnnnnnnnnnnnnnnnnnnnnnnnnnnnnnnnnnnnnnnnnnnnnnnnnnnnnnnnnnnnnnnnnnnnnnnnnnnnnnnnnnnnnnnnnnnnnnnnnnnnnnnnnnnnnnnnnnnnnnnnnnnnnnnnnnnnnnnnnnnnnnnnnnnnnnnnnnnnnnnnnnnnnnnnnnnnnnnnnnnnnnnnnnnnnnnnnnnnnnnnnnnnnnnnnnnnnnnnntcctagagatgtggctgagctacctgcagccatggcggtatgcacctgacaagcaggctccgggcagcgactcccagccccggtgtgtgtcggagaaatgg

SEQ ID NO: 39450 - DNA, 783 bp, Macaca Mulatta
ggctatgtacagttcctaagatgatatgaattaaaaatcttgcccatagctgtgcagatttggatgttaaaaagcccttccttgtgaattatcagccggcctctgagccatggtcatctgttgcagtaatcatggtgccgatgcctggttgggcaagggaagcaggactgtctatagagtggtttgaggataaggttattcttattagtgaacactacctcttatgtagaaatttcctgaccgcagggtgaatgtgacattatcttcctctcttttaatatgagaacagcaaacctgtaactgttccctgtgttgccagggaaagtagatggtgattcacttcttgagtatttgtgctgaaaaaaaaacatttgtgacatgttaatgacctttaggaaaggaaaggatcagggaaaaattatttaatatgtgagtttattgcctttccttctggtttcctatgttccatgtctactggtcactctaattttttagatgggtaaactatgcagtgaaatcctaatcaatatgttttcttcttgttaacagcattcgtattgaagaaaaagactaaaatgtggttttatttatatgccttctgtggatatacttgaaagcttgctataaatacagtcatgtgcagcataacgacattttggtcaatggaagaccacatatatgacagtggtcccctaagattataatggaactggcctgggtgcaatgggctcacacctgtaaatccccaaaactttgggaaggtccaggccaggccagaatcct

SEQ ID NO: 39451 - DNA, 230 bp, Macaca Mulatta
tccctcccaggtcccatcatagctgccagcatgtgactgaaggcagggtccttggcccccgctgaagcactatcgcaggtcagcaggctcacgcaccttggcctgttgctcctagaggtcgcctctgctattcagacaaggggaccacagtgcctggtgtgccggctgagctctgcccagcaagcccacccacctcctctgccatggactctccctcttctgcttttccc

SEQ ID NO: 39452 - DNA, 413 bp, Macaca Mulatta
atggcatgccccggcttcctgtggacacttgtgatctccacctgtcttgaatccggcatggcccagacagtcactcagtctcaaccagagatgtctgtgcaggaggcagagaccgtgaccctgagctgcacatacgacaccagtgacagtgattattatttgttctggtacaagcagcctcccagcaggcagatgattctcattattcgccaagaagcttataagcaacagaatgcaacagagaatcgtttctctgtgaacttccagaaagcaaccaaatccttcagtctcaagatctcagactcacagctgggggacgccgcgatgtatttctgtgctacggataaccaggcaggaaagcttatcttcggacagggaaccgagttatctgtgaagcccaatatccagaaccc

SEQ ID NO: 39453 - DNA, 772 bp, Macaca Mulatta
  misc_feature (1)...(772): n = A,T,C or G
gggttattaactctttaatctgtttttactttctaattttaaattaagggtatagcagcataatcttataaatattttagttttatcttctactntttaccccttagaaatttttaaaagtgttcccttttcctataaaaattatgctttatgtaggttcctagaatgaaagggaccgggaatggttccctttttccggtcccttaaagggcggggtgaaaaccatttcaaaaggccggggtggaaaacatggttaaaacctggcaattggaataaacccccattttttaggggaaaaaagggccnnnnnnnnnnnnnnnnnnnnnnnnnnnnnnccccccgggtgtgggaaattgccaaaggtttttagacccccnnnnnnnnnnnnnnnnnnnnnnnnnnnccggggagaagaggggggcaaaaaannnnnnnnnnnnnnnnnnnnnnnnnnnnnnnnnnnnnnnnnnnnnnnnnnnnnnnnnnnnnnnccaaggggggnnnnnnnnnnnnnnnnnnnnnnnnnnnnnnnnnnntgtttccccccnnnnnnnnnnnnnnnnnnnnnctccctttctccccccgggggggggcgcggggggggctttattttttggggggggccaaacaaataaaaggagggggggcgccgccccacacaaagaagatttttttttctcctcccccccgccgagggtgggtttttataaaaaaggagcgggggggcaaacatatttttttttagttttttgnnnnnnnnnnnnnnnnnnnn

SEQ ID NO: 39454 - DNA, 773 bp, Macaca Mulatta
ggtatattgtgaaagttttgcattctttcgacaagatatattgaacctcaggtcctggtctctgattgatcccaacactggggtcatatgttagagtgttacacagttctctgacaagcctttattatatattgtaaaaggctaacatcctggatgaaaatcctcaaaggtcattcctgaaaaagggcgtaggcttttgagttgggtgtgaaatgcggagctgtttccactcacagtgttggccataccaaatacatgctcctggctccagctgcctttatcaaggtgtgggatgcctgtttggagagaactgccttaaaccaaggtcatgacattcattctcaacatgagagaaattgattttttaaatttctgtttcatagctttagagtacttgtagcctaggctaggctactccaagtaaatatcctgggaacaaagaggaccccaaaggagcgttgatgtggcatgccaccaacggcttcccttggaaaaatcgggaagtcagtaaaacttagaattttgcctgtcattttactcagatttcttcctttcttgggtctctattggatgaccaaatcttagaaatttccgccaaagatactggtaataacaccaattgtgactactaacagagattttataaatgtctgggagtttaaaagcccccaaccctccaaggaataaaagctgtaaatgattgaatggaaaagcctattttggttaaaggttttgggggaagggaaactagggacccaggcccctggaaaatt

SEQ ID NO: 39455 - DNA, 874 bp, Macaca Mulatta
  misc_feature (1)...(874): n = A,T,C or G
gggagagatgtaattacccttggatnnnnnnnnnnnnnnnnnnnnnnnnnnnaacattcatgctggctagatgtttaatgtcaccacaaatacctactttaacaggcaatgataaactttcaacttaactgtgagctaacagtggcagtcccattaaaatccaggatgagactaacgttgaatnnnnnnnnnnnnnnnnnnnnnngagataaaattattacaaagacagaaaaagaaactatatcatttgaagacaaagaatgatcatttgaaaacagttcactgaaactcacagaattttataaaatcccatatatgaggaaccaaaaatacataaagtagttaggaataaacctaacataaaaggtagagaacctaaagaaatgtataaaactttccaagattccataaacaaaattatagnnnnnnnnnnnnnnnnnnnnnnnnnnnggagtctcannnnnnnnnnnnnnnnnnnnggagaccttgccttgaaactgaaaaagttatcaaataaatttcctctcagagaggtaatggactcaagatgacttcaagctagacaaatgcttggaactccttgagaacagaaagataattattgtccccttaaatattctcctgctacgagaaagagtacaccactctttttagagcttatcacccaccaaactgcaaaacacacgacaagcattcaatcgatgccccctcagatcgcacgatcggcgagatacgactctacacgtgttcacggactatcgactacatatactgacagtcggattctcnaaaactgcgatatcgnnnnnnnnnnnnnnnnnnnnnnnnnnnnnnnnnnnnnnnnnnnnnnnnnnnnnnnnnnnnnnnnnnnnnn

SEQ ID NO: 39456 - DNA, 753 bp, Macaca Mulatta
  misc_feature (1)...(753): n = A,T,C or G
catgtgaaagaaccaacctgtctcgcagaggtgcagagatttccagaggactggcctagctataaacaccagcaacatctgcaacacaaaagcctttgaacttctaggcaaggactcacgctaacctagcagtattccagatcgagaacgcggatggacaggtgtctcttgagcctgtgttccaagatgtctgtggaaaggattgcagctgtcatcctttggcacattagtggaacctctgtgagctacacgttctgctgcattacgggaactcatcaaagggccagattgacatcttgccagaaaaaccggtgttttgaggagcaaaagttttgtgtacttcagtaattgtcacatttgtcttccacctccttgacatttatttgttaatcatacgatcannnnnnnnnnnnntcctttgtttcttcctcagaagtacttctggggctttgattgcattatttctcttttaatgtatcatttcagtgttggaaagaaaaatctggatctttatgtggtgacccattttagatgtaaagatagttattcaatagatagtaaattatttctcttaagagatatttccttttatttctgtacaataatatgtatgaactcagttactaggggactgtattgtgacattatcaacctttattgctatttaaaaatgatagtttgtagaactgaggatttccattgatgtgaagcacaatttaatgaataagttaaaatattaaactgttgtgatgt

SEQ ID NO: 39457 - DNA, 631 bp, Macaca Mulatta
tcctaggattacagcgggagccacctcaaccagccccatatcaattcttaaagagcttcctcattattgaatatggctgcttcgtattcattacataaaaatagtataatttttataactaactcttattaatggacatttaaatgcttctaatcttttgttatttcatgcagtgaaaaaccttgtgcatatatcaattagcacatttatgtattttactcacaacattagtacctaaggtggaattgcagagtcagtgtgtatacaacctggtatttttgataaacattgtcaagttgttctttataggaattatactaatttgcattctcacaggtcaagtatgagaagtgctctctttgactggagagccgaaaactatatcattaagtcatatccagctggaggaagtttacttacatcaactcacaggcattcattctaaggacgtttctgtctatcaaaggtgaatatgctcacctcctggattggaggttctctcaatcagagacaattacgtcctcccagaaatgtctggagaacataatagattgtcacagctggaagtgggggcatactgggatctagggagtggtcagggatgggctgctaaacatcctacggtgcatag

SEQ ID NO: 39458 - DNA, 562 bp, Macaca Mulatta
aaaactaagagtccagtaaacgactctaaccatgatactgtcatcccaggaagcagcagtgtcatgtagcatgaggtgctacatcaggatttggagagacagaggagcgagtctatatggaatgattgtggatgtctgggagtgtgtgtgcatttccccagaaaacatactcccatgttcacagcacaacacaagcatcaatgttcaaggacaattccatcaccactgcacagtttgcataaatcaacccattcatcctccaccacagctgtccctgaagataaatttaccatccccagtcctcagatggacatggtgcagagacgaatttcccaatctcttgatcttttaaatggaagaagcacatgtgacctcgggaatgaatggaaagttaatgccatgggctactacccggaatttgtcacaaagccctggtagaatttcttgctaggccaggtggttccagcacttgtgtgtgcatgtgggagaatgaaaacctattcagatcccaaacactgtcatgactgggtggtgtcagtggtcagctcacccagggttggtt

SEQ ID NO: 39459 - DNA, 824 bp, Macaca Mulatta
ccctttatggagagagtgggatgtccggcttcagagtgggaaccttcattgcgccagtgacgacaaagagaattaaatatgggtgatgttgagaaaggcaagaagatttttgttcagaagtgtgcccagtgtctcaccatggaaaagggaggcaagcacaagactgggcctaatctccatggtctctttgggcagaagacaggtcaggccgttggattctcttacacagatgccaataagaacaaacgcatcacctggggagaggatacactgatggagtatttggagaatcccaagaagtacatccctggaacaaaaatgatctttgccggcattaaaaataaggtagaaaaggccgacttgacagcttatctcaaaaaagctactaatgagtaataattggccactgccttacttattgcaaaacaaatgtctcatgaattgtttatgtgtaccatactttaatagagctcatacaacagaattcagatcatgaatgactgacagaatattttgttgggcagtcctgattcaaaactaagattggcttgtggttaaatgaatatgttcagtgtttgaattttaatagtaattccaattcagtaaatgctatcactgtttaccccttctaaagatatgattagacttcattagtaatgttaaacttttcacaaagatggtgagtgccatcttaaaacttactggagattggttttatatttagatttctatagctggttatgtgaatgtatataaatactggagaaattccttcactgtctcagaaccaagcaagagtcacctgtgttttgtgttcataaagg

SEQ ID NO: 39460 - DNA, 997 bp, Macaca Mulatta
  misc_feature (1)...(997): n = A,T,C or G
atgctgagccggttggcgatttctccaacagggaagcttccctccaggggccctaagcatttgaagctcacacctgctcccctgaaggatgagatgacctcattggctctggtcaatattaatcccttcactccagagtcctatagaaaattattccttcaatctggtggcaagaggaaaatgcgaggagatctnnnnnnnnnnnnnnnnnnnnnnnnnnnnnnnnnnnnnnnnnnnnnnnnnnnnnnnnnnnnnnnnnnnnnnnnnnnnnnnnnnnnnnnnnnnnnnnnnnnnnnnnnnnnnnnnnnnnnnnnnnnnnnnnnnnnnnnnnnnnnnnnnnnnnnnnnnnnnnnnnnnnnnnnnnnnnnnnnnnnnnnnnnnnnnnnnnnnnnnnnnnnnnnnnnnnnnnnnnnnnnnnnnnnnnnnnnnnnnnnnnnnnnnnnnnnnnnnnnnnnnnnnnnnnnnnnnnnnnnnnnnnnnnnnnnnggtgggagtttgcaagctgccatatctgaaaacactaaatctggcaatcattttgaagagccaaaactcaaggacatccttctacagatttcccttggacttaagtacatccacaactctggcatggtacacctggacatcaaacctagnnnnnnnnnnnnnnnnnnnnnnnnnnnnnnnnnnnnnnnnnnnnnnnnnnnnnnnnnnnnnnnnnnnnnnnnnnnnnnnnnnnnnnnnnnnnnnnnnnnnnnnnnnnnnnnnnnnnnnnnnnnnnnnnnnnnnnnnnnnnnnnnnnnnnnnnnnnnnnnnnnnnnnnnnnnnnnnnnnnnnnnnnnnnnnaggattaccggcaccttcccaaagcagacatatttgccttgggattaacaatcgcagtggctgcaggagcagagtcattacccaccaatggtactgcatggcaccatatccgcaagggtaactttccagatgttcctcaggagctctcagaaagcttttccagtctgctcaa

SEQ ID NO: 39461 - DNA, 799 bp, Macaca Mulatta
  misc_feature (1)...(799): n = A,T,C or G
ggggttgagggaagcaaataatggaattgtcgattggtcatctggctctaaggtttgcccttgaactaaaaatgttgagtttggggcaagggccagaaatatggcagacgtggtttttgttacgcattcttgtattatatgtgactaaattaacaaacaagatacatgtgtaaggacccttatggaactggaagacgtcttgtagtgctacaaaagtgaaaccttattggtccacttttgtctgttcctatgaagataaaataattggggaccatctacaaataggcagtgggaagacagattctacagcactgctttcatttaattgggctttagacactccactcgaatgcagaacctcacctctagttgagaccaagaattggcacatttgcatgagctcctggaataagttgctgactttgtatctaagacctgccagggaataccaagagttgtttctacagaagatactgtggcaaccaggaaggnnnnnnnnnnnnnnnnnnnttctttacaacaaattaatgtgaggaagctcctccaatcatctggttatttgaggttcaaaatcaactgcctagggaaaattgcaatgcatgattctcttggagctatcttgtctgccttgaggttcctaaacaatgaaatttcattaatgagcagtcttcagtattaaaaccactgtcttgtcacctcattttgcattactgtccttcgtggatgtttcagttataactgtaatgttattttatagacaacattaatcccattaagctaacctatttttcaatattta

SEQ ID NO: 39462 - DNA, 629 bp, Macaca Mulatta
  misc_feature (1)...(629): n = A,T,C or G
caacttcggttggtgtgtgtcgaagaaacctgactgcgccctgaggagaacagcggagaaggtccaccaagcctggcgaaaggtccactgagcgggctgtcgtccggagccactccgggctgcggagcacccagtggagaccgcgcctggctcaggtgtgggaccccatccttcctgccttcgcagaggagtcctcgcgtgaaataagcggannnnnnnnnnnnnnnnnnnnnnnagtggaagagggggccaggatccaggcctccatccccacagaagtgaagctacagctgggaggtctcctcccaccccaaccgtcaccctgggtcccgactgcccacctcctccccctccccctcccccnnnnnnnnnnnnnnnnnnnnnntccaagcacaccggccataagagcgcgtgtgtccccaacatgaccgaacgaagaagggatgagctctctgaagagatcaacaacctaagagagaaggtcattaagcagtccgaggagaacagcaacctgcagaaccaggtgcagaagctcacagaggagaacaccacccttcgagagcaagtggaacccacccctgaggatgatgatgatgacatcgagctccgcggtgctgcagcagctgctg

SEQ ID NO: 39463 - DNA, 719 bp, Macaca Mulatta
  misc_feature (1)...(719): n = A,T,C or G
gggtgtacacttgaacagccatcaagagggatacttgagcattttagagtagtggaactcaaaatctaagattcatctgggatacttactaaaagaaatgtagagttttgaaactcactcttaaaaatatgtattcccaggctaggcatgnnnnnnnnnnnnnnnnnnnntnnnnnnnnnnnnnaccaaggcgggtgaatcacttgaagtcaggacatcaagaccagcttggtnnnnnnnnnnnnnnnnnnnnnnnnnnnnnnnnnnnnnnnnattagccgggcatgatggcgtgtgcctataatcccgaacnnnnnnnnnnnnnnnnnnnnnnnnnnnnnnnnnnnnctaggaggtggaannnnnnnnnnnnnnnnnnggcgccactgtagtccagtctgggcgacagagtgagactctgcctcannnnnnnnnnnnnnnnnnnnnnttgtattccattgatttaggtagacaccaggaatgtgcatttctgacaagctttccacgcgatcctacagtaagtcatctatggactactttaagaaactcttctatagagaatggagttggattaataataggtgattttttacactggactgattcacaagaacctaaacagtagtccatgaaagctgctcatctgtgggtaaacttgttttggccccttcttcactcctgaaaagcaagcaaggagggtgttttaaactttgttttct

SEQ ID NO: 39464 - DNA, 289 bp, Macaca Mulatta
gtcattgttttgcccctctttttacctgagtacctttctggggttttgtaaatcgtgtgtcatttgtaagaatatcacgttaactctgtgttacttggtgtcacctgtggtatccttgactgaccataatgatttagtttgggtatgatgtgtctgctttgaaatgccttactggagtatgtcaaatcctgctttaaagcattccatttatctgctgggacaataagttgcctctccttggatatgtgctctacattcagaagcgaaactgattttgctttctccatta

SEQ ID NO: 39465 - DNA, 779 bp, Macaca Mulatta
ggggactcattgatcccatttctagcaatttttcttacggaaataatttagctgaaggaaaaagtgcatgcatgacttttttttgcagcattatctgtaataatgaacaagtagaaacaataaggaatcaggtagattatgttatataaaatgacagtactttgtaattaaaacttgtcattatgaatactctgggaatgtggagaaacgtttggtacaacatgaaaaaccatttatgctatgattaaggcacagcactagaaaggaatttagattatcctgccgaatcccttccttgtataggaaagatcatctgaggcccactgtagatagggttcctccaacacagatcttttaactcccagggaagctccctttcctggtctgcaccacaggagagagagaagtagatatttaggaaagactggtaaagtagagttctgcacaaagaggcaggggcagattttggtcctgtcttaactatttaaattgtctgacaacctttagcaagttactcaaatactgtgggtttcaactgttcaactattaaattggaatatcctgtctgcctgcaagtagggctcaaagcacatatttttgatagtgaaaaaatactgttgagggatgcattgcccgaaactaaaaagtcagtgctgctaaagacgtgggcagttatggaaaaagagggaggatttgatagtggagagtgaaatcggtttgtaaatctttataactactgggccctttaattgccatttccagaattaattctttttaaa

SEQ ID NO: 39466 - DNA, 215 bp, Macaca Mulatta
attccagagaacaggagacctgccagccagtgcatgtggtgaacatggacatccaggacaaccagatagatgccatcataggggcatttctcatctgcgagctctgccagtgtatgcagcgctcagaggatacggagaatgagattgatcagctgctgcagaagttggaggagaagaatggccaggccttcctgcacatggtctgcttctactaa

SEQ ID NO: 39467 - DNA, 754 bp, Macaca Mulatta
gggagacctgggtttgaagtgttgaagttttgtatactttttcgtttgtttatttctctactccctccttctcataactgccaaccctcaggacttaagttctccataatgggcagtaccttctcaataatgtatacctacatgatagcatgagaaagtctatttgcatttgcaacattttcttaggaagaactgaaatgtaattcccatttttatttttaataagcaaaagcataaatcttagaaaacctatgaaaaagaaatacttttatgttatccctaattgtcccactaaatggaatgcctatgattagcctcattaagagttttatactgtgaagattttattagaagcaatatatgaaaattacttggattaatgtgttaatcttcctctttaaaatgctaatatccattttatgcacattaaagctcagtatgcattttctttgatgcatgcagtttctatcaattaaatataaagaatgaaacttagcaccaacttattcaatgaccgcaagttttttgtttttctttcgtaaaagttcattctatttgtattattttcatgtatttgtaatggtgatatgggatccaaggctgtatatataaaaaggagataggtatatagatagatgtgaaatttacacgttgaaaacagcatatgacatagaaagaaattatgaaaagtataactcaaattctgatatgcttagttagacgtgaaaggagtatctttttatcattatttaaa

SEQ ID NO: 39468 - DNA, 338 bp, Macaca Mulatta
  misc_feature (1)...(338): n = A,T,C or G
tgcgggcagcaggcgcaggggagcgcgtatcaccagtccgcgtcctcctctatgtaataatcaggggcggtaccatcaaagaggccggggtcgagggacttccgctgcttccctctggcgaagacgcgggagatggagccgaatcccatcttctctttcttctttttccgtttttggtcttcaagatcctctagtgactgaggagtcaggagccacgtggcagaggagggggagaaggagaaaggcgagcttagctggngtgcagactgcagtggatgggatccggggcggggaaggcctctctctgagttttaagccagtggggtcagggacgggct

SEQ ID NO: 39469 - DNA, 300 bp, Macaca Mulatta
tgagtctgtcctggcaaacagggatgttccctcagagggaacaggccgtcgaagcactaacagcaactgagcccccaagcatatcagcaaccaccttggaaacccaggctgggggcacctgaagcagctcaagacctggcagtcaggacccactggaagaccccattcacagcactgggtagcaggaggccaaaggccaagaggaaccagaggcctcagtccgtgcagccccacctaccccaccccatgcagctccaggatgtagtgaagagtgcgtctggaagtgtctgcctgggaagg

SEQ ID NO: 39470 - DNA, 585 bp, Macaca Mulatta
  misc_feature (1)...(585): n = A,T,C or G
gcagatatcaattgaaccaagtgatcaaagttatcatcaataatgagacaaagtgacattatgtgcacacaacatcacctgggtagtattcttgccaagtatatttgacttgaatctaatcatgacaaattcaaactgtacaatattcttcaaaacaactggcctggacgcttcaaaaatattaatgacatgnnnnnnnnnnnnnnagaagagaactgctctaggttaaaagagactacaaacatacaacaattaaatacaacacatattccttgaaggaatccaggattgtgggggtaaggtgtaaaccatgttgagataactgaagaagtatggactgtttataacattattataccactgtaaaatttctgaatgtgatagtgaacttaataatggtattatggaaaacaccattgttctcaggcgatatatgcttaagaaattatggagtgaggtgtcctgatgtctgtaatttatttcctaatacgtgaataaaaattcctaatatacagtaacacaaaaaactgtgtgtgtgctatgcgtgcagggaggtacgagagaggagagagaaaaagtgagagg

SEQ ID NO: 39471 - DNA, 701 bp, Macaca Mulatta
agcttcatggcctaaatatcaactacaactgtgagatttgtggaaactacagcgaccgagggcccaaagccttccagcgacactttgctaaatggcgtcatgctcatggtatgaggtgtttgggcaacccaaacactgctcactttgctaatgtgacacagattgaagatgctgtctccttgtgggccaaactgaaattgcagaaggcttcagaacgatggcagcctgacactgaggaagaatatgaagactcaagtgggaatgttgtgaataagaagacgtatgaggatctgaaaagacaaggactgctctagtgttcagggatgtagctcagcttttgggctagcccaggcttccctgagatctgctttttctatttctcccaaccaaatcctcttaaagaccctttgctacatagtctcatggtctagcatgcatcttgtagaaacaaagcatgctggcagattgcagggttgagatgtgttttatcggtcttatattttaaaagattctgccagaaaataaaaccagaccttgttctgaagcccagggttatggaccaactcagtgcttcgggtcttaatgcctccatacctctttctcaccaactttagtagtagctgagatttaatgggcacttgtcatgctacatatcatgttagataaatctgacctgacctctttccccaccctcctttgtt

SEQ ID NO: 39472 - DNA, 159 bp, Macaca Mulatta
gtctggctccagagtccctgtttgctccatggacaatttagaaaggctacaaagttgtatttcagcttaagtgagtcacttagatggcatatgtcttaaaaaaaaataaaagtggccctaccaatagtatgacagaaaggaggaaagaatcgtttttca

SEQ ID NO: 39473 - DNA, 827 bp, Macaca Mulatta
  misc_feature (1)...(827): n = A,T,C or G
ggcctctttgggcctcttttcctcttagtattagctcctccttattacccatggtaggcagaataatagcccctcaaagatgtccacagcctaaacaccagaagctgtgattgtgttagcttgcatagcaaatgggaattaaggttgttaattacctggtgttgaaatagattatcctggaatcgctttaaccagggaggcagaggttgcaatgagctnnnnnnnnnnnnnnnnnnnnnnnnnnggcgnnnnnnnnnnnnnnnnnnnnnnnnnnnttatcctggattattccagtgggccaattgtaatcataagggcctccaaaactgcaaaagagagtcaagaatgaccaataactatgaagaatgattagagagatacaacattgttggctttgaatatagaggaagggagcctccagcgttgtgggtgacctccggaagctggaactgataagaaacattcccccgaagcctctctaatgctctgatgaccccttgattttatcctcatgcgatcagtggttggacttctgaccaacagaactgtgaaataacctgggtccttaaatttgggaaaacttggttttaaccccaataaccattactaccccttcaagaaattcttttaatccatctgaaaccattctcccaaaaattttaacccctttccaggtccggcagtggcccttgtcttggtggcttcaaacaggaaaaaaattcccaattaatttgtggaaaacccccaaatttaaaattttctaaaacccccccccaacgtaaacttgatggggaccccccctttttcccccccacccttttgggccg

SEQ ID NO: 39474 - DNA, 769 bp, Macaca Mulatta
  misc_feature (1)...(769): n = A,T,C or G
ggagtcttaattacaataaatannnnnnnnnnnnnnnnnnngtgttctaagctgcagaaaagtaaatatgtccttgcttgtacattatttcaaacatagaaagttaattaagataatatgaaatgaaggcttatctttatttgagactaatttactgaggcaagaaagttggtgaggtggggtgaggcccctgcttctcaaataaggaaatcttaaattaaatcaatgccagtcaattgcacggacatttttgtcttggtgtaatgtgctggtcaagctatcaaataaaatgctggccatagattcatggtcctcaatagaactggtggttgagaataagattgctgtagatgctcatcatcctctacagaagtgatgaactgagagcttatatctttgaaagggtcatataatccttggacaaagcaggtaatacgcctgttacccctgctgcctttattcatccacccatctaaacaaccctcccctcagtgtttactaaatgccaactctgtgccaggaactagtctagacactagggatatggtggaaagagaatgtataatgctcagaagttggattagtgacattaaagaaatacagcggacacacagatcaacatattaatgaatcataannnnnnnnnnnnnnnnnnnnnnnnnnnnnnnnnnnnnnnnnnnnnnnnnnnnnnnnnnnnnnnnnnnnnnnnnnnnnnnnnnnnnnnnnnnnnnnnnnnnnnnnnnnnnnnnnnnnnnnnnnnnnnnnnnnn

SEQ ID NO: 39475 - DNA, 626 bp, Macaca Mulatta
ctgcctcctgggatctgggagctggtctgttcatctgacagctggagatcaccctctaatatctgtctggagctacttagagaaacagtggcatccttgtattcttcttgaagctgctgggtaagctctatgctaggtaaggctggtatcccagctggctggccgagtggcacagacatggctctggcccttggtggagatcatagcagtgttggccttggaagtgtggttgaccttgttaggggtgtcactggctgaggtgtttgaagataaaccaccagagctattatagatgactcgggttgcaggatgctgtggagctggtcttgtcgttcctgggatggtggtgaaggtggaggtgaagaggggacttgttccagcacttttcctgccaggagagctgtgaaagggtttcctccaaaaggatcttgcatactgttcagcatttgatcattaatgtcagcacagttctgacccagggcattgttcccacctggcattgtctctaagcccagatacagctgtggattcagtggatactcaaggttttgtgaaggttgttggatctgcattatctcttggatcatagcaaggttcctggccagctccagagtctgccatagccc

SEQ ID NO: 39476 - DNA, 206 bp, Macaca Mulatta
ggatctccctggccattaagatggaagagcaaatagtttctcatcctggagaaatactctccagggtggtggtcatatcttgtaaggattcagtcccatgttgagtaatgtctttgacaacggaaggaattgcaatcccccagctcagtgccaaaagtgtggggtgtgtttgaagctttttataattccatttaacctatccagat

SEQ ID NO: 39477 - DNA, 561 bp, Macaca Mulatta
  misc_feature (1)...(561): n = A,T,C or G
tgccatttgctctagagaatcagggaagaaagatacagggtgatctgtttggccccacccnccaggcttctggacatntccaggactctaggcaaaggcagaagccaggtcaagagtcccactgtaaaacaggtgcacccaggaccgggaaaggctcaggacacccatagtacacatcagctggaactcaggaggcctgggactcaaactgccctgtgtccggcctgggggaacccggggcgggcagcatgatgtgcaaacctcagatccagctctggtaacacaaagttgtcccagggaaaagtgagcggattccagtgttgtgacagctgcagagggcggctcaggatgaagacgcctgtgtggggacaatgggtcctttgtgggtgcaagggaggtctttgggggcagggcagtgcataggggtctggtggccccttcacctccttccagaactcttgggaaagagacactgcctgggaagactgagtgtcataattcacccaaccccttgtccaacatgaagtgaccaagcccttgatcagctttaaaaactagttt

SEQ ID NO: 39478 - DNA, 193 bp, Macaca Mulatta
gttattccagtagactgaactatatctccaggttaactggccttttacgcatgtctagcatatttattgtttgcatgtagtggctggagtttatctgttggatgtagatggggagttactgagttgtgggaaaaccagaaaacaaggcaggaataattagaagagcgatgatgtgcaccagaaaatgttaatc

SEQ ID NO: 39479 - DNA, 498 bp, Macaca Mulatta
  misc_feature (1)...(498): n = A,T,C or G
gaattcacnnnnnnnnnnnnnnnnnnnnnnnnnnnnngnnnnnnnnnnnnnnnnnnnnnnnnnnnnnnnnngaaagcaacataaactatgttgtttgtacaaacagtttaggcacagtgagccactcttattaggtagggaatggtgatagccctctctaaacccaagtttctagatgccaaatttgcaagcagccctttaaggacagtagtctcagacctgctattctaactcttctgaacaacatcctagacaaaagtactannnnnnnnnnnnnnnnnnnnctatgnnnnnnnnnnnnnnnnnnnnnnnnnnnnnnnnnnnnncgggctcaagcgatcctcctgctnnnnnnnnnnnnnnnnnnnnnnnnnnnnnnnnnnnnnnnnacacctggccaggttctactttttaatatttaaaatatggaatagactgggcatggtggcttacacctgtgatcccagaaatttgggaggccgaggcgggcggatcgct

SEQ ID NO: 39480 - DNA, 535 bp, Macaca Mulatta
acgagacaccggcgtgccagctgtcatgtcaccttgcagggctggagttggcagggtggggccaagtttggggtgcctgggagggtttgggggtgagtactggggtcactggtctctgcttccatcagctcagggctggttccctcagaatggaggccagcgcggccccctcaggtcatcggggctggtgaggctcagacaggagcccaggtgggatcctcgagctgggaaggacccagactccccctgtaccctgcctgccaaccacagggcctgggcccgactcccagcaagactgccaagagggccctgtccagatcctcccccacaagcacccagtccttgggggaggagggagggtcccaggagacccaccagcctggagcaccagctcctgtcccctcggctctccctggaccagacttgggcaggtagagcctcagcttcccccagcagggacatccctgactttccgggcctggggtctcttaggtggtgtcccacctccccaacagacgactagaccagcatagga

SEQ ID NO: 39481 - DNA, 341 bp, Macaca Mulatta
tgtctttagatattccagttctctatataaacacaacagaactcacaccggagagaaaccctctgactgtgagaaacgtggcaaagcatttaggtattccagtcctgtatgtaaacatgaaagaactcatactttgtagaaatcctgagaatgtaaggatttggggaaaacattcagttaattcagttatctttgaaaacatgaaagaaattatattggaggaaaacagtataatttacataatatgcataagagaagtgtgatgacgcctttatatgttccagttacctttgaacacattaaaaagcatatgcaacgtttccattttcctttgaaaatac

SEQ ID NO: 39482 - DNA, 697 bp, Macaca Mulatta
agggggaagggagagtatcaagcagtaagacaaggagatggtgaagacagcagaagcccagaagcagcaactgaaggaggagcaggggaggtcagcaaggaacgggagagtggggatggagaggctgagggagaccagagggctggaggggactatttagaagagggtaccctctctgaaggctcaggtgtagagtccctggaggttgactgtgccaaagagggcaatcctcactcttctgagatggaagaggcagccccacagccaccccagtcagaggagaaggagtctgaggggcagcccagttcagatggctgtctatgtccctgttcccttggcttgggtggcgtgggcatgcgtctagcttctactctggttcaggtccaacaggtccgctctgtgcctgtggtgccccccaagccacagtttgccaagatgcccagtgcaatgtgtagcaagattcatgtggcacctgcaaatccaagcccgaggcctggccggcttgatgcgactcctggagaaagggcttggggggcccgagcttctcgatcctcttggaggaatgggggtagtctttcttttgatgctgctgtggccctagcccgggaccgccaaaggactgaggctcagggagttcggcgaacccagacctgtactgagggtggggattactggctcatccccagaaactcccttg

SEQ ID NO: 39483 - DNA, 880 bp, Macaca Mulatta
  misc_feature (1)...(880): n = A,T,C or G
ggaaaggatctctatacaaacaaatacgtggctgtcaaattggagctgatgaagtcccgggccccacagctgcacctggggtactggttctacaagcggctcagcgccactgagggcgcccctcaggtctactacctactacncagcctgaaggacctgttcaaccttcacgctgaagacagtgctcccgattgccatccagctgatcgcacgcatggagtatgtgcacaccaagagcctcatttaccaggacgtgaagtccgagaacttcgtggtgtggcgcccggggaccaagcggcagctcgccatccacattatcaacttcgggccggccaaggggtacattggccttgagaccgagaagcacatcccgtaccgtgagcacaagagcttgacaggcagggcgcgctacatgaacatcaacatgcagctgggcaaggagcagagccactgcagtgacctggaggtgctgggccacatgttcatgtacttcctgtgctgcagcctcccctggcaggggctcaaggccgacacgatcatgagcagtacagaatatcgggaacaccaagcgcaccacgcccatcgaagtgctctgctagaactttccagaggagatggccacatacctgcactacgtgcggcgcctggacttggagaaacccgactgtgactacnactacgtgcggcgcctggacttggagaaacccgactgtgactacctgtggacctctccaccgaccctcttgaccgaagcggcttcgtgttcgactttgagtaccactgggccaggagcctttggcgacccccatcggcacggtccacaccacccaaccctcccagcttcagctttgggacaagatcagccaccagcaaaaaccag

SEQ ID NO: 39484 - DNA, 765 bp, Macaca Mulatta
  misc_feature (1)...(765): n = A,T,C or G
ggcgccnnnnnnnnnnnnnnnnnnnnnnnnnggctgggactgcaggcgcctgccacctcgcctggctagnnnnnnnnnnnnngnnnnnnnnnnnnnnnnnnnnnnnnnnggctaggatggnnnnnnnnnnnnnnnnnnnnnnnnnnnnngtnnnnnnnnnnnnnnnnnnnnnnnnnnnnnnnnnnnnnnnnnnnnnnnggccaacacctcacttcttatcagaaactgtgaaggtcaaaagacattggaccaacatattcaaatgatggaaaaaagaaagctttcagtcaagaattctgcatctggcgaaattatccttcaaatataaggggaaaataaagacatttttggataaacagagatgagagaatttttcactagtagacttgcactataagacattttgactgaagggaaatgacacctaaatggatatttggatctacacaaaggaatgaagagtacatgaaattgtaaacgtgtgtaaaacaaaaataatgattttttgttatgtcttaatatctttttacaatgtatacagataatacacaggataacctcccaatctcaacctcccaggttcaagcaatcctcttgactcaacccctcaagtagctgggactgcaggcacgcannnnnnnnnnnnnnnnnnnnnnnnnnnnngcannnnnnnnnnnnnnnnnnncccaagctgatctcccactcctgagctcaagcaatctgccccgccttgggcctcccaaagtgctaaagactacaagcccc

SEQ ID NO: 39485 - DNA, 759 bp, Macaca Mulatta
ggagggagaggaagaagtacagaaataactttcttatgagaccttaatgagataacacaaggggaataatctagcacatgcctgggtatagcacatgctcaataccaagagtgaacacctgtgctgactcttggattaaagtgattagtcactctggagaggtacagacaatgtagtcagatgagggatcagtaacttttgatgctattgttggggaagtcctcatggaaacttgaaatgggccttggagttgaatgggatttgggcacatccacctgagcatggggagatcaccttatttggctttgtatttttagcagatggtacagaataagttggaaataatttcttttagatgaataaataaggggaaaggacaattttggtgaggggtaaacctcaagcaatggcatgccagagattgggaagtacaacagaatttagggactccagcagtgattcggttcacctgaagaaagagtaattacaagggaaatgtgtcttctaagtacgatcagggtcagatcctgaggaggtcatagttgccaggccaatcatgtaggatctaaagcaggcttggtagccaatattggtgacattggagcagggtatgggtggcaggagcctcagatgaggagactattacagcatcagagctgggagtaattacttatctagggtggccatagggactatagagacctggatagaggcaagtgatattttagaggctgaattgacagcaccctaaagtgagta

SEQ ID NO: 39486 - DNA, 97 bp, Macaca Mulatta
tgtgcgagagatctcacttaagctagagtgacggcatactgggtacagtaatgtctggagtgtgcctggggacgctacgcgtcgtctagcgtctacc

SEQ ID NO: 39487 - DNA, 756 bp, Macaca Mulatta
  misc_feature (1)...(756): n = A,T,C or G
gggactgcctttatgatgtctggtttcattgagtggaaaggttttcatgaggtcagagattcagagttgatttagccatccacatgttaggctgagggtgttctctctttagccagtccgttgaaaggcttcttcctggttatggcccagcaaagaatccagtctggttttccagagtctcaaaatacccacatctgaaggagaaaccccagaggcagacagagttaggagtcagtgagcttggaactgaccagctgggaatgtgctgtggtctcccttgagaagagggggaaacagaacatgatctggaaagaaggaagaaggaacagcttctgttctcctcaggggaaatgagactttctgaacttcatcatcctgaagtgtcccacaaatcaaatccttttttttttgactactccttacataaaatatttttatgacaaagctttctacaaagcaaaagatgccttctataaagtgaatcatcacttcggatgcttcctttgtataaatctgacctttcttatgttgtaaggaggtttttttttcctattatttttattatccagagcaatacacgttcactgttgaacagttagaaagtttccgatggaccnnnnnnnnnnnnnnnnnnnnnnnnnnnnnnnccttgttggggccggccctcgggcccctcgannnnnnnnnnnnnnnnnnaaattttcgtttttgggcgccccggggcccccagtataggtataagtggaaaacattgta

SEQ ID NO: 39488 - DNA, 720 bp, Macaca Mulatta
ctattggctgctggtgggtaactgcatggacagaggaaaagggagggcaggactttgctgcagagctatgggatgaatgtagttcttccctgggcagcctgggagtgggaaggtcagaatgactcacgtggccttcaggatcaagccaaccaggatttagggacaacccaagaggtctttagtcctctggcgtgatttagacatgttttggaagagcacgagttccgtatctgagatgagatgttaagactttcagtgcagacagtacaagccatttcttcagggttcctccgggggcagctccttcatgaggtcccacctccggggaggggcacaggactccagatagtaagcacttaaggcaaacagtggatggcaccaacttttaaaggtgactctttgttaatcaatggcttcacctctaaattatatttttacagataatgcacctatgcaacttaacgtggctcttctaagcaggtgaggacttcctcctcaatgctctctataaaaatcatttgtgttctatatagtgagttttaccagtaaatgtggcttaatattttaattcttagaatgtgtcttctgtacgtgatgcgactaaattctgttttgtttgtggaatgactagcacaggccgactccctctctccctcacttaacaaaagaccaatgagctgttaatcgagctgttatctccaggatattacttgctaaatg

SEQ ID NO: 39489 - DNA, 636 bp, Macaca Mulatta
  misc_feature (1)...(636): n = A,T,C or G
gggggacactggtaagctgagtgaaaggaagtcactgacctattccttaccaacatacttaacagtgcctgtaggaagctagttgggagatgtggatgggaaggaaaaagtgtcaacatttatatgaatttcaaatatatcttacctctagccgtgccttaaaatggtttgaaatatgaaaactaaaaaatatagtaaaacatttttattaaacttgtagcttaagtttatattcagtttaatataactgactacattaagtttatgtgcaaattcagtaactaggaagtctacaggtggccagtgttgtgaagttatcccccaacactttattatgacaccttttgccaatgttattttaatgaatactctataatactacccagtgaacttgtacaaatattggatgatttttataatttacccactgaacctaaaaaaccgtagggggtggggaaaacccttcatttaaatgttggggaaatttttcctgcgggttaaaaagaatttagccctgtttttctttgtttnnnnnnnnnnnnnnnnnnnnnnnggggggttttccggaaaacccnnnnnnnnnnnnnnnnnnnnngtggaattttctnnnnnnnnnnnnnnnnnnnnnnnnnnnnn

SEQ ID NO: 39490 - DNA, 768 bp, Macaca Mulatta
  misc_feature (1)...(768): n = A,T,C or G
ggaggctgaggcaagaggattgnnnnnnnnnnnnnnnnnnnnnntgcagtgagctatgtgattgcaccactgtactccagccttggcaacagagcaagaccatgtctcaaaaaaagtgaatgtaacatcagtagactcttgaaaatgttccttaccccctggatctgttgaaaatgttattttctattcaaaattcagggttcttttggtttcatcctctcttgcttttttaaagttgtatatgtgattatgtcattactgaaagagtcttattcctttcccttaatctctcactcctgccccctgcccccatgtaggactgaatacttcattctgtcgtagagggtctttgtacacagtacattattactttatttaatttcttcactcctcacctgtgaccttcctttctctgatatctccttactaatctcttcactttcacttttccttttggctgtcatctactctctcctttttaattatctgctgaattaacttgctcacactgattaaccctcctttgttattagtgctgcttagagtctctttcttctattttctccatccagctttccttttactctctcattctgactttgcatccccagtcatgctcctagcctttaaagagttatccttagctacaagaaaaactggtaaataaaaatataaaatgaacccnannnnnnnnnnnnnnnnnnnnnnnnnnnnnnnnnnnnnnnnnnnnnnnnnnnnnnnnnnnnnnnnnnnnnnnnnnnnnnnnnn

SEQ ID NO: 39491 - DNA, 686 bp, Macaca Mulatta
  misc_feature (1)...(686): n = A,T,C or G
gtctcgagttttttcccttagtttttgtnnnnnnnnnnnnnnnnnnnnnnnncaccatgttagnnnnnnnnnnnnnnnnnnnnnnnnnnnnnnnnnnannnnnnnnnnnnnnnnnnnnnnnnnnnnnnnnnnnnnnnnnnnnnngcgcccggcctgctatccccatcttatagttccatgttcagactcagggaacaacacattcatattatttgatacctaagtgtagaggcagaggccagatctgaaattcatattatctgactgtttatgctccctccactctaacctgaggcatcctggttagtgtagtgtacatctgaggtttctttcctgaaggggaattaccagcacacagtaaagaagaaactaaatatagtttgtccttcatgaaagaaaacaacaacaacatattgggaagttaagtagcttaaaagttccttgtttgtactttaatcctttctaaaaatgtatttacttatgtctagacctttttcattcaaaaatatttgagacttatagagaaagaaattggctaacatcttatatacacatatgcaagtatatatgcacacatatacatacacacatactatatatagcatatatatcatgtctataaatatgccccatgtgtatctttcatgtatatatgtaaaaacgtgtgtaagtatatatgtgtgtgt

SEQ ID NO: 39492 - DNA, 605 bp, Macaca Mulatta
attgaagtgaaaagattttagaaaacatatctttaatgtgtcttctcctccacctcccactcccgacttgaaacctggggagcagccagtgttcttcatccctagatatgctacttaatctctttgctgtgctctcttgctctcatgcctgataccaaagtcaagtgttttctacccagaaaccaggtgatatttccctgtgatagtaaaaaacatgcagtgagatagttttttcattttgctggtcttgcttgcatgcctttgggcaaaaataaaacactttggtggctctgctaatctgtaagtattgcttatgatgtgcctatcttgttaccaagatgtgatttagtcaccaagagaatttggatatttaatactagtacataacaaaactccttatcaagtactcatgtgggcacatacagaggcctaattgtattcttgtaatgcacaatataaatactaatattgttttggagaatcagcatggtatgccaaagccatggtttggaaaaatgcattgtagtatgtctttatctgtgggaattactggcaaatataattgagagattctaaatactgtagttgtttccttcacttttgaa

SEQ ID NO: 39493 - DNA, 1981 bp, Macaca Mulatta
  misc_feature (1)...(1981): n = A,T,C or G
cgatgaggtggtcctgaggcagaagccccctacgggccgcaaggttcagctgacccccgcaagacagatgaaccttggatttggtgacgagtccccagagccagaggccaatgggcgaggggaacgcctgggcaggaaggtggcccctttggccgccactgaagactctctggcttccatcccctttattggtgagnnnnnnnnnnnnnnnnnnnnnnnnnnnnnnnnnnnnnnnnnnnnnnnnnnnnnnnnnnnnnnnnnnnnnnnnnnnnnnnnnnnnnnnnnnnnnnnnnnnnnnnnnnnnnnnnnnnnnnnnnnnnnnnnnnnnnnnnnnnnnnnnnnnnnnnnnnnnnnnnnnnnnnnnnnnnnnnnnnnnnnnnnnnnnnnnnnnnnnnnnnnnnnnnnnnnnnnnnnnnnnnnnnnnnnnnnnnnnnnnnnnnnnnnnnnnnnnnnnnnnnnnnnnnnnnnnnnnnnnnnnnnnnnnnnnnnnnnnnnnnnnnnnnnnnnnnnnnnnnngtccttggatagctggggcacctctgaagatgctgacgctccttgtaagcgacactcaacctctgacctctcagatgcaacggtcagagatatcaggagagaaggctggttgtattataagcagattctcaccannnnnnnngaaagcgggcagcggcctgcgccagtggaagcgggtgtacgccgcgctgcgggcgcgctcgctctcgctgagcaaggannnnnnnnnnnnnnnnnnnnnnnnnnnnnnnnnnnnnnnnnnnnnnnaggtgaggacgaggcggcgcccgtctgcatcggctcctgcctcgtggacatctcctacagcgagaccaagaggaggcacgtgttccggctgaccaccgctgacttctgtgaatatctctttcaggctgaggaccgggatgacatgctgggctggatcagagcgatccgggagaacagcagggccgagggcgaggnnnnnnnnnnnnnnnnnnnnnnnnnnnnnnnnnnnnnnnnnnnnnnnnnnnnnnnnnnnnnnnnnnnnnnnnnnnnnnnnnnnnnnnnnnnnnnnnnnnnnnnnnnnnnnnnnnnnnnnnnnnnnnnnnnnnnnnnnnnnnnnnnnnnnnnnnnnnnnnnnnnnnnnnnnnnnnnnnnnnnnnnnnnnnnnnnnnnnnnnnnnnnnnnnnnnnnnnnnnnnnnnnnnnnnnnnnnnnnnnnnnnnnnnnnnnnnnnnnnnnnnnnnnnnnnnnnnnnnnnnnnnnnnnnnnnnnnnnnnnnnnnnnnnnnncagcgcgtccccttaatcgtggctgcatgctgtcgcattgtggaggcacgagggctggagtccacaggcatttaccgagtacccggcaacaatgcagtggtgtccagcctgcaggagcaactcaaccgagggcctggtgacatcaacctgcaggatgagnnnnnnnnnnnnnnnnnnnnnnnnnnnnnnnnnnnnnnnnnnnnnnnnnnnnnnnnnnnnnnnnnnnnnnnnnnnnnnnnnnnnnnnnnnnnnnnnnnnnnnnnnnnnnnnnnnnnnnnnnnnnnnnnnnnnnnnnnnnnnnnnnnnnnnnnnnnnnnnnnnnnnnnnnnnnnnnnnnnnnnnnnnnnnnnnnnnnnnnnnnnnnnnnnnnnnnnnnnnnnnnnnnnnnnnnnnnnnnnnnnnnnnnnnnnnnnnnnnnnnnnnnnnnnnnnnnnnnnnnnnnnnnnnnnnnnnnnnnnnnnnnnnnnnnnnnnnnnnnnnnnnnnnnnnnnnnnnnnnnnnnnnnnnnnnnnnnnnnnnnnnnnnnnncagactggttcttcagtgacgaagaggacaagggagnnnnnacccctgtgggcgacaaggagcctcaggcagtgcccaacattgagtacctcctgcccaacattggcaggacagtgccccctggcgacccggggtcanncagcggacctgttggagatttaaagg

SEQ ID NO: 39494 - DNA, 618 bp, Macaca Mulatta
gcggcggctctggagcgcgcataagggtcctggcttcggcctcagccccaccatggtgacgcttgctgaactgctggtgctcctggccgctctcctggccacggtctcgggctatttcgttagcatcgacgcgcatgctgaggagtgcttctttgagcgggtccctcgggcaccaagatgggcctcatcttcgaggtggcggagggcggcttcctggacatcgacgtggagattacaggaccagataacaaaggaatttacaaaggagacagagaatccagtgggaaatacacatttgctgctcacatggatggaacatacaaattttgttttagtaaccggatgtccaccatgactccaaaaatagtaatgttcaccattgatattggggaggctccaaaaggacaagacatggaaacagaagctcaccagaacaagctagaagaaatgatcaatgagctagcagtggcgatgacagctgtaaagcacgaacaggaatacatggaagtccgggagaggatacacagagacatccacgacaacaaaaacagcagagtggtcctttggtccttctttgaagctcttgtactagttgccatgacattgggacagatctac

SEQ ID NO: 39495 - DNA, 815 bp, Macaca Mulatta
  misc_feature (1)...(815): n = A,T,C or G
ggtattttttggtagagactgggtttcaccgtgttagttaggatgatctcannnnnnnnnnnnnnnnnnntgcccnnnnnnnnnnnnnnnnnnnnnnnnnnnnnnnnnnnnnntcaccacgccctcttctcccctttttattggtgttgctgacagctgaggaagacttcagctcaactgactcctggatttggacttaaacttggtactgttggcttgaaacaacttgtgtcgtattgctgtggactgaatgttttaatcacccaccaaaattcctatgttgaaattctaaatccccaatgtgatggtatttggaggtggctttttggagctaattaagtcatgaggctggagccttcatgataggattagtgcccttattagaagaaatacaagaaagatgcacactctctcactaccatggaaagacacagcaagaaggtgccatctgtaaacctggaatttggtccatccaggaaccagatcactccagcatctagatctgggacttcctagcctctgaaactgcaagaaataaatggtcgttattttgagccacccagtctatgtttttaattatgagcacgtgcaaacctgaagtaagaaacacatgtgattttgaaaccctttcatttactggtgaccagcgaactctttcggcaaggagaaatatttgagtttcagaaaccacagaaaatggcttttgtgtgggctcccccagcccctgaaagcctttcggaaggttttaaacctttgcccatttaagccttgtctgggtgggatttttctggccaaaaattattcccctttctcct

SEQ ID NO: 39496 - DNA, 784 bp, Macaca Mulatta
  misc_feature (1)...(784): n = A,T,C or G
gggtgcgtaaaaagaatgtgtcgcctgtaattacatgatgttctgtgtatatctttaaaacaacttttaattatacagcccaatcttacatatctttaattttttatttgcttgaatcgtcaattacagaaataggtatgttaaatattctcactatgatggtggatttgacaatttctcattcatctatatatttttgcttcatatattttgaggctatgttatcagtgagttgttgtaaattgaacattttataatatagggaccttacagtatgatacctgttaatgannnnnnnnnnnnnntcnnnnnnnnnnnnnagagatcgaatcaaggtttctttggtttttgcctcatttatctctcttttatcatttggctctaaatcttctgaatctatgtttcaagtatatatgtaggaagcttacttgcgtttttttaaagtttgggattttggaaatattggttgacaatttataagcttgtcattgaataattcatgtatatttgttgtgactaggaatacatttagaatttatttgctaccatccgataatttgccttttgatttttcctgcgcgttaagggaggtattgggcgagcgcaggccacgcaattgggaccaaaatgaacagagggttgcccgaggtggtggccttgcccgggaaacatgggaagggagaccgggcgattaaagggcgcaaaaaggctgaaagtatagaagaaatgagcaccgccaacccccacgcaaggcgggcgcggagggaagacaaacaaaaaggcg

SEQ ID NO: 39497 - DNA, 397 bp, Macaca Mulatta
taaaaaggactgtttaaatggatcctaagataactttttgataatgtaatattgacatgataaaattgtgaacttcataattctggcacaggaacaatttatgaaaacatactaaggtatttgtaaattgaggaaattatatatatgttaggaaagtcataattattacacttgtatatacccttaaaataacagagcctgcttgaaatgttgcaaaaagaaacagaaatacctgctaatatgcctttctaattaaggatgatgccaattaatctctttatataaataataaacttggagttgttttaccaattgtgttgatggaagtgtgctgacatgttcacacatctattcatgcatgtgtaaagatggctatacagactttaaaagtttaatc

SEQ ID NO: 39498 - DNA, 660 bp, Macaca Mulatta
  misc_feature (1)...(660): n = A,T,C or G
gggggtggctggaagacatggctactggcgttggtgttgagcacggcgagcagcttcaggcctttagtgatgatgaggcctttctttgtttggcatctgcagagacggtgaaaagcagagctccaggttgaaggagcagagtaatggatggagccctaacatgagtaagaatgggttcaggcaaggcctgagtggtcaccaaaaatgagaaagcacagatggtgctatcacatacattcacgtcctgctttattctgaagttcaagtgtgagaatacatgttgacatacaagccagctatgattaaaggtgttggctgtggccttggaaacagtcatgtgaaaacccatcaccttaaggtgttgagtgtaaggatcttcatgatgaagtttctttaaatggtgcagtgagcgtcagtttccgaggccggaaaaggatcctctagtagccacattgtggcagctgccctgaaccgggacctggacccggacccaaattgccatgtctttaatgcatgttagctactagccatgccagatgggatcagcacagccctgcctctgctgctaattgttccctctaagtaatcgccatgccttcttcgggcttcatctttnaaggaatgaagtgactgatgatatctgctgnacagcttttgcan

SEQ ID NO: 39499 - DNA, 682 bp, Macaca Mulatta
gctgggcgcaggcccatgccgcagtgtatctcccagcccggcctgcgctctctggcctttaggaaggagctgcaggatgggggtctccgaagcagcggcttcttcagctccttcgaggagagcgacattgagaaccacctcattagcggacacaatattgtgcagcccacagatatcgaggaaaatcgaactatgctcttcacgattggccagtctgaagtttacctcatcagtcctgacaccaaaaaaatagcattggagaaaaattttaaggagatatccttttgctctcagggcatcagacatgtggaccactttggatttatctgccgggagtcttctggaggtggcggctttcattttgtctgttacgtgtttcagtgcacaaatgaggctctggtggacgaaattatgatgaccctgaaacaggctttcacagtggccgcagtgcagcagacggctaaggcgccagcccagctgtgtgagggctgccccctgcagggcctgcacaagctctgcgagaggatagaggaaattgagaccaagaaacgaacagcgagagaatgaattgattatttcttttctgagatgtgtatatgaagagaaacagaaagaacacatccatattggggagatgaagcagacatcgcagattgcagcagagaatatcggaagtgaatta

SEQ ID NO: 39500 - DNA, 785 bp, Macaca Mulatta
gggttgctgtttctctttgctctcctagatgtggctcttctttcacgctttatttcatgtctcctttttgggtcacatgtgtgtgctttttgtccttctgttgttctgtctacttctcctttctctgcctacctctcttttctctttgtgaactgtgattatttgttaccccttccccttcttgttcgttttaaatttcaccttttttgctgagtctggcctcctttctgctgtttctactttttatctcacatttctcatttctacatttcctttctgcctctcttggggctattttctctcttgtttcctcccctgtgtgcctcagcatctcttgttgtttgtgattttctatttcaggattaatctctggtggctggtgtttcttctctgcttcttcccgttgtactcacctttgagtatttcggcctcttgatgaatctatctccctctctgtgatttcatgtaaagcttcttctcgtgtaaatatttcctttgcgtatgtggggctttgtggtacgggggtggggccatggtgtggcagaaggggggttccttgaggcgcctgcgtggggagggggcaggaacgcccggtatcgcaagagtgagcgggtgtggggacggagtcgcttatggcgaaaggtggccatggtggaatggtagcaggggggagaagacagggcccctgggacgcgggaaggggagaaaagaacggcggaaaccaaaggagaggaagcggaggcagacgaagcgcccaacagcggcgagggaagacgcccgaagcg

SEQ ID NO: 39501 - DNA, 810 bp, Macaca Mulatta
  misc_feature (1)...(810): n = A,T,C or G
ggcgtggtggcacatgcctgtaatcccagttactannnnnnnnnnnnnagnnnnnnnnnnnnnnnctggannnnnnnnnnnnncnnnnnnnnnnnnngnnnnnnnnnnnnnnnnnnnnnnnnnnnngagtggaaccccatctcnnnnnnnnnnnnnnnnnnnnnngtagaatagatgtagatacagacatacaaatacatacacaagaaaagagatccaaaacattaagaggtacgaaattaccagtggcccagacaatacagtcagaatatgatgagattgctttaagctaggattggtgcagaaaagcttcttagaagatgaaatttgggctgaatctacaagggatgatagaatatagataggtaggaagagcagtgaaagagaaagttaaaaagataacatggactcatattatgtgaggttttgaatggcaaactaagaatttggattttatcctggaggtaatgggaaaatggctataatattttaaaattggaaaattcttattaggtggcattgaatattaaaaagaattttggggaaattatacattgaaataaccttttatatatggtatatatataaacctggggtaaaacataattagtaaaaaataattaaaaaatgttgggcccccctccggccccttgaaaaaaccttttcaaaaaccttttcttttgggccccgcggggccccattagggtaaaatgaaacctggtgcctagacttgttctccaaggaaaatcctgggtcccaaaacaaaaggctttggaaattnnnnnnnnnnnnnnnnnnnnnnnnngcggc

SEQ ID NO: 39502 - DNA, 642 bp, Macaca Mulatta
  misc_feature (1)...(642): n = A,T,C or G
gggnnnnnnnnnnnnnnnnnnnnnnnnnnnnnnnnnnnnnnnnnnnnnnnnnnnnnnnnnnnnnnnnnnnnnnnnnnnnnnnnnnnnnnnnnnnnnnnnnnnnnnnnnnnnnnnnnnnnnnnnnnnnnnnnnnnnnnnnnnnnnnnnnnnnnnnnnnnnnnnnnnnnnnnnnnnnnnnnnnnnnnnnnnnnnnnnnnnnnnnnnnnnnnnnnnnnnnnnnnnnnnnnnnnnnnnnnnnnnnnnnnnnnnnnnnnnnnnnnnnnnnnnnnnnnnnnnnnnnnnnnnnnnnnnnnnnnnnnnnnnnnnnnnnnnnnnnnnnnnnnnnnnnnnnnnnnnnnnnnnnnnnnnnnnnnnnnnnnnnnnnnnnnnnnnnnnnnnnnnnnnnnnnnnnnnnnnnnnnnnnccccccttgtatactttgctcccgaattttcatttaccgaaccccacccagttctctaaaaaacggnnnnnnnnnnnnnnnnnnaagccctattttttaaattctaattgggcaccttttccccccattaaaaatccaaaaattttgaacccccttcccctccccgaaggatcagagggtaaatttttttttacccaggttcttggggcccctttttttgggacccctccctttttccc

SEQ ID NO: 39503 - DNA, 654 bp, Macaca Mulatta
aatacaaatgctttttgttgaggaggtattatccagagttcatgcttagaacaaatgcatctttgtgtatcctaggcttaataattcatgagtttctgagaccacagaatcaggttttctgtagtagataaagactccctggtgcttcaaatcccgtacaaatgttttgactcagcagcttttactcctcctccttccaatactgcctttgcctggcttgttttgtctctttgcaactgattttgcaaaaggagattttgcaactgattttgcaaaaaaaattgtagctttaaaataacagggtctaagtattttaaatgtgcctatttcacagctctcttggtgacaaaaacatgctatttttattggaacttcaaaccaaatccctactgagtgtgtgctggttcctgcaggtagcagtctcctattatctcctgtttagcaccaaaagagctagtattattggatatcgaccctttaaaggccactggcagtaggatttaaaaagcagcccactgctcaatttcaagatcagcttcctccttcttgacttgtgtaagtcggcactaccttgtgcctctcagattgctgaagtgctactggtaagcgtgtgcatgctctgcctttcttgtgacacgagctttcagtcagcaa

SEQ ID NO: 39504 - DNA, 659 bp, Macaca Mulatta
gggatttcaccacatcaattagtacggttttcccagccacacgctgttttgctcttagctatctgctcagacagaacgcctacgtgaaacagaaacaaaaacactaaaagtaaaaatggccatttgctttttcaccagatttgctaattcatcctgaaatttcaggttcccagagcgaaataattttaaacaaatgttgagatgtaacaggtattaaattgatgttgctggactgtcgtagaaattacacccaaagaggtttttaatctttatttttaaacagtgagcctgaattttgttgctgttttgatttgtactgaaaaatggtaattgttgctaatcttcttatgcagtttccttttttgttgttattacttgtttttgacagtgttgaaaatgttgagaaggttgctctaggttgagagaagagataagcacctcccaggaaacagtttaagaaagttttgaactgcaagattcatgccaattagcaattgactctcactgttcttgtcactggtagaccaaaataaaaccagctctactggtctcgtggaattgggagcttgggaatagatactggaggatgcccaattagggcctagccttaatcaggtcctcagagaatttctaccatttcagagaggccttttggaatg

SEQ ID NO: 39505 - DNA, 794 bp, Macaca Mulatta
  misc_feature (1)...(794): n = A,T,C or G
ggacatgcacaatttgaaaggctaatttttcacgcctgaggtctcagcctgaatgttgctttattcattagtgaggccttaccttatcagtcttcccactttccactacgtatagacacagacaatttaatatttcctaataagtgggaataattataatggtttgttacttgtttctgtgcagatagatgggaaccatacctgttttcttcactgttgtgcctcctacctagctcagtggctggaccatggaatgtgctgaatgactaattgctgaatgaatatatgagatctatttttttaaataatcctatttatactttaatacttaaacagtactatctgtgaatgtagtaatagtcttccaggtattacaattatggtcataatttattttctttatcaggttataaattccctgagcctttttttgctttgtttttagttatatttctcctcagtgcctagcgctgcacttcagaaatcatagattttcatgttatttgcactcttcatcatctttcttcctaccataatcctgtttgtaattctatgagttatgataaataggaatgtgttttactatgtgagaaagtacatgtaggtacctgggaatagttaaatgcattagtgtatgtgagaagttataaaatttaaaacataattctttcttaaatgaatctaataattttgatgggaactatgatgaagcaacatattttctgaaaaagggaactagattttgaagtctaaatccntgaccaccgtagcctgtatggacattattgctaaat

SEQ ID NO: 39506 - DNA, 125 bp, Macaca Mulatta
gtagtttatctgtttctcttgagccagaaagccttgggcttggtagtgccaacagcagccaagattctcttcacaaagcccccaagaagaaaggaatcaagtcttcaataggacgtttgtttggt

SEQ ID NO: 39507 - DNA, 863 bp, Macaca Mulatta
  misc_feature (1)...(863): n = A,T,C or G
ggggcgcgcctgagaacccgaaaactttactttgcaaactagtggagctgagaggcagctcagacgcagattcgcttgcctttccctgaactgcacccatgccaagcacacgaggtctttcctagcaccaccccctacctacagctccacacaaaggcgcgtgggtgccggcaggacccctctccaaagttgagcggagagttgaatttaaatacccagtggctccgctgttggtgttgaaaacacaaacccagacagtatgatgggaaggaaaagtggggagattagcaccaccatttaagtgaccttcagatctattaataaaccttagaagaaaaactgggggccctccgtggttaaggagggggtcttaagttgccccataaaggggctccaaaattcttggaatttcaaccattcctcctgggattaatcctttccaaaagggatgggaattttccgggttttgaacccccctgcccccccagggggaggggaacaaaaaattttcatggggggccatttcctggggaaaccacaaaaatggggttctccccccccaaaatttcaaaccccttggttttctgggagatttttccccccccccctcctccagggaaaaaaagggagggggggtggggcttttttcaaaatactgggggggtttccaaaaaatttttggggcgccacagggggggcaaaaaaaaataccccccaaaaatggtgttcttcttttttaacacaaaggatattttttggggggaggcctctcccccccttttggagcgcctttttagccccccccggcgccccccgaaaaaaaaatattgtaaatcccttttgaaccgcggccttcccccccn

SEQ ID NO: 39508 - DNA, 1814 bp, Macaca Mulatta
  misc_feature (1)...(1814): n = A,T,C or G
cactgctgaccctctccggacctgactccacccctgaggacacaggtcagccttgaccaatgacttttaagtaccatggagaacagggggccagaactttggcagtaaagaataaaaggccataaagagaggcagtagcacatatctgcttctgacacagctgcagtcaccagcaagctctcaggcctggcatcatggtgcattttactgctgaggagaaggctgccgtcactagcctgtggagcaagatgaatgtggaagagactggaggtgaagccttgggcaggtaagcattggttcttaatgcatgggagcgaagggtgaatattaccctagcaagttgattgggaaagtcctcaagattttttgcatctctaattttgtatttgatatggtgtcatttcatnnnnnnnnnnnnnnnnnnnnnnnnnnnnnnnnnnnnnnnnnnnnnnnnnnnnnnnnnnnnnnnnnnnnnnnnnnnnnnnnnnnnnnnnnnnnnnnnnnnnnnnnnnnnnnnnnnnnnnnnnnnnnnnnnnnnnnnnnnnnnnnnnnnnnnnnnnnnnnnnnnnnnnnnnnnnnnnnnnnnnnnnnnnnnnnnnnnnnnnnnnnnnnngatcctgagaacttcaaggtgagttcagttgtgggtgatatgattttttggctttatagtttgacattaattaaagcttaggatcttattggaaagatcaacaaagatctcagaaatcatgggtcgagtttgatgttagaacagcagacttctagtgagcataaccaagactaacctgattcagaactagtgacagtaaaggactactaacagcctgaattggctcaacttttcaggaaatcttgccagaacttgatgtgtttatcccggagaattgtattatagaattgtagacttgtgaaagaagaatgaaatttggcttttggtagatgaaagtccatttcaaggaaatataaatgccttattttatgtgggtcatgataattgaggtttagaaagagattnnnnnnnnnnnnnnnnnnnnttttctcaaagaaaaataagacacattttctaaaagatattaaatttcccatcagtattgtaaccaagtgaaggcttgtttctgaatttgttagggattttaaactcccgctgagaactcttgctgcactcccattctacatttacagaaattagacaactgcttaaagaaaaatagggagagagggagcccaataatactggtaaaatgggaagagagggtgaggatgcaggtaggtagaatgttgaatgtagggctcataaaataaaattgaacctaagcttatctgaattttctgggtaggcacaaaccttggaacagtttgaggtcagggttgtcaaggaatgtaggtataaagccgnnnnnnnnnnnnnnnnnnnnnnnncagcaagttgttttcggaaacttctactcaacatgcttatgtgttattttgtcttttgcctaacagctcttgggtaacgtgatggtgattattctggctactcactttggcaaggagttcacccctgaagtgcaggctgcctggcagaagctggtgtctgctgtcgccattgccctggcccataagtaccactgagttctcttccagtttgccagtgttcctatgaccctgacaccctccttctgcacgtggggactgggcttggccttgagagaaagtcttctgtctaataaagcacgttttcttcagtaatcaaaagttgcaattttatatactgcatcttttactcttgtgttaaaggaaaaagtgttcatgggctgagggatggagag

SEQ ID NO: 39509 - DNA, 797 bp, Macaca Mulatta
  misc_feature (1)...(797): n = A,T,C or G
ggggcagtgagccgagattgcnnnnnnnnnnnnnnnnnnnnnnnnnnnnncagggnnnnnnnnnnnnnnnnnnnnnnnnnnnnnnnnnnnnncgtttgagtcactgggctgggaaaggcagacccactcttcatctgggtgggcacagtctacgcagctgccagctagaatataagcaggcagaaaaatgtgaaaaggtgagactggcctagcccccagcctacatctttctcctgtgctggatgcttcctgccttccaacatcagactccaagttcttcagtcttgggactcagactggcatttcttactcctcagcttgcagacagcttgtgggaccttgtgatcatgtgcagtaactttaaattcctcaaatcccctgagtgcaaggccatggctcaaagaagccctgcagacaacggcattaatctcccctacaaggacttgacctccgaggtaaccaggcgccgagtcaccatgaccacgagaaaagagataattacccagaaaagtgatgaagccaaggagatgctctcccacttggatttggaacaaacccctccccctcgcaggacccacctcacagtacctcctgccccacctcttctccactgagatccncatctctagagtgaactatttgagtgatctaccgactcagaacgttatgcatctgagttgctaatctgagactgtcttcattttctccccaaccatacaggtactgcatatacgttgtcacagcgagagcattactctcgtgtaactcggctgtcataaaacgaaaaaaaaaaatgg

SEQ ID NO: 39510 - DNA, 790 bp, Macaca Mulatta
ggctagtaaaagactattacctcacaccctacacttgatcttcccccaactttaagtgggtccgttcctcatatcactgccacaagaattaacaaccatgcccatctttcatttttctgctgaaagattttcagtggctcccattgaataccaaataaagtttgaatcccttagattggcattcacagccttctatgttctggccccagctttatctcttgaaactcattactcactatctgacaatgccactaaatatccacaagagtgatttcaaggtttttctatggtgaaggttcaaactggtaataaaccatgtttacatttttctggtctaaaataatttctatattactttataatagtcagctgaggtttgtttaagctcttggacaagcctaaaacttgtatcttgaagaaaatatttttttccacccaaagaaattgcattcaatttcttaaccttcaaaacaatgtcactgttgtcacctgtgcatttgatagctaaagcacaagtattcttcaggagcataaatactccagccttgaatgaatactccagccattgtccagctccctgtgaaaacttaatatttgagaaagacattcaacggaatgtggtttctatacacttcacaagtaggttgagattttcttggatttaaggttaatcacctaaaaagatgttttactttggggtttcattaatctaaacccccctaaaagaaggtttttccaattttattggtaaaacccctttgggggttagccaagggtcagccacaaaaaa

SEQ ID NO: 39511 - DNA, 1660 bp, Macaca Mulatta
  misc_feature (1)...(1660): n = A,T,C or G
gtcgctttaaggcggaggcccgggagggggccgacccggctcgccagctccacgctaggctccagactccggcatttcctcccggctagctggcgcggcttcgcctccccctcggaagaggaaactcccggggtccgagtaacagggtcaggcgcggagaggagcggcgggagagccaggagggccgcccagnnnnnnnnnnnnnnnnnnnnnnnnnnnnnnnnnnnnnnnnnnnnnnnnnnnnnnnnnnnnnnnnnnnnnnnnnnnnnnnnnnnnnnnnnnnnnnnnnnnnnnnnnnnnnnnnnnnnnnnnnnnnnnnnnnnnnnnnnnnnnnnnnnnnnnnnnnnnnnnnnnnnnnnnnnnnnnnnnnnnnnnnnnnnnnnnnnnnnnnnnnnnnnnnnnnnnnnnnnnnnnnnnnnnnnnnnnnnnnnnnnnnnnnnnnnnnnnnnnnnnnnnnnnnnnnnnnnnnnnnnnnnnnnnnnnnnnnnnnnnnnnnnnnnnnnnnnnnnnnnnnnnnnnnnnnnnnnnnnnnnnnnnnnnnnnnnnnnnnnnnnnnnnnnnnnnnnnnnnnnnnnnnnnnnnnnnnnnnnnnnnnnnnnnnnnnnnnnnnnnnnnnnnnnnnnnnnnnnnnnnnnnnnnnnnnnnnnnnnnnnnnnnnnnnnnnnnnnnnnnnnnnnnnnnnnnnnnnnnnnnnnnnnnnnnnnnnnnnnnnnnnnnnnnnnnnnnnnnnnnnnnnnnnnnnnnnnnnnnnnnnnnnnnnnnnnnnnnnnnnnnnnnnnnnnnnnnnnnnnnnnnnnnnnnnnnnnnnnnnnnnnnnnnnnnnnnnnnnnnnnnnnnnnnnnnnnnnnnnnnnnnnnnnnnnnnnnnnnnnnnnnnnnnnnnnnnnnnnnnnnnnnnnnnnnnnnnnnnnnnnnnnnnnnnnnnnnnnnnnnnnnnnnnnnnnnnnnnnnnnnnnnnnnnnnnnnnnnnnnnnnnnnnnnnnnnnnnnnnnnnnnnnnnnnnnnnnnnnnnnnnnnnnnnnnnnnnnnnnnnnnnnnnnnnnnnnnnnnnnnnnnnnnnnnnnnnnnnnnnnnnnnnnnnnnnnnnnnnnnnnnnnnnnnnnnnnnnnnnnnnnnnnnnnnnnnnnnnnnnnnnnnnnnnnnnnnnnnnnnnnnnnnnnnnnnnnnnnnnnnnnnnnnnnnnnnnnnnnnnnnnnnnnnnnnnnnnnnnnnnnnnnnnnnnnnnnnnnnnnnnnnnnnnnnnnnnnnnnnnnnnnnnnnnnnnnnnnnnnnnnnnnnnnnnnnnnnnnnnnnnnnnnnnnnnnnnnnnnnnnnnnnnnnnnnnnnnnnnnnnnnnnnnnnnnnnnnnnnnnnnnnnnnnnnnnnnnnnnnnnnnnnnnnnnnnnnnnnnnnnnnnngctgctgaggtgggtcccctgcccaaggcagtgcgggaagccgccccagttgacctcctggccgctttcgacgggcaaaaaaaagaacttgcagcggcgcgtttgctgtccacgtggcaaaggctgccccagcttctccgggcctacgggggtccccgctaccttgccaggtgccccccgccccggagtcagcgcacccagggcttccttgaaggtgaaccgtaaaccctgacagcacccccacctgaccaaatgctcctaaag

SEQ ID NO: 39512 - DNA, 1095 bp, Macaca Mulatta
  misc_feature (1)...(1095): n = A,T,C or G
gctgggactacaggggcacccttcacgcctggctaatttttgtatttttaatagagaccttttcaccatgttggctaagacggtctcgatctcctgaccttacgatgcgcccaccctggcctcccaaagtgctgggattacaggcatgagccaccatgcccggcnnnnnnnnnnnnnnnnnnnnnnnnnnnnnnnnnnnnnnnnnnnnnnnnnnnnnnnnnnnnnnccgagccaggagcagtgccgcaaccaagagatctcagcttggcgacatggctgcgtctggagcctgcgagggacgccagcctgtggggttgtcaaggagaacattcgttacgtctcagccaacggcactgtcaccaagaaaccgtcgtctctgaggaaaaaagagacgttcggcagccgagaaagtctgtacaagtgctgtgacagaaagactgccggctccacgcagctggcaaaagagtcaacatgaacgccgggtgctgcgaccatgaccccggcactggaggacgtgggatggagaatgggacacacggagagagaagggaaacgtttcattcagaccaactagcgtcgccgccaccagaaaactgaccgctcagtgctgccaatgaagtgagtatgagaaaccgatgattggtgggaggagcagcgctgggcgctggacccgctagtgtgagaatctggcggcgctaggacctctcaagcgcgggcacgaggcgaaagccagcgctgttgccaaagacaaatgcccgttctttttggcgccatcaacggtgcagccagcgatcactcccaggctctgagaaactggagatgtcagccacaaaccctccgttcagggaaaggtggggcgccgtgacagatcgactggcactgggtggaacattctcttgtggcctagtgactagaacataaaaacgaaaacggaacacaaaactactgctggcattactcctactctctccgctcaagtcagtggcttcaggcttacgaaaacctgtatttttcttggctgtgccatgatccgtaagtaccgagggccccagcgacctacccagtgtgattcgcagagggaaatgagctggaata

SEQ ID NO: 39513 - DNA, 793 bp, Macaca Mulatta
  misc_feature (1)...(793): n = A,T,C or G
gggtttacattttcacctgttacaaatagcatcctgaaggatttggaagtagctattattgtatcattttatagataaggaaatagagaaaagttaattaccttgtcccccaatggtaggccttgcattcaaatggagtcctgtctatctcaaagactacgaagttcctttctgtttactatgatgccttttaataattccagtggggtgagaactgggtgaggtgggcactacagaatcatcaaaaacctggctgttgatggaacctcagagtcacttgagaaagcaacatttgagcagaatctaggagccttctgggaaaagatggagaaaactactctagaaagatgttaggtttattgcaaaccagtcaatcatacttactgatcacctactagaggaaacctgtgataacacttgtggggagatttatggaaagacgagatatttgcacatcaggattttacatcacgacgtgtgcctgtgtgtgtctgaaaaatactagtgtaacaagctggtgagtacaatatgnnnnnnnnnnnnnnnnnnnnnnnnnnncaccgacttcatttggcagagcaccaganacgagggggtgatgaggtcctgtctttgtggcatggtgaaaaaaaaatgccctcccaattcagtttcttcctctgaaatgaagaaagtaagatctagccccctgcatactttgacaggatgtttgcagggctttggttaattttctgtaaaatgtttttgaggctcctctggaagtggtgtggtcttgtaaaataaggaaggtatt

SEQ ID NO: 39514 - DNA, 2998 bp, Macaca Mulatta
  misc_feature (1)...(2998): n = A,T,C or G
ggtttttgtaagattttttgcacacctaaacagtgtttgcttttgtgctagccttacccttccactaaagttattttaaataatttcacatttctgcaaattagcactttgcttgtctgcaatcttttactctgatttttgaagttttaaagtaattggagtaatactgttgaatgaatttgtttcacttccaaaataggaaaaattgtaaatccttgccttatgcagctttctcagaattctgcttcttcctaatactagatgtgtagccatttgcttcgtggactaatccgcaaggcacaccctctaaaacttagcttcactacaagatcttccagataaagttttctacctcttaattattctgatcagggatgctaaattataatttgttatgtattatctcatataatgtgaagaggcttaatgtnnnnnnnnnnnnnnnnnnnnnnnnnnnnnnnnnnnnnnnnnnnnnnnnnnnnnnnnnnnnnnnnnnnnnnnnnnnnnnnnnnnnnnnnnnnnnnnnnnnnnnnnnnnnnnnnnnnnnnnnnnnnnnnnnnnnnnnnnnnnnnnnnnnnnnnnnnnnnnnnnnnnnnnnnnnnnnnnnnnnnnnnnnnnnnnnnnnnnnnnnnnnnnnnnnnnnnnnnnnnnnnnnnnnnnnnnnnnnnnnnnnnnnnnnnnnnnnnnnnnnnnnnnnnnnnnnnnnnnnnnnnnnnnnnnnnnnnnnnnnnnnnnnnnnnnnnnnnnnnnnnnnnnnnnnnnnnnnnnnnnnnnnnnnnnnnnnnnnnnnnnnnnnnnnnnnnnnnnnnnnnnnnnnnnnnnnnnnnnnnnnnnnnnnnnnnnnnnnnnnnnnnnnnnnnnnnnnnnnnnnnnnnnnnnnnnnnnnnnnnnnnnnnnnnnnnnnnnnnnnnnnnnnnnnnnnnnnnnnnnnnnnnnnnnnnnnnnnnnnnnnnnnnnnnnnnnnnnnnnnnnnnnnnnnnnnnnnnnnnnnnnnnnnnnnnnnnnnnnnnnnnnnnnnnnnnnnnnnnnnnnnnnnnnnnnnnnnnnnnnnnnnnnnnnnnnnnnnnnnnnnnnnnnnnnnnnnnnnnnnnnnnnnnnnnnnnnnnnnnnnnnnnnnnnnnnnnnnnnnnnnnnnnnnnnnnnnnnnnnnnnnnnnnnnnnnnnnnnnnnnnnnnnnnnnnnnnnnnnnnnnnnnnnnnnnnnnnnnnnnnnnnnnnnnnnnnnnnnnnnnnnnnnnnnnnnnnnnnnnnnnnnnnnnnnnnnnnnnnnnnnnnnnnnnnnnnnnnnnnnnnnnnnnnnnnnnnnnnnnnnnnnnnnnnnnnnnnnnnnnnnnnnnnnnnnnnnnnnnnnnnnnnnnnnnnnnnnnnnnnnnnnnnnnnnnnnnnnnnnnnnnnnnnnnnnnnnnnnnnnnnnnnnnnnnnnnnnnnnnnnnnnnnnnnnnnnnnnnnnnnnnnnnnnnnnnnnnnnnnnnnnnnnnnnnnnnnnnnnnnnnnnnnnnnnnnnnnnnnnnnnnnnnnnnnnnnnnnnnnnnnnnnnnnnnnnnnnnnnnnnnnnnnnnnnnnnnnnnnnnnnnnnnnnnnnnnnnnnnnnnnnnnnnnnnnnnnnnnnnnnnnnnnnnnnnnnnnnnnnnnnnnnnnnnnnnnnnnnnnnnnnnnnnnnnnnnnnnnnnnnnnnnnnnnnnnnnnnnnnnnnnnnnnnnnnnnnnnnnnnnnnnnnnnnnnnnnnnnnnnnnnnnnnnnnnnnnnnnnnnnnnnnnnnnnnnnnnnnnnnnnnnnnnnnnnnnnnnnnnnnnnnnnnnnnnnnnnnnnnnnnnnnnnnnnnnnnnnnnnnnnnnnnnnnnnnnnnnnnnnnnnnnnnnnnnnnnnnnnnnnnnnnnnnnnnnnnnnnnnnnnnnnnnnnnnnnnnnnnnnnnnnnnnnnnnnnnnnnnnnnnnnnnnnnnnnnnnnnnnnnnnnnnnnnnnnnnnnnnnnnnnnnnnnnnnnnnnnnnnnnnnnnnnnnnnnnnnnnnnnnnnnnnnnnnnnnnnnnnnnnnnnnnnnnnnnnnnnnnnnnnnnnnnnnnnnnnnnnnnnnnnnnnnnnnnnnnnnnnnnnnnnnnnnnnnnnnnnnnnnnnnnnnnnnnnnnnnnnnnnnnnnnnnnnnnnnnnnnnnnnnnnnnnnnnnnnnnnnnnnnnnnnnnnnnnnnnnnnnnnnnnnnnnnnnnnnnnnnnnnnnnnnnnnnnnnnnnnnnnnnnnnnnnnnnnnnnnnnnnnnnnnnnnnnnnnnnnnnnnnnnnnnnnnnnnnnnnnnnnnnnnnnnnnnnnnnnnnnnnnnnnnnnnnnnnnnnnnnnnnnnnnnnnnnnnnnnnnnnnnnnnnnnnnnnnnnnnnnnnnnnnnnnnnnnnnnnnnaatcaggtgaccttcctaaacatactaagaattacgttctttcatgtgttaagacacatttaatttgtttgcagcactttaacaaaaatatggaataaaagtttacatgttggccctctagggatctaattaaggacattaaagtacaattcttgagctactatccatcagctcttcttaatcaaagattgccatcagtatagagtgtatctaatggcacagcattctggtgttttgataacagtagaactcaatttcagtaactattaggagcatggtctgtgctctagcattaaaaatgttattataatgtgaatatcttgtattcattgtacaatgcagtattcaaaattgtccttgtagtgcaaagatgactgataatttctaaaagatttgatccttaaaacttgtttgtttccaagcagacttattttaaggaaactgatttttgagtcagaagccttaaaagtgtcatatacaagtgacatcattttaagtccaaaagtgaaacactcgatttgaataagctagtttattaactaaagctgttttgttatgaagtgttacagtatttcagcacatctcattcaacataaaaagaatattaaatgt

SEQ ID NO: 39515 - DNA, 650 bp, Macaca Mulatta
ccaggctgttgagcgcctgcgcctggccgatggcccccatgggtgcgctggccgcctggaggtctggcacggcgggcgctggggcaccgtgtgtgatgatggctgggacctacgtgacgccgctgtggcctgccggcagctgggctgcggaggggcgctggccgcccccggaggggccttcttcggggagggggcagggcccgtgtggctcagcgaactggcttgccggggcaacgaagggcagctgggcctctgccaccaccggggctggaaggcccacatctgctcccacgaggaggacgcgggcgtcgtctgtgcaggtcagcgtgtggctaactctagggacgattcaacgtctcccctggatggggctccctggccagggctgtcggtggagctgagccccagcacggaggagcccccggtgacacacggcccccgcctcgctgggaacccccagaatgcctcccgaaagaagagcccccggcccaagcaggccaagtccacccgggcccctctgctgacaactggagccccccgccaagagcggctgcgcctggtgtctggtccccacaggtgcgctggccgcctggaggtctggcacggcgggcgctggggcaccgtgtgtgatgacggctgggacctgcgtg

SEQ ID NO: 39516 - DNA, 774 bp, Macaca Mulatta
  misc_feature (1)...(774): n = A,T,C or G
ggagagctccccatccagatcagccagagttcacccctgtccaagacgagctggaagccatggaactgtggggccctggagtctgatagcctcagaagaaattgaaagaccaactgcaagaactcttaaggcatcttgtttgagaaaatgttgttatgtggtttgtatgctcctttggggggcgggggcggggctcatttcagcagcctaaatctcctccttggataatgttaatattattgttattattaacaannnnnnnnnnnnnnnnnnnnnnnnncccttaatctatgacatggttaaaatgatttccctttggtgttttcatggcatgtcagataatttgtttttccagagaagagagctcaaagaggaattgggaaaaataaattgaactctgaaatcttctctctcaagtcctgaaatgaacagatatgattgtgtttgagggaaataatatgcccgcagcaagaaaagaattcaaagaggttcaaagaatatgtcacttactcctacttgctataggaataaccttgctgataagaaaaaaagggacataattggacaaactacctcttgcttaattgatatgtccaactctgagatcagttggtaactggtttcatgggtatccaaaagttagcatttggatataatctttctgaatttggtaatttaaaaaatagatttagttttttcagtggtttttaactcatgaanataaatgactttccanccnaactctgatgcaaaggagatataaatttttaatga

SEQ ID NO: 39517 - DNA, 726 bp, Macaca Mulatta
  misc_feature (1)...(726): n = A,T,C or G
gggcaggtggatcacannnnnnnnnnnnnnnnnnnnnnnnnnntaacacagcaaaacgnnnnnnnnnnnnnnnnnnnnnnnnnnnnnnnnnntgtggtggtaagcacctgtagttnnnnnnnnnnnnnnnnnnnnnnnnnnnnnnnnnnnnnnnnnnnnnnnncnnnnnnnnnnnnnnnnnnnnnnnagacnnnnnnnnnnnnnnnnnnnagcnnnnnnnnnnnnnnnnnnnnnnnnnnnnnnnnnnnnnnnnnnnnnnnntatttttaagaaatacgtactgaagtgtttatgggtaaaggggcactatggtacaacctactcttaaatgttaagaaaaaaattacatacaaaatagcttaagagagactgataaagcaaacacggtaaaatgttgccacttggggaactgaggggatatgtatatgtgaattatttgtattgtgtttgcaacttttctctacatcttaaattatttcaaaataaaggttctttttaaaaatagaaagggttatttttaaaaaacaatgtaccctccctgtcagaagcctctgtaccaaaggcagtaaatgatatcacaagggttgtttttataaattaaccatttaagtaccccactggattatgaaataaaggtaaactggaaataaaattaaaatgaagggaaattaaaagggaccaaaaccctttgccttccannnnnnnnnnnnnnnnnnnnnnnnnnct

SEQ ID NO: 39518 - DNA, 675 bp, Macaca Mulatta
  misc_feature (1)...(675): n = A,T,C or G
accaacaggctgagtgcctggttatctgtccatgtttcccttgcagacattatgtgcccggataaaatcagcttcatgggcccggactggctcacccaaggaggtgctgaaggtgccatttagacatcagttaaatggtgttgatcatcctgtttgccgtttcctccatgactgaaggcagacccttggctatctcacctccaccagacctctggactacctgaccctccatcttcctcaggagctggagagctggtacttagcaaaaatatttattctctcagccacagtcatgactgttgtggcctctgtggagatgaaggcatgggaagcaaccaggggaacatggcctcagcccagagaagccaccgctctgttccccaagcccttggtctgctgccagagcagtgccagccctcccgcccaccagggagggacccccacccccaagcactgggtaaggtctgaagacagcacagcagccatacccctcaccatcattaccaccatcaccagattctgcatctccctagtgctttgcaccctgngaattggcagcatgtggaggaactagaatctcaggaaagaaattgggggttgttttctacgtaattgtgaaaacaaggtcttcaaatgtggagacttctccccatttacatgagcacatgtaaacgc

SEQ ID NO: 39519 - DNA, 121 bp, Macaca Mulatta
ggcgagtctggggctggcaagacggagaccaccaagctcatcctgcagttcatggccaccgtcagtggccagcattcgtggattgagcagcaggtcctggaagccaaccctatcctggagg

SEQ ID NO: 39520 - DNA, 971 bp, Macaca Mulatta
  misc_feature (1)...(971): n = A,T,C or G
gggggagcaagagcatcaggaaaaatagttattgcatgctgggcttaatacctaggcaatgggttgataggtgcagtaaatcaccatggcaaactatgtgacaaacatgcatgtcctacacatgtatcctggaacnnnnnnnnnnnnnnnnnnnnnnnnnnnnttacaagaagttttgctgtaaagagggnnnnnnnnnnnnnnnnnnncaatagcctggagagagatgtagggtgaggttttgttttcttttgttcattacagtaggagaaaatccagcatgtattgtgtgcttttgggaacgatccagcagagtagggagatgtttgaatgcacaatagcagaatgaattattgaaatgaaatacttgagatgggaaaaaaagagaatggataagccacagcaagaacaagtaactgggaaaaatcaagtgaggaagacctataaggaaaagtaaagaagagatagcagagacactgaggaagcgagaagcgctcaacaagcagtaatgacgtcaacgataatgagaaactaaaaaataaaaaatggcgaacagaaattaacaaaaaaaagagggataagaaagagtagggtggaaaagtattagaagaagaatagagagtaagggtaaaaggaaagaataagtaagcgtaagagttgagaagatgtttgcaaatgtgagcaaggacgtaacaaacaaccccgaatctatgataaaataaggaatagggaaagtgtgtgaatagcaatatattggaagtgaatgatatattgcggaccaggtataatatacacgactaggagagtaacaaacaagatagtataataataaaggaaaaggacggatattaatgatggataaagaatagagaancgaacatataattagcgctaagaactatagtatagcagaaatgatataatatacgaatcacctagaaagagatataataaagactacgggtacacag

SEQ ID NO: 39521 - DNA, 853 bp, Macaca Mulatta
aaaatcttggccaaagtttgatttaggttgaaaaaaatccattggttctgtataaataaggtcattaccaaaatgactttatccagaatgagcaattctccagaataaacaattctcaaattcatacttccttttttggtattgaaagtatgaatctgagaattgtttacttcctggacttctagaatgaatatattaagctttaacttattgttttctgaagttgttacatattcctacagcctcttcaacctcagtataaattgatttaaacttgacagggaaatataaaaaatttaaaatctgtttctggaggcatgttattactatcgaaaaatgtttggaatcttacctgatcctatcttttatttttaaagggaagttcaactttttaaagatacggagaaggatttgccatcaatgtgctgtcagaaaataatgcagagagccataaaagcagagctgcaccttttaaatgttcactatcagatgtgtcgtcgccattgttgtgatatttacaaacttgtaatggaaaatagggaaggattaaatatgtgtttattaattttaaatctgttttttcttaggaatttgtcactagctttaagtttattctagacagtttctttaattttcatttttgaagagtaaagtaaggagtagattgttactgggtttgttagttagcctaagggtaatagaatccttgagtttcatggaggggccacaggcatggttggcatgacaaatccagtgaaaacatagatttgttgtttctttataaagttcaagtaaggatgaagttagagggttttgcatgacatgctaccacactttctctggcttatgtgtt

SEQ ID NO: 39522 - DNA, 817 bp, Macaca Mulatta
  misc_feature (1)...(817): n = A,T,C or G
ggggttttgctttcttttcaatgttctaaccaatgtatcattaaatcaatttccagggcagttttaaacactgattctccaccagaacccacagttgcttctgtgtgtcctttgtcaacatgttctggctatatactttttttttgtagattttcctattcttaggagacagagactaaagggccttcattataatagatctcagatgggcagtttacccccagtgtcagctttgccatttcccatctttctgttccctcactcttcccccaaaatatttaagacacagataatgaattttaagttataaaatcagtatttcaaatagctttttggattatgattttcaagtttaccttggattatatgtaattatgcctatttttttctgcccttccctaccttatctttaaccatcaccagttgtcaaatttatattacacaagtattcaatagataaatcactaataacctatttttgtggtccatcgatttccattgaatttgagtatacaatagnnnnnnnnnnnnnnnnnnatttcaggtagtaagtattttctagccaaatgaatatatgtattttgtatttcatataattccgaagcttattatctgatagtttaagtggtcagtctcattttttatgtagaaaaagtctatactctttcaaggccttatcaaggatcaaaaagttccaattnaccgtaacttttacataagtttaagttcctttcctcctaacaaaatttagccagccatatattacctttaaaatatattgtttaaaaaggcctttttgggtttttaacccctaaaa

SEQ ID NO: 39523 - DNA, 777 bp, Macaca Mulatta
  misc_feature (1)...(777): n = A,T,C or G
ggggtaaaagcatcagagtgtgcttgcatgactaacttcaactatattttttattcttttcaaatcactgggaaatttttgtataataattttagaatgccatgaaatcatattgctgtgaaagtacatattatttcacttacaaaaagtggccctttagaattgtggatttgcaggaatcgaaacatatgtgaaccaacaatgccatcaaaagatattcattaactattttattgtacaggacactgtcctgtatgttgtctgaacataaatgggtacagtcttttaaatcataccccttaagcatgttatgtttaaataacatattaactgacagacatgaatagcaggaaacatacataatataataaaaccttcacattaaaataaaaaaacaacatgnggaaagcaaaataaagacattactaagtgaggtaaatgcaggagcagggcacatcccactctacttctgaataggagaggaaaggcaatgaaatatgtttcattaatccactatttgtgaccttgggcttattacttaacctctcagtgactccattccccatctgtaaagaagggataatagtgtttactacataggggtttatacagagaataaatgggttagtacacttatagtccatgtaataagtgcaatataaatgttagccactcttctaatttgtagatatatttgcattatctacttaagttattgatgaaataaaattgattggagttgaggacaatattgccccaaaatggctaaatcttcct

SEQ ID NO: 39524 - DNA, 933 bp, Macaca Mulatta
  misc_feature (1)...(933): n = A,T,C or G
gggctttaaaatcctgcacagaaactgaaatgtatatccgaagggatatgttcatgagtattaggtttaaggatgttaaagctatagccttaaaaagctttgttcatgatttaaattccctgccatttgtttcaaaggcacatttatggaaatgtgtattttgnntgttggtgntnttattcaacanaattttgtgnntgcctattacgtggntggaacccctgggaaatcccatccaatggaaatttcccacaaagnnnnnnnnnnnnnnnnnnnnncccgccccnnnnnnnnnnnnnnnnnnnnnnnnnnnnnnnnnnnnnnnnnnnnnnnnnnnnnnnnnnnnnnaacctaaatanattatnttattttttaaaaactcaacatacctaactaaggtgtgtcgtnnatggaattcctcactttcttactggtgtggtgagtctacccgccattaataaccataggagagagggattgcgctagcgctctcacaccaatattatacttccattgatccgaaattccgcctttatttgctatctccctagctacatttactcccagactagcagatcaccccctaccaggatccatcaatattagtcctcgctagtccactaatatacccagctcgtataattgtccctagcctcatacgtatcccggcttaatcgcacttacccctacacccgatttcttacccctgtacgtctagctcccactttatttaacgagatgctcttgcggaaatgcatcattggtgtcggagtaccggcgatgtgggtaaggacgttgtatggtcccccgcctcttgcttgcactcgttcgncctcatcctgtcacccgttntatcaacagcccgcaatagatcgctaattatcgagcgatatcgttattagtagacggccccacataatttcctttataccg

SEQ ID NO: 39525 - DNA, 528 bp, Macaca Mulatta
ttctaaaatgttaagttttgaatttaaagtataggaataaatccaggtgagagtatggtttaaacattttacaaccatcttaaaatttctgtaaaatagtctttgacttatggattttgttttattccagccagcacctaaccaagtcacttttcatctgccactacatcgttactatgctatgtttttgagtaaggtaagactgtcattaaagagttctgttcttttttttttaattttcagaaataagaattgaattagtaacttttttattataattttaggctgtgaaatgtcaagaactagatttggattctgttttaccagatcaggaaatgttaatgaaactaatgattcacccactccaaattcaagtatgtattcaggcatttaaaaacttttgaagtggattccttgtttaggagattcttcctttatttatttgcctttcattgttattatagctgagatgtttgaaaactttttaaaaaaagttgttattgtgtttttgccagattatgtttaggt

SEQ ID NO: 39526 - DNA, 737 bp, Macaca Mulatta
  misc_feature (1)...(737): n = A,T,C or G
gggcgggaagtcgacaggccaggatctaaggtgaacaagaaggaggtggtggaggctgtaaccattgtggagacgccacccatggtggttgtgggcattgtgggctacggtggaaacccctccgaggcctccgggaccttcaaagactgtccttcggctgaagcacattccagtggatgaaaatgcccaaaaaggggggttttccctataaagaaaacggggggccttaaaatcctaaaaagaaagggccttttacccaagttactggcaagaaaaagggccgggattaaaggatgggcaaaaaaacccccccggaaaaagggaatttccgccagccttggaaaaaatttccggcccaaattccttcccggggttccttttggccccaaaaccccaaaaggggcccccggggtttcccccgggnnnnnnnnnnnnnnnnnnnnnnnnnnnnntgtaatggggaaaattcccccgggggaaaacggggggggcccccccgggggccccaaaaaaaaacccggggaaattnnnnnnnnnnnnnnnnnnnnngagggttcccaagaaccacaagggggggcccccnnnnnnnnnnnnnnnnnnntgttttttttggggccccccgggnnnnnnnnnnnnnnnnnnnnnnnnnnnnnnnnnnnnnnngggggggggtccccccccaaagggggggggaaaaaaggggggttttacaaaaaagggggggggtcccccccccc

SEQ ID NO: 39527 - DNA, 797 bp, Macaca Mulatta
gggccccacacctcctgattcagaatttctgggactggggccaatgaactgaaattttcatattcgctctaggtgattcatgtggagtgtctaatatgaaaaacactggttcttcatcttgttttctctcaaatgcagagttactgtatttctaagcaatgagatgccataatctgaaataaagtgccacattggaggacagataccagacaaaagagatgctggcaggaaaaaagaatttttcttttctttatttgacctcctaaggtattataggaaagaaaatttagtggacattctttgttttatatacatataaaacatatttatatataaatatataaataaaatatatgtaaatacatattcatatataaatgtttatatattgattttatctatattttatccacataaaattttatccatataaaatatagataaaaccaatacagtaagtctgcgtttcagagcaaacatgatgaacaaatggttctcatattagacattgcatatgaatgtctactagacttgttatatgtatgtgtatataaaaaccggtttacatacacacataaatatatatacatacatacagatgtatctacatatgtttacagatatgtctgtgttatatatatgtgtgtataaatcattcacactgtatgtgaataatcctctatcaggtatattaaaatgggcgcaataactccccaagagccactcgaatgtttcacatgatttggcagaaattttctaaacccttgttgaaagatcatggggctcctaatatcaaa

SEQ ID NO: 39528 - DNA, 467 bp, Macaca Mulatta
atgaagataagaggtagtgatacgctcgctagtgacaggtgtgatgaatgctgcctatattttctagcttgagtagctcaagaaggttagcagagacagtagataacctctctttagagacaaacgagagaacctctcagcatgagtgttggtttcatcatgagggactgccttcgggccaatcaccaatcccagagtcttcccaatgtgctctgcctgcttccaagcctgtgtctaattcccaatacatgttatttttgcctacgtagtttcgatttgacactactacctcactgtatgctttattctccaatattaatctcccgaatttcagtgctccaggaggaaattcactcttctgaatttccaggtgctttcagtttccaccgctctaagcctctgctctctaattttcccccatatagatcctcaagcagagtttcactaggtgtggtctatccacctgt

SEQ ID NO: 39529 - DNA, 783 bp, Macaca Mulatta
  misc_feature (1)...(783): n = A,T,C or G
gggccaatannnnnnnnnnnnnnnnnnnnnnnnnnnnnnnnnnnnnnnnnnnnnnnnnnnnnnnnnnnnnnnnnnnnnnnnnnnnnnnnnnnnnnnnnnnnnnnnnnnnnnnnnnnnnnnnnnnnnnnnnnnnnnnnnnnnnnnnnnnnnnnnnnnnnnnnnnnnnnnnnnnnnnnnnnnnnnnnnnnnnnnnnnnnnnnnnnnnnnnnnnnnnnnnnnnnnnnnnnnnnnnnnnnnnnnnnnnnnnnnnnnnnnnnnnnnnnnnnnnnnnnnnnnnnnnnnnnnnnnnnnnnnnnnnnnnnnnnnnnnnnnnnnnnnnnnnnnnnnnnnnnnnnnnnnnnnnnnnnnnnnnnnnnnnnnnnnnnnnnnnnnnnnnnnnnnnnnnnnnnnnnnnnnnnnnnnnnnnnnnnnnnnnnnnnnnnnnnnnnnnnnnnnnnnnnnnnnnnnnnnnnnnnnnnnnnnnnnnnnnnnnnnnnnnnnnnnnnnnnnnnnnnnnnnnnnnnnnnnnnnnnnnnnnnnnnnnnnnnnnnnnnnnnnnnnnnnnnnnnnnnnnnnnnnnnnnnnnnnnnnnnnnnnnnnnnnnnnnnnnnnnnnnnnnnnnnnnnnnnnnnnnnnnnnnnnnnnnnnnnnnnnnnnnnnnnnnnnnnnnnnnnnnnnnnnnnnnnnnnnnncaaatcgggatcgaaaacctcaacggatacctaacaggccaggcatagcaagcaacaaacaagccccatggctacctttcactgtttaacccaacacaggccatgccctcaa

SEQ ID NO: 39530 - DNA, 807 bp, Macaca Mulatta
  misc_feature (1)...(807): n = A,T,C or G
gggccaatannnnnnnnnnnnnnnnnnnnnnnnnnnnnnnnnnnnnnnnnnnnnnnnnnnnnnnnnnnnnnnnnnnnnnnnnnnnnnnnnnnnnnnnnnnnnnnnnnnnnnnnnnnnnnnnnnnnnnnnnnnnnnnnnnnnnnnnnnnnnnnnnnnnnnnnnnnnnnnnnnnnnnnnnnnnnnnnnnnnnnnnnnnnnnnnnnnnnnnnnnnnnnnnnnnnnnnnnnnnnnnnnnnnnnnnnnnnnnnnnnnnnnnnnnnnnnnnnnnnnnnnnnnnnnnnnnnnnnnnnnnnnnnnnnnnnnnnnnnnnnnnnnnnnnnnnnnnnnnnnnnnnnnnnnnnnnnnnnnnnnnnnnnnnnnnnnnnnnnnnnnnnnnnnnnnnnnnnnnnnnnnnnnnnnnnnnnnnnnnnnnnnnnnnnnnnnnnnnnnnnnnnnnnnnnnnnnnnnnnnnnnnnnnnnnnnnnnnnnnnnnnnnnnnnnnnnnnnnnnnnnnnnnnnnnnnnnnnnnnnnnnnnnnnnnnnnnnnnnnnnnnnnnnnnnnnnnnnnnnnnnnnnnnnccaagggaggagagagaataaaaaaagaaaaatattgttgggacgcaattggtcgctcgggaaactctttacaaaacaattcgatttggggcgccggggccggttatggtaagtggaaacttgggtaagagattggttatcttaaggaaaatccgggttcaaaggacgggggggggggaaaaactgacgcaaaaaaaaaacagcccgggggggggcaaccaaagcggtttctggaacaaatgacaaaag

SEQ ID NO: 39531 - DNA, 261 bp, Macaca Mulatta
tctactccacatagatcctccactgcctcagggtcttcagtggtaacagccagtgtgcaggtatgtatgttctgtacatccatgtgataaactgtaagattgcatagtgtcatctttcttgtaggtaactttaataagctttttatgatatgtggattgttctcaataggcttattacagcctgtggccatggaatattcctgatgctgacatcatagtggtaggcacacttgtagatgaggtgtttgttgagatgtggat

SEQ ID NO: 39532 - DNA, 776 bp, Macaca Mulatta
  misc_feature (1)...(776): n = A,T,C or G
ggcaaaccaaaagtacagtgatactggcttctatatttacctatgtagttccctttagcagcattctttatttcttcttatggcttcagtttactgcctaatgtcttttcatttcagcgtggagaatcctctttaacacttcttacaggtcacgtctactggtagtaattaattcccctagcttttgtttatctgcaaatggcttaatttcttcttcattcctgaaggatagttttgccaaatacagaattcttggttaacaggatttttttttctttcatggggttaaatatgtcatccagaggtaaaaaaagttaaaagctgaacacagtagtgggttctcatagtctcagttatcacaaggctgaggcagaagtagcacttgatcccgaggttgaggccaaactaggctacacaggtagatagattttaaaaatcagtcagttcatctgtctatctgcccattctctggtttcttacctccatggcttctgatgagaaaactgctgttaatcttattgaggaatctgattttctttaagtatttgtggtttcctttagctgatttgaacacatttttaaaaggtttgaaactcaaatgggaattggttcaaaattttcggggggaactcctttaaacccctttttaaagcccggttggtttnnnnnnnnnnnnnnnnnnnnnnnccnnnnnnnnnnnnnnnnnnnnnnngggggtgtttttcgccctgcnnnnnnnnnnnnnnnnnnnnggcgccctttttgtaaaaaaaaat

SEQ ID NO: 39533 - DNA, 788 bp, Macaca Mulatta
  misc_feature (1)...(788): n = A,T,C or G
gggcttctcgcctaacgccgccaacatggtgttcaggcgcttcgtggaggttggccgggtggcctacgtctcctttggacctcatgccggaaaattggtcgcgattgtagatgttattgatcagaacagggctttggtcgatggaccttgcactcaagtgaggagacaggccatgcgtttcaagtgcatgcagctcactgatttcatcctcgagtttccacacagtgcccgccagaagtatgtccgacaagcgtggcagaaggcagacagcaatacaagatgggcagccacacgatgggccaagaagattgaagccagagaaaggaaagccaagatgacagattttgatcggttgaaggttatgaaggcaaagaagatgaggaacagaataatcaagaatgaagttaagaagcttcaaaaggcagctctccggaaagcttctcccaaaaaaagggcctggtactaaaggtgctgctgnnnnnnnnnnnnnnnnnnnnnnnnnnnnnggctgctgctggtgcaaaaagcccagaaaaaaaatgagcgcggcagagtaaggaaggctccaacccggagagggggcctgggccaaggaaagcgagaagggcaaagaagccgtggccccggctgcccaaaggctcccgagggggcgagaagaaggccgagacccacgggaaggaagcccggatcgcggaagggaagaccgcgaccacatagaaccacggaaacaggcgcgaagccgcaggaaaaacccgagctagacgggggcccgccaacagaaaaggaag

SEQ ID NO: 39534 - DNA, 169 bp, Macaca Mulatta
attcttctccccagacacatgctagtattgaaagttaagtgtgcattttttgcagctctttttcttatgcatatgtaggtatataggcaatgtagttgttaggtgtttttagacatcaataggatgatactctacatgtcttgccttcttttgcacttatatcttaaag

SEQ ID NO: 39535 - DNA, 574 bp, Macaca Mulatta
gactcgtttgctgatatctaaattaagaagttggttcttgagtgaattctgaaaatggctacaaacttcttgaataaagaagacaagactctcaacagaagaatttcacatctccaagggacccttcctttcattttacactttgttactaatttgcagaactctattaaatgggtaggatttcacccattcctagctaagttgttaaaattaaaccatttggttcgtgtttaaaaactttccaacaacatctaatggctttacaggagctgaatataaaagcatttatacttaaaggtcttgtgtattcattaacaaatatagtaatgtcttttaatgttttaagagttgatcaggatttaatatgatgcaagtaatagggtgattaataagggaaggtttttatgaattcaaaagccagttattcaaaagcagggaaagattttgagagagggaacaaagtattcttagattgcacagaggctaagttccagttttaatttttgggggtagttggactctgttatgaaaagataggttatgggtgggtgacaggctgatacagttttagaaa

SEQ ID NO: 39536 - DNA, 1060 bp, Macaca Mulatta
  misc_feature (1)...(1060): n = A,T,C or G
aggagaacataactgaatcttgtccagtgacgtttgcctccagctgcctgacaaataagtcagcagcttgtaccacagaagtcagtaccaattgacgctgaaagagtaaggcaaaaaagtgagaatgatcttcaaactaaatatttgaaataggacatactccccaaatcagtctagacacaatttcatttccagcacttttagaaactaccaaattagtaaaccagaaatcgaaattagatttgtgcaaacatgaagaaatctactggattggcttccagattttaaattttatgtcatagaaatattgactcaaaccatattttttatgatggggcaactgaaaggtgattgcagcttttggttaatatnnnnnnnnnnnnnnnnnnnnnagtgttctatttgctttaatgagaatagaaacgtaaactatgacctaggggtttctgttggatagttagcaatttagaatggaggaagaacaacaaagacatgctttccatttttttctttacttatctctcaaaacaatattatccttgtcttttcaatcttacacttttaactaataagtggattttgtattttaagatccagaaatacttagcacatgaatattttgctataaaagcatatataactatgttttaaatatccatttatcttctgtatatctaagacttatatccttatttttactatcacacatgaataaagcctttgtctctttctttctctaatgttgtatcacactcatctaaaacttgagtggctgtcttaaaagatataagggggaaagataaagaatattgtctgtctctatattgcttagtaagtatttccatagtcaatgatggttttataggtaaaccaaaccctataaacctgacctcctttacggtttaatacttattaaagcaagggattgccagtacaccaatttgggataacagttaatgggatatttgtcccaaaattaaatttccaataaaaacctttaaagctngannnnnnnnnnnnnnnnnnnnnnnntnanaaannannatanaaaanaacccca

SEQ ID NO: 39537 - DNA, 184 bp, Macaca Mulatta
caaagatgtgaatggacccgaaccactcaacagccgaagcaacaaactgcactttgctttttgactatatgagttcgataaagatgataagctaaaaagtgatgagctgatacaggtgctatgcttgatggctggagtaaatatctcagatgagcagctgggcagcatcgcagacaggaccatt

SEQ ID NO: 39538 - DNA, 738 bp, Macaca Mulatta
gggggtagggctgaaaaatccgtctggctgcaaacctggtactgatacaaacaaggcctagacaggcactaagtgttctgtgttccccaaagagatcttaatgaaatcccagcatacctctcactcctacacttaaaataccttgggcaagagcatgcttttgaccccaccccagccatttggattgagaaattccattgaagatgcacagctttcctccagtgcaggggctgggtatccaaatgcagagccttctccagactctttgggcttagcctggcttggtaggctcaggagggattcaagattatttcatcctttatgtctgttcgatggcagtttatcatcattgccacctcatcctctattgtagccaaacctcacaaccagtaccatgtgaacttcgtcactgatgccacgttctttttctcggctgtcactaagctcaggtcaggatggccctcccggctgacttccctgatactttctgtatctccttttcagtctgccctaaaatgacagctggacttccaacagtggtttcttctgtgggacacatggctcttatactctgggcggcactgattcctttattaccagtggcttgattttcccggatctatctccatgcagacagtgtaaggttgggacttcatgcctcacgtttcctggtttgggggcttcggaagttcctacccccagctttgctggctggtgcccggcccccccagttttaca

SEQ ID NO: 39539 - DNA, 713 bp, Macaca Mulatta
  misc_feature (1)...(713): n = A,T,C or G
gggtttctccatgttggtnnnnnnnnnnnnnnnnnnncnnnnnnnnnnnnnnnnnnnnnnnnnnnnnnnnnnnnnnnnnnnnnnnnnnnnnnntgccaccacccccagctgcctttatgctttttgtttctttgatatatctaaacttaagatcagaacagaaattcatgtgccgaacagaatggattctttgcagtaccatcccaattgaatcctctctttattttcctgcgtccttactagtcactttgatagtgctaactaacctacactatgggggttattcatgaattaaggatgataaaaaaaaaaataccttgaaaatgttgtgtaccctgtggatctgaggcttattactaccacctggctggatagaatgtcaaaaccttcaatcacttaaggtgactggaacttttgtaaaatacacttatgaccccattggnnnnnnnnnnnnnnnnnnnnnnnnnnnnctttcctaaagatgaggcaatagaaatttataatttgagactacagtgccccgttgttttaactcttatcacaactggcaactggtagtgattttttgttggtggtgatgttttggtttggtttgttttgagatggaatctcactcctgttgcccaagggttggaatgaaaatgggaatgatcttccacttaactgcaaaccttccgcctttgttggggtttctccaaattctccctgggccc

SEQ ID NO: 39540 - DNA, 619 bp, Macaca Mulatta
gagaagagctgttctcacgcgtaggatccaaagggctcaaaggcgaagggtgccatctgcttctccgctgattcagaagataaagaggagaagtgtcctgtttcatccatattgctggtcctgatttttcaatagtgtcccttaccctgaagctcttccattggccatcatggggttagctaacagcccaggaaactggtctcttttcctttccccttaccacctggaactcaactggaaagggcaatcagatgactctatatcaggccccaccacctggtctttgaagtttctgtcctaccagtgccacagctccctcttccacttctgagctacctccaaaaaaggccatcctcagcagcctagttatgctcatcctggaatgctgtattctggatgtctactcaaggccaaaccccaatattgccttttttcccctattcaaggccaaggctaggctctcttcattgtctccatttctctttctctagagctcctagagggccagacactgtttctcatatatttctggatccttggagcttagctcagagcttggcatacatgcccagtgtgaacttttctgaataaaataatttcaaatgctgtatacaagata

SEQ ID NO: 39541 - DNA, 875 bp, Macaca Mulatta
  misc_feature (1)...(875): n = A,T,C or G
tgttcagagtacatgttgaaagttgtaatttttgccaacctaccagactcaaaaatgttaccttgctatagttttattttttagtctcctgttctgcttatgtttgggccttttcagaaacagttcagtagtttttccttttttaggatttcataaactttttcttgaatatccagataagaagaattttagtctttgaggccaggcannnnnnnnnnnnnnnnnnnnnnnnngcactttggaagagttagacaggtcaattgcttgatctcaggagtttgagattagtctgggccatacagtgaatcctcatctctattaaattaaaaagcattaaaaaaatttagaaaagaattattttagtctttgtggtccaagaatcaactttcaatcctaaagttgattctcaggtacttatagcatcattgacaacataatcatttaaaatgataaaagtcactatctctctggaccatacaaaatcaagtgtcaggccagtgatggtcacaggatgtgtttgaacagtcactggtttgtagatttgtctgaggattgaaaattccaccagcatgtaatctaggcggggatctctctgtgagggtcactgtatttcacctcctgtattaggctgaggtcttccactggataagaacatgctcaaatcctctatttgatgggctcatgggtttgaccgaggaaagcccgtgtcacagtcacattaattgatctgcctagaagcccgagttggggaaagctaagtttcaggataaaccccctaggcaaatcacggcacgcacggcggtggacacattttcaaagacattcccggaggacagaaagcgcattcttgtcggccacagaatgagtttgaaaaa

SEQ ID NO: 39542 - DNA, 660 bp, Macaca Mulatta
acatgaaacttctcattgggtattttcgagtctaccacggggaatcagctaccagcttactgccatgtggaaaactgcacgagattccgggatcggaatcaaaatgctaatttaaaaggtcaagtgaagctgcgcctcacgttttggcgtgcctgcgctctctgcaggcagcagcgaacaaagacccagcaagagaaggcagaggctaagacccatcccgtatctgctctcctgaaataattctggagtcatgcctgaaatgccagaggacatggagcaggaggaagttaacatccctaataggagggttctggttactggtgccactgggcttcttggcagagctgtacacaaggaatttcagcagaataattggcatgctgttggctgtggttttagaagagcaagaccaaaatttgaacaggttaatctgttggattctaatgcagttcatcacatcattcatgattttcaggcccatgttatagtgcattgtgcagcagagagaagaccagatgttgtagaaaatcaggcagatgctggctctcaacttaatgtggatgcttctgggaatttagcaaaggaagcagctgctgttggagcatttctcatctacattagctcagattatgtatttgatggaacaaatccaccttacag

SEQ ID NO: 39543 - DNA, 138 bp, Macaca Mulatta
atcacctggggagaggataccctgatggagtatttggagagtcccaaaagtacatccctggaataaaaatgatctttgctagcactaagaagaaggcagaaagggcagacttgtcagcttgtcttaaaaaagctacta

SEQ ID NO: 39544 - DNA, 190 bp, Macaca Mulatta
tggtttgcatcctcactcctcatcatcctggggttccagtaactgtggcgttcaggaacaggtccgggccaggtgtgaaggtgaaataagcagccgtgttgctcacacagagcctgtttggtggtctcttcacacggacgtgcatgacatttggtgccgaagacccaggataagaggactccttcgggag

SEQ ID NO: 39545 - DNA, 796 bp, Macaca Mulatta
  misc_feature (1)...(796): n = A,T,C or G
gggttgaccgagacaagcgcatttactgagaagtggatttgacttttcagagagaggaacacagtaaaaaccagtcaacaaaccgtggcgctaaagagcaattatgagacgtttttagagatttcatctgaagctatgtagaagaaatgattttacaattctaataataactctgaaataaaaggtctgttttggcaatatttgacaagtttctcagtttaagaaaagcaaggacaagctgattgttgctatgtgtgttgctttcgttccccataaaatacagtctctaagatttagcaactgtcattgttgtaaaccgttttgtcaattaccatacttatctgttgcttgaaattcgaccctgaagtccaagttctcccttttaatacaaacaaaatgctattgtctatattttactgctttttaattttttactacttctttttgactagtaaaattatcagaaatccaggggttctatagtcaacataaaagcagaaaatgcccagtgtgtcatttcaggaaacatgagaatgaagaccagatctcatagatcacagcttctctgagtatttagactatgttcaatcccagtaaagcagaagaaacagctttgcataaaaatacccattgaatacatgtctttgttacatgctatagaatagcatgtctgacttttanaacatagtaattgagaggtgggggagactatatttgtgagcatattacagaanaaaaggtattgtagcacccttttcttggccagtcagtccttctgattttcgtttcctgacca

SEQ ID NO: 39546 - DNA, 260 bp, Macaca Mulatta
taatttattttttatgaactcactttccattgacatatcatggtcatatcaatggggagttcaggcaataaagtatggcatatattgtctactgtatactgtgctggcactaggggttcagagaggaaaacatttcaattgctttttacccttttagtgagtgactaatgtacatttctttgtctgagggtatgtcttggcagtacaggatttcttcagacatggctcaggaaatggccgagagtaaagtgaatcacaag

SEQ ID NO: 39547 - DNA, 848 bp, Macaca Mulatta
  misc_feature (1)...(848): n = A,T,C or G
caaagacttttagggaaaaaccaaatagtttgtgatttatccttaattgtaaaatttctgagaaaatagcaaatagaactttaatggaagcaaaaatagtttttagatactgagaaaatgacaattttctacaaatcttgggactttttatgccagtgatttagattaaggggtaatgttttttaacaaaaaggcttgataaggtgccaatttttctgtggtaccttaagtaaatttccaagaaaagtaaattttctgaattctgtttctgggccatccacttccggagtaaaggnnnnnnnnnnnnnnnnnnnncagaataataaacattgagtaaactttgtctgttatttaaaatagctacaaaggttagagtatgccaaaaacccagtgccttaaaatactattgtgttactgttgctgcattcagtgcaacagaaagtaattatagagtgattcacttacaaagagtatagtggtggaaattaaaaattactaaaattctttataacttttcctctctctcccataaataatttgatccagttaactctgctcaattaaaggaatgatgcatgcaaccattacatccaggggtagttttagttgaagatgctcactgttggttagtttcctctggaatagattccatgatccccgctggtcttcctttcggcagtcttttctcagcagtgtccccgagggcttcttggtccctagtgtgcaaaacctgtgaagaaaaacactggatatgagattcaaaaaaggagcaaacaaatgtcttctccttggaaacagcccattttgtccccagcagtccatggcgttgctctcccttgcccagtccc

SEQ ID NO: 39548 - DNA, 622 bp, Macaca Mulatta
  misc_feature (1)...(622): n = A,T,C or G
ggggacacacacacgcacgcacacacaaacacagtccagttccaggaaacggctcctccaggtatgggaggtttatcctagctctgcccaaggacacttcagggcctggtgacctcagccctgcgtggtagaagtgtgggctacaggtcccatccggcatccccgcttcccgctgcagcctgtggtccacacttgtgagcggttctgaggccccctccccagcctggcctgcgcttctctgccctgcgaaaggcgaaaggggaaaagccggcgtcctctcctggagggctctttactttacccgggcccgcggaggttgggcggccccaggcctgaatagaatccaccagaaaaaacagcttttgcttaaccaggggcccacccaaggaagggcgtttccccttgaaacggttgcacccccaagcccaggggggggaagcccacaataaacgaaagggccctggggccttcaaaattttcggaaacccacccctcggaatccagggggggggtgttttaaacccccctcccccccaatgggtgtctcaaaaagaactgggaacccccttttnnnnnnnnnnnnnnnnnnnngggattttttttataaccttttaaaatctgg

SEQ ID NO: 39549 - DNA, 741 bp, Macaca Mulatta
  misc_feature (1)...(741): n = A,T,C or G
ggagccacttaaatcattagcccaaaaaatagccttttagatgagtatggaatagtatttggcttcaattgatttaagagaaattatcgtcagaatatctcaaattctcctctagtgataaattttgcttgatgagcagaattttttgcacatctgctgtaccagactcctgtgcccatagaacagacagaattcactgtgagagaacttttatctttccacagaaaatactggataaatacaggggctgacacaacattctttacatggacttccatctcctcaacttccgctgtaccaaactcccattactgtgaagccaagggaaaaaattgctgaaggatgcactaccttcctttctaaatctgttattcagtaaacaaaataatccctgtttaaggtgattgcctgttgcatctgtcattggttggggattagaaataaacacagtctttaaagagattataatcagaagtgggaagtcatagatacatttgtcttctgtctctttccctatattttgcacatagtaaataataaataatgatttacttaaggtgtgacttgctgttctggtatcagatatactatttttggcttttaaaaattaattttctaaattaagtaacctcaaagttaatgaatggattgaagaagctggccgggcgtggttcgcnnnnnnnnnnnnnnnnnnnnnnnntcgaggcaggcagatcagttgaagcccgggaatttgagacc

SEQ ID NO: 39550 - DNA, 528 bp, Macaca Mulatta
tttcttcaaatcaagtatgtaaaacaatacgcggttcaccacggaccaacaaggacccacacccaggcttcccaaagggaaaatggaagcctgtggccgtgctggaccacagcagccccaccgcaggggatgagggactgtggcagagacacaggcaaagcagcccccaggacagaggggtcagcatccgaggcctggccctcctgacacattcctacacgcagattccaccccgggacgactaactggctctccacgggaaatgcatcccctaacacgtgaggcccaagcttctggcccagttgtggtagttgcccgttcagtacccactctcctcctccctttgcgttacccgctgccttcctttggaggaccacccccggctccccactggagagcaggcgtctgtctgggtggagcaccccactttccttcaggaatggccgtgctgcgcagccccccgtgcactacaccatgactgtgctgagagagacaggacacagcggcacacgtgccctcctcagagca

SEQ ID NO: 39551 - DNA, 821 bp, Macaca Mulatta
  misc_feature (1)...(821): n = A,T,C or G
ggcatggtggcccacannnnnnnnnnnnnnnnnnnnnnnnnnnnnnacgggcagatcacctgagatcaggagttcaagattagcctgaccaacatggannnnnnnnnnnnnnnnnnnnnnnnnnnnnntagccagacgtggtggtgcatgcctgtaatannnnnnnnnnnnnnnnnnnnnnaaggaaaatcacttcaacccatgaggcnnnnnnnnnnnnnnnnnnnngtcgcgccattgcattccagcctgggcaacaacagtgaannnnnnnnnnnnnnnnnnnnnnnncnnnnnnnnnnnnnnnnnnnnnnnnnnnnttagccgagcatggtggtgggnnnnnnnnnnnnnnnnnnnnnnnnnnnnnnnnactcaaaaatcacttgaacccacaaggcagatgttgttgtgagccgagatcctctagcctgggcaacatatcaacagtgtccctatatcaaatgtatacccagaactgtaattactaaagaccccagactgtatattataccccgatcgacggtatcttttaggaaagaagcaacctcccatttccttactatttctggctagaattcagattgcatttcccgctttttaacatcaacttgttggccttaaaaatagacacaaacatttcgttcccacgaaggttataaatatctattacaatctccaccctgtaacctttctgtgaacgtctagcgaactccccacccaactgcgtctcgtctttaatttactcattatttacctctctccaccatatgtcggtactatttgtatgtttttacacacatgcatatatctatgggact

SEQ ID NO: 39552 - DNA, 143 bp, Macaca Mulatta
gacaaaattgtattctgtaggttccaagttcaacatttggaaaagtagacatttggaatgctctagttccactagacctttggttttcgcttaagggggactcaaggaccattgtgttagaattcagtgaagtcaggatgtag

SEQ ID NO: 39553 - DNA, 349 bp, Macaca Mulatta
  misc_feature (1)...(349): n = A,T,C or G
attttttcttaattcaagttgaactgcagtatcagttacacttaagtctaatagaatggaattaaaagtcaccatgtagaaacaatgtaaggtccagtttaatgcactgtcccaattgatgaatccataaagattttgataaaatgaagaataaatgcttactggacatttcaagctctaactagcatgtttaaaacagatttcatcttcttcaccaaccagcggcttttcttgacttgccaaatcagtgaatggtactgcctgttccctctttcttanatcttgagtgtgttgtgttttctttcttctttacctctataatcaaagatcaaacgctgtccagttttcc

SEQ ID NO: 39554 - DNA, 509 bp, Macaca Mulatta
gcagtatctgcatcccccatatgtgttgccacggtgcagcatgactctgtgcccatgactgctgtgccacctttcatggacggcctgcagcctggctacaggcagattcagtcccccttccctcacaccaacagtgaacagaagatgtacccagcggtgactgtataacgcagtcactggtgggttcctttactgaagggagaggaaggcaggggtgggttgtcaggtgggcgtccgcacgtgccggtggtatttgtggcacggttcctttggatggcttcatttgcccccagactgtatgaaaacatctccaaatgagcatttctggatatgtgtcacccagggtatcattgatttatgatgggaaactggcctcagctggagatggctatgatgttgctgatgggcgtgtaacaaatgcttgagtcccaagtgcccttgagatatggttggtgaaagaattttataaactgataaattaaggggttttattatgttgttgttattat

SEQ ID NO: 39555 - DNA, 927 bp, Macaca Mulatta
  misc_feature (1)...(927): n = A,T,C or G
ggatgtccattgtgatttaacatatcaattttagaggaaatggcatattgccacctccctcctcaaactagggactataaatcgatccatcaccctaactgagactctgccttaaattctgctaagactaccatccaaacactcaaatttacattagcgnnnnnnnnnnnnnnnnnnnnaaaacaaacacctgtaagaaacggtcaagtaaactgtgatacattcaacccaaagattaaacatgaaaacaatgaagtagcaggatattaaaagaatataaactctatgtacatcaaggcccaaggttcttaaattacacatagactaagactggaatggaagggggatatgttaacagacacttttttaaatttttaatattacttctctaatgcatgaattgactaacccaaaaaattcagcaacaaataaaaaaaaactgatttactgccctatcacaccaaaatatggtaaaaggaattccctttttccttttgaaaaggcacatttgggaaatctaagtatttgggagttcccgaaacaccccaacagctaccttaaccaactacctatttgttaaaatttaattaggaaccacctggaaaaatctacacgtgcttttcttcgaaagtcctcaggtatattggtcaaaaaataattatcaaacgcaaactactttgaattttggctaaaaacccagtgaatggcccccctataatggcaaataaagggtatcggggcccaataaggttggccaccaaagcggttctcttaccaaaccgcacgattttactaaaaaaatgggaaaaagtcgttgtttcccgcactttatgtcgcaatttttttcacagacctctagatatgcaccaaaaaacggcttcggggtaaacagaatacatccctgccttattacataggaaaatcccc

SEQ ID NO: 39556 - DNA, 812 bp, Macaca Mulatta
  misc_feature (1)...(812): n = A,T,C or G
ggcatgatggctgnnnnnnnnnnnnnnnnnnnnnnnnnnnnnnnnnnnnnnnnnnnnnnnnnnnnnaggaaggcagatgagccaagatcatgccattgtacttcagcctgggcaacacagccagactccatctcaaataaataaatnaataaaaattgaataagcagctaagaatttcagacaactgaagaagatctctaacacgaaaagaatccaaaaacccnaaaaattttaaaaaccaaaaccccccccaaagaaaggaggactgataattagnnnnnnnnnnnnnnnnnnnnnnntttttgacaccacaaaaacccacgaattaactaccattaaataacaccaaataaataaaaatacagccacgcgcaaaacgatataaataataaatagaaaaaaaaataaacacaaccaacaattttaatatcggaaaaaaaaaggaaccggagaaaaaacaacaaaaaaaagccgaatcaaattaacactaattcaacaattataaaaacccaaccaacgaagagaaacacgaacaaaaaagtatgtatataacataaaaacacgataaaacacaattaatatataaaaaacaacacattacaaaaataacacacaatgaaatgacgcacaattaccaacaaccaacacaaaacaatataaaaaagaacgaataaaacaaatataaaattaacaagtagaaacgaagaaatcagcacagcaacatcacgaacgaaattcattaatacttaatgaaacgatgacacgcagtaaacgcacaccaattatccccaagacagaaacatatcaataat

SEQ ID NO: 39557 - DNA, 425 bp, Macaca Mulatta
gaaaacatacttctctgagactcattgtggtcagtttggcttttttctttaacctagggattgtgattcctctgatcatgttcatcctggcagccattctgctgatcctctctctcaagagacacaccctacacatgggaagcaatgccacagggtccaaggaccctagcatggaggctcacattggggccatcaaagctaccagctactttctcattctctacattttcaatgcagttgctctgtttatctacctgtccaacatgtttgacatcaacagtctgtggaatactttgtgccagatcatcatggctgcctaccctgccagccactcaattctactgattaaggataaccctgggttgagaagagcctggaagcagcttcagcaccgacttcatctttacccaaaacagtggactctg

SEQ ID NO: 39558 - DNA, 620 bp, Macaca Mulatta
gggggactcggatgccggcggtctctgctgaagagagaagatggcgcttgacgggccagagcagatggaactggaggaggggaaggcaggcagcggactccgccaatattatctgtccaagattgaagaactccagctgattgtgaatgataagagccaaaacctccggaggctgcaggcacagaggaatgaactaaatgctaaagttcgcctattgcgggaggagctacagctgctgcaggaacagggctcctatgtgggggaagtagtccgggccatggataagaagaaagtgttggtcaatgtacctcctgaaggctaatttgttgcatacgtgtgccaaaatctttgacttccttgacgtgaccctccttttccggggtggcttttacggatcactctccccttctctcagatctgtcccatatggtataccttttttctctcctttgtgcttttcaattcctccactccccctctgtactttcggtgcttccacctcaccccagggctttcttctcgttattttcctcttctaaccccttatatttcttctctctccctttgcaactatttattttattcatctccttagtactatttctttttctccacatact

SEQ ID NO: 39559 - DNA, 1022 bp, Macaca Mulatta
  misc_feature (1)...(1022): n = A,T,C or G
gggtaccataattccacactctgtggtccttattaaatccaaaattaaacaaaaagcagtaaaataactgactactcacccatattataaaatataatccaaaccccttggtgtttttctttgctttggttatacgatattcagagaaagaatatattaaatcatttcagccatgaacaactgcaatgtataactaagtaccaaaatctagaaaatataaaattttcttaactgacaggttggacaaattgttcaagaaagatgaacttatcaaaacacaaataaaaaagtataacgcaatatagcaatcaatggcctataaattaaaaaaattagataattttatctgacgggtatagcaaataatgcaagaagaacattaatatttataacattaattaaaagtaatcatatcattataattttataaaattatttttatatacaaatagaagttataataaaacgcaataaaacaaatcctctagtaatttttataaaatataaatttacaataatacnnnnnnnnnnnnnnnnnnnnnnttataaaaacatcacaacgatcccaataatgtataataaaaaacgattaagtacaanctgaatataaaaaactacaacatacacttcataactaacagtatagataatataccaaaatgatcataattctaaataacataaaacaattattcaaacctaancacaaaatccgtttttaataacaccacactgacatatacgacaatacaactcaagaaatcataaaaacaagatatatttataaacgggatccggctcatatatactctatccaaatcccgctacacgaaaaataccccagtacgaacgtatacgtactcaaatagctactaatancgtccaagaattctatatatcaataatgttagcgtagctctcgtatacatatattggacaatcactatatatccacatcgcataatacacttatgctaatcgtgaacagaagatgtatacaaatatgtctatatcatacaaac

SEQ ID NO: 39560 - DNA, 824 bp, Macaca Mulatta
  misc_feature (1)...(824): n = A,T,C or G
ggagcaggagcggtgacaatggtaaggccttgaagacagctaactcaagagggtgaaattcgaagtcaatccattcccatattccatattcccatatgccattcccttataacatgcataagtctgagtgggtaaaggactgggaaacttggtgaaaaacaaagaactggaaaaggggttaaaaggcttagattctgcttcttctgcacactcaagttcctgggaaatccattcattttactggacctttgttttgtcctctgcaatataaggtgattggagtagaagggtggctctttnnnnnnnnnnnnnnnnnnnnnntagcctttcattaataaaatcttacataaagttatataaaagaggcagaagcaatgccatgctggttaaagggggcagagaagtttcctggttggcattcccttggctttccctccacagagccccagggtgctatataatagagcctgagactgagactgccagcctccacatctccaagctgccttccagctctgacactgtgagaaaaaaatgttccttgttttcccaaggacgtataaattcactctcttttttttgatgtgaatgaaatgaaaggaagtgcagactagggcatgtgtataggccagttagcttcattttgttttccggcatcccgtggggagtggtagagcaaaggcgagtttctgtaccccaaaacgatcatccttcactcctccctttaagttactaaccaaaaaaaaatggacctttaggaagataacccttttaaatttccgggactatccacctcttctggcttttgccccatttcccccccc

SEQ ID NO: 39561 - DNA, 549 bp, Macaca Mulatta
tcgcaggtaagtttacagagagaaccctcaaccaccttttctctttggcatattgatgtgaaaaccctttaatcacatgcagtcaatgagaaggattgtcaagagagttggggaagagtgaaagagaaaaggaacatatcttcccccaaaactatcttggtcccacctacatccttgttttataatcttcttccaaccaagtaagaatcttagcttacctggaaagagtaagtcccaaattagggtcttgattgctttccatattaatgatgggagcagggggatggagcagttgtttagctttataaataagtagggtgcattcagagggaagtctcaggggagaacaggattccaacagggggcagtgggtgatgaggctgaaattataaatgccagtgtcatagtggagtgttttgggtgcctgacaaaggaactgggctctattcttcagagaccatggatagtattaaagtctttatgtaaaaggataatatggtaaagtgtatatgttagaaaatgtgatctagcaattgatctagtaactta

SEQ ID NO: 39562 - DNA, 778 bp, Macaca Mulatta
gggacaaaaccaccagcacaaatcagttaaggatattgaggatttgaacctcatcatgtacacattttacctaagagacatacagggaacactacacctatcaacaacagagtgtgcctacttttcaagtgtgcttggaatgttttttaaatttgaccatatactgagacatgaagcaagtctcaaaatttcagtatttgaaattttatagtttctgaccaccatgaaattaatttaaaaaccaattataaaaacacagctagaaaaaaatacaaattctgaaattcaggcatatgctctaaattgcttgtaaaagaagaattacttagaaaattagaaaatatcttaaatgaataaatttgacctattaaaatgtgtagaattcagtgtaagcctttcttgttgtgaaatttaagccctagtagtataagagcaaaggctaacagtaaagtgttcatgtcaggaaattaaaagagcagtatatgaatagaaatcacaagccaagaaataataaagatcaatataaaaataaatatcaatggcataaaagcaaacttaggataatgaggattgacaaaagacaaggttgagtctcagaaaagactaagggaaattgataaacccctgtcagagataatcaaaaataaaacatgccatacgatcagtatcaggaatgaaaaaggattcactactatgatccaagcaacattttttaaaaatgctaaaagggagaatggtatggaaaagcttaaagctagttaagtttgaaagtcctaag

SEQ ID NO: 39563 - DNA, 720 bp, Macaca Mulatta
taccagctgccacagcctggggaaggcataaggaggaggagaattcatgggggccacgtgccctgggaacaaccaactgtgatgaagggagagtgaatgaaagctcacatcctcaccgtccctgtcttgcccacatttgtcaggtatgtgaaactgtcagaataaccagaccatgaatgcagtttagtgacaacacaaggagaacatatatgggaaatgaccagcttggggtttatttcaaacacgatggcacttagtcatgttggggaactcatagtctcccgtctccctaattctgctctctgactcgcactaaaccctcctctccagtgtcttacaggagaaagcactgtgcacaagctgtcagcaggggagtatggctaaggacactgagtaaaaatctttaatgttggattattcaaatagactttgtaaactcatggcaggtatgagatcctgttgtgaaaaattgattactcctaattattatttggcaagtgaaaagcaggctttcacaattccaaaagtggcctttgaaaataaactgcataaactcaaagatggaaaatataaagtttatttcaagttcaaaaggaaacattcagaattatgttagatttttatttctcttccaaattctaaaaattttgaaagtattgaggctaagtactattttaaagtagaaatttattattgtattttcataagaaaaagtttcaa

SEQ ID NO: 39564 - DNA, 892 bp, Macaca Mulatta
  misc_feature (1)...(892): n = A,T,C or G
tccgcgtcttctcttctctgcgctttttttgtcttnttcttggtttttgtcccggtcgtgncctcntgtgtgcgtggttccgcgtctctgttgtccntcttttttgggggttgtctcttttttctttttcgttccgcgcgcctttttttctttttggcgttgggggtggttactttccccctcttcttntccannnnnnnnnnnnnnnnnnnnnnnnnnnnnnnnnnnnnnnnnnnnnnnnnnnnnnnnnnnnnccttctcnnnnnnnnnnnnnnnnnnnncnnnnnnnnnnnnnnnnnnnnnnnnnnnnnnnnnnnnnnnnnnnnnnnnnnnnnnnnnnnnnnnnnnnnncttctcnnnnnnnnnnnnnnnnnnnnnnnnnnnnnnnnnnnnnnnnnnnnnnnnnnnnnnnnnnnnnnnnnnnnnnnnnnnnnnnnnnnnnnnnnnnnnnnnnnnnnnnnnnnnnnnnnnnnnnnnnnnnnnnnnnnnnnnnnnnnnnnnnnnnnnnnnnnnnnnnnnnnnnnnnnnnnnnnnnnnnnnnnnnnnnnnnnnnnnnnnnnnnnnnnnnnnnnnnnnnnnnnnnnnnnnnnnnnnnnnnnnnnnnnnnnnnnnnnnnnnnnnnnnnnnnnnnnnnnnnnnnnnnnnnnnnnnnnnnnnnnnnnnnnnnnnnnnnnnnnnnnnnnnnnnnnnnnnnnnnnnnnnnnttttcggtgaacaaagttcacaatatctggtcgaataggagccttgaatacagcaggcaaagtgacatttttgccagatgactcccccttttcggagtacaccgatatcagtgggcgagcacacgccatggcggagagaggagaaaaccacgttcctctcaccccggatgctgctacaggaaaagccc

SEQ ID NO: 39565 - DNA, 697 bp, Macaca Mulatta
  misc_feature (1)...(697): n = A,T,C or G
gggtaggtttcctccacgcagtcgttcaggaacccagactccttgtgtcttgtggctcctccaacccctaagtcttttgtcattgtttcacatccagccagcaggagcaaaaaggagtggaggagtgtacatgagaagtttatggatcagcctggaagtactacacctcttaaattttttaggatagagctcagtaatatgaccctacccaactgtaagggagcctgggaaatacagtagaattgtgtgcctaggaagaaagaaggaatttttatgaacagctagcagtttctgccatagtctgcccccatggcaaccagtgtctatatatccctgtgagcaaaggnnnnnnnnnnnnnnnnnnnnnnnntatggaaaaatgaccatgggttaacttaccagttcattttccctagaaacagataaaattggaatatcagctgtgttaataaaaaatattgctgtattttaaaaagaggcccctggtttgtaaactgcatctgaactgagagaactgtgaatgagctctgaatactgttaggagcccatagcaatggtttttcctgagagcattgcaaccccttgtagtgaagtgtgcccccctccttgggtgactatgaaagccacatttaatggaaactgtttataaaaagatactgggtttctggttgtgggagcttgggggccagtttaagcc

SEQ ID NO: 39566 - DNA, 668 bp, Macaca Mulatta
agttacagcagcacgtacagactaaggcaatgaattttttctgagccctccatttaaaaccattctatactgcagtatctcttcatatgtggtactagaagtgttagcactaagactccgggaaagagaagccaatttagctcttctactggccacaaatccaacaatacctagtcaattccctgttttaagagatggcttcaagcagaataaactcttcctaagaatttacaactgtaaaacctagagttggctctaggtggaccaagacttttccgggactgacattgattgaacatctgttaagtgccattcaggcatcctgccagcataaaagatgagtaagatgggacctgcgtgtcaggccctcactgtctagagttgtgttacctggtgtggtagtgactgtggagcacttggagttctgccggtagtaaagtacacaccagtttctgaagacttcatgtgcaaaaaagagtgtaaaatacctaattcataattcttttaaaatgtttagtacatattataatgatactattttgggggattttcattggttcaactttgatactattttcgaagtagtgtgttaaaatatattattacaatctcgcctatttctttttaactatttctaatatagctagtagaacatataaaattgcaca

SEQ ID NO: 39567 - DNA, 392 bp, Macaca Mulatta
  misc_feature (1)...(392): n = A,T,C or G
accggctgtgcgggagctgggacacggtgccttcnnnnnnnnnnnnnnnnnnnnnnnnnnnnnnnnnnnnnnnnnnnnnnnnnnnnnnnnnnnnnnnnnnnnnnnnnnnnnnnnnnnnnnnnnnnnnnnnnnnnnnnnnnnnnagccagatgagtccagagcttcggagagaagattaactgacagcttcttctggcagctgcttccagaggtttctcatggcacatagtgttctctccaatggttattatttttggaggggagaagcccagtggtctctgcactgggaggggtacagttaagtttttggtgcctcagaggcacctgacaccggccaggctgatgtgcttcatctggcagctttcgcactagaccccaccacacccagggct

SEQ ID NO: 39568 - DNA, 654 bp, Macaca Mulatta
ggcgttgccgctctgaatgccagcacctaacccctaatgtccctgctgcagccctcccagcatctccctgtacccctcctaggatctcccctgcaacccccattatcctccctacaccccccagcatcccccctgcagcctcccagcatctcccctgcaccccccagcatcccccctgcagcccttcagcatccccctgcacccctcccaggatctcccttgcatccccattatctcccctgcacccctcgcagtatccccccgcacctccattatcccccctgcacccctcgcggcatcccccctgcaccctccagtattccccctgcagcaccccccagcatctcccccgcaccgcccagcatcccccctgcagcccttccagcaacccccttgcatccctcccaggatctcccctgcaaccccattatccccctgcacccctcgcggcatccccctacaccccccaacataccctctgcacccccggaatcccccctgcacccctccagcattccccttgcaccctcccagtatccccctgcatcccgggctccaagcctcccgcccaccttgcggtccccgccctggcgtctaggtggcaccagaatcccgcgcggactcctcccgctgggtgccgccctcgcttgcccg

SEQ ID NO: 39569 - DNA, 96 bp, Macaca Mulatta
gataccattttccgtaatagtgggaagccagtcaacttcttggaatcttggaagtgttgtaaaggaagctcaagtatatcgagcattcacattgct

SEQ ID NO: 39570 - DNA, 901 bp, Macaca Mulatta
  misc_feature (1)...(901): n = A,T,C or G
attggttttcttattttacctggtttttactagtgtggatgttttgttgtttatgaccccccacattttnnnnnnnnnnnnnnnnnnnnnncaatgggttaaaaagaggttgtggctctttgaaaaatactcttttccccctctttccgagaatataaacaatagtgtgttttatacccttctttacccgtattaatttccctctgtctctttattcacaaatggaggcgcctcttgttgttaataagggcgtggtttatgggtggagctcttttcacctcaaggtgtatgtgcgggagaataaatttgtccccccnnnnnnnnnnnnnnnnnngagnnnnnnnnnnnnnnnnnnnntctcccccaataattccccaattattttttaaagagtttttgttttatttttccagacccaatccctcaatagttttgttgtttaaaaggccccatggaaaaggagggccatttgcttttttcagtatttcttggcccccatttctttgggagattaccccagtctttcaaaatttcaccaaccaccatgcagcaaacaatcaggaacagcacagtcatgcttgagatgtccctgtaatcatgtttttgatgaagtctctgtgtcctggggcatcaatgatagtcacataatactttctgttctcaaatttccacaaggagatatcaatggtgataccacgttcccgctcagctttcagtttatccaagacccaggcatacttgaaggagccctttcccatctcagcagcctccttttcatatttttcaatggttcttttgtcgatgccaccgcatttgtagatcagatggccagtagtggtggacttgcccgtatctacgtgtccaatgacgacaatgttgatatgagtcttttcctttccca

SEQ ID NO: 39571 - DNA, 1253 bp, Macaca Mulatta
  misc_feature (1)...(1253): n = A,T,C or G
gacnnnnnnnnnnnnnnnnnnnnnnnnnnnnnnnnnnnnaagctcatcatttaataagtctgaattcattttcaccacatggtattgtacacggtcatctgctgaaacagatttcttttttaacagatcttaagtttaaaaaaagtcatagatactgtgagttctgtataaactggtggacagtaagttagttcctttgttttaacttataagcctcaacttcaccgcagaataaagaatgtaggccaaagaaagcataatcggtcactcgtatagaacagtattgtttctataatttgaagctttctgaatggacgggttcaggcctgatgcaactgtaaaaagattacttaatgaatagactatatggaaattgtacaaaatgttattacctttaatcattagtagcttaaacagcactatatcactaattgctattcaaaatcggaaacctgtttttgaatccccgagaaggcagcatgtgtacacaaccataccaccttgtacttaggggtgtgccaaaacgtaattcaacagaaactttggctttaggaaagagtcacaaatatttaaaagaatggcttcaatcgtcattttaagtatacggtaggggaaaagtgtgctttaattaaatatacatcataccagtgatgctggcaaggttgaaagttactcctaatgttgatagctataaaaactagtttgtacataacaagacaatgagaggaaaaagcaatccctttgaaacaaaattatcaaataaaaaatgttcacagtggtttgtatcaacagtatgcattttatgacaagaacatgtacagacttggagcaccctagggctctttatgtcctaaagaaaacgagcatttacatgattatgggttgtactgaatttaaaaagatcaactgtacacttactccttagacaggataaactgtcctggggtgtacagctttaacaccatcattaaaattgtttgcaaaaggaagagagaattaaaaaacaaaacacttttcttttcggagtgaagagtctctcatttgctgttataaccagcaaatgccattcactaaatcaaaaacggaaggaagggcccccacaaacacagatctatctgagcaagctgaccagtacacattacagtcttaaaaatgaaggttatatactctatgttacaagtcccaactaggcagtgtcaaaatgacatctatttctttgcttgctttgtgaacatacccgttggaggcgttac

SEQ ID NO: 39572 - DNA, 627 bp, Macaca Mulatta
atctcccctggatgcacaggagagattcctaggagacctgagcaggtgttttcctgaggacgagtctgtattcctgtttccctttatttgtttggtgcttggctgctgggcagatgaacccccagagcaagatccaaaggtgctctttgtaccatttggatccccacagttggagcagagccccctgttttgcaaagatgctaaagtatgttctctttgactatagaagtttaggagcaagatagaggctgtccctctgggtggacgcatgctcctgtaccagaggcttggccaccatatcccctcttggaacacacttggtggccagagacaaggcccctctcagtgacaccgtgggaggcccgtgtccccagacatgaccacagatggctgaccacactgatcaattccagcagttttatcattctgctcgctattgaaagctataagtaaaaccatgtattttgatgccatttgacaaagctacccattttgatttgtagaagccactctgctcttaaaatgatgagtgagtcttggtcctgatgcacattctatggctgttctcttgtgtcgacattgaaccatatgaaattgccattgccataggtcaaaatggctgaacgt

SEQ ID NO: 39573 - DNA, 794 bp, Macaca Mulatta
  misc_feature (1)...(794): n = A,T,C or G
ggggggagctggaggagaactctcaagctaagagtatagggtattttaacctaaaatagcttatcttagggaatcaagtatcttactacccaaacaaggatagtttagcattctaatttctaaataagatttaaatggatgataaacctggagaacaaagttcgcatcatccgtcaacacgacattaaatgtttttaattctcaagccctccctttctttgtgcaaatacatgcttacgttatatatggcatgatatagttggcatagatatgaaaatatttagagtactaaattcataatagtcttaagaattagctaataaaacgttttgggatcttttgatacaccaatgaaaccagcaggaattcagatgttgtaaaatgagtatgaaacgcacatgcatccttttcctaacttgagctctgcttcccacatagttgccctcctagacgaactctcctgccattaagagctcaactagtaaactcaaaggaaacaaataagacccaaagctataccataggcggaattctcagtcacttaatcatttattttgttatgaaataggaagattataataggatagcaatgtatttgtgtttagggctgagaggagtatgatgaagattaaacttgtcataaatacatttttctaatttttaatagttctaaatgaaatgggatttttttttaattgagggagaagataataaanaagtttccttttcaggcagnaagtccttttttcttttcccatataggattttnatggtatttttatccccaaaaagcc

SEQ ID NO: 39574 - DNA, 780 bp, Macaca Mulatta
gggtcaatctaggaagaataagtaaatgcatatattgtgcatgaagttctatgtaaatgagaaaaattatacggtgaaaaagaagatgactttaggatgatcttctactgccttcttaaatcactcctttcccttttttatgacattatctctttctgattttctaccacatttcaggctactgcccctcggtctgtttttttaagtttgatacaactgctactgctgtggatgataatgatgacaaaggcaagcatcataaaaattataaataaggacagctaatatatatgaaatgtttactttttataaaaaagtgatcaaattgtttatatgagttcacaaattcaatctttattgctacatatgaggtagttgtcttcattttattcccacttcacagataggaaagctgagtcacagtgtgtttaattaattttgcatgactacagagtagaacatgggagagacacaaagccagacatttagttccagaaactttactgttaatcactgtgctgcaccaatggaatatgcattccttttgatcatttagcaagatacaatgagtgataagacaaatctcaatagattttttgaagattcaaattatcaacattctctgaccaaaacacagaccagaaatcaatttttaaaagatattgtgaacaataatcaaatattagaattttatagaatgctatagaataaccaatgtgttaaaaaattacaggaaacattagatacatttttgaaactaaatggaaaaagaaaaattct

SEQ ID NO: 39575 - DNA, 563 bp, Macaca Mulatta
  misc_feature (1)...(563): n = A,T,C or G
gatgaggtttaccatgttgctagcctggtctgnnnnnnnnnnnnnnnnnnnnnntgccggtctcagcctccccaaannnnnnnnnnnnnnnnnnncaccactgtgcttcgcccctaatttttgttgttggtttttttcatgtacagaggtttcaccgtgttgcctaggctgaaagtcactgttttaaaacatgtgatgtcatttgaaaatctgatatttctacgctttgcaatagcaggaaccttcaatagcaggaaccttcagaatcatttaaattataactgctacccttacagtttatttttttggcagtgtgtatctggtaattacaatcttctttcctccaccatggtaaataatagtttcatatgttgctttacatagtagaaaacacgatggaacttggcagaggctgaagagtaaatagatttaaaccaatttaaaaataattgtgttaacatctggaaactcagtacttgcaagggactatctagatagggatatttgtcacaggtgtcttaactctagttaaaaattgctctagttctgccatcagtgtttct

SEQ ID NO: 39576 - DNA, 623 bp, Macaca Mulatta
  misc_feature (1)...(623): n = A,T,C or G
gggggctcctaccctggtgcgtccctctccgcgtctggccagtcgagtgtgttcctccgcagatgtggtcctccgcagatgtggtcctccgcagatgtggtcctctgcacgtccagcgtctgtgtgtctgcctggtggattgcaacaaaagagtgacaggcaccatctatgagtatggagccctcaccctcaacggtgaggagtacatccagttcaagcagtttgcaggcaagcacgtcctgtttgtcaatgtagccacctattgaggcttggcagctcagtatcctgaactgaatgcactacaggaggagctgaagaattttggtgtcgttgtgttggcctttccctgcaaccagtttggaaaacaagaaccaggaacaaactcagaaatacttcttggactcaagtatgtgcgtccaggtagtggctttgtccctaatttccagctctttgagaaaggggatgtgaatggagaaaaagaacagaaggtctttactttcctgaagaactcctgccctccaacctctgatcttttgggctcatncagccagctcttctgggagccatgaaagtcatgacatcgctggactttgagaattctagtgnggccgatggatcctgcn

SEQ ID NO: 39577 - DNA, 828 bp, Macaca Mulatta
  misc_feature (1)...(828): n = A,T,C or G
ccggggttagggtgatgtgtgtcgcagcactgactgggtagcgtgggtttggctgaggtggtcaggaggccggggctgccgcaaggcactggcctgcctgaccgcttgctgtcttctgggcctctgtgggttcagggcaggggccaggggggtctttttgccctgataacttgatgttcttccctccgtcgccagtcaacaatagagggttagagatctctaatttctctgtgagaaagtctgaaggggccaggcccggtctctgctcccttccacccgccttgggttaggactgtctggcagttgcccgcttttggccactggcaggagagaggcctggtgggctgctggcagggcaggagctggagtgagggccatcctctttctgctcctggacacacgcaagcctctctcagcaattcccttgactggccagtcagggtgttgatctgagccagtatcccccaagactggaatggcttgagtgggcctgcattgaagggcactgtgtggcgaccctcccccttccaaatctcagcttggagccagctgagcaggctttgnnnnnnnnnnnnnnnnnnncctactgcagtgggtctgttgccaattttaattttttgttgtcccaggagctccctctagtggtcaaagtagcaaaatgtgcccaaggactagaacttgggtccctctgcctggtctggaggcagaggagggggctctgggtttgactgggattgtggtccccagaggtccatggcctttaaggatagtctctgttttctgtttcccccacctgtttacagtctaagaatactgtacataatagat

SEQ ID NO: 39578 - DNA, 662 bp, Macaca Mulatta
atcttaattatgagaacttgttgttttctgtgttgtgcctgctcctcattggtgtggttggttggtaggggtatcctgcctgtagcatctgaagtggtcttttggaaaaggtttagccccttcatgttgggattccaggatttgccttcatcctcaggttcgtattttcctgtggttgttataaactctttaaggcatagttgcacttatcaccttacagctgtgcaggtgcccagcaccgtcttggaaggtagtttcacattctcaggtgggtcagatgaccttgttagcaacttgacagacatgtcctggatgttttttgttcccaagaggctctcaggtcctcccccagggtcctgtcactcaaccatctacagggatgagaagacagtaaggctggctgattagccataatgtccttgactaatcctggtttcctggttctcacacagtggtaacaagggcttgcagccggttgtcagccaacagactgggaaaggtggtgcttcttacaggccctgataacaggaaaagcctaaatgacatcaagagacgagacagggaaagcataacaggcagattttcacaggcacagcaattgagaatgattctgtttagaaggcagacgttctcccagagcccggaggcccagggctcactgt

SEQ ID NO: 39579 - DNA, 220 bp, Macaca Mulatta
taatggattatataagctttgatcaatctttcatgtgtcttaatgtctctctgatttctatctcattgtctttctggactctgtcttttaacttgggcatcctgttttattgttcagcaaactaatttattttatatctgcaatcttgatttgaatttgcaagagtgctttcttgttcctgtatttcctcttttcactagcagcttgcaagctcctactt

SEQ ID NO: 39580 - DNA, 704 bp, Macaca Mulatta
gagcagagcctgaaggaagttagtggagccaggaagcttctcccagcagaatggggagcaccccaagccagccctggacactggctatgagactgagcaagacaccatcaccagcaaagtccccacggacagggaggactcacagaggatcgacgacctttccgccagggacaagcccttcgacgtcaagtgtgagctgaagttcgcggactcagatgcagatggagactgaggccggctgtgcgtccccgccggcgccccggctgcgacgtgtccaggcctggagtgttttgtgtttctcctgttcagtatccgagtctcgtgcagtgctgcgtaggttagcccgcatcgtgcagacaacctcagtcctcttgtctattttctcttgggttgagcctgtgacttggtttctctttgtccttttggaaaaatgacaagcattgcatcccggtctcgtgttctgcagtcagtcggagtacttgaagaaggcccgggggcggcacagagttcctgagccctttctgtagtgggggaaacatggctggacctctgttggctgagaagagcatcccttcagcttcccctccctgtagcagccactaaaagataatttaattccagattggaaatgacgttttagtttatcagattggtaacttatcgcctgttgtccagattggcacgaaccttttcttccacttaat

SEQ ID NO: 39581 - DNA, 804 bp, Macaca Mulatta
ggctttgttatgtgatgtaaaaaaagactttttaaaaaatacaggagtcgatagcagcagttgatgacgagatggcactcagaaacggcgttgacgtaatttaggacgtggaatcataagcgaaacagcacactgtttgaataaagagcgagtcggtatttatatttgtttttcttttgtcatgattatttattttaagttgctccagctgaggcatcttttgtatcagtatttctgttagggaacttttcttactaggtggtttgtattgtctggtttctaacatgaaggtagctgtttggcggttaaacacgttttgagtaatttgagttacaacgtgtgaaactgagcaaaaaagcagtgataagtttgggttaccataccaaatatttgttttcccactggaaaaaagtaagttttagaaaatagttaacctttgcagcatttgtttacagtttacagttccagaagtgcgtcgaaatggattacataactgctcttttattcctggtgtttacatctgtcccaggctgacacctgctcttggctggccccctttggtatgggctttaatttcactaccccaaacacaatactgtcatctgctttataataatgctcaagaatgcctgataaaaatctcattttgcagccagaacagccctgaatccttttttggcactaactggcaaaggaagattttttttctctagataatgcatttagcagccttagtgctcccgtttagaaaccacgaaactattaacccttgaataattaaaacagccggctggaggggttaaa

SEQ ID NO: 39582 - DNA, 859 bp, Macaca Mulatta
  misc_feature (1)...(859): n = A,T,C or G
ggcatgaccacgatannnnnnnnnnnnnnnnnnnnnnnnnnnnnnnnnnnnnnnnnnnnnnnnnnnnnnnnnnnnnnnnnnnnnnnnnnnnnnnnnnnnnnnnnnnnnnnnnnnnnnnnnnnnnnnnnnnnnnnnnnnnnnnnnnnnnnnnnnnnnnnnnnnnnnnnnnnnnnnnnnnnnnnnnnnnnnnnnnnnnnnnnnnnnnnnnnnnnnnnnnnnnnnnnnnnnnnnnnnnnnnnnnnnnnnnnnnnnnnnnnnnnnnnnnnnnnnnnnnnnnnnnnnnnnnnnnnnnnnnnnnnnnnnnnnnnnnnnnnnnnnnnnnnnnnnnnnnnnnnnnnnnnnnnnnnnnnnnnnnnnnnnnnnnnnnnnnnnnnnnnnnnnnnnnnnnnnnnnnnnnnnnnnnnnnnnnnnnnnnnnnnnnnnnnnnnnnnnnnnnnnnnnnnnnnnnnnnnnnnnnnnnnnnnnnnnnnnnnnnnnnnnnnnnnnnnnnnnnnnnnnnnnnnnnnnnnnnnnnnnacatcctatgaactcctccttaccatccatgaaccccctaacccataataaggaattccccctccaccaccttagcggaaaaaccaagcccaaagccccccttttggaatccacaaataaaggcacggaaaatccgggaaactaaattacccagggcctttttaaacatttggaaataaccgcccgccaaggtcccaatttctgcccccatatttctttccattaagcccggaatataccaccaaaactttctcttctattaatataaaagcgccccttttaaccaaccccaccaaattcttttccttatggggagtaatttccaccaaccccccttatgcac

SEQ ID NO: 39583 - DNA, 671 bp, Macaca Mulatta
tatgaattctagagaatcctgaagaagactgtgctttcactagtttgcacagcatagaaaatatgcttgtttatataattcatatgagagttagatgtttaagatgttaataattaagtaagttttaggagtctcattgtgatcgtggtattagtagatgttggtgttattttgtttgattttgggaaatgtattaatatatgtgttaaacaaggagctaaaaacaattacactttgtatttttgcttttgtcatcataatcatgttgaatttatgtaattattgattttatttcatgtggaatagctaattgcttcttaaaattatattatttaatgttttcattagctacactctacaattcacatactactttttattttaaaattacttaaatagatccaaaaagtagaagttttatttaaaatgtttttatgcttgaaatatgagaaccaggtacagttttctattcaaaattttcttattttaatattgtttggctaacaaagatagataaagtttcactcaaacacttttctccttacaatttcaagataatgtacattaacttttctacgtctaaccctaggttatccttccctgctataaagttgattgcttaaatttactgagaaaatattcccatcattaacaaaaataaaatattgaac

SEQ ID NO: 39584 - DNA, 278 bp, Macaca Mulatta
gaactggcagggagaatgggcgactgactttgtctcgtgaagcagagtgaccctactctgtcctttcctcagagactcagggttggtaccaaccaggaaactagcagctgctcttgtactgggcccaggttgctttctctatagtcattgagaggcaaaccctcaaacagagagtgtgtcagcagggggcaggcagctgatggatgtcattgtacccttgggggaagagaactcagcaggcaaaggaagtggggagatccagggattccatcggtcgc

SEQ ID NO: 39585 - DNA, 785 bp, Macaca Mulatta
  misc_feature (1)...(785): n = A,T,C or G
tacttgcctaacatgcatgtgctgtaaaaatagttaacagggaaataacttgagatgatggctagctttgtttaatgtcttatgaaattttcatgaacaatccaagcataattgttaagaacacgtgtattaaattcatgtaagtggaataaaagttttatgaatggacttttcaactactttctctacagcttttcatgtaaattagtcttttggttctgaaacttctctaaaggaaattgtacattttttgaaatttattccttattccctcttggcagctaatgggcttttaccaagtttaaacacgaaatttatcataacaaatactaatataactgctgtttccatgtcccatgatcccctctcttcctctccaccctgaaaaaaaatgagttcctattttttctgaaagaaagggaaattgattggaattccatttaaaattttggtatatggcattttctaacttacgaagcccacaatggttcttggccccatccctgaccctgggctacattaacctggtaagttttgtgcttccaaatcaattttttggttttttacaaaattctcttgaaacctcttaaagccctgcctttcgaaattttaatccctttaatatctatttggtaagggtgcaccagaaaattatcccnnnnnnnnnnnnnnnnnnctcttcctgtacctttggtcacccccaaacacaatttccccaatacttggggggggcccgcataggaatatctttgggcagaaaaaagaggccccccccctctgaaact

SEQ ID NO: 39586 - DNA, 326 bp, Macaca Mulatta
gaaaggaaagaaggccaaggggaagaaggtggctccggcccctgctgtcatgaagaagcaggaggccaacaaagtggtgaatcccccatttgagaaaaggcctaagaattttggcattggacaggacatccagccccaaagagacctcaccagctttgtgaaatggccccgctatattaggttgcagaggcagagagccatcctctataagcagctgaaagtgccttctgcgattaaccagttcacccaggccctggatcgccaaacagctactcacaagtacagaccagagacaaagcaagagaagaagcagaggctgttggccc

SEQ ID NO: 39587 - DNA, 668 bp, Macaca Mulatta
  misc_feature (1)...(668): n = A,T,C or G
ccagtacctcctcctcctgaagnnnnnnnnnnnnnnnnnnnnnnnnnnnnnnnnnnnnnnnnnnnnnnnnnnnnnnnnnnnnnnnnnnnnnnnnnnnnnnnnnnnnnnnnnnnnnnnnnnnnnnnnnnnnnnnnnnnnnnnnnnnnnnnnnnnnnnnnnnnnnnnnnnnnnnnggggaacaaacatgtatcctggatgaaaataaaccaagtctattgaaattgcaacccaagacattcagaagagacaaggctacagtgaatctggaaagtttgcacgtgtttggatgtattgattgccttaactggcagccctttgcactgccagcttctccctcaattacatgaggaaccacgagggggcaatgtcttcccgagcaataataggtgagtggtggtcttaggaccccgtggtggcccatgatgctagcactgtgtctttggccattcttgcctgttatggaacgtagtccacagaagggcatggtcttcttggagcctggcatgggcccaacaaaaatgacaatgtagtcaatagttccactcagacttcacttgggagcaggtggactacgttgtgtgataccaggatgcctggagaacctctcctatccccacccagggaagcatggcttaattccaaataaagaatctggttcctttgtcttt

SEQ ID NO: 39588 - DNA, 778 bp, Macaca Mulatta
  misc_feature (1)...(778): n = A,T,C or G
ggaaatcaatgtcctttccaatccatggaactgtcatactggtatcacaacagaaaaccttttttaaatgaaaagattctacgtcttgcactaagaagatgcaaaatcccatgcagctgtaagtcacttgctggaaatcatctggtatgactgatgtcttcaacatagccttgaatagaaggaaaactgtagtaaatgttatcaaatatcacaaacagtatgtaaagatattataatgcatgcaagaatgcatcacttttcagatgacaagcaaaagaggtttaaatttaaatctgcgttaggaaaaagtgacagcttcttcgatactgacattagaagtccaaaggctggccaagcctggctctctagataccctattcttccctttggtgcagtgcagtgggaccatttaaagacccaggtcactaaaagtaaaagccttcaaaaatgtcctgaattttacaaaccacaaggaaaacctcaaggtagaataaaaaatattgaaaaaattaattttgacatcctatagaagtcaatctgctctgacattgatggtgttatcctggaatgtataaataaatataaaatttgaaaatgctgtccaatggctgaccagataaacttgcgaatggaagaaaaaaacgtatgtttttttctgcctganataaaaatattctaaatactcaatattatctctttgtttataagtatagaaggtgataaatatctaggataataaagaaaaacaaataattggacaatttgaaaacatatatgc

SEQ ID NO: 39589 - DNA, 793 bp, Macaca Mulatta
  misc_feature (1)...(793): n = A,T,C or G
ttaaaaaataccccttaaaaaatgttggaatattaaagaaagccggaaattgatttccaggtttccaagaaggaaaacatttaccccaaaggtcctttagtttttcttgtcngttggctttcatgtacttttaaatacctatgttagttagacactgtggtaaatgtaagcatttgctatatggtgggcttactactgtcatattcagaattggcctgtgttgtgtaatttgaatggggtaagaaaaatcttcctgacaccagagtgcctaaaaggccatcaggaatcagcaggcctgacacataatcataaggattagatttcataatcatcatctatgaaggatttcaaatgggatggtgtagaaataaggggaggccagaactcaaagtcagctttgcgattttgctgcttgtgtttgcggattgctcaggatttaatagaatgcctaaaacagaaatgtgaagccgttatacagcagagggcatactgattagtatccactattttatctaaggttttcactgaacgtgatgtttctgacattcatttaagtttcagtgtataccagtagttcattcctttttattgctgagtagtatttctttgtctgaatataccatagttctttcattttcctgttgatggacccctgggctgtttgtcatcttggttatcattagtaaagcaactaaaaatacacagactttattatggacatattttttcatttctcctgggtaaataggacagaattgctctgtaatagaataagtaaatatttcgtggttcc

SEQ ID NO: 39590 - DNA, 298 bp, Macaca Mulatta
tgactctgtactaccctatagtgggcctcaataagggccacaaggtgaccaagaacgtgagcaagcccaggcacaaccaccgtgggcgcctgaccaaacacactaagtttgtgtgggacatgatcccagaggtgtgtggcttcacccctaacgagtggcgtggcatggagttactgaaggtctccaaggtcaaacgggccctcaaattcatcaagaaaagggtagggacaaacatctgccccaagagaaggcaggaggagctgagcaacgtcctgaccgccatgaggaaagcagctgc

SEQ ID NO: 39591 - DNA, 597 bp, Macaca Mulatta
ttgtctgttttactttatttagggggactaggtgtttctgatattttagttttcttgtttgtatagttttgtgttgtctgtgaatggggtttaactgcggatgaatggaccttatctgttggcttaaaggactggtaaaatcagaccatcttattcttcaggtgaatattttactttctgaagtgccctcctctgcaccagcagtaataaatacaatgccataatcccttaggtttgcctagtgcttttacaattttcaaagcacttccataagcattccttccacctccttggtagacatttatggaaagcctgctacatgtcaatcatagtattaggcacaggggacctaaagacaaacaaaaggatggcattctgcctcataaattacaaaacctaatgaaaatgacaacttggtaaacaaattattgttatattataaaatgctataaaagaggcatattgaaagtgccctgttggagacagggcaaatgccacaaaaatgatgtaaatttccatggaggaaaagtagaatctgcctggttagtgggcagcagaagacatttttcatcagtgggcaggtgttccttttgtaga

SEQ ID NO: 39592 - DNA, 678 bp, Macaca Mulatta
cttgcagccccctgactgcagcagatggcctgcaaggctccaggatggccgagctgcgggccctggctgaggtctctgggtcgggcagtgacaggtataggtaggaagcactgaaaatagcgttcccagagcacattgcaactcactgggtaagagggacgacacctctggtttttcaataccaattacatggaacttttctgtaatgggtacaacgaagaagtttctaaaaacacacacaaagcacattaggccaactatttagtaagcccggatggacttattgccagaaacaaaaagtagctttcaaaagaaatttaagttatatgagaaattccttagtcatggtgttgtctaaatcatattttagctgcacagcgttaccccacacagcgttaccccacacaggcagaacttgaagggttactgacatgttaatgctggtatttgatttcctgtgtgtgttgccctggcattaagggcattttacccttgcagttttactaaaacactgaaaaatattccaagcttcatatttaaccctacctgtccaacgtaacgatttcatgaaccattattatattgtcgaattcctactgacaacattataactgtatgggagcttaactttataaggaaatgtattttgacactggtatcttattaaagtattctgat

SEQ ID NO: 39593 - DNA, 800 bp, Macaca Mulatta
  misc_feature (1)...(800): n = A,T,C or G
gggataagggtatttggctgagcacatgatttatgttgagcacctgagaagacaatcagacaacacccctttcctggttgtacctactttgatggctatctctgtgctttggggtttctgttaagcagctcctaggtgtggtaagccagattaccctaagtgagagaggatgttgggcttctccttagattatataggccacttggagcagagccagaaatccttttgtaatttttgtaattttagtgttaactgactatatcatgcctcatctggtgtggcttgtggtcactcttaacatttcagcttcaattaaaaatatggccgggtgtggtgacagtgcgnnnnnnnnnnnnnnnnnnnnnnnnnnnngccacgtgcggtataannnnnnnnnnnnnnnnnnnnttttgggagaccgaggcaggtggatcatctgaaatcaggagctcgggacaggtctggcccacatggttgaaactttggctctgctaaaaatacaacaattggctgggaatggtgggcacacatctgttaatccccactgctttggaaagctgaagcaagagaatcacttgaaccccaggaaggcatagttttgcaatgaagtcaagaatcgccaccattgtactcccatgctgggttgaaaaatagtgaaaactccggtcttcaaataataattactaaatggatgccannnnnnnnnnnnnnnnnnnnggaatttattttcctcctcacccattttgggaatattgaacaatttataaggggctaaatggaaaatctatttacacttggtn

SEQ ID NO: 39594 - DNA, 808 bp, Macaca Mulatta
  misc_feature (1)...(808): n = A,T,C or G
gtttttacctccggataattttttcctttattttaaattaaggccccaaccataaatttattttaaaaatccaaggtttaattttttaattgatggaatttaagccatttggcttttccatcctattccggatttttcccttcaatcaggggattattcctaatggtgtcctaaagaatattagggacggggggggcgcccaagatgaccgaatagggaacaggtcccagcctccagctcccagtgtgagcgacacagaagacgggtgatttttgcattttcaactgaggcacagaccgacacctcacacctcacagggctgggtacatctctgagacgaagctttcagagcaagaatcagacagcaacactcgttgttcagcaatattctatcttctgcagcctccactgctcatacccaggcaaacagggtctggagtggaccccaagcaaactccaacagacctgcagctgaacgtcctgaccgttnnnnnnnnnnnnnnnnnnnngaaaggacatccacaccaaaacccaatcaatacgtcaccatcatcaaagaccaaaggcagataaaaccacaaagatggggaaaaagcagtgcagaaaagctggaaattcaaaaaatcagagcacatctccccctccaaaggaatgcagctcatcgccagcaacggaacaaagctggacggagaatgactttgacgagttgagagaacaaggcttcagtcgatcaaacttctcagagctaaaggaggaactacttacccagcacaaacaaactaaaaaccttgaaaaaagaatggatgcc

SEQ ID NO: 39595 - DNA, 127 bp, Macaca Mulatta
ggcctgatccaccacattgctgctcttataaaaagggggaagtctggacacagacacacagagagagcacgggcacctggcttgtaggctgaggcatctaccagccaaggattgccaatgattgcca

SEQ ID NO: 39596 - DNA, 775 bp, Macaca Mulatta
  misc_feature (1)...(775): n = A,T,C or G
ggtgcaggaaggcgtactgaattctttgtcaccagcacttttgatatgagcagtattcgttacacagtaacagttcctgcttagaactgacttataatttaaggtgttcactatattttctttggttttaaaatgcaaaatctcattggctgttctcttgaatgtcatatcatactggtgttaaaatatgtaatgtatttctttattaacatcactagatgaaaccatatcttaaaatgcagaagtgattggaaggtaggtcttatctagcctttggatttcaagaatagcatagtccttttgatttttcagagtttatatatgaagttcaccatgtatgtgatgaatttcataaggtacttggtatacatatttgcctgtgtttcttttcaactcataattggaagaattgtgatcgattataggatctggttaaaaattcagttactgaaggaattaatgagaacttggaagaaaatactgaaaggactatcataagggctatagctcaaacttcgtaatacataaatcactgtcatctttttggatttggttgtttgattctccttccttttttgacatatatatgccttaattcttcaatctgagggaccatngctttgaaatagactgaaaattaagggtcaccaccctaattttactttngtattcaatatcataaggtgagggttaataaaagtccaatacttttctacccnccnnnnnnaaanaatatntcattatattgacatatctaaattatacacaaaaaagt

SEQ ID NO: 39597 - DNA, 188 bp, Macaca Mulatta
  misc_feature (1)...(188): n = A,T,C or G
agttcgtgttcaagaccagggcatgcaaggagaggactgtacatgaggaactggctaaaaatgtgactggtcttttgaaatcaaatgactcaacaacagtaaagcatgtcctaaagnnnnnnnnnnnnnnnnnnnnnnnnnncctaaaatcgatggcacagcacttgattgaaacaaataaaatccag

SEQ ID NO: 39598 - DNA, 977 bp, Macaca Mulatta
  misc_feature (1)...(977): n = A,T,C or G
ggtcccnnnnnnnnnnnnnnnnnnnnnannnnnnnnnnnnnnnnnnnnnacacctgacctattgattgattttttttagagacgaggtcttgctatgttgcccaggttagacttgaactcctgggttgaaactatcctcccgcctcagcctccacacaacaggtactgcagatgtgagctactgaacctggctctaggtgtcctatcccggcctgcgggatagtcagagcaggccctggaggagggggtgggaatttggggaacaagagacacgagaaatggagacaagacagtgctctgatcaagtctcgtttaatggcggtaatgcactgccttatatacacttggaagggaaagggttgggctaacgccgaaatgatctcatttgcccagggccccgccccgggtagttttccgctattctccggcccgaatgccatgcgtgcgcttggcgccctttaaggcaacaatttttcccccgggccccgcccgggcaaaaaagtgagtccgaccaagtaagtcggggatacaatcctgccctcttttaattgacggccattcaccgactggggcggccacaataggcccacccatccgggtgaaacccccgctgggctgtgtaacactcccctccccccccctataccgcgctctaatgctctgcccataccctttttctcccccgcggtcccgcacattctacatcatttattattggcgcccgcgctcctcccttcacgcacacctcccccgtactgcccaggctccttcttgcctctatctttcccctacgcgtgtcgtatggcaacaggcagaatgacacgtccctctggaccggaccgcggcgtccctgtggtctatttacgcactgtgctccgagccgcacgcgtccatctgacgccctntgctgcacttaccggcctgccaataatcccgaattcatgtcaccacacatgcccccggctcctggtacaggn

SEQ ID NO: 39599 - DNA, 192 bp, Macaca Mulatta
  misc_feature (1)...(192): n = A,T,C or G
gtatccacagctatttacaggaattctttccccctggaaaggactactgctgtacggccctccaggtanaggtacaggaaagactttactggccaaagctgtggccactgaatgtaaaacaaccttctttaacatttctgcatccaccattgtcagcaaatggagaggggattcagaaaaacttgttcgggt

SEQ ID NO: 39600 - DNA, 121 bp, Macaca Mulatta
cagtggctgtctggtgaacacaaggatcatagcatttgtgtttgggatgtgagggtccccaagaaagtgggcaaggtgttctcggctctgtatcattcttcctgcgtctggagtgtggagg

SEQ ID NO: 39601 - DNA, 161 bp, Macaca Mulatta
tgcagcctttgcctcctggtttcaagcaattctcctgcctcagcctcctgagtagttgggactacagacacatgccaccactccctgctatttctttatattttagtagagacggggtttcaccatgttggccaggatggtctggatcccctgaccttgtg

SEQ ID NO: 39602 - DNA, 755 bp, Macaca Mulatta
gggggggttagctcagttattttagaaagtactcagaaactgaaactgttatatctctcattttaatatgaaatacatcatcaagatttatggctaactgagattttaaatgcacactgctgaagagtttgtcataagaggccaatctgagttaaatccctggaatgctgtaagtgcagtcagtttgttggaactcagcatacagtaaatagacattttctatagattaatgtagggtctctaggcggggcataaaagaactttgccagtaagatttagctggttagcctgattgctgggcctgattggggtagaagagcaatttttaaggtagcttatctagttccaagtcatgacaaaccaggcctgaatacagtcatggaatagcaggattatggagtgatgggtagggcattgaataaagagatggccctggtcctaagttattggcaggcccttgtcccagtagctacaggaaacattgtcttatttattccgcacaactctgagataggctttcttatttttgggggtggtagacggctattattctatttagaatatttatataaaaacttgaactgattttgaaactagtctctacttaaggcaaacaaagccgctcattatgcaatccgtttttgtttaattttgatagtttaaagttcttggtagcagaaagggtgaataaagtgaacagtggtcatatttttatgtgtgaagtggctgtgtgggtaaactgccttgggattcta

SEQ ID NO: 39603 - DNA, 792 bp, Macaca Mulatta
  misc_feature (1)...(792): n = A,T,C or G
ggatctcaagcaattctcatgcctcagcatcccaagtagctgtaactacaggtgtgtgccatgacatnnnnnnnnnnnnngcnnnnnnnnnnnnnnnnnnnnnnnnnnnnnnnnntnnnnnnnnnnnnnnnnnnttnnnnnnnnnnnnnntacccacctcggcctcccaaatgttgggaattacaggtgtaagccaccactcctgaccttacttttttcttaatattacaccgtgaaccatttttccatgcccttaaagttatgtcatgttttaaaaagagtaaaatactcatccccgctttatagtttttcgaacgagttaaaaaaggatagggaaggattatctcctctccagttttctgagacatttctattcaaggttaaaatgtactgtgttgatattttttttaaagtgttgaccaagagtatcatttttcacatccataatgaatctccatgttacggtcttctgtagatatttatgttcttcaggtagcttgttttatgtcctgtcgctattaagggatgtctctataaagtagagatcagttgaactgtttgtaaaaagtcatgannnnnnnnnnnnnnnnnnnntcaaagtgggtgcattgtttgagggtaggagtttgagaccggctgggccggcatgatgaacccccatctctactacatatacaaaacttagccaggcgtgttggcgagcannnnnnnnnnnnnnnnnnnnnnnnnnnaaggcggnnnnnnnnnnnnnnnnnncgggggggtgggagggtgcaaatgaccctagaatga

SEQ ID NO: 39604 - DNA, 396 bp, Macaca Mulatta
agccctcaatggtgagaactgcaaaacctcagccctgcaaagcatgccccatgtaagggcagtgccactgctgcttgtgcggctcagctgactgagcggaaagccagagggggcacctctggagagttaccgagcactgctgctccagtgaccaaacgtccagccttctaagaggtatgtgtcaacctcaatcctaagcaagcagcaagaagatgtagatacatactgtctctttaagctaaattacctagagaaaacctattgtaaaagaaaaggcaatgaaagtaaccacaaaagtgatgagacagaaaagccagggctcatatgaccccctggaaggtttgccgctggccttacctacaaggcaaatgtggaaaatccgggaagtcctcaatg

SEQ ID NO: 39605 - DNA, 784 bp, Macaca Mulatta
  misc_feature (1)...(784): n = A,T,C or G
ggaacataacaaaatttaccctcttagccatttttaagtgtagaattcagtggcatcaagtgcatttacagtgttgtgcaaccatcactactgtccatttccagaaatttttttgtcattccaaggagcaactcattaaatccattaaataagaactctccattcccctcatataatatttgcccctttgcatctgacttatttcatttagcaaatattttcaagcttcatccatagtgtagcatctgtgagaatttccttcctttttaaggctggataaaattctattgtatgtacataccacattatgcttatctagtcatctgttaatggataaaaacaatgaaactatgaactcctgacattacttgtacggcattttatagtggcttttctgattctcactcnnnnnnnnnnnnnnnnnncttatcctttatttggcctctaaagatggatttgttcatttgagggaacaaattagtttgactggtttgggaaggtattttgacccacagaatggaatgtataaaaccgggcatgatagataaacttagccataccccatcctcattgcctggctcagccttgtaggggtctgtagagatctagaggggacactgtaatgcattttaataggtacctggtgacaccttaattgtgaaacctgattcaattcctatataaaagtcgtttttaaaattctgacctgagttagtgtttgtagtgaaaacactggggactgttcaaacatttgagaattatgaatatggcccagaaaggtgtc

SEQ ID NO: 39606 - DNA, 935 bp, Macaca Mulatta
  misc_feature (1)...(935): n = A,T,C or G
ggnnnnnnnnnnnnnnnnnntnnnnnnnnnnnnnnnnnnnnnnnnnnnnnnnnnnnaagacagggtttcatcatattggtnnnnnnnnnnnnnnnnnnnnnnnnnnnnnnnnnnnacctgcctcaacctcccagagtgctgannnnnnnnnnnnnnnnnnntaggcccagcctattcagtcttctgttttgttttgttttgagatggagtctttnnnnnnnnnnnnnnnnnnnnnnnnnnnnnncannnnnnnnnnnnnnnnnnnnnnnnnnnccgggttcaagcannnnnnnnnnnnnnnnnnnnnnnnnnnnnnnncgtgcaccaccacaccctgttaatttttgtattttaaatagagatgggggtcgcccctgatggagcaggttggtcacaggtgttaggatctaaggtgatgcctggtaggggttcggatagaaaaggtattgggtcgagggagagaggaacaggagtaccagaacttggtgcggagtgtgaaagaaaagaggggagagtgatgtgaaaacggaacagtatattgaggagtggcgggatgcgcagagagggtagaagatggcggatggatctcgtgtaggtggagtagaaaagagagaccacgtgtacatttgtggagtgcatgttctaaatcggtcgcggagatcagggagtgagagtttgagaagcgtagagggcgaagaaatatatgaggttgtgcgaggggaattaaggaaagatatgtttgtttgagagagtgggaatatgagtggatgatacgtagagggtgacgacgcagggagagaggtcagcgcaggagcaagatacggacggaggctggacggggtggatccggagtggagtcgagagagccggtgcggtgcagggcatagagagctggagtagtgaggtgggaggaggagataatgtggcggacggtn

SEQ ID NO: 39607 - DNA, 783 bp, Macaca Mulatta
ggcctttgcactccggtagcagagttgattagttgcaacagaggctgccgtggtgtgaagcctgaacttgttactgtctggatgtttacagaaaaaaatgtgccaatccctggtatagaacatgggccctgcctggctccaacccatcctctcccttacatgcttgtccttttcctgacaccatgggggcaaagtctcaaatcaaaatcaatggaaaaattttgtctttctctgctgttaaaaatatacttatttccaaatccagcttctccttcctaaacctccccaaaggttggctctcttctgactactttcttcgtctccttttcttctgtgatcctgcacttccttgaagacgtctatcttgattacttctattctatatcctttgtgggtttctcttcccctgaccacctttaaggtaagtgttttctagggttgtccttggcccactggtctcacgccatttaccctgccatgccccagaactctttgcaggtggatcaaagttcacttggtcataagcccagttcccaggagagaaagacgaatttcccgcctaagggagataagccatcccaaggttagtggatttcaggggtttcattcccttgggcttaaataaacactgataccctaaacccgctaaacgggactgggtttggtgttccgttccccccccccaacgtgaggtaaatccaatatgtacccccttggagccgaaacacccgggaagaaagccgaattggacccccctttagtgaagacagccccgttaagggg

SEQ ID NO: 39608 - DNA, 379 bp, Macaca Mulatta
cattatctatatatccataattaggtaacctaatcattatctttgtagtgaacctggatcctcaattgcattctcccatgtacttcctactggccaacctgtcttttattgatatacccctggcctcctttgctactcctaagataatctataatataagtagtgaacagaggaccatctcctatgaaggctgcatgacctagaggttttcccttcactttttaggtggaagtgagatgatgttacttttagccatggcaatcgatagatactttgccgtatgcaaactcctccattacaagtccattgcatcagacttgctcctcgctcctggaccacggatttcatgcacaacatgagtcaaaaagttttcacagtg

SEQ ID NO: 39609 - DNA, 359 bp, Macaca Mulatta
  misc_feature (1)...(359): n = A,T,C or G
aaggttttacagaataatgcaaagtaccaagtagtacccaaaaagctgaccataggcaaacgcctagctcaatgtctacatccagcattaccaggtggagttcatcggaaggcacttgaaacatatgaaattatcttcaaaataattggacctaagcgacttgccaaagatnnnnnnnnntagttctggacttatttcctcttcttgcaaatgctgccatgtctgtgaagccaatattgctcagtttgtatgagatatattatctgcctttgggtaaaacactgaaacctggtctacagggattgcttactggtattcttcctggcttagaagaaggatcagagtactatgagaggtaa

SEQ ID NO: 39610 - DNA, 598 bp, Macaca Mulatta
  misc_feature (1)...(598): n = A,T,C or G
gcctggggagcaaagaggatatctatcttgaccctagcagcattatttacgccacaacagatctacaagtgtttcaaaatagcttggagaggacaggtttcctctgtctttgtaatcttgtagttgcatcaagctaccgtctacctctgtggctccagaagcatgtaaatcagttatccaatctctccccagattcatggactatctgccatgccccgaacaccaggcagagtgctaaggcgacacgaagatgaataagatgtgacccctgctctccaggatcctgtcgcatagatgaagagatagaacatatccataaaaagataactaatgaccgacatggcctgctgccgacacgtgttatggtcctgcgggctacagaaattcagaggaggaagacagatgactgcagtgtggcagctgctcctcgggcacttccaggagcttgttagggtgaggacagaagacttcataacacagagggaacctgtgacaccggctttatatcacacaatagaaaatacccaggtgagggccgggaannnnnnnnnnnnnnnnnnnnnnnnnnntnnnnnnnnnnnnnnnnnnnnnnnnnntg

SEQ ID NO: 39611 - DNA, 625 bp, Macaca Mulatta
  misc_feature (1)...(625): n = A,T,C or G
gggggtgaggggcgcccaccatctctgcttgctgaaaagctgcagaggccgccaggagtccacgcacctgagacttttacctttacccaagaaaggaataaaaaaggtcagatgatgacggctgtgtccttaacaaccaggtcccaggaatcagtggcttttgaggacgtggctgtgtacttcactacgaaggaatgggccatcatggtgcctgccgagagggccttgtacagggatgtgatgctggagaactatgaggctgtggcctttgtagtgccgcccacttccaaaccagctttggtctctcatctggagcaagggaaagagtcctgtttcattcgccccagggagtcctaagcaggagtgacgggagagcagccctgaatagatcctggaaactagaaaatttacttactaaccaaagcgtgttacctacaaatattcaaaaatttttcaaaacctcatgctgggaaacaggaaagggctattctggaattaaaaccctttcccaaaagggttttgttaaaacccctaaaaattttaacccttttttttttggaaagggaatttagnnnnnnnnnnnnnnnnnnttttgtgtggaaaaaataattctccatttcactca

SEQ ID NO: 39612 - DNA, 995 bp, Macaca Mulatta
  misc_feature (1)...(995): n = A,T,C or G
ggnnnnnnnnnnnnnnnnnnnnnnnnnannnnnnnnnnnnnnnnnnnnnnnnnnnnnnnnctcaaactcctgacctcgggtgatctgcctacctcatcctcctcnnnnnnnnnnnnnnannnnnnnnnnnnnnacactcagcctaaatattgttacataagtgtctgttaactgtacctaacacacacttgccgaagcactgtggttacagacacgcctgcccgcacatatttccaacgccctcgaacctgataccaccccccttcgcataatcccatgcaagacatcccccgaccgggacacctcacacgcagagcgcgcttctcaaaactaccccctcccccatcaacctggctgcccagacaggcgcgccccggcccccaacccttaccacaacccaagcacccgccccaccttccggccacggacccccccctccaccacaagccccgcggcccaaacgcccccgccccaagaaagacccaccacaacccgcccgaaagttcaccctcagatgcccacgcctccactttccgcacacgcgccggaacgcacgggcgcaacggacggcgcacacacctagcggcccgaacgcacgccgcgaccaccccacgcatcacgccgcgagacgcccactcgcgttcagcccccattgccccgcaagcgcgcggaagataagaggaccacctagtgcccgcgctggccaagcggaacccaaacgtacgtaataggcagccgcgccccggcaccgcgccccgagtggtgagcccatcaccgcgacgcccctctccgcccgctaccctaaatcccggccccgaccgtctgcgagacacctcacgggccgacgccgccatataacaactcgcacgtgtgtcaggagccgccctcttatagtaagcagcagcgccggtcctctttcgcgctagcggccgctcccgccgcacgattgcgtcgggagcccacggcgatccgcccgcgcggcaggcttgcgtctc

SEQ ID NO: 39613 - DNA, 766 bp, Macaca Mulatta
  misc_feature (1)...(766): n = A,T,C or G
ggggacgttacgtcgttcttgacgtcgtggcgagcttgttagctccgcaaggacccggacgcgaccaggggaggcagaaggactctgcacttgtccaagagaagaatccagagaaatcagagcaggtcaaatagttctaaaagccatggcccagggactggtgacattcagggacgtggctatagagttctctctggaagaatggaagtgcctggaacctgctcagagggacttgtacagggaggtgactctggagaactttggtcacttggcctcactaggactctccatttctaagcctgatgtcgtctccttattggagcaagggaaagagccctggatgattgcaaatgatgtgacaggaccatggtgcccagacttggagtccaggtgtgagaaatttttacaaaaagatatttttgaaatcggggcattcaactgggagataatggaaagccttacatgctgtgacctggagggctccgattttagagctgactgggaatgcgaaggccagtttgagagacaagtcaatgaagagtgctattttaagcaagtgaacgttgcctatggacatatgcccgcgttccagcatcacaggtctcacactgggagcagggagactggtgagaaactgatggaatgtcgggaatgcgggaaagcatttagccgcggctcacaccttattcaacatcagaaaactcacactgggtgaaaaccccttcgggtgtaaggaatgtgggaaaggctntcagcccgtgcctca

SEQ ID NO: 39614 - DNA, 390 bp, Macaca Mulatta
agtttctagatgtcgtgcggctggttcatcagaagtcctggaaagtgggcgatatcttccatgcagttgtccagtactgcaaaatgtatgaggagcagaaggatgggagactgagtctgtttgactggctcttggaactgggataaggcagtctgccctatagagcattccttccctttattcagcttagattacagtggtttgttctaaatgctctaaacattctcaaaacatcacatcacattagcagagctataaaaataaatctgctactcaaatccactgcatacagaataaatcggaggaaaagcaaaatataggtctgtcaaattcatacaacttgtgggtgagttccaaagagcttggattagaaggactggacaaagagag

SEQ ID NO: 39615 - DNA, 776 bp, Macaca Mulatta
gggagaggttaaggagttaacctggggcatgccagaactgggatggaatggccttgaaagattttagtgcattgcacttgacttagataggatctttcctgacccttgcttacttaggaatggcagagttaattggtgcttcaggtattaaggggctactatcactctgatatgtagcttttccatctctgtaacttgtcttcaagtaactggaagagtaatatatattaaaaaaatagcctttaatcagattgcctgcagtgtttcatggtcactttaaagccatgactttgcatgattgctaggtaaattcactcaagaagtaggaaatacaaattctttatgtttcaagtatttttgaacaagtggtaaaatgaaattgatttttatcatgtttaaatgaaagtaacagcagatattcaatgagtgacttattttgtggatatttttgtcctttggatatgatgtatagagtcacaatatattttcatcttttttgagaaattagtgatttagacatcttacatagtttctgagcacctggtacagtaaaagatctctcttaagaatgatttgtgtgatgtagttaggtggaccatccagcagagggcggtagagccagggccatagtaaaagttacagtaaagttgcggtttagcaacttgagtcttagatttaaattttgcctagaatcaaaagtttcaattttagtaaccatttttctttaaagtcaggcctggtaatggtttcctaaatggaaaattaaggccctggat

SEQ ID NO: 39616 - DNA, 644 bp, Macaca Mulatta
aggtggctatcctgtccagagtatccccactcatcacagtcttatcacccagctttatttgtctcattttattttccattacctgaaattgtcttgtttatgggctgtatattgtgcatccccacaagaacagaggcctctccttcttgtttccaatacctagaccatagcagtgagtttattatttcagagggatgaggactgtttttgatgtcccatgtgggtaagaactcaggccttcctaattttatcgatagccctagccctaccctgctctacttacgttctttgaagaagcaggtgaaaaattgctagcctgattttttcttaatactagaaaaatgagggagagtcctactgaccttaaggtgtctccagttctcaatttttagaaatcctagccccttgctgacagattatgaaggagagttttatggaggtaccataaaggctcacaggttcttggcagttgtgaatatgtgaggagtgagcataggtgcacaaatacacattatctgtgctcatgtacacataagcctgtcattttcaaattggctaaagtgcattttctacaaagggagtgggggctgttgagcctgaaatagggaacaccaggacagtaagatccaatgctttgaaagtgg

SEQ ID NO: 39617 - DNA, 690 bp, Macaca Mulatta
  misc_feature (1)...(690): n = A,T,C or G
tcttagtttctcttctttcccgggggggggggggcaaacaaaaattttctactttttttcttccannnnnnnnnnnnnnnnnnnnnnnnnnnngggggcccggggccccacaatactcccctcggggggggcgcgnnnnnnnnnnnnnnnnnnnnnnnnnnnagggagagatctttggttgccccctctcttttgaacccccaaacgccctgggggggggcccccccttaaatttcccnnnnnnnnnnnnnnnnnnnnnnncccctcttttttttccccccttaaaagggcaaagcccccttttcccgtttgaaaaggggggaaatgatttggggccataatgaaaaggggggtgtttttttttgccccaggagttttatgtccacgttaacccccattgtannnnnnnnnnnnnnnnnnnnnnnnnnnnccctctttctctcttatctgcctccgatcacgggatcctggctagttttgctcagggcagctcgcttgacctggtgacgaattccgctgtttcctggggctttcctttttcctccagaaggtcttgtgctcatggtttaggaacttagtcactgtcgtctttctggttttcatgagatcaaatcaaataaggtaatacatgcaaactgtataatgtactgcaaaggcaggccctgctgctgtccttagagttcagttccc

SEQ ID NO: 39618 - DNA, 757 bp, Macaca Mulatta
aactgtattaagtgttgccaccaccataccaggtacttctacctacactgctgaattgatacactgaccagtaacagtgcaactaccaccctgacccctgatgctacaagttcaggggcaatatcatcactaaaacggcagatgacacaacaactgaggttgccatcactctagtcagagaagctacaactccacctactgaggccacaaccctctagttgccttcacaaccttagaagcaggcaccacatctatggctactactgcaacagctgcttttcctagaaccataattcctatggcagccaccactgaaacaactgcagccttcacaagtgttggaatcaactgtaagccttgggtgccacaactactgccagtatgattgtaccaggtactgccaccacaatcacagttactgctgcctgcactgctgaacctgcttcttcaattactgcagctacaacttcaggggatgaggccactcctgaaggaagctctagcgctccagctatcacaaggacagcagcaacaatcacatctaacagtaactccatcaccactgccctcgtggcagccaccagccccgtgactatggtcaccacaaatacagcctcatctggaaccacctctgctgcactatctgctactataacggcagccagtgctcctacaattggcattaacactgcttcctcatagtgaaagcaatgctaaagttcatctcaatcaccttggtaaacaggtaaattaatga

SEQ ID NO: 39619 - DNA, 3019 bp, Macaca Mulatta
  misc_feature (1)...(3019): n = A,T,C or G
ctctcgggagtccaaaagaatctgagaacgccgttcccatccaagtagattaggatgcctatgacgctcaagtgttcaggctgcccggcccatcccgggcccagtgcctcgccacctgcannnnnnnnnnnnnnnnnnnnnnnnnnnnnnnnnnnnnnnnnnnnnnnnnnnnnnnnnnnnnnnnnnnnnnnnnnnnnnnnnnnnnnnnnnnnnnnnnnnnnnnnnnnnnnnnnnnnnnnnnnnnnnnnnnnnnnnnnnnnnnnnnnnnnnnnnnnnnnnnnnnnnnnnnnnnnnnnnnnnnnnnnnnnnnnnnnnnnnnnnnnnnnnnnnnnnnnnnnnagatgtcctggagaacatgatggagccaccacagcgagactccagtgcaccagggaggttccacgttggcagtgcagaatccatgctgcatgttcgacctggtggatacacgccccagagagcactgattaaccccttcgctccctctcgaatgcccatgaagcttacgtccaacagaaggcgctggatgcacacttttcctgtggnnnnnnnnnnnnnnnnnnnnnnnnnnnnnnnnnnnnnnnnnnnnnnnnnnnnnnnnnnnnnnnnnnnnnnnnnnnnnnnnnnnnnnnnnnnnnnnnnnnnnnnnnnnnnnnnnnnnnnnnnnnnnnnnnnnnnggcacagcaattcccgccagcctggtgacggcatgtccttcttgaacttcagtggaacagaagaactttctgtcggtctgcttagcaacagtggtgcaggtannnnnnnnnnnnnnnnnnnnnnnnnnnnnnnnnnnnnnnnnnnnnnnnnnnnnnnnnnnnnnnnnnnnnnnnnnnnnnnnnnnnnnnnnnnnnnnnnnnnnnnnnnnnnnnnnnnnnnnnnnnnnnnnnnnnnnnnnnnnnnnnnnnnnnnnnnnnnnnnnnnnnnnnnnnnnnnnnnnnnnnnnnnnnnnnnnnnnnnnnnnnnnnnnnnnnnnnnnnnnnnnnnnnnnnnnnnnnnnnnnnnnnnnnnnnnnnnnnnnnnnnnnnnnnnnnnnnnnnnnnnnnnnnnnnnnnnnnnnnnnnnnnnnnnnnnnnnnnnnnnnnnnnnnnnnnnnnnnnnnnnnnnnnnnnnnnnnnnnnnnnnnnnnnnnnnnnnnnnnnnnnnnnnnnnnnnnnnnnnnnnnnnnnnnnnnnnnnnnnnnnnnnnnnnnnnnnnnnnnnnnnnnnnnnnnnnnnnnnnnnnnnnnnnnnnnnnnnnnnnnnnnnnnnnnnnnnnnnnnnnnnnnnnnnnnnnnnnnnnnnnnnnnnnnnnnnnnnnnnnnnnnnnnnnnnnnnnnnnnnnnnnnnnnnnnnnnnnnnnnnnnnnnnnnnnnnnnnnnnnnnnnnnnnnnnnnnnnnnnnnnnnnnnnnnnnnnnnnnnnnnnnnnnnnnnnnnnnnnnnnnnnnnnnnnnnnnnnnnnnnnnnnnnnnnnnnnnnnnnnnnnnnnnnnnnnnnnnnnnnnnnnnnnnnnnnnnnnnnnnnnnnnnnnnnnnnnnnnnnnnnnnnnnnnnnnnnnnnnnnnnnnnnnnnnnnnnnnnnnnnnnnnnnnnnnnnnnnnnnnnnnnnnnnnnnnnnnnnnnnnnnnnnnnnnnnnnnnnnnnnnnnnnnnnnnnnnnnnnnnnnnnnnnnnnnnnnnnnnnnnnnnnnnnnnnnnnnnnnnnnnnnnnnnnnnnnnnnnnnnnnnnnnnnnnnnnnnnnnnnnnnnnnnnnnnnnnnnnnnnnnnnnnnnnnnnnnnnnnnnnnnnnnnnnnnnnnnnnnnnnnnnnnnnnnnnnnnnnnnnnnnnnnnnnnnnnnnnnnnnnnnnnnnnnnnnnnnnnnnnnnnnnnnnnnnnnnnnnnnnnnnnnnnnnnnnnnnnnnnnnnnnnnnnnnnnnnnnnnnnnnnnnnnnnnnnnnnnnnnnnnnnnnnnnnnnnnnnnnnnnnnnnnnnnnnnnnnnnnnnnnnnnnnnnnnnnnnnnnnnnnnnnnnnnnnnnnnnnnnnnnnnnnnnnnnnnnnnnnnnnnnnnnnnnnnnnnnnnnnnnnnnnnnnnnnnnnnnnnnnnnnnnnnnnnnnnnnnnnnnnnnnnnnnnnnnnnnnnnnnnnnnnnnnnnnnnnnnnnnnnnnnnnnnnnnnnnnnnnnnnnnnnnnnnnnnnnnnnnnnnnnnnnnnnnnnnnnnnnnnnnnnnnnnnnnnnnnnnnnnnnnnnnnnnnnnnnnnnnnnnnnnnnnnnnnnnnnnnnnnnnnnnnnnnnnnnnnnnnnnnnnnnnnnnnnnnnnnnnnnnnnnnnnnnnnnnnnnnnnnnnnnnnnnnnnnnnnnnnnnnnnnnnnnnnnnnnnnnnnnnnnnnnnnnnnnnnnnnnnnnnnnnnnnnnnnnnnnnnnnnnnnnnnnnnnnnnnnnnnnnnnnnnnnnnnnnnnnnnnnnnnnnnnnnnnnnnnnnnnnnnnnnnnnnnnnnnnnnnnnnnnnnnnnnnnnnnnnnnnnnnnnnnnnnnnnnnnnnnnnnnnnnnnnnnnnnnnnnnnnnnnnnnnnnnnnnnnnnnnnnnnnnnnnnnnnnnnnnnnnnnnnnnnnnnnnnnnnnnnnnnnnnnnnnnnnnnnnnnnnnnnnnnnnnnnnnnnnntgtgaccctggatgttgatgtgaacaaccgcacagaccggctggagtggtgcagctgttattaccatggcaactnttctctgaacgcagcctttgagatcaagctgcactggatggcagtgaccgcagcagtactcttcgagatggnnnnnnnnnnnnnnnnnnnnnnnnnnnnnnnnnnnnnnnnnnnnnnnnnnnnnnnnnnnnnnnnnnnnnnnnnnnnnnnnnnnnnnnnnnnnnnnnnnnnnnnnnnnnnnnnnnnnnnnnnnnnnnnnnnnnnnnnnnnnnnnnnnnnnnnnnnnnnnnnnnnnnnnnnngctttgaaccggaaacgtactgggatcgaatgcacctcttccaggaagccattgcacacaggttt

SEQ ID NO: 39620 - DNA, 680 bp, Macaca Mulatta
  misc_feature (1)...(680): n = A,T,C or G
attctggccaacatgcccaagcctnnnnnnnnnnnnnnnnnnnnnnnnnnnnnnnncgtggtggcaggtgccgtagttnnnnnnnnnnnnnnnntnnnnnnnnnnnnnnntnnnnnnnnnnnnnnncagaggtggcagtgagccaagatcacactattgcactccagtttgggnnnnnnnnnnnnnnannnnnnnnnnnnnnnnnnnnnnnnnnnnnnnnnnnnnnnnnnnnncactttttgtttcactgcctaatattaattaattggccatattttaattgtattgtgttccatatattttaaaattatttcttctgttgtacaaaccaagatagaagataatttgcctaaggacatagttggtaggtatcctagctaggaaagtgggtgcttctgaaaattattataaaaatgaaatgaggtaattttctgggcccctggtacaatgcctgagatgtcatatatactcagctaattataagtgacattttgttctagaatccagtagctctacttttagtccattgtgctgaacacaaatctacagatccttaaattgtatacttttattaatttaattttaaagaggcagaaaaatggactacactggaaacattccagtccaccaatagattgaaggaccaaggccatattctctttcagatgctacaaattgtg

SEQ ID NO: 39621 - DNA, 700 bp, Macaca Mulatta
cggcacgaggctcaggtccatactgccttgtatatttcctcctttatgtggtcaattcacattgtaagcctgttgcttagtgcatctcgtttcttggtatcaacttctttaatagagttcttggttacaatcaacagaagctggctttggctttttaatgtagaaaaggaacctattgaaaagatactgatcggtttcaataactgctagaaggttctgcaaaaccatgctttgaaagtgagcaggaaaagaggagactaggctttgggggcacagccaaaattacaaaactagcccagggatggccatcctgttcatgcacagccactgtccccagcactaggcacagactctaccactgcctcactgtctctgctggacttggaaacttgatattactgttactgctgcactgtctgccatgaaagtgaattctccaggatgcttcttcatcctttcatctctagcttataattcaaagtctggaattgagtggtcaatcctaggtcacatgtccatgtcctatctccgagggaggctggtaattgaatatctggcattttccattttcacttcttatgaatgaaggaattctacaaataatagaagtgggattcaggtggtaggcagacaaaaatgcctcacaattatacactatgccacccttgtttaacctttacctcattcactgtctactctc

SEQ ID NO: 39622 - DNA, 890 bp, Macaca Mulatta
  misc_feature (1)...(890): n = A,T,C or G
ggatttttctgttctttgttgccaaaacttctcttccaagtattgcccagcttatatactgccagattttataattggtaaggctgtatttagtcacggttttgttttatacatgaatattaaatatttattaagatattgatgacntgtaaagnntgagaagntggtcntntaattgcatttttgatcctcggtaggtgctcagtaacttttgactttaaagagaagtgactttagagagaagctgtagaagagaatgcttaatcagtgttactatttttcaatattgggaaaccattccaatcctttcccggggggaacccctaaccggaaagggtttttaacccccttttnnnnnnnnnnnnnnnnnnnnnnnnnnnnnnnnnnnnnnnnncttnnnnnnnnnnnnnnnnnnnnnnnnnnnnnnnnnnnnnnnnnnnccacccccccacaaaacaacacccnnnnnnnnaagggnntagaaaaaanaatagagaggggcnnnnntatttaactcctcnntnnnnnnnnntagtgggggtttttcttccccccccccacacaccgccgggnnnnnnnnnnnnnnnnnnnnnnnnnnnnnnnnnnnnnnnnnnnntgagcaaacaaaaaacaagagtgtggtggttgttcccccaccacacaccacaattaatatatttctcttctggcgcgcggnnnnnnnnnnnnnnnnnnnnnnnnnnnnncttcttttttttgagaaccccccccaagaggggtgtggcatgatcatcacnnnnnnnnnnnnnnnnnnnnnnnnnnnnnnnnnncannnnnnnnnnnnnnnnnnnnnnnnnnnnnnnnnnnnnnnttgtttgtgaaaaaacaaaaaaaacggccccccccaccat

SEQ ID NO: 39623 - DNA, 300 bp, Macaca Mulatta
cccgtcccttctggggaagctcctgtctgccagaggggctacaaaagcacagtggacaccatgatgggcaaatttggctcatgggagcaccactggtggctgaggcactgttgggccacatagcagttgactttgccctctccaccttcttttcacaagagttgatcccaataaacatccatcctcttccatcccaaactgtcttggcatctgcttctgcagagcccagcctggggcaagtttcatgggaaagggcacgtctcctgcaagttgcctgtgaccaggaagatggaggaggga

SEQ ID NO: 39624 - DNA, 416 bp, Macaca Mulatta
  misc_feature (1)...(416): n = A,T,C or G
gcaaggggactccaagagtcaaggggattcacatggagggtctgtgcaaggaggtcacaataataacccagatacccagattctagggaacacctggtgagaaaaacagagctcaggaggcagtggtgccggcagtcagaggagaggatgtacagttcacagacgaccangaacagccttccagaggagaacacaagtatcaaggcccagggaccaaaagcccaggtgcagctgtggagcccagtggacacccagaagcacaggaatccacagcagggagataaaaacagaaagtccctggaaatagagaacacaggtgccctggatgaagacttcactgancagctttccctaatgcagctccctggaaaggaagatagcagaaatgaatttaaaggtccaaggcccaagtagca

SEQ ID NO: 39625 - DNA, 1282 bp, Macaca Mulatta
  misc_feature (1)...(1282): n = A,T,C or G
gggatcctctgcgtgtgtcctcgcgagacaagctcatcgaaatggccgcgtccactcaaggaaactttgacggaaattttgagtcactggaccttgcggaatttgctaagaaacagccatggtggcgtaagctattcgggcaggaatctggaccttcagcagataagtatagcgtggcaacccatctgttcattggaggtgtcactggatggtgcacgggatttcatattccaaaaagttggaaagatggctgcaatcagatgggggaagagggaaattatttcgttcagctaggaaaaccatactggggtaccttgctaagttggaagggactcccaaagtgccaaaaaggacatacataaaaaatggcatatagaacgagactgaaaggattgggggaaggaagccagagcacgcaaggaactatacccagagaataacaaaggaattccacaataccgcggaaaagaaatgttcggtttggtccacacttcgtattgcgcataatgacaaaaataatggataaggcatttaaaatacgaacaacagtgtcgcgaaagagaatacatatgttcatacgcgcgtgtgagaggaatctcactatcatcacatggctccactctctagagttagtattaaaataggtgatactgcactcctcctcccctttggaaatgcgggcgagtaagaaaaattaaacaagaacaaaaaagaatgacataaaatactaccacgaaacatgattatatccacacaatttagggagtcggatgtggcaaaagagggcggttgagtgaantacagggttttagntagtctctgcttaaggaatccctttagatgtggtggggtgacaacgatggcgacgcgggacgtcaatcaagaaagacanaaggccctaataccccaagtgatatggagtgggtggtgcgatcattaaagtatatagtatgatcgacagaattataggaataagctgcgagataaatctatatacaccantgttaagtgatgcgcgttacaatagagcgtgtaccagcacgagtgctgtcaaaccagagactgatgccgagcccgaaaataggtgcaccatatactatacttgtatagacgcnaactctcgcataccccccgcgccaatcatacacgtactatagttagaaaatctaggtgaccctcacaaagactcagggacaaacagctaaagagtgtggatgtatctggtnatgatgcataaagaaagccgatagaaactatcgctccaaacacaactatgagaccg

SEQ ID NO: 39626 - DNA, 132 bp, Macaca Mulatta
ttctctctctcagatgaaatgcctagtcctcattgtcaacccttcattcttgatgctaggatctgtacttgtgtttctgagtcagatgttttctccattgaatgctttacccttttaaccaacccaggcctt

SEQ ID NO: 39627 - DNA, 503 bp, Macaca Mulatta
aaaaacaaagcaagaagaaagtggaggaggtgctagaagaggaggaagaggaatacgtggtggaagaagttctcgaccgtcgagtggtcaagggcaaagtggaatacctcctaaagtggtagggcttctcagatgaggacaacacatgggagccagaagagaacctggattgccccgacctccttgctgagtttctgcagctacagaaaacagcacatgagatagagaaatcagagggaggcaaacgcagagctgattctgattctgaagataagggagaggagagcaaaccaaagaagaagaaagaagagtcagaaaagccacgaggctttgctcgaggagccggaggggattattggagctacagactccagtggagagctcatgttcctgatgaaatggaaaaactctgatgaggcttcctggtccctgccaaggcagccaatgtcaagtgcccacaggttgtcacatccttctatgaggaaaggctgacgtggcattcc

SEQ ID NO: 39628 - DNA, 717 bp, Macaca Mulatta
  misc_feature (1)...(717): n = A,T,C or G
tttaaataatctctcanatgtgtacagtagaactcaagaagacagactaccaagggtcatctgaagtcgtgattgggtcacgaataataccaggacaaagttagagatcactactcaagcataagccccagttttcataagactgcagtgaagatgtttgatataaaggcttgggctgagtatgttgtggaatgggctgcaaaagacccatatggcttccttacaactgttattttggcccttactccactgttcctagcaagtgctgtactgtcttggaaactggccaagatgattgaggccagggagaaggagcagaagaagaaacaaaaacgccaagaaaacattgcaaaagctaaacgactaaaaaaggattgaaagactgaataggctctgcaaccagaggaaaatcatttggaaaattatgcagctttggaagaacccactaaagtttcttctttggatttcttgacagtattatttagtaaatgaaatctgaccaaatggaagaatcatgttagttctgacctcaatactatagtaacttttaggcttgggtgtagaagtttgtaggtttctattgacagttattataaattatcatttactgtggtacaaattctttattactgacttagtcatttgccgcttagcagttatctactgacatgaaacctcctgtggggaaagtgacttagattatgaactcattcaatg

SEQ ID NO: 39629 - DNA, 712 bp, Macaca Mulatta
  misc_feature (1)...(712): n = A,T,C or G
ggagtttgagaccagactgagtaacatagagagaccctgtctctnnnnnnnnnnnnnnnnnnnnnntagccggatgtggtggtgcacacctgcgatcacagctaatccagatgctgaggcaggaagattagtagagtatggggctagaagttacagtgagctatgatgtnnnnnnnnnnnnnnnnnnnnnnnnnnnnnctggtctcnnnnnnnnnnnnnnnnnnnnnnnnnntagtgatacactattaattccatatatgctaatatgagatagcatccatataaactactatcaagtctttatgtgccagctactgcaataagtcttttcacgtttaactcattgaattcataatgagttttgaggtagctaccattatttcccccattttacgaataggaaaactgaggctgggagacattatttaacttgcccaaggttctaaaccagttactggcagaactggtatttgaacctacttaatctgattctagagcctgtgctatataaactcttacccactatgctatgctactcattagtatctgtttaacaattactactattacaatagctgtaattatcactcgtatagtacaggggaccctatcaaagaaacactcagcttttcgcttatctatttctgaaaaacattttttttattaaaagtataaaggtgcaatttcacctgaatttatttaaattaatttc

SEQ ID NO: 39630 - DNA, 337 bp, Macaca Mulatta
cttaagtccaagtccgttcgcaggtccccagtcgcacgcattgaccagtaggtctaagaaggccagaatcaatgtgtaaatactgcgagggaatgtggggggcccctaggagaccacctgcaccccgatggctcgcctgatcgccccaagccccactgcctggcgtcagggcctgccagggctctccaccctacccacccgcagggcttgtttgctgtcttttcccgcctcgttttcccgccttctccaggctgtccaggcgggcagggctgccctgccccctccgccctgtctattccactctgaccagtcctggcgggcacacgagtgacctgtg

SEQ ID NO: 39631 - DNA, 490 bp, Macaca Mulatta
caaatttgagtttattctggttgaggtgaatgtaagaggaatatataatttaatacaatgtgaacagggcttctgagtctgtctcatccctacctaatatgttagggttttgccccttcatttcccttacaaaagaatgttagtaggtttatattaatcattgtgtccaaaagcaagcaaagcaaatcacagtgttcacagctctgcttcataacaaatacataaaccaaatgccataaaatttcttcaactctagttggaaaccgtttggaatttttgttagttgtccagcaggtaagctggatgacctgtggtgctgacctttttacatagtgtagtgttatattagccaaccccaaaggagcagtggttttcaaggtttttactggcctacaaatctaccttcattccgtactgtagaaacatacataccaggtaactaaatcgaatcactctctatcatgagttagtactcactcgcacttaagga

SEQ ID NO: 39632 - DNA, 758 bp, Macaca Mulatta
gctgctgagagaggtcaaggacaagatcatactctagttggtgcataagccaagatccattggaggcccggcttcagagtggacatttcccaccttgggtgtgcgctgacctgtctagactgcaaagcggtgtagccaggccctgtgcctgttgctcttccactccctcacacacccgttgcctggcccgccaaggaggctgtgcagcctgaagctctcaaaggcctctaccaaggcctcctcttccttcccacccaagcttctggcagcctggctccagcctgacccaaacccagatcagtggccaagcaggcagaaggtgctgatcaaaagggccctcaaagctcatttcatctaattgtgagtgttcacagagaaagggctgaaaacggagctggcgtcaacagtaaatcatgtctgcgggaagaggagaagcttcccttggaaattaaggaatgactgtcgacaggccggaccatcagaacgccagctgcctaatgaagcaataaaggcctttgtccccccacttctcgctgctctgctcttacatgtacaattattacaaaaatcaaagagacgaatgttgccttgagatatgatttccatattggtatggattgtattatacaagcagtacaatacgctccattatcattttgattatatgcgcctttcatttgcactattggaccattatctgccgtacattcattacattataagaaactggaactctatccttgcaatgaattgtaaaa

SEQ ID NO: 39633 - DNA, 1282 bp, Macaca Mulatta
  misc_feature (1)...(1282): n = A,T,C or G
gacctatgaatggaaaaaccattccaactcaacagcctccaaccaaggtgccccctgagagaccacctcccccaaagctttctgcaaccagaagatctaataagaaactgccttttaatcgatcctcttctgacatggatcttcagaaaaaacaaagtaacttggcaactggactctcaaaagccaagagtcaagtttttaaaaatcaagatccggtgctaccccctcgccccaaannnnnnnnnnnnnnnnnnnnnnnnnnnnnnnnnnnnnnnnnnnnnnnnnnnnnnnnnnnnnnnnnnnnnnnnnnnnnnnnnnnnnnnnnnnnnnnnnnnnnnnnnnnnnnnnnnnnnnnnnnnnnnnnnnnnnnnnnnnnnnnnnnnnnnnnnnnnnnnnnnnnnnnnnnnnnnnnnnnnnnnnnnnnnnnnnnnnnnnnnnnnnnnnnnnnnnnnnnnnnnnnnnnnnnnnnnnnnnnnnnnnnnnnnnnnnnnnnnnnnnnnnnnnnnnnnnnnnnnnnnnnnnnnnnnnnnnnnnnnnnnnnnnnnnnnnnnnnnnnnnnnnnnnnnnnnnnnnnnnnnnnnnnnnnnnnnnnnnnnnnnnnnnnnnnnnnnnnnnnnnnnnnnnnnnnnnnnnnnnnnnnnnnnnnnnnnnnnnnnnnnnnnnnnnnnnnnnnnnnnnnnnnnnnnnnnnnnnnnnnnnnnnnnnnnnnnnnnnnnnnnnnnnnnnnnnnnnnnnnnnnnnnnnnnnnnnnnnnnnnnnnnnnnnnnnnnnnnnnnnnnnnnnnnnnnnnnnnnnnnnnnnnnnnnnnnnnnnnnnnnnnnnnnnnnnnnnnnnnnnnnnnnnnnnnnnnnnnnnnnnnnnnnnnnnnnnnnnnnnnnnnnnnnnnnnnnnnnnnnnnnnnnnnnnnnnnnnnnnnnnnnnnnnnnnnnnnnnnnnnnnnnnnnnnnnnnnnnnnnnnnnnnnnnnnnnnnnnnnnnnnnnnnnnnnnnnnnaggttaacagcctttctgcagaatggtgtgaagctcttcacagttttacagcagagaccagtgatgacttatccttcaagaggggagaccggatccagattctggaacgtctagattctgactggtgcaggggcagactgcaggacagggaggggatcttcccagcagtgtttgtgaggccctgcccncagctgaggcaaaaagtatgtcggccatagtaccgaaggggaggaaggccaaagccttatatgatttccgaggggagaatgaagatgagctttccttcaagg

SEQ ID NO: 39634 - DNA, 817 bp, Macaca Mulatta
tcgctaaaatatttggggccatggagttgaaaagcctttagggtccgccaggcatttgaaaattggtccaaatccttttctttgaaggaaccagtattttcttttttgggggacttcagggctgttaccaaataccccaagggctgatagagtaattttcagatttcacaccatttatatgtagatatccaaaagaaggaaaaaagagcttcatgtgacttagcttaatgggttttccctatagttgtaaatgtataaagtgatccatatttgggaattatcatataccaattatttctaataataattgatataatctattagaacttgtgagaggttttgatataaataatttgcctgcctagcagagagaagagaaggagagtaagcaagagaaaatgtttctaaaatgtcctatcattggaagtaaatgatcaaaaatgttttgcattaagttagggtttggttttaattttaccttgaattctaatgttcctacaccttccaaatatattttaaatcttcattaaacaaatcacattttaatcacacacagagcttaaaagaggtgattctacaacagatattcagtattagctagcgaaggagaacattggttgaaggtacctaaaaccacgtgcataaggaacagtttatttcttatttggtgatttactattttaagtcatttctgtgtcaaagctataaaaatctccagtgctaaaaagtgtgagaagaaatgagctagccaaaaaaaagaaaaaaagtcaggggagagttaattttaaaatttgcattatttttattttcctactcc

SEQ ID NO: 39635 - DNA, 733 bp, Macaca Mulatta
  misc_feature (1)...(733): n = A,T,C or G
agtccctggnccagntggcctcatttctaaatcacagatttgtacagtgactaatttttgcaaagcagagtttttaaagggtttttaaaatttactattatgatgttaggtatcatattagtgtgtccaaagtagccacaaagaaagagatgatactattgaagcagaaacttgaaatcctgatttatacttcaaggaacaaaatcaattcctcaaaaccttatgaggcaaaatttattttaatgtcatagtagttaggtatcaaactcagttataaatagggggctttaattctcatagtgatagaactttttaagcacttcaggattataataccgtaacagttgtcttccctgccactctggggtgctctctgaagcggcatctccggcaaagaactccatagtgtgtgatgagcctgctgcttgttcagtattggcatttacctcttaatatactgtcctgtgcccatctggagtaggagccccccagaggagactgggcagagatttacttggcagtaaagattatctgacaagtctaatattttaggtctttgtaattccccattttcaaggtatatctcaattagtttatcttgatatatgctcagagatataaactattggcatcccatgtttatgttattacacatagctttttatttaaagttctgggtcgtaaactcaggttcagacatcctagaattccaattctatgattggactgtgat

SEQ ID NO: 39636 - DNA, 730 bp, Macaca Mulatta
ggggaagcacactgcggcgattctggagcggttgtgcttttctggcttcagcgttgcggctcaaggcacagttggtcatgtgcctgctgtccattgccgctaaggcctgctgctgccattcaggcgtctctctctctctctttcatgccgctctctccaccccatcttgggacggccggctctaagaattcctgctacgacactgaattcaaccaggaggtgatgccacatgcaatcagaaactatgccactggtgaagaggtatattgagccctgcctggttaacctccagtgaggttatcagagaattgggagaggctcaaaccagcatcctgcacctagttatcaaaccattgtgaagtcttgattcctggatggccagaaaacttctcattggtcaagagcaacattaagatctgcctgttactcatactgatgcttcctgcccagcaagttcatcagaggaagaggatgaattacggttgccatggatgtccttgtgaggcagttgggaagccttggctggattgtgaaggatatttgaaaagtattttagagtccaccagatcctccatgtgaatgaccatacagcaaaagaaggagggtccctgtcagtgattaacgtaacatagtgatgaaggtaagtagggggaagagagggcttacttttgcccctgattcttgttcagggaaggcctccttagaaactgcccatttttgccagaagcaa

SEQ ID NO: 39637 - DNA, 1040 bp, Macaca Mulatta
  misc_feature (1)...(1040): n = A,T,C or G
ggtgactatatctagttctttactaaaagtaaactcacctctctatatatatttcaaaactgaatttgaagcctattagagaccaactgatcttttagttgtaacgaactgtatggtcttgtatggtgacacacctgtgtaggaggccaagacttggcagaggatgtagtctaggtgtcctggtatatatatatggtcactcacttcgtttatatattccacactcaaaaaagaagtcagaagtttttttgagtaatacaaaaaccatcacttatataatttgtataagaaactttaaacagttttaatcaaaattatgaataacatcaaaaatgctttaagattttatattttggaatacctgtgaagtagtatgactacatcatgttaaatatttattttcttctatgattttggggcagcnnnnnnnnnnnnnnnnnnnnntccacttttaagaaattcagggaagatttggtcacattgaagatacaatatttttgtagtatttataaactgttctaaatgatagactatagaaagcatttttgtcatatgaaggtaaatcagtccattatttagatcatttaaactctgaacattacaccttctgggctttgatttatgaagtggcacagaatctaactttgcactgaatatcttttcattcacatctcctctgccttagtcacatgggcacagtacagaaaatctatcaaactcaaaatatatagaactattacgtcgtgaatgatctcaaaattaactctgtcactggacagttggtgaacgaatgtgccagtgctaagaaggacaccaggatggagataacttccgaacactggttcgagtaaaactggcctgttgcaaaaaaaggggtaaatacagagtttctttttttctctctgcggcgcacgcaatagtagtggcgaggtgtcatgnngnaagagaggaaaacacgaaaagcgaaaacgaagcaacacacgagaacagacacaagatgatacagaacgaggacgatacaaagcaaacacgaacacacg

SEQ ID NO: 39638 - DNA, 686 bp, Macaca Mulatta
  misc_feature (1)...(686): n = A,T,C or G
cttctgtggaaagtgtcgagcattccaacaaagggcattactgtagattttttgtgtgtgcccatgctgttgattgctaaatgtaatagtctgatcgtgatgctgaataaatgtgcctttttaaaaaatgtgctgtgtagttagtctactctgaagccatcttggtaaatttccccaacagtgtgacgttagaattccttcagggtgatgctaggttctatttggaatttatatacaacctgcttagatggagaagccattgtcttcagaaacctttgtgtagctgaaccgatagttactgctgtgacctgaagttcaccataaaaagggattacccaagcaaaatcatggaattattgattataaaaatgagtgttgacacatcctatgcaatatatctaaattgaataatgataccagataaaattattgatgggattgaagcttgtatatcatccattatcatgtgtaatcaataaactaattctcttgaaaaaaattacaaaattagaatactattaataaacaaggaagctgttcaaagaatagttctaaacatttaatagtgcaatttgtattanaattcaccttctttatggaaaatgagaaaatgatcttaggatacaaagccccacaaaacataaaactattacataatccattattcacttataagatgataattt

SEQ ID NO: 39639 - DNA, 4138 bp, Macaca Mulatta
  misc_feature (1)...(4138): n = A,T,C or G
ttcctccacagtgaaggcagcaacctcacccctgcccaccacttccaggacttccgtttcaagacctatgcacctgtcgccttccgctacttccgggagctcttcgggatccggccagacgattacttgnnnnnnnnnnnnnnnnnnnnnnnnnnnnnnnnnnnnnnnnnnnnnnnnnnnnnnnnnnnnnnnnnnnnnnnnnnnnnnnnnnnnnnnnnnnnnnnnnnnnnnnnnnnnnnnnnnnnnnnnnnnnnnnnnnnnnnnnnnnnnnnnnnnnnnnnnnnnnnnnnnnnnnnnnnnnnnnnnnnnnnnnnnnnnnnnnnnnnnnnnnnnnnnnnnnnnnnnnnnnnnnnnnnnnnnnnnnnnnnnnnnnnnnnnnnnnnnnnnnnnnnnnnnnnnnnnnnnnnnnnnnnnnnnnnnnnnnnnnnnnnnnnnnnnnnnnnnnnnnnnnnnnnnnnnnnnnnnnnnnnnnnnnnnnnnnnnnnnnnnnnnnnnnnnnnnnnnnnnnnnnnnnnnnnnnnnnnnnnnnnnnnnnnnnnnnnnnnnnnnnnnnnnnnnnnnnnnnnnnnnnnnnnnnnnnnnnnnnnnnnnnnnnnnnnnnnnnnnnnnnnnnnnnnnnnnnnnnnnnnnnnnnnnnnnnnnnnnnnnnnnnnnnnnnnnnnnnnnnnnnnnnnnnnnnnnnnnnnnnnnnnnnnnnnnnnnnnnnnnnnnnnnnnnnnnnnnnnnnnnnnnnnnnnnnnnnnnnnnnnnnnnnnnnnnnnnnnnnnnnnnnnnnnnnnnnnnnnnnngatgggcgggatccccgctgtgaacggccgcggggagcggctgctgctgcacattggcatcattgatatcctgcaatcctacaggnnnnnnnnnnnnnnnnnnnnnnnnnnnnnnnnnnnnnnnnnnnnnnnnnnnnnnnnnnnnnnnnnnnnnnnnnnnnnnnnnnnnnnnnnnnnnnnnnnnnnnnnnnnnnnnnnnnnnnnnnnnnnnnnnnnnnnnnnnnnnnnnnnnnnnnnnnnnnnnnnnnnnnnnnnnnnnnnnnnnnnnnnnnnnnnnnnnnnnnnnnnnnnnnnnnnnnnnnnnnnnnnnnnnnnnnnnnnnnnnnnnnnnnnnnnnnnnnnnnnnnnnnnnnnnnnnnnnnnnnnnnnnnnnnnnnnnnnnnnnnnnnnnnnnnnnnnnnnnnnnnnnnnnnnnnnnnnnnnnnnnnnnnnnnnnnnnnnnnnnnnnnnnnnnnnnnnnnnnnnnnnnnnnnnnnnnnnnnnnnnnnnnnnnnnnnnnnnnnnnnnnnnnnnnnnnnnnnnnnnnnnnnnnnnnnnnnnnnnnnnnnnnnnnnnnnnnnnnnnnnnnnnnnnnnnnnnnnnnnnnnnnnnnnnnnnnnnnnnnnnnnnnnnnnnnnnnnnnnnnnnnnnnnnnnnnnnnnnnnnnnnnnnnnnnnnnnnnnnnnnnnnnnnnnnnnnnnnnnnnnnnnnnnnnnnnnnnnnnnnnnnnnnnnnnnnnnnnnnnnnnnnnnnnnnnnnnnnnnnnnnnnnnnnnnnnnnnnnnnnnnnnnnnnnnnnnnnnnnnnnnnnnnnnnnnnnnnnnnnnnnnnnnnnnnnnnnnnnnnnnnnnnnnnnnnnnnnnnnnnnnnnnnnnnnnnnnnnnnnnnnnnnnnnnnnnnnnnnnnnnnnnnnnnnnnnnnnnnnnnnnnnnnnnnnnnnnnnnnnnnnnnnnnnnnnnnnnnnnnnnnnnnnnnnnnnnnnnnnnnnnnnnnnnnnnnnnnnnnnnnnnnnnnnnnnnnnnnnnnnnnnnnnnnnnnnnnnnnnnnnnnnnnnnnnnnnnnnnnnnnnnnnnnnnnnnnnnnnnnnnnnnnnnnnnnnnnnnnnnnnnnnnnnnnnnnnnnnnnnnnnnnnnnnnnnnnnnnnnnnnnnnnnnnnnnnnnnnnnnnnnnnnnnnnnnnnnnnnnnnnnnnnnnnnnnnnnnnnnnnnnnnnnnnnnnnnnnnnnnnnnnnnnnnnnnnnnnnnnnnnnnnnnnnnnnnnnnnnnnnnnnnnnnnnnnnnnnnnnnnnnnnnnnnnnnnnnnnnnnnnnnnnnnnnnnnnnnnnnnnnnnnnnnnnnnnnnnnnnnnnnnnnnnnnnnnnnnnnnnnnnnnnnnnnnnnnnnnnnnnnnnnnnnnnnnnnnnnnnnnnnnnnnnnnnnnnnnnnnnnnnnnnnnnnnnnnnnnnnnnnnnnnnnnnnnnnnnnnnnnnnnnnnnnnnnnnnnnnnnnnnnnnnnnnnnnnnnnnnnnnnnnnnnnnnnnnnnnnnnnnnnnnnnnnnnnnnnnnnnnnnnnnnnnnnnnnnnnnnnnnnnnnnnnnnnnnnnnnnnnnnnnnnnnnnnnnnnnnnnnnnnnnnnnnnnnnnnnnnnnnnnnnnnnnnnnnnnnnnnnnnnnnnnnnnnnnnnnnnnnnnnnnnnnnnnnnnnnnnnnnnnnnnnnnnnnnnnnnnnnnnnnnnnnnnnnnnnnnnnnnnnnnnnnnnnnnnnnnnnnnnnnnnnnnnnnnnnnnnnnnnnnnnnnnnnnnnnnnnnnnnnnnnnnnnnnnnnnnnnnnnnnnnnnnnnnnnnnnnnnnnnnnnnnnnnnnnnnnnnnnnnnnnnnnnnnnnnnnnnnnnnnnnnnnnnnnnnnnnnnnnnnnnnnnnnnnnnnnnnnnnnnnnnnnnnnnnnnnnnnnnnnnnnnnnnnnnnnnnnnnnnnnnnnnnnnnnnnnnnnnnnnnnnnnnnnnnnnnnnnnnnnnnnnnnnnnnnnnnnnnnnnnnnnnnnnnnnnnnnnnnnnnnnnnnnnnnnnnnnnnnnnnnnnnnnnnnnnnnnnnnnnnnnnnnnnnnnnnnnnnnnnnnnnnnnnnnnnnnnnnnnnnnnnnnnnnnnnnnnnnnnnnnnnnnnnnnnnnnnnnnnnnnnnnnnnnnnnnnnnnnnnnnnnnnnnnnnnnnnnnnnnnnnnnnnnnnnnnnnnnnnnnnnnnnnnnnnnnnnnnnnnnnnnnnnnnnnnnnnnnnnnnnnnnnnnnnnnnnnnnnnnnnnnnnnnnnnnnnnnnnnnnnnnnnnnnnnnnnnnnnnnnnnnnnnnnnnnnnnnnnnnnnnnnnnnnnnnnnnnnnnnnnnnnnnnnnnnnnnnnnnnnnnnnnnnnnnnnnnnnnnnnnnnnnnnnnnnnnnnnnnnnnnnnnnnnnnnnnnnnnnnnnnnnnnnnnnnnnnnnnnnnnnnnnnnnnnnnnnnnnnnnnnnnnnnnnnnnnnnnnnnnnnnnnnnnnnnnnnnnnnnnnnnnnnnnnnnnnnnnnnnnnnnnnnnnnnnnnnnnnnnnnnnnnnnnnnnnnnnnnnnnnnnnnnnnnnnnnnnnnnnnnnnnnnnnnnnnngtgctcatctgctggcaccgggcatccaccaatcactttcccccatccctccgaaggacacccggcaggcatcccccggggaggcgggggcagaaatcagaaggggtgtctgggacctggatgaccaacagggacaggggcatggtcgtcatctcaaaggcccacacccccagaggccacactgagcgtcccagggagccctcgagtccccctgcccagagnnnnnnnnnnnnnnnnnnnngagcctgtgggggtgactcggagcagcaggtgtggtcccgggcgggcagcaccacgtccagggcagcctccctccgctgagcgagtcacatgataccagtgcccggccaacactcccttgcaggagaaatttgcaaacctctgtggataccacatttccatttttgtgttgtctccaaggcccctttggagatctactttgttggttgtgttttttggttcctttcagagaactgtaaaccgaggctgaagtgccccactgactgtgccgaggggcgggggcaggaggaccgcaagacctatttataatatttagcaaactcggcctccctcagatcccccgcgagggaggccgctggacccaccccgctgtcccccacgatagaagtctgtaaataccttggtgaccaatgcccacttcccctcctgggtcacctctgatggccgccgtccactgagaatgtggacagtgtccaaattcctgtactgtaatgactaaaaggcgttttctctgagactgacaaggc

SEQ ID NO: 39640 - DNA, 1073 bp, Macaca Mulatta
  misc_feature (1)...(1073): n = A,T,C or G
gggtgtggatgtgatagctgctttggacctgtatgtggagcagggccagtgggacaagtgcattgaaacagctaccaagcannnnnnnnnnnnnnnnnnnnnnnnnnnnnnnnnnnnnnnnnnnnnnnnnnnnnnnnnnnnnnnnnnnnnnnnnnnnnnnnnnnnnnnnnnnnnnnnnnnnnnnnnnnnnnnnnnnnnnnnnnnnnnnnnnnnnnnnnnnnnnnnnnnnnnnnnnnnnnnnnnnnnnnnnnnnnnnnnnnnnnnnnnnnnnnnnnnnnnnnnnnnnnnnnnnnnnnnnnnnnnnnnnnnnnnnnnnnnnnnnnnnnnnnnnnnnnnnnnnnnnnnnnnnnnnnnnnnnnnnnnnnnnnnnnnnnnnnnnnnnnnnnnnnnnnnnnnnnnnnnnnnnnnnnnnnnnnnnnnnnnnnnnnnnnnnnntggctgccagactttctgtttcactcttgcgtcacacccagcttcnacctgtagacaaagccttctatgaagcaggcattgctgccaaggnnnnnnnnnnnnnnnnnnnnnnnnnnnnnnnnnnnnnnnnnnnnnnnnnnnnnnnnnnnnnnnnnnnnnnnnnnnnnnnnnnnnnnnnnnnnnnnnnnnnnnnnnnnnnnnnnnnnnnnnnnnnnnnnnnnnnnnnnnnnnnnnnnnnnnnnnnnnnnnnnnnnnnnnnnnnnnnnnnnnnnnnnnnnnnnnnnnnnnnnnnnnnnnnnnnnnnnnnnnnnnnnnnnnnnnnnnnnnnnnnnnnnnnnnnnnnnnnnnnnnnnnnnnnnnnnnnnnnnnnnnnnnnnnnnnnnnnnnnnnnnnnnnnnnnnnnnnnnnnnnnnnnnnnnnnnnnnnnnnnnnnnnnnnnnnnnnnnnnnnnnnnnnnnnnnnnnnnnnnnnnnnnnnnnnnnnnnnnnnnnnagacctcccacagaacagtgtgccaggacgtgctgaaattcatcagtcagtggtgtggagggctccccagcaccagcttttcctttcagtagtcggtagagctgaggaagagttagggcctctccctcattaaagttttataaata

SEQ ID NO: 39641 - DNA, 1010 bp, Macaca Mulatta
  misc_feature (1)...(1010): n = A,T,C or G
ctttttatattggtcnccccccacncnttgttcntaaagtaagaagaagtcnctagttttatatgtcnacctaaaataacnacngagacngactttcccaaaaggagtttattcnggaatagcnagggattgnnatcctgntatggtgaaccntggacncctccngaggggctggggaaagggggaagccttttaccctaaaaaggagaaattaatgtaagccnttttgaaacnaagggccattggttacngggacttgttgnnggggttggcattagctcnttggtggaggtagctgtttttggacnaatgtccttgtgnnagaagcttatctggaatgctgtgcttttgaggagttcctggcatcntttctgtcataggcatacatgcngcnagttcttttgataagtccngttaccggggatatgtggcatgaggactctttcttcntgggcctctgggtcccntttttcttangggttgacccagngaccntattttgggtatggaaaattttcccccatatatggggggattagancataaaagggttaagtgactgctcagggccccncgctagttaatggttgtcctgtcaggctagcaaggctcaaaagtcctcagcaattctcctgcctaaagctgaaagaatcagttttaggccagtttttacaaagnccatgagcttcatactgctaccttagctgactaaactaatactcaactaaactgaactaaaataactgagtaaaacacagatctgtcctgagtngaagaatgccaaatagagacattctttactggtcagtcatcagaaaatcagaccacatttacatatataactaaaatagtcacaaaacaacacttatccttactaagtgcaatacactgatttttttactttctttcatttacaaaaatatactgtacaagacttaatttcatagcccattngaacttagaggtaccctngagtatngngagtcacagccacatatatctaangggct

SEQ ID NO: 39642 - DNA, 389 bp, Macaca Mulatta
aggccagcttcctgctgtgctctctgcacccaccgacctcacacgcagccctagaactgacgtccactggcctgaactgggtctggggccaacacggagcaggtgggggtagagcagccctgcttgcctggaggaaagttgaatggctggaaccaagatgacagatggaggctggcaggcaaacacgggaggtctcctcactccaagaggggagtcagcctggggacagttcttctccaggccctgctgctcctatcagctgcaacacagcagaggtaggcccctccggaaaagctcccacggtcctgggtcctgctccaacttctagaagctcccagcgttacttcctgggcaggcctgctcatcatcgcgctactcctgtccaaggg

SEQ ID NO: 39643 - DNA, 212 bp, Macaca Mulatta
  misc_feature (1)...(212): n = A,T,C or G
nccacagctgttgcaaatccaacactgtcctccttagatgttaaacggattttatttcaaaaaattaccgacagaggggatgagttgcaaaaagcctttcagctgctggatactggtcagaacctgactgtgtcaaaaagtgaactgagaagaatcatcacagacttcctgatgccgctcacacgagaacagtttcaggacgtgttggctca

SEQ ID NO: 39644 - DNA, 575 bp, Macaca Mulatta
ttctttgggaatagctgggctgagacctacaggaatcgcttctggaaggagcaccacttcaaggccattgccctggtggagaaggccatgcaggctgtgtatggtgccagtgccccagtatgacctcggccaccctctggtggatgtaccaccacttacagctgcagggtgcccatggagacgcggtcatcctgggcatgtccagcctggagaagctggagcagaacttggcagcgatggagaaagggcccatggaaccgactgccatggacacttttaatcaaacctggcatttggttgcccacgaatgtcccaactacttctgctaggcccatcgtggctcaggctgcccaaggcttttctgtcaccttttgttctctcatgccgaccagtcttggccttgagctgacttagcagggtctttctggattgtctggatccatgcgttatttttctagcttcctgcctagctccctgctcactttatattgtgaaaggtgggggtgagtcccacttgggcatttcccattgaataaagcaggcacttgacccagccatagcccaggtcaaccccc

SEQ ID NO: 39645 - DNA, 786 bp, Macaca Mulatta
  misc_feature (1)...(786): n = A,T,C or G
ggcatgtgctggttgtttcaaatacacgaccacatttatactgtacaaaagtcttagttttatttatagctgaggaaacagattcagagagaaagagtgatatactttggaaggatgatatttcaaaactatcagagagataaagtgatatacctaagattacaccctttggaacaatgagttctcaaaacagtcttcctccaagatgtgtcctgtttctactaggacctacttccttcatgggtctcagtatgctggagagactggggaggcacacacctttcacacaacggaaccagaccaattctcctcaaaaatgcatcatgtatcacggaaacaaggactcctatttagaaacattctagctctctttagaatctacttattcttttttagatattgatctaataaacgtactagcagtagccctagctgccagaaaatgtgtaccaaaaacaaaatgaaaacttggtgagggggtgtttctacacattcagagttccacactgctaactactagtagggacactgtggaagagaaaagcctaattaatagacagataacttcaaagagcaaatcagtttggaaccactaaatattaagacaagcaggacagtcaatgtagccatcaatgtatgaacacactgatgttatagtcagcatgataatcctacattttttacagaaatgtaaaaaaanaatttatcttgtttcgcttttttcagtcctttacttttaagaagtatatctaaaaaagtatgaactacaagtttggttgccaaaaa

SEQ ID NO: 39646 - DNA, 721 bp, Macaca Mulatta
  misc_feature (1)...(721): n = A,T,C or G
ggatggcacctttgcatttccccttgggacaagagagaaaggaaataactggtactgccagagttaaatttgtacgtggagtagcaggaaatcatttgctgaaaatgaaaacagagatgatggtgtagaggtcctgaagagagtaaacaaaatttgaaattgcggctatcaactatggaagagagtgctgaactggaaaacaaaggaagtattgacaattgatatgcttgtaacagcaccgattcgaacacttgtgccattgttcgccagcagcactcagcagccaagtttggagttttgtagcaggaagacaaataaattagggatttaatatcctggcaaaatggtagacaaaatgaactctgaggtccagctgcacagggaagaaagggaagacaggaagaggttagagaggaaatacaagagtcagaagactggaagatgttgtgaaacttaagaacacatagagttggagtaaaagtgtaagaaaactaaaagagtaagagactggtcagaaagtaggatatttgaagttaacacttcagtggcagagtagttctgaatggtaacaagaaattgagtgtgcctttgagagtaggttaaaaagcaatangcaactttattgtagctacttctggaacagaagaatgtcattaatagtttttagaaaactaaaatatatangcatactttatttngtcatttaacaaaagaaagtttt

SEQ ID NO: 39647 - DNA, 903 bp, Macaca Mulatta
  misc_feature (1)...(903): n = A,T,C or G
ggggagtgagacgctgacgggaggatggacggattggtttctcggtgctccgcgcggctgctgcagcaggaagaagagattaaatctctgactgcagaaattgaccggttgaaaaactgtggctgtttaggagcttctccaaatttnggnnagcagnnnttacanagnanagaaaanatntttaaaaaatttgaaagttattccaacttgatattcttcaaaagagtcttcaggcagaaaagaacaaacccactaaaaatatgatttacatttaatagccgcctacaagaagggtattttggtccatgccaattaaaaggcttggcctattcccacgannnnnnnnnnnnnnnnnnnnnnnnnnnnnncccaaggggggcaaccccaaaggttttaaggccaacccccaaagttttggaaaaaaccattcccgggtaaaaaaagggccctaggggggaaattttttccccaaaagttctcccnnnnnnnccagcgttagtaanaaaagaggttttctccccccnnnnnnnnnnnnnnnnnnnnnnnnnnnnnnnnnnnnnnnnnnncncctcnnnnnnnnnnnnnnnnnnnnnnnnnnnnnnnnnnnnnnnnnnnnnnntgaaaaattttcgcgcgggcccccgggggtttttattataagggcccccnnnnnnnnnnnnnnnnnnnnnnnnnnnnnnnnnnnnnnnnnnnnnnncgnnnnnnnnnnnnnnnnnnnnnngagggggggcnnnnnnnnnnnnnnnnnnnnnnnnnnnnnnnnnnnnnnnnnnnnnnnnnnnnnnnnnggggnnnnnnnnnnnnnnnnnnnnnnnnnnnnnnnnnnnnnnnnnnnnnnnngttgttgggtgccccccccccgggggggccctcctctcttggagg

SEQ ID NO: 39648 - DNA, 775 bp, Macaca Mulatta
  misc_feature (1)...(775): n = A,T,C or G
gggcttccatgcacctctataccgcatagatgtgtcctagtcttcaaagctttcaggtctcgctcaggaggggcagaaggaaaacggcagctcttcagatgatcagccctcacatggctcacccatggtcctcaccagggcgacagtgagactcatctcacatattccctttcttgacatctctgctcccctccacttagtttccagagaagctactgaaaacccaggctcccactcccaccctgtcccatccccagctcagaggcctcaaaaaagaggtctgcactgggttccaagttcatcgaggaaccacgtggaaacacagaggactggacagtgtggcctgggccagttcttccagaagtttcattatttaattcaaactgttttgagacataaaagaacatggccgggtgtggtggctcacgcttgtaattnnnnnnnnnnnnnnnnnnnnnnngnnnnnnnnnnnnnnnnnnnnnnnnnnnnnnnnnnnnnnnnnnnnnnnnnnnnnnnnnnnnnnnnnnnnnnnnnnnnnnnnnnnnnnnacatggtggtgnnnnnnnnnnnnnnnnnnnnnnagggaggctgaagcaagagaattgcttgaactgcgacccgggaagcggaggttgcagtgaaccaagatgacgccactggactccaccctgggtgacagaacgagactctgcctcaaaannnannnnnnnaaannnannnnnaaaaatgtggccggcctggggcccttcgagaaacctttcctaaaccaattcgt

SEQ ID NO: 39649 - DNA, 299 bp, Macaca Mulatta
gagcacaccctctggctgccatgggatcgcttctttgtcatggaaaccatcatcatgagacatgaggagaatgagattcccagctgtgacctgagcaattttgcccgccccaaccctgtcgtctctccatccccactgacatccttcgccagctcctgtgcagagaaaggccccattgtgccagaaattcaggtacccagctttcctaactgcattccaccacacttttatttcattctggggatggaagaggatctcagagacagtggaaagagagaaaacacctctgtagggcttgg

SEQ ID NO: 39650 - DNA, 663 bp, Macaca Mulatta
  misc_feature (1)...(663): n = A,T,C or G
ctggcagctactctactgtacttttgataattttttgtgttacttttgtttctgtttattttcagaatgacattccaaaattttaatctctgtgtgatgtttttcagtatttcgatgggaaaagttaagatggcattatnnnnnnnnnnnnnnnnnnnnnncaaacacttcttgatttcttgtgatgtcttcaggtttttgttttttaattgaatatatcagtgcaccataatactaatggttaggagatcatttaaatcacaagctatattttgtgattgattttaaaattttaattatcccagtggttgagattgtttttctagtcttgaaccttggtcaaacattttagtaactttgaattagtgtatgactgaactagatgtatatattggcagtcttcaatttaggagtgaattaattaattataagagtttgtttgtaactgatgataattattgataggttaagtgctgcacaggtggtccacattgcacatgaatcctcaaatacttctgtaatctatactgtagttgaatattgaatagcagcactattgtgttacctcttttataacaaagtaattttcaagtggaaatgcaatacttttaaagccatatagtagaccttgtcggttgaactaggtctccatttgttggctga

SEQ ID NO: 39651 - DNA, 722 bp, Macaca Mulatta
gggcttttcctgtagcagcatccggggtgagaggaacgtggttttctcctctctccgccatggcgtgtgctcgcccactgatatcggtgtactccgaaaagggggagtcatctggcaaaaatgtcactttgcctgctgtattcaaggctcctattcgaccagatattgtgaactttgttcacaccaacctgcgcaaaaacaacagacagccctacgctgtcagtgaattagcaggtcatcagaccagtgctgagtcttggggtactggcagagctgtgggctcgaattcccagagttcgaggtggtggggactcacccgctctggccaggggtgctttttggaaaacatggtgtccgtgggaggcccgaaatgttttgccaccaacccaaaaaccctggccgcccgtttggccaatcgttagaaagtggaacaccaaccccaaaaaaccaataatggcccatccgggtttctggccccgtgggctgcccctccaccccctaaccagccaacctgggtccaatggtccaaaaagggtcacaatcggaaaattggagggaaaagtttttcctggaaaaccttcccctttttggggtaaattggggaaaagaaattaagggttttgaaaaggggcctttcccagggaaaagaaacccaaagggaaaaaccccggtttttttgggcctccccccttgagggaaaaactcttttaaaaagccccccg

SEQ ID NO: 39652 - DNA, 402 bp, Macaca Mulatta
gcagaactggaaggatgctgaacgctggttcaccagccagactgaggaaccgaaccaggaggttgttggccacacaaagcagctccagatgtacaggtctgaggtcactgacctgtggcacaccctccagggtcttgagattgagctgcagtggcagctcagcatgaaagccaccttggaaggccaccagcgcactttggagctcagctggtgcagatccaggtgccgatcagcagtatcgaagctcagctgggcgatgtgctagctgacagtgagaggcagaatcaggagtaccagtggctcatggacatcaagtcgcggctggagcaggagatcaccacctacctcagcctgcttgagggccaggaagatcactacaacaacctgtccacctccaagatc

SEQ ID NO: 39653 - DNA, 753 bp, Macaca Mulatta
ctaaaggagctttgcaagctgactcatctcacaatattgctgtgtttaatcataactggtctcttcccattcatgtcactgatcatgtcacatgtgttgaattctttattattttaagttattctgcatgagcatagaacgtcgttaatattcacgagttgcctgtggtgtgtacttcatctcacttgagtctgttgagaagtgtgtttgggggaatcatccgctggtgacactgccggtctgagtaaccctgtctccctttctcggctctgaaggaactaccttgttctgcactagctccatccctagagccctgcttctccaggcccgagagaccagcaaaccgtcgccctccgtcccggtgggccccacattcccccactgcctcacagcctcagtcacccggagacccgacgtccttggaggagcatggtggcgaggagccgcccgaggagcagccacaccgtgatgcaagcttgcatggattatcacagtataattcactgtaatttgcataaccacaccatcgccatgaacaaaactctgcccaaaaggagagatctagttttctcaaggtcaaagaatgttttttaaaaacacacagctgctgaatgttcaacctgtgaaactgagatgtttctagaatgaaacagtaaatgtgcctgtaataacttaatttttttcatagctcagaaaactatttttgtctccatcttttttacacacagtatattaaatgaaaaggtaaataag

SEQ ID NO: 39654 - DNA, 450 bp, Macaca Mulatta
  misc_feature (1)...(450): n = A,T,C or G
gggcgctcacacgtctgtgcccagggaggccccaagatgctggtgaggcctccacccggactggtgtccaggctcttgacactgtcgtgaaaaggaattcatggaggagcagagcaaaatgtggagattcattgcgaatctcctgaacatactgaagaaagaaaagtgcaggcataccacagagcatcacgcccaacggggtttggggctgctacctgtaaatatttatttaaccgaggggtgaaatattcatgaaggttcttggaaaaagcatatgagaactcatatgggagagaagccctgtgaaggcaatcaatgggaagaagccgtcaaatgcagctcagcttccttgcagcatgacagaaccgatacaggaaagaaaatctgtgattgtaaagaatgtgataaaagcacaaaaaaannnnnnnnnnnnnnnnnnnnnnccctgtc

SEQ ID NO: 39655 - DNA, 788 bp, Macaca Mulatta
  misc_feature (1)...(788): n = A,T,C or G
ggcagctctgttacgaagatgctccttcctataggggcactaagatttaacggatttttgactcattgaaatagtgcagtgaactttttcttccccatcctgcataaaactttttctatacttctggtttttcgtttaggacaaataattggaggtgacattactaagatacgtagtatttttcagggtatggacacatatttccaaatagcttccaaaaaagttgttttacctaaaaatttgaaggaataatggaagtttttactgaatataatttgtttgtttgagatggagtctcgttctgttgccctggagtgcagtggtgtgatctcggctcagtgcgggctccgccgtctcaagttcaggtgagtttcttgccccaggctcccaagtagctggaattacaggcgcctgccaccacatccagctaatttttatatttgcagtacagacagggtttcacannnnnnnnnnnnnnnnnnnnnnnnnnnnnnnnnnnnnnnnnntgccctnnnnnnnnnnnnnnnnnnnnnnnnnnnnnnnnnnnnnnngccgtgcccagactctgaatatagtttgaacttaaatttgagaaactattactttaggttctagttcactgatgatccttctaaatatggctgttgtgttaaggtttttagaaaccttactaatggtctaaaactgtacagaactttcaaagnnnnnnnnnnnnnnnnnnnnnnnnnnnnnntagaaaacattttttaaccatttaattttaaagaacacaaaatttttgtaaagga

SEQ ID NO: 39656 - DNA, 781 bp, Macaca Mulatta
gggaggtttcatcagtcatctcaagagtgtcctggtctaatcgtccggaggcattttccccaccttctcacactccagcgtaaccccagaaacaatcattatttctatagtctactgcgcagagccagcccgaaatataattaagaatcatgcaaagggatgtgcaaacgagactgggctagaccaatgcgtccaaatttcagaagccgagctgggggccacggagtgcttcttgaaggggaaagtgagaggtgggttcacaaaagaatgagtgaagggtccaaaccacggccccacctggctgactgagcaggaacaaggacgtgcccggcagccgtcccaggcagctggcagggctctgagtgggcagaacaggtaaggaggccaaccagccggccaggagagcctcgcgtcctcccagagacgggaagtctacccctgggagacaaggacgccaagccagggcttgatcccagtggagcaaggcaaacccggcgactcgaacaggatttcaggggttaaaggaggagacccgttcattttttttcatccagtaattatctcctgagcacctacaatgtgccaggcactgttctaggtgttaggaaactagctgttaacaaaatagaccaagatcccgaacctcgggaagcttatattctagtgggaacaagggaggaacccactatggcctgtttatggactgaaagatttgtgtcccccccaaaatctatgccgaaaatcccaaacccccaatatgatggccaataggaaagtgggc

SEQ ID NO: 39657 - DNA, 314 bp, Macaca Mulatta
atacaatgactttttaaatgtactaaaagaacagtccaaaagagaaaatactctatgcatgaagaaggtaactgaagcacaacactgaaggactataaaacctacatagtcatgcaatagaaaaatgaaaaggataaaaaagcttgatggaatattttcagacattaaagtcattatagaggctgtccattacactgaatgcttgttataacgttaaaggaacaaagaaaactaaaaactaagactaaagaaaatacatatagacaagcaggaaggaaattttaaaaatctcttagagtggcattaaaagtgat

SEQ ID NO: 39658 - DNA, 628 bp, Macaca Mulatta
gggtacattggtagtctctatgacttgtagcaatgttttataaatgtttaaaatgctaaacttaattttccaaccttttcttgacaattagatacctatcctgtagttactgaaaatctgggtagtaaatctacccagttaaaatggcactttataaaagggaatagagaagagatgggactatttctatatttaaatgctgctggctattaaattcctttgtatataaatgaaaaataccattcattaaaattaaggacttaagtgtggttcttaattacatttcattcgtttatgttagagtaaatggcttcataattactttaaaatttaacccacaagcatatgaaatctgtttgtcataaaattggaaacaatttttgagagggactaatttaaacaagtccttctcctttagtcttttgggtcacgtaattgctgaaacctaagtacctacagactataggataaggaagttcacagcctgcagggtgaatgaacccatgtgtgaactgcacaaagcaattcatagaaaatgcacagaaatttgtaacacttttgtcacgtctgtctctagatgctcattgaattttgtttaaagatgaatgaaaggccgggcataatgctc

SEQ ID NO: 39659 - DNA, 258 bp, Macaca Mulatta
  misc_feature (1)...(258): n = A,T,C or G
tggacctgggggcttcgcctgactacaaggacagccgcggcttgacacccctctaccacagcgccctggggggtggggacgccctctgctgtgagctgcttctccacgaccacgctcagctggggaccaccgacgagaatggctggcaggagatccatcaggnnnnnnnnnnnnnncacgtgcagcacctggagcacctgctgttctncggggcattcaaaagtgcccagaacgcctcggggaacncggccttgcaca

SEQ ID NO: 39660 - DNA, 1241 bp, Macaca Mulatta
  misc_feature (1)...(1241): n = A,T,C or G
ggggaaaaaaaatcatattcccaccatccaaagacagatatagtctcctctgtcttgtttatgcttgtttctgtgcacaggtttatgattataactgtgtcaaaatgtatattcaaaatagcttgttacgttacctttgtggaattatggttaaatactttcaccttaattttttcaaatgttccctataataatgtcctgataacagtgtattatgtatgtctccattgtgtgcataatacatacccagaggaaaaattagaaaatacagtannnnnnnnnnnnnnnnnnncctatattcccaacacccaacaactactgctaacatcttgatctatttcctccgtcttgtttcagtgcacaagtttgtgattataacactgttaaatatgtgtgcataaagtctaaaatgaaaagatgtggaaaatagctaaaatagtgttgtcgttgtgggaacttggttaaatattttgtctcaaattccttaaataatctttggtgtcgtggtaataaattttatgtatgtatttttccattacaaatataatacatactcatagaaaagtttggaaattcagtaaagaaaattcactcatattcccaacacccaacaacaattactgttaacatcttgatctgtgcactagtctgtgattattagggtgttaatgataagtatgcataagtgtcaaagatgggaagaaagatggaaaacaagaaatagttgtgtagttgttgtgggattatggttattttgtctcggttttcttgaaaggtcttcatcattctagtgttctggtagtccgcctttattacatatatttccattatatatgaaatatgtgttcattatagaaacttcgaagttacagaaatgtagaagagaaccttcacccatgatttcaccatccaaagactgtggttaacatcttggatatattttcttcatcttggtttctgtggcacagggttttttggttttgttaattatgggtttgtggggcgttctattctatcatgtaatagtgtcaacaataaaaataaagtttaaaattaatatttagncccgagaaccaacaccgctttttccaaccttttctaccttttcaaaatagaaanatcattggtgggccccctttggcnnnnnnnnnnnnnnnnnnnnnaaaacatttctttttggccccgcccgggccccattaagttaaaatgaaaacatgggcccaaaaaccggtttctcccag

SEQ ID NO: 39661 - DNA, 716 bp, Macaca Mulatta
  misc_feature (1)...(716): n = A,T,C or G
tccctcccatcctggctgcataaagtttctgagacttgagaacagcaaaaatgctgttaaagggaaatattaagaatgagaatctgcatgaagggtgattatgtgcccacagttaattctttataccgtttacccacatgtggtattaccgaagccgggcagaaccatgctagcggaagatgtgaaattcagatagctcattattgccaagagctaggcagctttgatctccaaattgttattgctttcatttttattgtaatggaactnnnnnnnnnnnnnnnnnnnnnnnnnnnntttttttcgttttgtttttgtattgaagagggtttttttccctttatttttcataagctactgtaaatgaagaaaaagtgtcttctctgggctgtaggcctggctcagtgtacacaggtatacatcctaagctctctctgttctctaatttgtggtgactgaatatgtgtcgcaatccacggggcatttctacctgtatttctgcagcacccccactgccttgagtccccagcagtgctgttatttgcctaatacctgtagccatctgccacacagccagacatgaaacgctgggacagagaccatttagattaaatacaacagcttatcttgctgggtggggaaagttaaaaatatgctggttcaaggtctaaagtaacatgataactatgttgtagcattatggaatattttcagaa

SEQ ID NO: 39662 - DNA, 741 bp, Macaca Mulatta
  misc_feature (1)...(741): n = A,T,C or G
tcatgatttaaacgtattttcatcatctagaaagttcctcatactcatgtccagctctatttatgccactctgaaaacaactactgaacattatgcttttgaccatttctccattgtatgtgatgccaatatttttgtacaatctttcacttcactttttgtttacagtgaattttaaaatatggaaggttagtttttgcacagctgaactcaattttttaaaatcttgacttctaagtttcctatatttctgtcattttctattagaccatgttgccatgttataaaacattgtaatattttcttacaatgcctccatagttttattatatattcactcaatacattatgtgtatatgtggtatgaggtaggaatctaacttttactgtttttatctttatgnnnnnnnnnnnnnnnnnnntgaggggtagggatttaactttttttcaaacacatataaattgttcactactgtttatttaaatagtcctgttcttttcccttttattattattctattttattctcacttaaattcaacctaagcctgttttggactacaattaatactacagatcttcctaccaatcttccccttgcttaattcacttctaacacattagtctcaggtttcctcaggcacttcaaatttagtcccagctcagaactctgtactttctatttccatgctttcatgttctttctcttgatatcccttgctttcttattttcttcattta

SEQ ID NO: 39663 - DNA, 734 bp, Macaca Mulatta
ggcaactaagaaaagggaaacattttagttttggaagtcagaatgccaaggaaaaggaaaaatcttgggggaaatccttttcggaagactgcaaaccctaaggaagttatcgtatccagtgttgctagtcgtgaggagccaaccactactcttccttccatgggtgagacaaaagttgatcaggaggaactcttcaccagtatctcagagatgttttctgatctggatcctgatgtagtgtatttgatgctttctgaatgtgatttcaaagttgaaaatgccatggattgtctattagaattatctgccactgataccaagatagaagaatcatcttcacaaagttttgttgcttctgggaaccaagtaggtgcagcagaaagtgaaataatggaaaaacgtcctgaagaagagagtgaagattcaaaaatagattcatttttggacatgcagctaactgaagacctggattccttaatacaaaatgcttttgagaaattgaactcttctcctgatgaccaagtatactcatttttgccttcacaagatgttaatagttttaatgacctgagtgagtttgtaaatcctgattcaagtaatatgactcccattttttctacacaaaatatgaatttgaacagtgaaaatttagacaattctgggctctacgttaagtttaaacccattacccttcacatttctggtttttgagccgagtccccaaatgtttttat

SEQ ID NO: 39664 - DNA, 1099 bp, Macaca Mulatta
agtgtggcgtgtgttgggttcttcttggtccagagggcctgtccacacacgggtggtcaggacaagatcttcctgtctgtccggcccagcgctctggtgcctcagggaggacacgtgactcttcggtgtcactatcgtcgtgggttttacaactttaccaacttcactctgtacaaagatgacagaagccacgttcccgtcttccacagcagaatattccaggagagcttcctcatgggccctgtgactccggcagacgcagggacctacagatgtcggggttcatacccgcactcccccactgagtggtcggcactcagtgaccccctggcgatcatggtcacaggagtccacagaaaaccttccctcctggccctcccaggtcccctggtgaaatcaggagagacggtcatcctacaatgttcgtcagatatcgtgtttgggcacttctttctgcacagtgaggtgaactttgaggagctcttgcaccttgttggagagctccatggtgggggttcccaggccaactattccatcaattccaagacgtctgaccttgcagggacctacagatgctacggttctgtgactcactccccctatgtgttgtcagctccgagtgacaccctggacatcgtgatcacagtgccaagcgtcaatggaacattccaggccgacttccctctgggccctgccacccacggaggaacctacagatgcttcggttctttccgtaccgcaccctacaagtggtcagacccgagtgacccactgcccgtttctgtcaaaggaaacccttcaagtagttggccttcacccactgaaccaagctgcaaaaccggtatcaccagacacctgcctattgtgattaggtactcggtggccaccatcatcttcaccatcctcctcttctttctccttcgtcgttggtgctccgacaaaaagagactctgatgaacaagaccctcaggaggtgacatacgcacagttggatcactgcgttttcacacggggaaaaatcactcgcccttctcagaggcccaagagacccccaacagataccagcgtgtacatagagcttccagatgctgagcccaga

SEQ ID NO: 39665 - DNA, 111 bp, Macaca Mulatta
ccagggaaatccttcgaggatgatcccaaacgcaactgtattttcagatatttctgtactctttttcaagtcacaaaactaacagctccatgtgcaatcatagctttggta

SEQ ID NO: 39666 - DNA, 1149 bp, Macaca Mulatta
  misc_feature (1)...(1149): n = A,T,C or G
tcgaatgaccacccagctcctgtggaagtcacatacaagaacctgttatttcctattgcacacaatccaaacaatgtgaccttcattaaatttatagaggaacttaagaagtatggagttaccacaatcgtaagagtatgtgaagcaacttatgacactactcttgtggagaaagaaggtacctatgtcctcgattggccatttggtgatggtgcaccaccatccaaccagagagttgctgataggttaaatttcataaaaattaagtttcatgaagaacctggttgttgtattgctgttcattgcattgcaggccttgggagagctccagtacttgttgccccagcattaattgaaggtggaatgaaacatgaagatgcaatacaattcagaggacaaaagcagcgtggagcttttaaaagcaagcaacttttgtatttggagaagtatcatcctaaaatgcggctgcacttcaaagattccaatggtcatgtaaacaactgttgcattcaataaaaccggggtgcctaatgctcttggaagtggaacttgagataggacctaatttgttacacacattagccagcatgttggcttagcgagtagtctaatgaagcttccataggagtattgacaggcagttttaccaggccacaagctagacagatttggcaacctctgtgtttgggttacagtcaacctatttggacacctggcaaaagattctttctgtcagcatataanatgtgcttgtcattcgtaccaattgacctttcccaaaatcaggcagtattgagttatgacttatttaaatctatttccatgccagaatcttatcgatacantagaaatttaggaaaattangtaccaaatacccagcactatacttgtatattttttgcaccatacagaactaaaatctcaggaactatgaacactttagattttatgtggtttattccttcatcatttcaacattgaaagtagggctacttggggatttggccgcctcacttatgtttacgtctcccatattcctaccagtaaacatcaggtttgcttaaccattgataattttttaaccagccttacaaggattatttcaggatttcaataaacctcattttgggcttttataaaaacctccg

SEQ ID NO: 39667 - DNA, 818 bp, Macaca Mulatta
  misc_feature (1)...(818): n = A,T,C or G
tacagtgngtctacattagaaaacagctattgtgaaaataggagatgggcggccaagagtctataaatggagaagggtaacaagatgtatagtaaaagggagaataatagagaattttggaaagcgccccaattcaagggggagtaaaaaggggaaacggagacatccaaatcagatagaatcaagggtgtaatccaaaaggggggaagaaggaaagggtttccccagcttataaaaatgaattcccagacgggtgaagcttggaacaaaaaagctatagtttcatcttgggtagcaagcgggaaaacttagaaacacgggggcagacctttctgtcagcgagaaattctccttgtacaaataaggaatcaaaacagtgtccacatggtgaggtcactgagccgatgccaggataaaccacaccaagcttatagttcaaagcatggtactccacctttcagaaatataacctcggtcgggtgaggtggttcacgcctgtcnnnnnnnnnnnnnnnnnnnnnnnnnnnnntnnnnnnnnnnnnnnnnnnnnnnnnnnnnnnnnncggccaacatggcannnnnnnnnnnnnnnnnnnnnnnnnnnnnnnnnttaggtgtgatggtggccatctgcaatcccagctacttggcggggctgaggcagggagaatcacttgaactggagaggtggagattgcagtggcccaagactgcaccactgccctccagcctgagtgacagagagagactccgcnnnnnnnnnnnnnnnnnnnnnnnnnnnnnnnnnnncatgtcggcagcctcggcctctagaatcc

SEQ ID NO: 39668 - DNA, 177 bp, Macaca Mulatta
  misc_feature (1)...(177): n = A,T,C or G
aattgtgtgtatgtgtatgtatgtgcacacacacactcatgtttgctttcttggtgtgtcagtatacgccagttccttatttcctcagtcagattgtctntcagtctgtaattctggtagtaagtcaaagataaaaacctntgctacaaaatgcttcctgttagcaagtacttgggt

SEQ ID NO: 39669 - DNA, 822 bp, Macaca Mulatta
  misc_feature (1)...(822): n = A,T,C or G
gggggcccatctttttattttcaacttttctgagtgagttttagatgtagatgttatatacagcatttgttcagggctttggtttgtgagccaagnnnnnnnnnnnnnnnnnnnnnnnagatgagcttatctcatttatattttgttgataaggcagttcttccacattattgattatatttttctttgggggctttgtctcttatggatatgtgtgtgtttcccatctgatcgtttttgatggttcataagtcttattctcttactaccttcatagatttaatatccatttcttgatttgtgaaaatactcaagattattttaactccttgctaataaagataagaaaaccagtgcacttatacctcccttgccccagctaccatttaacaaaatttttttcccatccccttctggtgggaatataaaacctttgtcaatgaaaacaaattgcaattatttttttattttaatcccttaaagtccttcaaagttaccatggtttcaatgggggattaaaaattccccctggtaaattcttttaaaaccattgaccttccttggaatttccgaattccggcctctcttttatttggaaggtttttccattaaccccgaattttttcctgccaagggaaaatcccggttttttttccggaaagggaaggccttnnnnnnnnnnnnnnnnnnnnaaacccattttctttttcggttttcccccggtgggggcctctctatttttctagaaagggggccttttttttatataccctttcccnnnnnnnnnnnnnnnnnnnnnncggccgtaaagttgaaaatttt

SEQ ID NO: 39670 - DNA, 729 bp, Macaca Mulatta
  misc_feature (1)...(729): n = A,T,C or G
taaagctcatgaccatattatctacacttacactttcttcctattatatcaaactggaaatttgaaaattcaatcgagttaagtgttcagcatgaaagtgaattttaaaaatcatatgcctacaaactttgcatcaagcttaatgaaatacaatatttatgttatggagaagttgttaagattccctctgccaccgcccgacttcagatgggcgagggcatccagattaaacagctgagtccaatgtagggtgtcttcctaagtgcaatagattggagtggctgagcccactgaaatgctctatagagaagaaagtagaacagtaaggaaatgattatgggaaaaatgcatcttctccaggagatgctctctgattgcctcaaataggtccagtctcttatccatatcccttcttactaatgttgagtttgcatgcttcctgttccattagagtccatttatcctaatatgtatttagaatcgtaggcatagataatgcaatgnnnnnnnnnnnnnnnnnnnnnaagtggccagccttaggcagagtggaaagcgatggttttgctaggtctagagatcagtggtgactgaataggaggaaaagctgttgtttgaggcattttgcaaggctccaaagaggctacagagaacccaggcaagatcagacaataggagttacttggacctacgaaaggcaggctataatttagtgcatgcttttgccttcta

SEQ ID NO: 39671 - DNA, 178 bp, Macaca Mulatta
  misc_feature (1)...(178): n = A,T,C or G
aggccatctccagactatagtcacattgggctggggcacgaagtatggatttggggtgtgtgtaattcagtccannnnnnnnnccaaaccacagaagtcaccccgagccgacgtcccgctatcggtgaggctgcaggacactgtcacgttactgcatggagcctctcactgtctgagc

SEQ ID NO: 39672 - DNA, 889 bp, Macaca Mulatta
ggaccctccagcttatcagtcattcagttgatagaccaaggttacgttgctttatgctagcaaacttgttgacagcaacttgtgctactttatgcagaaaacaaatgctagtaattattatgcacagaggaaaaataattttaagtatgtggtaaagcagcttcatttttcaaaattgatttgctctgctttttctttggtccattagattccagaatatccttttactgggaatttagttacatattaagataacctgttatcagtttgttttgaaaagaagacattgttagttatattgaaccaccttattttaaaatttttaacttttatataccacttgtgtgattccagtgtcatgtcttgggtttgatgtcgttggacagaaaagtgtatcaattattttaaatgaatttttccccgtgtttgaggcttagtctgtaaatgtgttgctgtaacagaaaatacttgggtatgcattacttgaatacttgaagactgaaattaataagatgtattacataatgaattagatttttctgaacagttttttacactgaaaatcttcatttctggattacaatttgaaatggaatgaagacctgaattatttggataggaaaaaattatgatagtgcttatgggaactgtaaactcttttgtgtttgacgcatcaaacttcaagtttttagtaggattctctcctgaaatttctttctctctatacttatgacttatatctactgagtttaacggccggtaaacttggtttgctcatgtaatccaggttctgttcacattttttaattcttccttttggtatctacctgtgttagcaatattgacccgttactaactctttgacattgtgaaccatgttttccagcaa

SEQ ID NO: 39673 - DNA, 659 bp, Macaca Mulatta
ggggggtttttatagcggccgcgggcggctccggcggcggttggcggctgcggggccggtgaggaggagacatcatggcggctacgctgttcgtgctgctgggtttggcgctgctgggcgcccacggagcctacggggctgccggcacagtctccacttccgtagaaaacattggctcgaagacactcctcacctgctccttgaacgacagctccacagaggtcaccgggcaccgctggctgaaaggcggcgcggtgctgaaggaggacacgctgcccggccagaaaacggacttcgaggtggactccgacgacctcgggggagagtactcctgcgtcttcctccccgagcccacgggcagggccgacatccagctcgacgccctcctgtcaggtgcccccagagtgaaggctgtgaagtcgtcagaacacgtcagcgagggggagacggccgtgctggcctgcaagtcagagtccctgccccccgtcaccacctgggtctggtacaagataactgactctggggaccaggtcatcgtgaacggctcccagggcaggttcttcgtgagttctcgcacgcacgtcggacggagcttccaaccagaacctgacatggaggcgacccggcaagtcgcgtgcaagtcccagctccaagcccca

SEQ ID NO: 39674 - DNA, 697 bp, Macaca Mulatta
  misc_feature (1)...(697): n = A,T,C or G
ggattgtgaaaattattgacatggttgacccagggccaaattttacttctgtttggtctggtatgattagattagaaaagggcaaaatccaatggagtttcaaagtgttgagaagcagtttatcatggatgtcaaaataatttctatttatctttgatcagctcagataaaatgacttctgtgtttaggtaaatgtgaagtttgcgtttctggttaccaacttgatgaggactgttgggaagttaaaaatctttggttagaaacataagcacatttgtacaaggagacatttataatattcattgcagtgtactttaaaatagtgaaaaattgagtcctgcctaaatatccactaatggaaggagaataatttttgaatatgttcatataataaaataataagcagtagtgaaatcaagtagagcctatataaacagcatgaataaatctcagaaatctgattttcataggaaagcacatttagaaagctatgtatacttttagtctatgcagaataatatatgttctctttttttggtgagaataataatatgttattaaggtatacttaaatatgaagtaaaagtataaaacactatgtgtgtgaacgatnaaaacccaaaattaggggaagtgtcaagcttatcctggtaaagattactttatagcttggttgggtggaatacgttggggtttc

SEQ ID NO: 39675 - DNA, 944 bp, Macaca Mulatta
  misc_feature (1)...(944): n = A,T,C or G
ggctgaggaaagcaaacaatcagcagtgctcaaaggagcaaaacttcgaatgtgcacgttgacccctgatatttgcaagcatagcacagatcctaagactagagtgaagtgggaagaagaattagaaaatccagtggatgtcctgaatatagggaaccagggctgttgaaaatcagtaaaggttgatgacctggggccagaccaggtgactgtggcagtacaggtgaaggtaccctggaccttctcagttcactggctcataagtccgccataatgcgggttcctcctcctcctccctatctcaacacccccccccccccccnantgggtttnnnnnnnnnnnnnnnnnnancncacacnncacacacnccnatggaattgggaggggctatatgaatcccagcatttatctttccctggtgcgcccaaggcatgcttggatctgggaaatattaagggttaattatatatttaggctgtaaacggagagggattttttctcatgtgggtggaaaaaggagaagtggaatttttgcaacaacccctgttcttttttgccaccaacattatgtgggggtgggggtccttaaaaatcgggggagctatttcatgaaatgtgcctcctggggggaattccaaaaaaaaagcttgatttggtccctccggtgggggttgaaaacnnnnnnnnnnnnnnnnnnnncccttgaattcgcaggggccattaatcacctttgcgagaaggatataattcctttttgcacaccccattaccccaaagannnnnnnnnnnnnnnnnnnnnnnnnnnnntctctttttttcccagagacaaaagatattcgagacaataataaagaaagttattcccaccaccctagttggcggtgcgacttttaccgaccactttgaaaaattaggagaaaagttattgtatctcttccaagtt

SEQ ID NO: 39676 - DNA, 781 bp, Macaca Mulatta
  misc_feature (1)...(781): n = A,T,C or G
ggcaatgatgtataatcagtgcatggcatgattatttcactgtttgcatacacaaatttataaaaccaaacagtatttattttagttaaatatgtaaatcataatccttttcaagatatgcattgaattcttcgcttaaaatcctccaatccatctctctgaggatgaaacctaaatttcctgccatgccttacaaatatttccagtatctcaacagtgcatactcctaactttgtctgttatattctttcctgggctttgtacattccagccaaactgcttttctagctatttttcaaacacagcaagctcatcaccccaggccttttgtacttgctcttcctactatccgtgctcttcttccccaagattcacatggttgttttgcctttcagatcctcacacagtgtcaccacactatctgttctaaagtagctgtactctgccaccccaaaacccccgtcacattcaaccatatcacgcctcctatctgaaatcatcccattacatcttcttacttacatgtttattctctctccttctatctcacatctccaccacataaacacactagattgcaaaataggagaacaatttgttcatttagcacattactgttttctgaggacctanggcaataggtgttcagttgaatggatgaagattaacattattatattcttagatcctggccttcaaaagcgatgttaattaccatgagtacaaactatatttgggtgtggctggaaaagaaaaatgtggttttagtcccctctacatc

SEQ ID NO: 39677 - DNA, 935 bp, Macaca Mulatta
  misc_feature (1)...(935): n = A,T,C or G
ggcannnnnnnnnnnnnnnnnnnnnnnnnnnnnnnnnnnnnnnnagcctcactatgttgtcagggctcaagggattctcccannnnnnnnnnnnnnnnnnnnnnnnnnnnnnnnnnnnnnnnnngcactcagccttgcacatattatttgtttactttcagcagcagccctatgtggtagtttatccncatttttaagnatgaggaatctgtggtttggagagataaagtacttgccccaggtcatgtgctagaatttggcaatncagggaatccaatccagtatggagtgcattggtctgatcaggaatcacttcagcctcaacttcttggcctcaaaaaatcctcctggttactnntcccaagggttaaaacccaaggcaccacacnntcccccggggcaaattttgtgtgtttttaattaaaaaaaaaggtccgttgnntttgtccccggccgaatttccaaacggggggagctcacaaaggatcccccccaccctggccccccagtggtaggaaaaaannnnnnnnnnnnnnnnnnnnnaccctgcgctgacctccttnnnnnnnnnnnnnnnnnnnnnnnnnntgccccccccaaaannnnnnnnnnnnnnnnnnnnnnnnnnnnnnnnnnnnnnnaacccgctatacccccccctttttttaaagncccccccggggggggcggctatttatttnnnnnnnnnnnnnnnnnnnnnnnnnnnnnnnnnnnnnnnnnnnnnnnnnnnnnnnnnnnnnnnnnngatataaattattccctccgcaaaaaaaaacccctcttctcnnnnnnnnnnnnnnnnnnnnnnctccttcggggtgtnnnnnnnnnnnnnnnnnnnnnnnnnnnnnnnnnnnnnnnnnnaaagacgagccccccttttttaagagnnnnnnnnnnnnnnnnnnnnnnnn

SEQ ID NO: 39678 - DNA, 811 bp, Macaca Mulatta
ggtacctctgttaccttcttttacacatcacagtatcccatgacacaccaagcacaccgtttagggaggtgaacgtcatgcgatacagcttaataaacacaaagacgtaaggttggtgttctgttcccaacttctgccctacttgctgtaccacacattaaacatcagagcactctgttctgggctgggcttaggcccaagcacacttgaatgaattaggtacagtattaggaccagcttcgaatcagcttctgttatttttgttaagccaacctctgtgttaccccagccttacttttattacctgattttactgtttctcagaacacatctgacctctgcaaaatggatccttccacttgtgccttaatcctgtcttctgtctttttgtgaaatgtcattttgaaaatctcttccacattagattgcataaatatctgtttatctgaggtttttttgaaaagtgtaatttttttgaaactgaatttagaaatatatacacattgaataatagatatttcttgagatgaaatatatgtagttatgttcccattttccaagtttcttcttggtagtaaaggcacatttttaccccttttaggagataagtacaatttgtacattatgccaataattggcttaataggttaatatttacataaacctcatattgctttttaaagttactatttttgtacagtttttggcttctttgtagccccccttccccttagaatgccaccattttagccctatttagttgggatggagtttgaatttatttaccttggccagaatttatggagttaaa

SEQ ID NO: 39679 - DNA, 1401 bp, Macaca Mulatta
  misc_feature (1)...(1401): n = A,T,C or G
gcgagagcattggtgggtgtagggtcggaggaaagcaggaagacccatcggagcgtgtatttgagccgctgcatttcttaaccctagatctcgaaatgcatcgtgattcctgtccattggactgtaaggtttatgtaggcaatcttggaaacaatggcaacaagaccgaattggaacgggcttttggctactatggaccactccgaagtgtgtgggttgctagaaacccacccggctttgcttttgttgaatttgaagatccccgagatgcagctgatgcggtccgagagctagatggaagaacactatgtggctgccgtgtaagagtggaactgtcgaatggtgaaaaaagaagtagaaatcgtggcccacctccctcttggggtcgtcgccctcgagatgattatcgtaggaggagtcctccacctcgtcgcagatctccacgaaggagaagcttctctcgcagccgaagcaggtccctttctagagataggagaagagagagatctctgtctcgggagagaaatcacaagccgtcccgatccttctctaggtctcgtagccgatctaggtcaaatgaaaggaaatagaagacagtttgcaagagaagtggtgtacaggaaattacttcatttgacgggagtatgtacaggaaattcaagttttgtttgagacttcataagcttggtgcatttttaagatgttttagctgttcaaaatctgtttgtctcttgaaacagtgacacaaaggtgtgattctctatggtttgaaatggatcatatgaggcatgtaataccaagaattgttactttacaatgttcccttaagcaaaattgaatttgctttgaactttagttatgcatagactgataataaacctctaaacctgcccagcagaagtcnnnnnnnnnnnnnnnnnnnnnncagaaacaactggcaaaaaactaagatttactttttttccatagctgggaaaataggaggcacctatagttgaataagcagtctttaaaaactgctgtgaaacacaagccatcaggtaaaaagaaacgctgaactattaaattagaggtttttgaaaaatccaactttcatcctgggcagaggttgcctagttggtatagaatctgttattcaagaaagtttacctttgctttaggtcgtaagttcccttattgaatgctgtatatgaaacatgccgttctgacctcttatgtgcattgggggtcaaaaggcggggtaaagaggggtatcgattnnnngaatnttnnntttttgaggggctnntttttggagaatttttccgtccnannnnnngcccccgcccntttgngaggggggccactttttttcgcaacgccccccacctttgtaaagtatttaccgtggggcacaaaaat

SEQ ID NO: 39680 - DNA, 798 bp, Macaca Mulatta
  misc_feature (1)...(798): n = A,T,C or G
ggggcaaaaaggagtcctccttctcctcctcttcctctacctctttcttctcttcctcttcttcagtgagctttcaagggtaccaaaaagcaaccaagaaaaatgatagtaattggagaggaaaaagataattacaagaacagggaaatgcaagctggtttaactaatatctgattcagagcttcccatgcagacccaagtattcagctttcatttctaaagagatcatatcccctcaattgaaaacataaaaataaaaacaaattaaagcatctctaaatattctaaactcttatttgtaatattttagtagaaaagtacccagtcttgtgtaataaatacaaattaattcagctttactcaaaatgttggcaagtgtaatgaaaataagaggtaaatttgtcagtgaggtggtgttatattaaaacacaaatctgctactcttgcttaggtagaacagtcccagatttggcaactaatgataatgtgagaataaacagaacaagtgtagaaaacagacaccacagtttaccttcccccttaagcaatttggattatggcttttagcatatatcctaacacatatgttaagaaatatcttgtatgaaaacatatgttttgcaatactttaggttaaatttttaatcccataatgctttggcaaataaaaaatgcctagtaatttaccacatgaataggtatttggtggaaaacngaaaatggaaggggctaaaaagaaccttccagggatattcccnnnnnnnnnnnnnnnnnnnnnnnnnnnnnattgccattttt

SEQ ID NO: 39681 - DNA, 369 bp, Macaca Mulatta
ccactcctatccctgagtaacagcctcatgcaaccatgttatgagccagtcatggtacggagcgtgcctgaaaagatggagcagctttggaggaatccttgggttggaatgtgcaatgattccagggagcatatgatcccagagcaccagtatcagacctacaagaacctctgcaatattttcccttctaacatcgtccttgcggtgatggagaagaatccccacacagcagatgcccagcaactggcagccttgattgttgctaagcttagggctgcacgttgatatgacatagtacttatttctttatacaaatatgaatattaatactaacaatacactaacacaataattatagtaactaataat

SEQ ID NO: 39682 - DNA, 684 bp, Macaca Mulatta
  misc_feature (1)...(684): n = A,T,C or G
nnnnnnnnnnnnnnnnnnnnnnnngntgccagcctggaactctcttttctagctgtctgcagaaatatttactttgcttactcccctctccctgttgctttccttctctttttattttcttgtccctgttccagttcatcaaatagttgagtgtctaccattaagtaggaactgtgcttggtgctgggaatacagtgatgaaaaaggcaggtggatgtgctcatggagcttacatctaaggatgagagaaaaggaagaggagatagaagatagatcattaggacttgagacttaaagataattaggactatatgaagttaaagagcttacctttattttctttctcttttcctttcctggttttacttagttcatgtgttctgtattttttgttgttgttgtcgatattacactgataagaaccgatattacacttgatcttagccagaaatctaagtatttgttttctcttaattatcagcatttgggataaatttaagacacttttttagctagtgtacctgccttttctgctttaaatattaaaattacaagataattttacctattgtagtaaacattattgataaaattagttttcgaggggtaactgggcggtttaaagttctgtgtgggtttcagtgggatagagccactttgtacgttgggcattgtctatgatag

SEQ ID NO: 39683 - DNA, 787 bp, Macaca Mulatta
  misc_feature (1)...(787): n = A,T,C or G
ggcatttttatgtagctagatttgcaaaatttctggtagctgtgaaattagcaatatgttgtgaagtgttctatcaattcattatttttattatggtgatattttgaaaacctgttaatttaaatgtaccagcttcaaaatttatctttagaaaagtggggcgaggtgtggtggctcatgtnnnnnnnnnnnnnnnnnnnnaggactgaagtcgggggatctcttgaggccaggagttttgagactagcctgggcaacatacttgagatgctgtctctatagaaaataaaattaaaagcagttatctgggcnnnnnnnnnnnnnnnnnnnnnnnnnnnnnnnnnnnnnnnnnnnnnncatctaggaggtcagggctgcagtgaaccatgatcctgccactgttctccagcctgngtaacacagtgagannnnnnnnnnnnnnnnnnnnnnnnnnnngtactagataaaaatggattcttcattactaaaaatatatcagagagtggttaataattttagataggaaaataatatttgatgcctatgattattgagtttgcctctttacagtaaattctgtaaattaaaaaagtgagtggtaattttagaaaagaatagtaaaattcttaatatagagggaataaatcctggctgatttttgacttttttgctggtttctggaagtccccatggataagttaagattttggccaaaaccacaagtttttggaattatcccaccaaaaaagttgaaaaaattggttgggaacaacctttttaacacttt

SEQ ID NO: 39684 - DNA, 815 bp, Macaca Mulatta
  misc_feature (1)...(815): n = A,T,C or G
ggggattgcctgagcctgggagtttggggctgtggtgaactattattannnnnnnnnnnnnnnnnnnnnnnnngaccctgtcnnnnnnnnnnnnnnnnnnncacacagacatgtgatttattatatgatctggtggataaaaggcttaaaaattggaactataaagagcaaaacatgaattttctctttgccctagaccactccttctttcaattttctctctgttcctgaactttcctattttcacactgttcctcaatagtaaccattgttaactatgtagtgtgaatccttcccaaactctgtttgtcagtatagcnnnnnnnnnnnnnnnnnnnnnnnnnacactcgcacatgtgcacccacagtgcatctggatcacnnnnnnnnnnnnnnnnnnnnnnnnnnnncatatatgattgtgattgtcagttttatacatcaacttggctagggtacagtttccatcattcaatcaataggcatttttgtagatgtgactaanatctatattctgttgactttgagtaagggagattatcctagataatctggatgggcctgaatcatcattttgaaagtcttaagagcagagctgagtcttcccgaaagaaaaggaattctgcctgtggatagcagcatcagttttgggcctggcagttccagacctctccccctgaagggcttgcttttgtggttctcagaactactagcccagccctgaaaacccgcaaaagccataatcccttggaaaaaaaacctcctaaaaatggtattttcccaccggggttttggtttccctttaatttgaaaca

SEQ ID NO: 39685 - DNA, 477 bp, Macaca Mulatta
cctttgtgactcatagactggcactggtgccactgttgttggcaattttcagccccctggagaagctcctgtccattcacagaggtctccacccagaaagaagaccccacctaactgactagatctctgcaggaatctcagatttcctccatccagtgttggcatgccggtgggtcagtttgccccactcttatgtaactcgcggtttgatgctcaactccactgctgctgctgtttttttaaatcctgaaagggggtgggggaagcgcactaaccaagcacaatagtaaacaagtctaccctgtttaatgtggttaccaccagacatctggaaagatggtttgatcctggcagctcacattgttttcacgagcagccaaagggaatattttgaatgtttgcattgagacaaattgatagagagcctgcggtgagggccgctacaaatgaaaactgtcttgtgttagccgggcagac

SEQ ID NO: 39686 - DNA, 144 bp, Macaca Mulatta
gaccgcttgtgtggagaaggggaatagaggtgaatttaggctaaccagttagctgaatagtggactcagcttttggcaggaaagatttaaggtaattggttattggagataggggtgatgagggcttgtgactggttgcgcgtt

SEQ ID NO: 39687 - DNA, 587 bp, Macaca Mulatta
gggtaaaatttaggtgtaagaaaattatgggacaagcagttgtgtttgtgtgagagtttgtatctattttccaaagaaaattgcaatattggaacaaagattattttaataaggtggataatttcctaggaatctagaaacctaaaacattctgaaatcagatctatattgtattactgtaaaatttaatggaccattgttgagactgtgcccatgcaaattctgttatttgtctgttactcatgctagaagctataattgacttctttcttatattttttttatttttatgaagtattatgtgagctggtcagaaattacagtgttataaaatttagtagtacacacaaaatttttagatgcaagttcacaatttatgtattaagttatattttagttagaacatttcattttgttgctttaattgggtaaccctatatgagctgtttaattatgcctttcactatttataattgtcataaatgagtttattgtgccaatttgttcaggtaagtactgggaaaactttataattcatgggatgttttgataaatatagtaaacataagaaagtactgggtgtgtag

SEQ ID NO: 39688 - DNA, 524 bp, Macaca Mulatta
tggcatgctcaccctgcacgtgctttgccctctccttgcaagcctggcacacagcttctctccatactcctaaggggctttgcagacactcaagccactgggctccccctaacacatgcaggtcttctcttctgccaactaacgtgctcgcaccctcccagcacgtggagagcttcagttgtcagataaacaggaagcgactgatgaccgctttctaacgctctcttttctcccgttttcagctgtagagtagctgccaggaggacttggccacccagccctgtcacactgcagccccctccccttccctctcgtggcccacaaggaggaagaaagggcaacctaaaagcccacttagaaactttttggatataccactgcaattcttttcaaaatagcattccccaagtttttaatgggaggaaaaaaagctttaatgttgagcatgctgcgagctgctgcgtggaaaggcctctgtgtgggccgaagacccttcttccctggctgccaggctcgccaggagc

SEQ ID NO: 39689 - DNA, 617 bp, Macaca Mulatta
tgcaccaccccatgctgcctggctcccgggatgatgctgacgtgaagtggaagtttgctcgctccaagatctgtctgtcctacttccgagagggcctgacactgcctgtgcccttcaacatcctgccctccccaaaggctgtcttctaccttctcaggtgatgacctcagagctcccactccccaaatccccagcccctgcccccatttccctgtcctctaaccaacttcttcccaccattgaaatctctcaggagagtttgccagttcatttgctgttgctgttcctgctgcaaaaccaagaagccagactatcccctcatccctactttgtgagtacctcctcagcttgctgctggtcgccctggtgtcaggccttcacctgtattgtctataccatccacttgtctgcataccccgggcttatctatctttccaggtatgttccccagaaagcctgtctcaatttctactctctcacgtggcttccctttccctcttcctggctctggccatttcctgaatttccaaccctgtgtcatgcagcctaaacagaagtccttgccaccctcatcccaagctagaaatactcactaagctccagacagaactttttgt

SEQ ID NO: 39690 - DNA, 685 bp, Macaca Mulatta
ggttctcccaccgccccgctgtgggtctcagcagctcgggcgcgcgggaggagtggcagcggccaggcagcccagtttcgcgaaggctctcggcgcgccgcggcccgcaggcactcggcacgcgccttccccgccgccaggatgcccaagaggaaggtcagctccgccgaaggggccgccaaggaagagcccaagaggagatcggcgcggttgtcagctaaacctcctgccaaagtggaagcgaagccgaaaaaggcagcagcgaaggataaatcttcagacaaaaaagtgcaaacaaaagggaaaaggggagcaaagggaaaacaggccgaagtggctaaccaagaaactaaagaagatttacctgcagaaaacggggaaacgaaaactgaggagagtccagcctctgatgaagcaggagagaaagaagccaagtctgattaataccatataccatgtcttcccagtggtccctgtctcccttcttgtacaatccagaggaatatttttatcaactattttgtaaatgcaagttttttagtagctctagaaacatttttaagaaggagggaatcccacctcatcccattttttaagtgtaaatgcttttttttaagaggtgaaatcatttgctggttgtatattttttggtacaaccagaaaatagtgtgcgatattgaattac

SEQ ID NO: 39691 - DNA, 328 bp, Macaca Mulatta
gtgtatgctgattttcaaaagttgcaagacatccagacttctcagttaagaaaacagagattttattaatttctgcttacgctcttctttatttattaataactagtccttattgtagagaaccatgaaaccctatcattataactggagaaagaacttgtatataagggtcaagtttgcagtttattagaatattcttactgagagctgtgttttgagaatcagatgtaacccacttctgatacccatatccactgtgtcactaaaattgttctttacattgtatttgaaacagggtgagcattcagtttaatgtctatagattaaa

SEQ ID NO: 39692 - DNA, 828 bp, Macaca Mulatta
  misc_feature (1)...(828): n = A,T,C or G
ttgagtcggaatgcagttgttggtttaattttctgtttgacaatatttggttcagtaacatnnnnnnnnnnnnnnnnnnnnnnnnnnnnnnnnnnnnnnnnnnnnnnnnnnnnnnnnnnnnnnnnnnnnnnnnnnnnnnnnnnnnnnnnnnnnnnnnnnnnnnnnnnnnnnnnnnnnnnnnnnnnnnnnnnnnnnnnnnnnnnnnnnnnnnnnnnnnnnnnnnnnnnnnnnnnnnnnnnnnnnnnnnnnnnnnnnnnnnnnnnnnnnnnnnnnnnnnnnnnnnnnnnnnnnnnnnnnnnnnnnnnnnnnnnnnnnnnnnnnnnnnnnnnnnnnnnnnnnnnnnnnnnnnnnnnnnnnnnnnnnnnnnnnnnnnnnnnnnnnnnnnnnnnnnnnnnnnnnnnnnnnnnnnnnnnnnnnnnnnnnnnnnnnnnnnnnnnnnnnnnnnnnnnnnnnnnnnnnnnnnnnnnnntgccataaagctacaactgtccatcatcattatagatgaaatagactcctttctacgaaactgttcaagttctgaccatgaagctacagctatgatgaaagttcagtttatgaatctctgggatggattggatactgatcacagctgccaggtcaaagtaatgggagctaccattcatcctcaggaccttgtctcagctataataagaagaatccctacaagatttcatatcaaccagcctgctttaaaacagagagaagcaatcctgaaactcatcttgaaaactgaaaatgtgggtaagcatgtagacctgctagaagtttccccggaaactgatgggttttcaggaagggacctaa

SEQ ID NO: 39693 - DNA, 769 bp, Macaca Mulatta
  misc_feature (1)...(769): n = A,T,C or G
ggatatgtgaagtgttcagagtttactgctataaggaaacttcctaatactgacattcaccttttagctgtagttattgggaccatgtgctctggttttctggagactgccagtttgctcccttctgcatcccacctgggttgtttctgtctgtcccctttcactttcaaatgtcttcatttggatgttaaattatatggtcacctagttataggtaagccatgctcgagttgaaatcttgatagtgaggaaagatctgtgtcattggagctcattgtttctgctgcaatgtgccacagactatgcataatgaaatcataccacattaccatcagaattcttgttttagttgtcatttaaattaatatttatgattgttatcttgggcaaaaagtttagagcagagatgacaaatcattagaacaacgatgaatttcagtattatggctaaaaagttcctctgtctcaatattaactcactctccttgcagtgtacttaacagtaattggtatgcttttttatttaatgcttaaatcagactttataaaaatcttaaaccaggcctttaatatggtatgccatttcgccagtctaccaatggaaatagtatgggcttctaatcctaagcttgtacaatgggattgaaggttgagcccatgcccagcctctgcactgccactaaattttgggtaaacaggattggagtcactgccccaggcattttggaaataaccgggtgttgnnnnnnnnnnnnnnnnnnagggaaag

SEQ ID NO: 39694 - DNA, 90 bp, Macaca Mulatta
cagaagaatcccaggtttcttagagaacccagtgactttttgcaccttaaatcggtgaaatcatcgtgttttcttctgccgtacccatag

SEQ ID NO: 39695 - DNA, 741 bp, Macaca Mulatta
  misc_feature (1)...(741): n = A,T,C or G
ggggcggccgccatgttctctgtgtgtctttgtcttttgtgtgttctttcagtctccaccactcccggcacggaccccaacaagtggcgcagcgagcagggtcagcacgggtgagacagaaagattaaccagcattggagttgggaactgtacttccacctatgtgaggaatgtatatccaactatcccaaacaggaagtgatgttatgttccccaggatggccttgaactcctgttctcaagtgagtctctcactacaggatccannnnnnnnnnnnnnnnnnttattaaaagacatgttggctcattccaatttgtggcaattatgaataaagctgctacaaatatttgtatgcggatttgtgtggacatagatttgctcattgaaggaaataattaagaatacaattgttggatctaatggctgcttttcttccaactttaatcacaggatgtgcctggaaggcagcacagagaataagcagtagccctaacctgtcaccagaacccattttgtcgaataacagattcctagaagaaactccagatgtcatgccccacagatgtctggaaatgggaatttgcacctcaactttttatattgagagactttttaatcctgcctgggcgtgatacctggaatgtctccctggtcccgttcggaacacaatctctgctttaatcaagtacagatgtgggccaaattaccttttatgacaagttggggcccccaaagcctga

SEQ ID NO: 39696 - DNA, 1262 bp, Macaca Mulatta
  misc_feature (1)...(1262): n = A,T,C or G
gatactccgaagaaggactttctgaggaagcagggcagtttatctacnnnnnnnnnnnnnnnnnnnnnnnnnnnnnnnnnnnnnnnnnnnnnnnnnnnnnnnnnnnnnnnnnnnnnnnnnnnnnnnnnnnnnnnnnnnnnnnnnnnnnnnnnnnnnnnnnnnnnnnnnnnnnnnnnnnnnnnnnnnnnnnnnnnnnnnnnnnnnnnnnnnnnnnnnnnnnnnnnnnnnnnnnnnnnnnagcatctcagagattctcgacaaagtgcaagaagatgcagaagatgtcctcttcagtctgggcttttgccaagaggatcacaaagacacttctcggatacccgcccgatttttcaccaccccctctcaggccaagggcattgatttccagctcttcctgaagtcccaggtgcggaggattgaaatggaagacccctgcctcatgctggccannnnnnnnnnnnnnnnnnnnnnnnnnnnnnnnnnnnnnnnnnnnnnnnnnnnnnnnnnnnnnnnnnnnnnnnnnnnnnnnnnnnnnnnnnnnnnnnnnnnnnnnnnnnnnnnnnnnnnnnnnnnnnnnnnnnnnnnnnnnnnnnnnnnnnnnnnnnnnnnnnnnnnnnnnnnnnnnnnnnnnnnnnnnnnnnnnnnnnnnnnnnnnncaagatgtgtctgtacacatgcccccgagatcggccaccacccaccccacaacacccccagaaagaacagtttggaccaagttgtgttggaagtgatggacaaagtgaaagaagagaagcaggtcctccagcaagactctgatttgggacaattctcacaggaagatcctgtgccccctgttgagggtgaaaagctgcccacttctccctatccatgtgtcctctgctgcaaagaggaaacacagcaagggatgtccacagtgctagcaccatcgcaaactctggattcgaaccccaaggtaccctgttgcacacattctctgcccatagaagatccacagtggagcacagacccagctcagataaggagagagctgtgtagtctaccagccaccaatacggaaacccatccagccaaggatgagactttctggaaaagaaagagcagagcaagaaagagcctgttccagaagaatctcatgggcaggaaggttaagtccttggacctgtccatcacccagcagaaatggaagcagagtgtagacagaccagaactgcgtcggtctttaagccagcagccacaggacacttttgacttggaggagg

SEQ ID NO: 39697 - DNA, 810 bp, Macaca Mulatta
  misc_feature (1)...(810): n = A,T,C or G
ggctgggtgacagagccaagactctggccccgcacaannannngaaaaaagaatatgtcattgtagggagaggaatcctctgcaaaagtgaaaaggcaacgagaggcaggagaggagatgatcaagcgtgactggactcagcactgtgaggatgtggctctgactgtcttgtcagccatgtttctggcacttagcacgaaccctggcgcacaggaggtacttctgaaggggtggatgatgtgccggacagtcagccctcttcctgcaattggcttcgggcagcggagctcctgtatctgcagagcctgacctgaaggcagtttacttcctgatcccagtgagatttggggacaaatgcaaacaaaaattcattccacagtctgcatccccaaccccattatctgattcagctgaaaggnnnnnnnnnnnnnnnnnnnnnntttctcttccccattaatgctttatggtttgagatttgataggggaaataatagtgtgaatgggatttatttagtttccctgcttcatttgaaattagtaaaaattcacccaacattcctttaggctatgaaaactttgggttcgcccccgnnnnnnnnnnnnnnnnnnnnnnnnnggtgggccgccctcgggccctccaaaaagttttctaaaaccatttcctttggggcccgggggcccccgttggggaaagggaacatgggtcaaaagctgttttgcctaggagaatccggggacaagaaaaaggggcttgggattcctcacccattaaaaaaaaccccggggggaaccccgaacgtttcctaaaaa

SEQ ID NO: 39698 - DNA, 841 bp, Macaca Mulatta
  misc_feature (1)...(841): n = A,T,C or G
ggatgccccagttagacacatcgacatgattcaccactattatggcgatgctccctacactatatcttattatacagctaaagctactaaacacgaaccactaccaaccacctcttacaaaaaaccccacccttcaattccacaacatccgnnnnnnnnnnnnnnnnnnnnnnnnnnnnnnnnnnnnnnnnnnnnnnnnnnnnntttaaatcaacccgctacaatccccattatcctattccctaccctactaatcttaacccccaagcaccccattaataatcgactagctaccatccaacaggacctaactcgattcaccctaaaacaaataataataactcacaacgctaaaggacaaacctgatccttaatactaacatcccctaatcaccttttattgctataacaaaccctcctagggactttatgccttactcgtttcacgccaactaccccaactttccatagaaccgagcaagaagcaaatcccgtcaatgaagcggccaaaaataattagttgggggcttcgactttaaaaaacccaaaaaactcccgcaatccccaccgtcactgcgcccaagggcagaaccttacacccctcttcatttcccttagtttagagtaaacaaattgaaacattaatggagcttaaagtatacttcaagccaaagtagaatccgtgggccgtgtataatttaaacccgccaaaacaatcacgacgtcccggatccttcgtgagaaatataggactttgaaaccagagatataccctttttacctcagcccacattttaacgcgaatccataacagccgacaccaaaagctcgtgcacgccga

SEQ ID NO: 39699 - DNA, 399 bp, Macaca Mulatta
  misc_feature (1)...(399): n = A,T,C or G
ccccactaattttcatgacttctccgctcncggggtcccacgccctcaggagcttccctgggctggagacagcctagtacactctctgctgtgctgtgaaaccggattctctgcgtctagagactccagagtaataggggtgccctctagtgaggccggtgggaccctaccagagacagcatctttccgagccaccccaggtggacgttaggtggcagtgatgaggcaggtcacccactccccgtcctggacgctactcagctagcccagctgagtggggtgggaaggaatagcgttttggagttgattcactaacttcccacctgacttcttgtgaggtggtgtctgagggccaaggcaggtgtcaataaggcgtagaaatataaattccgagattct

SEQ ID NO: 39700 - DNA, 371 bp, Macaca Mulatta
tttattaatctatctttgagtacacaaaccctgtagatggtgtcacttaccagatcaagggaatgacggcaaaccttgcagtgttagtggcctttatcattttggaaaaaaaacccacctttgaggttcaatttaatcttagtgatgtattatcatcctctgaagagttattcctgaaggttcataaaaaagctacaagcaagttatgatttacgagaccaagagacaaagaactatccacgaggattctgtgtgtgcttatccatagaacaacaataacgccagctgttggaatttgacaggtgtgaatattttttctgcagtatgtagttagaatctttgcctcttttccagttgccttctattgtctg

SEQ ID NO: 39701 - DNA, 438 bp, Macaca Mulatta
  misc_feature (1)...(438): n = A,T,C or G
tttcgatgcccggccttctcccganccgcgggttgngacagcccttttgagccggaagtttattcagtacggaaaagagaacagcgaggggagaggcttgcccctaggatgtgtcctaccngctcggactcggaaaattcccgtcgcncgcgatgcagagcagtgggccgaagggctgcctcagagcagcccagaccgccagctgagcgggaggacctgagcgcgccgccccagcacacaaagtagtcgcgggccgaggggtgccgccgaggccaatcagagccgcgcgccgcgtgagtggagtgcgagccggccaatcagagggccggaagatgagcttcccgttccaaactcttccctgtagccttgggacccagatcccaagcctggggcgctttacggtgggaaagggaaatggtgccctgaagacaagaatca

SEQ ID NO: 39702 - DNA, 878 bp, Macaca Mulatta
gggcaagagacagggatgtccttgcagacatccctgcaagatcctcactattattattcatgtgttattggcaaaaacatagcttgtatctttccagaggcagagtttcaaagacagggttttctttgagacataagcacattgcttacatacataacaaggttattaacacttgcactcaggggaaaggaaatagctattgcaaattaatgtgtgctactttataaaataagctgtttgtgtatatgaatttagctctaggtaagcaaaatgcacacatcatataaaagtaaattgcaatgatcagaccaaatggctgtgctggacatcgaagaaaagacacgttggccatcggagaactcttacatgcgatagccaagatagcttcttttaataggaagaaaaagttaaatttctgaaatttccaaaaaggaatgaggattagcctaaattgggtcatgcctaaattttttatggccctttgaaaagttttttaagtccctatttcaaggtaagaaaaaagtcccacgcgcgaagccccaaaagaaaaggggttaagtggatggtttccagagtttcctgggctttcacctggaaattttttttaagcccgcagaagtggaccatatttgcaaaatcccagaaagatggcgttaaccctttagaaaatggggcccagaccagaagcaagcgcttggttaataagatttttttcctcaaaggccgcaaaaagagcgggtagtttaaaacattaaaaagatagagaaacgccaattttacacaagaaaagcgtatttaccgagattctgaagccacggagggacacagaagaggaaaagaaggaacactttgtccacccgcgcttcagcccatagaaa

SEQ ID NO: 39703 - DNA, 815 bp, Macaca Mulatta
  misc_feature (1)...(815): n = A,T,C or G
ggcagcttatataatattctcctgcttgtggtatcccacacatacacaaacctgtaaggtatcatgaaaagcaagggtaaggcctcctagagctgggggtaaggcagaggcatggctttttaaaggaaatggaagcaacaattatttacttaccttacatttactgaaccgtgttctggcttttagaaactaggaatacagagtttgaataagacatgaactcagctcttgagcaatggggtggagaaataagaataactaaaaatataaggattactggcatgtttgaatacaagcttctgaaatgggagacaccacagggaaagaagagaaaggttttcctgcagacatcacacaaaaaccctttttcagagtgtctagtataattagggtacagttaacttcatactcatccaggaaatctaaaaggaacacaactcatggcaaggtgggaacctaggctgcaaatcccggggaactttttccgagtgtattcaaacaaagccccgaagaaaggaaaggaaatggtctggtatataaaatatttatactattttgctaccctaatactcacttgaaatgaaattttccattgaattatcaaggcagaaaggatactggaattataaaaatggggaaggggccaaaaaaaaatccaaccttgtctaaagttgaggtaatagatggctccatgccctaaaagtcccaggcgcgttttgaagaagctggagaataggagttgaatccgtccaaagggtcaagggagttttgaggaaccacgccggggaccaaaagaggggcgaacacccgatgan

SEQ ID NO: 39704 - DNA, 631 bp, Macaca Mulatta
  misc_feature (1)...(631): n = A,T,C or G
tgggacgcctcgnccaaagcagtgtgtggcaggtcccctggtaggatcaacgcagtggctgaacaccggtaaggaacggatacttggagtccggacatctgaaacttgtgtttgctgacacaagagtccaggaagtacaggaggaaaaagaaggaggacagcaatcagtcacagctccttccagcattcacagagtgactaccactaattacgcctctcagacctgtgtttgagcagacctattttctctatgaattaatgccaagtgacctacttttccacatattattcattatttgttctgctgttttatcgattttgagactgttttgctacacaggaataaaaaaatccaatacaataaaactcctctcattnnnnnnnnnnnnnnnnnnnnnnnnnnnnnnnnnnnnnnnnnnnnnnnnnnnnnnnnnnnnnnnnnnnnnnnnnnnnnnnnnnnnnnnnnnnnnnnnnnnnnnnnnnnnnnnnnnnnnnnnnnnnnnnnnnnnnnnnnnnnnnnnnnnnnnnnnnnnnnnnnnnnnnnnnnnnnnnnnnnnnnnnnnnnnnnnnnnnnnnnnnnnnnnnnnnnnnnnnnnnnnnnnnnnnnnnnnnnnnnnnnnnnnnnnnnnnn

SEQ ID NO: 39705 - DNA, 464 bp, Macaca Mulatta
  misc_feature (1)...(464): n = A,T,C or G
atggcctctgcagccatctcgacgcttggcatgctcttcacattgagtgggctgagagctcagttggtgactcagccagaagatcaggtcacggtcgccgaagggaatcctctgactgtgaaatgcacctattcagtctctggaaacccttatcttttttggtatgttcaatgccccaaccaaggcctccagttccttctgaaatacatcacgggggacaacctggttaaaggcagctatggctttgaagctgaatttaacaagagccaaacctctttccacctgaagaaaccatctgcccttgtgagcgactccgctttgtacttctgtgcagtggccgaactaggaactcgactgatctttgggaagggaaccaccttatcaatgagttccnnnnnnnnnnnnnnnnnnnnnnnnnnnnnnccagctgagaggctctaaatccaatgacacctctgtctgcc

SEQ ID NO: 39706 - DNA, 782 bp, Macaca Mulatta
  misc_feature (1)...(782): n = A,T,C or G
ggtaatcagaacaccacacaggtttaccgtttatagaaactagagcagttctcacgttaaggtctgtggaggagatgtctattggagaaatggctggtagttactcttttttcccccctccctccttaataagactttaaaagtgcttaaccccttaaacttgttactttttacttgaagtattttgggatggtcttaacagggaagagagagggtgggggagaaaatgtttttttctaagactttccgcagatgctatagtactattgacaaactgggttagagaaggagtgtaccgctgtactgttggcacgaacaccttcagggactggagctgcttttatccttggaagagtattcccagttgaagctgaaaaatacagcacagtgcagctttggttcatattcagtcatctcagggagaacttcagaagagcttgagtaggccaaatgttgaagttaagttttcaaataatgtgacttcttaaaagttttattaaaggggaggggcaaatactggcaattagttggcagtggcctgttatggttgggattgggggggtgggtttannnnnnntggnncnggtccggcttgggggcggcctcctgccggccgtccttcccccccccgcacgggccctgggtccgccaggccccttctctcccgccgggcccccggcccccctctcccccccgttgtcccccccccgactttgtgccnctgggccgcccttctcggccactggggtgaaggagccacctggggcgcatctgcgctctcc

SEQ ID NO: 39707 - DNA, 245 bp, Macaca Mulatta
gctaagaccagaaaccatgcctactttaccttctgccagggtggcggagtgaacgcaggtattctgggaggggaaggtcggggaattccagccacatctggcggaattccggcacatctggccctggttcagagcctacctcgtgggatgcggtctctggggaggcgaggagtaaaatgggcttgaaaagcaacgcccacgtactcagcggtgaaacagactgagctgtgtgctctgttcctgaa

SEQ ID NO: 39708 - DNA, 635 bp, Macaca Mulatta
  misc_feature (1)...(635): n = A,T,C or G
tgagaaacattaagacctactatcaggaagtctccagcagctgattgtaatgaatttgcccaatgttttgatgattggcagagacccactatctggtgagtgaaagccgctcccttccccccctgcggtgcctgggcagtgccatcggcgttgggcagctgctggccgtcgagctctggctgccagcttgggccagcacagtgaaaacacattatcattttgctgagattttaaagagtgggttcattaccctgaggcattcagccaagggcacatttcttccttaagattgaagcctcagctgggtgtgnnnnnnnnnnnnnnnnnnnnnnnnnnnnnnnnnnnnnnnnnngggcggatcacaaggtcaggagatcgagaccacggtannnnnnnnnnnnnnnnnnnnnnnnnnnnnnngagccgggcgcggtggtgggtnnnnnnnnnnnnnnnnnnnnnnnnnnnnnnnacaggagaatggtgnnnnnnnnnnnnnngnnnnnnnnnnnnnnnnnnnnntgtaccactgcactccagccaggtggnnnnnnnnnnnnnnnnnnnnnnnnnnntacaaccgctaaaaagattgaagcctccccaggccgggcacgnnnnnnnnnnnnnnnnnn

SEQ ID NO: 39709 - DNA, 770 bp, Macaca Mulatta
  misc_feature (1)...(770): n = A,T,C or G
ggctgaagttaagtaaaacaataatgggcaaatgggagtttttgattttttacttcattctgattatttctgggccaggaagatactggcttttataattaacattattagaaatagtgattttgtatcagttcttaacttttacatccaatttactgcattcaagtgtaattggggaagctttcaaactggaaaattattttggtgcctaattcaaacagtgactaataagtgcatgtatccaaagagatcgttgttgcttagcttaggttgaggttattttattgcctgaaggtttttgttttcttcttcacacagcaccatagaatgctgacataagaatattatgaatttattgttaatatttcagatagtattttaagataaggagtctgcagcatttacttgtattaaaacattactgaaagcttggagaagtattatttttggattttgatagtcctttagcaaataacagaaagggaaggcgattatgtgttggcgtatttgtggggtgnnnnnnnnnnnnnnnnnnnngtgtgtaaggtaagttagaatgtaaggagggtgccctaaaaggatgagggaaagcattaggttggtaattctcttcggtatgtatcgtccaaacactttccattttctaaaattattcatgagggagcctcccttgtttcactagctttggtcttgactattttgatattttcaaattttctttgaggtccaccccagaatgggagcctgggtcatccactgcctgtaaaaag

SEQ ID NO: 39710 - DNA, 712 bp, Macaca Mulatta
  misc_feature (1)...(712): n = A,T,C or G
atcaagcaggtcataaacggaaactcagaagagaaaacgacacctggaagaaggcaaagaaaggccagagaaagagctgtccaaacataaaaggaaaaagagttatgaagatacagatttagacaaagacaagagcatcagacaaaggaaaagagagggggatagagtcagggtcagttcaggaaagcttaagcatcgaaaaaagaaaaaaagccataatgtaccctctgagaaagaagaacgtaagcacaggaaagagaaaaagaaatctgttgaagaaaggacagaagaggaaatgctttgggatgagtctattcttggattttgaatatttagttttgtttacccaaggttgannnnnnnnnnnnnnnnnnnnnnntatggatttagaaaaagacaggaacatccgatgaaggaaaggagaggtagatacagtcagtgtcacttcaggacacttagtttttgtataaaattttaaattgaattaaaaggaggaaaaaaaagcctaaacttaacctctgagaaagaacataagaactcaaggagaacataagagaaaaggtaacctgttaaagaaaagacaagaatctgtgttttggaatgagtctactcttgggtattgaacttttagttttgtttgcccaaggattaattgaggaaatcagctaagaaactggactttagaccaaaagcagaagatcagatgaagaaa

SEQ ID NO: 39711 - DNA, 501 bp, Macaca Mulatta
agttagtacattaaacaaatgggagtaggagggaggctttggaccaactggctccaacctatctggtctacaagcatgttgggtggaacagaggtggagaaaagctgagggcagggatgtacacccttcctcggggcaagacgccgcctggtcctgcggagcgattccaagcctcgtccacaaacatggccaaggacactgccagcctctccattcgcctatgtggatactctgactccaaaaccagaaccacagggcaaagggatgtcggcacgtgccggtatgagagcctctctctgcggcagctggcgtgggggttaccagctggggctagccagactcatcttcattagcacagactggtctaccagttgcacagatccagattcgaaaatctcgggtacaaatcccaagaggcgatggcatgtaaccacatcaaactcaacatctgcacctaactcccaccttcttcctctgggaaatcttcctggacatgcccag

SEQ ID NO: 39712 - DNA, 287 bp, Macaca Mulatta
  misc_feature (1)...(287): n = A,T,C or G
agatcaacctggtggcctgcactcacatctacatccccctggtcacctatgtgccagtcatctctgcagagaaggtataccacagcagctgtttttggcagggatcgccaatacatgctttgagctggccagccagatggcaaagtgtgatggnnnnnggcttactggtatggcaagtgtatggcttactgcctgttgtaccacagagatgtacccaaggatatcaatgctgccattgccaacatcaataccaagtgcggcattcagtttgtggactgctgccccac

SEQ ID NO: 39713 - DNA, 872 bp, Macaca Mulatta
  misc_feature (1)...(872): n = A,T,C or G
gggggtataatgttcgcaatttggatggtgagttcactggaagcccgagcctcaccattatgcaaactacccatgaaacaaacctgcatatgtaccccctggatctaaaatacannnnnnnnnnnnnnnnnnnnnnnncccttcagattttgcttattttcagggtgaaagaagaaataaataggttcatatttttaaagaaatttaaaatcatcttgaaaataaaaacttatctaagcacatataggctcagataaatcaagaaatattttaaatggctcttggatatacaatttacttttcttttttattctcnnnnnnnnnnnnnnnnnnnncacaataattttgaacatagttagaataatcacgttgctacaagaaagatgtcagtgctgtttgtggctgggaatttcacgggggaaagcaaagtggaaaactgcaaacttgttctttgggaataactaaagcaaacagtggtttctgaaaaattaagctgggtctcaagtttttctttacgaagaaattaccggatattggcttcccggggttaaaatttccactttaagatgtgtgggaaaatagaatacgccctacctaaatgttaaggaacggccaattatttanacagggaagaaaattcaccaattgtttaagaaggggcccaacaaaccaaatggttccagggtccaaaaaaaggaaattcctgggtaaccctggaaggttttttggaaaaaaacactcttgttcaaggggatttattccaaaagaaaaaatttatttctccagaaatttttacacctttattttcccccggcccaagggaatatttttaattggccctcggggaaaaccaaaccggtatttttagtttt

SEQ ID NO: 39714 - DNA, 629 bp, Macaca Mulatta
  misc_feature (1)...(629): n = A,T,C or G
gtatttctaatggcatccttaagaatcttataactacagccatttcagaaggcaacaaatgtcacctgttaatccacatatcattgatagctttcgctcttccctctctactttgtttgaattacttgttaaaaatcctctagaagtacatgtagttctttagaacaatttaaaaattaaaactgtgtacagtacacatgctctcatacattttcagagttaaaacatagtttgtggtatctttcattgactcatggtgactttttaaacaatgcaagtcatttagacataatttgtaaaaaaacccaaaatactcagtgtctgtgttttgcaatcttcacagacgtaaagaaattctagcagacgtcagtaccaaacttcttcaagaaaaagagcagagcggatctttatttacttctcatactataagggcagtcctacagtcagcatgcaatggaaatcttaatgaaaatttaggtctcaacagaatacatattccaagagaaaccttaaggattcctaccttaagctcattgtcttcaaatatcagaatggagagcgacttgtcanaggttagatatagcatcattttttctttccttctcagacttctgatataattcttgtat

SEQ ID NO: 39715 - DNA, 3955 bp, Macaca Mulatta
  misc_feature (1)...(3955): n = A,T,C or G
gacgcaagaatctttaaacccaaacaatttagagtactggatggaagacatttatactccaggatacgattcattactaaaacgtacagaagctgaattcagacgagccaaggtctgcaagatagctgctctgatcactgctgcggcatgcaccgtcatcctcgttattgtcgtgcccatctgcacaatgaaatcatgagctaagaatgcacccttacgtaccgcttatgactatcaatgttgtcgtctgtattttagaatcttgcagcagtgagacaacaatttattgaaacagagatgaactcatggaggcatttctacaaatattgaatgaaggtggttttcagaaactatactaattctagtgagaaatctacctacctgttagctttgactcaattacactctgatgcatttttagaagtgtgatatcttttcctaccaaaagaacataatggactatcaataaatacaaattgaatattccaannnnnnnnnggaagattaattgggttctttccattttgataatgtttcatggtagggaataagttatacagaagatatttaatacatgcctctttagaagaaactaagggaagtagcaacataagaagaaaagagggtgggttctcttttccataaagttcttagaccattgctggtgaagtaatagggtgtgcacccctaaagggtattacttctctgtcgacttttatcaagggctactgacgtttcattcttgcccttttgtcatcaacaagacagaatgtctgcatcactgcagatcttcatggaaacattctggaccttcttccttgcacaaggagtaagaaggagctggactaccaagnnnnnnnnnnnnnnnnnnnnnnnnnnnnnnnnnnnnnnnnnnnnnnnnnnnnnnnnnnnnnnnnnnnnnnnnnnnnnnnnnnnnnnnnnnnnnnnnnnnnnnnnnnnnnnnnnnnnnnnnnnnnnnnnnnnnnnnnnnnnnnnnnnnnnnnnnnnnnnnnnnnnnnnnnnnnnnnnnnnnnnnnnnnnnnnnnnnnnnnnnnnnnnnnnnnnnnnnnnnnnnnnnnnnnnnnnnnnnnnnnnnnnnnnnnnnnnnnnnnnnnnnnnnnnnnnnnnnnnnnnnnnnnnnnnnnnnnnnnnnnnnnnnnnnnnnnnnnnnnnnnnnnnnnnnnnnnnnnnnnnnnnnnnnnnnnnnnnnnnnnnnnnnnnnnnnnnnnnnnnnnnnnnnnnnnnnnnnnnnnnnnnnnnnnnnnnnnnnnnnnnnnnnnnnnnnnnnnnnnnnnnnnnnnnnnnnnnnnnnnnnnnnnnnnnnnnnnnnnnnnnnnnnnnnnnnnnnnnnnnnnnnnnnnnnnnnnnnnnnnnnnnnnnnnnnnnnnnnnnnnnnnnnnnnnnnnnnnnnnnnnnnnnnctgtgaaataacctgagagcgaggtttctttagtgtaaaagaagctgttgtaatttcatccaaatttgatctgtctccacctgctgaatggtgctttgccaataatggaacagaaagaatccctatcagcatctgattccagtgtgttgttacaggttaaagaaaaaaaggattgacagaaactagttaccttatatatatatttttgataacaaggtgggatataaatagattttggtagcaagtgtaatcactctgtatgatataataaatttctaaaagagagatttgaagcatctcaagttttaaagcaataggagtctagcatccattctgaaaaatcccaaataatgcttagcttgctgtgtctaattctgttgttcaccattaaggggtagacagttaattttattatgttaacaactgagggatgaattttttcatctgtagtaaacctttatttttagaaatcttcatgttatctatttgtattatcatgtttatgtatggattttcaatttcagtgactgaaaacttaagccttagtatgaaaaactgaggatttataattgaaaattaaaaaatatgtatatgttactatctgtcatcagaattatactctttggtgctctgttttcaatggggcatattacataaggttgtttctttcaccccaaagagactactaggttaccactaagggcattgcctttccacctaacccctcaaccagtaagacactgtaccacattctagccccactannnnnnnnnnnnnnnnnnnnnnnnnnnnnnnnnnnnnnnnnnnnnnnnnnnnnnnnnnnnnnnnnnnnnnnnnnnnnnnnnnnnnnnnnnnnnnnnnnnnnnnnnnnnnnnnnnnnnnnnnnnnnnnnnnnnnnnnnnnnnnnnnnnnnnnnnnnnnnnnnnnnnnnnnnnnnnnnnnnnnnnnnnnnnnnnnnnnnnnnnnnnnnnnnnnnnnnnnnnnnnnnnnnnnnnnnnnnnnnnnnnnnnnnnnnnnnnnnnnnnnnnnnnnnnnnnnnnnnnnnnnnnnnnnnnnnnnnnnnnnnnnnnnnnnnnnnnnnnnnnnnnnnnnnnnnnnnnnnnnnnnnnnnnnnnnnnnnnnnnnnnnnnnnnnnnnnnnnnnnnnnnnnnnnnnnnnnnnnnnnnnnnnnnnnnnnnnnnnnnnnnnnnnnnnnnnnnnnnnnnnnnnnnnnnnnnnnnnnnnnnnnnnnnnnnnnnnnnnnnnnnnnnnnnnnnnnnnnnnnnnnnnnnnnnnnnnnnnnnnnnnnnnnnnnnnnnnnnnnnnnnnnnnnnnnnnnnnnnnnnnnnnnnnnnnnnnnnnnnnnnnnnnnnnnnnnnnnnnnnnnnnnnnnnnnnnnnnnnnnnnnnnnnnnnnnnnnnnnnnnnnnnnnnnnnnnnnnnnnnnnnnnnnnnnnnnnnnnnnnnnnnnnnnnnnnnnnnnnnnnnnnnnnnnnnnnnnnnnnnnnnnnnnnnnnnnnnnnnnnnnnnnnnnnnnnnnnnnnnnnnnnnnnnnnnnnnnnnnnnnnnnnnnnnnnnnnnnnnnnnnnnnnnnnnnnnnnnnnnnnnnnnnnnnnnnnnnnnnnnnnnnnnnnnnnnnnnnnnnnnnnnnnnnnnnnnnnnnnnnnnnnnnnnnnnnnnnnnnnnnnnnnnnnnnnnnnnnnnnnnnnnnnnnnnnnnnnnnnnnnnnnnnnnnnnnnnnnnnnnnnnnnnnnnnnnnnnnnnnnnnnnnnnnnnnnnnnnnnnnnnnnnnnnnnnnnnnnnnnnnnnnnnnnnnnnnnnnnnnnnnnnnnnnnnnnnnnnnnnnnnnnnnnnnnnnnnnnnnnnnnnnnnnnnnnnnnnnnnnnnnnnnnnnnnnnnnnnnntacagtaaggtaaatcatacttacatcatccattactagctgatcataaattgttagtattttaaggcatgcaactatgtgattgatatctgcaaggctagtttaatagatgtgctaaatatcactgttctgaatatctgtgccatagttctgatactcttattggaatcaaggcagtgctgtttttgtttacaagttatcaagataagagcagtggcatcacatttgttggttctttttcttaatagaaaaaacaaaacagaagaagctctgccaacagtaaaagattctgttaagtggtataaaagcttgtgaatgttgaaattcaacatgcttcatattataaccaacctgcaagaatattgtggtcaattgtgtgaataccatatcaatatatactgtatattgtactatgaaaatttgtatttaaaggtaaagatacgaataattgttcgtataattggggaaaagggtattcaatatttattaacaatgagaaatgcaacgaacttccttatttatgccttatgaataaaagagtgtggaatgtaaggtgaaattttatgtgcaagatcctgaaggaatgggtattcttgaaggcagggactgtgtcttttctatgtttgttctgtacagctctcagcacactcttg

SEQ ID NO: 39716 - DNA, 182 bp, Macaca Mulatta
gcggataggcctttttccagaagtcctacctcatcctgcatcggaggactcacaccaggggaagccccatggctgcgccgagtgcgggaacgcctcctcctagaactcctgcctcctgccgcacaggcggacccacatggggaggaaaccataccagtgctccgactgcggaaagacctccc

SEQ ID NO: 39717 - DNA, 1118 bp, Macaca Mulatta
  misc_feature (1)...(1118): n = A,T,C or G
catccctgaacacggctggccactgggtgtactgctgacaactgcaacaacaaaaacacaaatccttggcactggctagtctatgtcctctcaagtgcctttttgtttgtactggttcattgtgttacattaacgacccactctctttcttgctggtgaaagccctactctttaatcaaaccctggtggcccactgactaagaagaaagtttattttcgtgtgagacgtcagcccctccgggcaggcaagggctctgaagatttggcaacgtggcttaattgttctgctttttctgtagttcaatttcatgtctcttgacccttttgtataaagctgcaatattctctcttgttgttctttcatatggaatgtattttcaaatgtaaactcttttctctttctctctcctatctctctgtctttttatctctcttaaaattggaggatttgccgttgtccagaaaagaaacttgcagctttaacctgctgggaatggcaaacgattttactagactttatgnnnnnnnnnnnnnnnnnnngggaaattcctaactttgccctccaaagtctaactttggttttcttgttaactggttaaagtgacagtatcttttttccttatctattctgttcaaaacgacctctgatagaattgttggcatttagtagaaatagtggtaaggttgaaggaaagaaaataattcgaaattggggcttttcacaggtggagaaccaaaggaagaactggataaaatcttccaaatatccaaaagcatgagatttttctatccaaatatgcaaaaatgacccaagagaaccttcttgttttgcttctgagtcagacaagggaattggaaggaataacagttaatttaagaattaaactataaatcctgatgcctgggcgtcaagtattttaagataagaaggggaaaaacacaaagtcaaaacaaatggtttacaaaatttataaaagcaacctttgaaaaaatagacttaaatgaatgcttctagaaatttccagcggcttgcaaaaaataagcctgcctttagggctggcaatacctaaagcctctaacagcacaagggaaacaaatatcttaccagggcagcccta

SEQ ID NO: 39718 - DNA, 797 bp, Macaca Mulatta
  misc_feature (1)...(797): n = A,T,C or G
ccatttttttttttcgttttatgacagccgagttacacgagagtaatgctctcgctgtgacaacgtatatgcagtacctgtatggttggggagaaaatgaagacagtctcagattagcaactcagatgcataacgttctgagtcggtagatcactcaaatagttcactctagagatgnggatctcagtggagaagaggtggggcaggaggtactgtgaggtgggtcctgcgagggggaggggtttgttccaaatccaagtgggagagcatctccttggcttcatcacttttctgggtaattatctcttttctcgtggtcatggtgactcggcgcctggttacctcggaggtcaagtccttgtaggggagattaatgccgttgtctgcagggcttctttgagccatggccttgcactcaggggatttgaggaatttaaagttactgcacatgatcacaaggtcccacaagctgtctgcaagctgaggagtaagaaatgccagtctgagtcccaagactgaagaacttggagtctgatgttggaaggcaggaagcatccagcacaggagaaagatgtaggctgggggctaggccagtctcaccttttcacatttttctgcctgcttatattctagctggcagctgcgtagactgtgcccacccagatgaagagtgggtctgcctttcccagcccagtgactcaaacgnnnnnnnnnnnnnnnnnnnnnnnnnnnnnnnnnnnnnccctgnnnnnnnnnnnnnnnnnnnnnnnnnnnnngcaatctcggctcactgcccc

SEQ ID NO: 39719 - DNA, 917 bp, Macaca Mulatta
  misc_feature (1)...(917): n = A,T,C or G
ggggagcctaacccatttgctgtttggtctcaagtaggagcatctggttacagtctggcgacagactgtgtttacgctgccaccccttaagtggtgccctatgattagactgtcacaagtgtcctgaaaatgagtcctcctgcagctcttctcaaattctgcagctaccaggaggactctgtgatgtcactgtagcacagagttctaattctttgttggggggactgtgtgttcgatgtttagcagcatccctggcttctagccctgaaatgccagtagcaacttcctcactggcaccaaacatgacaaccagaaatgtctgttaacattgccaaatgtctcctgatgggcaggatccctccttttgagagcccactgtgctctagtacaacgtctggtccaatacagggcccttggacacgccaaagggctcccctgtgttcttttgcatcccttggctaaatttccccaacccccaccaaagaaaaatccaccatggaacctttccccgtcgggcctcgggcctggcattttcggggtatggaacccctcggcacccgggaaattctgccaccccgccagaaattgggcataccacctgagctcggccatcaacagtggtgtaccctcccggcccccccggataaacttctcgccctacccttcgcactccccctccctctcggtgtgtcagccacgctgtccccccccacgctagccaatctcgttctccatcgagcgagggtagcggtacccgcaccgttcggcggggccccttcgtcgtgttatcccccttctacttttgtgtcaccgccccgtagtcggcaagagccaactcgtaaacctgataggcggccggtcggcgatccccgttgccgtccagtccgncccggcgcctccatggtacgggggcgcgc

SEQ ID NO: 39720 - DNA, 812 bp, Macaca Mulatta
  misc_feature (1)...(812): n = A,T,C or G
gggctctaccggcgggatttgatggcgtgatgtctcacagaaagttctcggctcccagacatgggtcgctcggcttcctgcctcggaagcgcagcagcaggcatcgcgggaaggttaagagcttccctaaagatgatccgtctaagccggtccacctcacagccttcctgggatacaaggctggcatgacccacatcgtgcgggaagtcgacaggccaggatctaaggtgaacaagaaggaggtggtggaggctgtaaccattgtggagacgccacccatggtggttgtgggcattgtgggctacgtggaaacccctcgaggcctccggaccttcaagactgtcttcgctgagcacatcagtgatgaatgcaagaggcgtttctataagaactggcataaatctaagaagaaagcctttaccaagtactgcaaaaaatggcangatgaagatgggcagaaacagctggagaaagacttcagcaccatgaaaaaatactgccaagtccacccgtgtcattgcccccacccagatgccgcctgctttctccgcaccagaagaagggcccccttgatggagactcccggggaaccggaggccccttggcccgataaatttggaatggggcccggcaaacggcccccattatccggtcctctcgcgccctcacagttgcttggtggccccgattattatcacccgagcagtttcggggggtgggcccgacgggccaagggcgtaccggaggggggtgcccccggttgtgttgggctcggccctgtcaaatgggcgcgtcttcctgacaactcccgc

SEQ ID NO: 39721 - DNA, 761 bp, Macaca Mulatta
  misc_feature (1)...(761): n = A,T,C or G
gggagaaggggatcttggagttcaaatattctaaagttcgagagggggattaagactttggtttagatatattttttaacaggtgtgttaaattttggtgataaccactgatataatggaaataaaatgtatttttccaaatcactaatgagtaaaaaaagaataaagatgaaatagtccagaaggcagaaaaaagatgggcaactaaaaaatacggcaattagaattcacaaaataacaatgcagtccttgacaaatgtatttgtccacacagataaacctggaaaacacaatagtgaataaaaaataaaattaaattaaataaaaataaaatagggaataaaaaaggaaatgatagactaatacatacataaagtatgataatatcaatgtccatttaaaagacacaaagcaatatcatgcttgaacatacactcacatcactagacgagcatgttccaaagtcactatggagcttgtctatctggaaagaaagtagagtagtaccaacttgattggagaaagaagactaaaatttacccaaaggggccatttttgggggaaacccaacccaaaaccaccccnnnnnnnnnnnnnnnnnnnnnnnnnnnnnnnnnnnngggccccccttgggnnnnnnnnnnnnnnnnnnncttaaaccttttccttttggggcccccggggccccccnttaagggaaaatgtaaaacaggggggcccaaaactcggttttcccccaaggaagaaataccccgggggcc

SEQ ID NO: 39722 - DNA, 774 bp, Macaca Mulatta
atgaagacccgcttttcaatctagtttgttgaaagttttttctcatagagtttttggttttgctgtcttcattgctccatttttatgagaggacgttgaaggggaattgaaaccctgttaccgccacttttccccataattctttttttcagtttgacttgtactaaattgccaatatttgatcaatttcaatgattgaaactgagaatttttatatagtttaacctaatgcagaactctatctttagattttactacattgggaatttctttttccaaatgtattgttcagcatgtatttttgtgtttaatacataccttgatttcccataataaccagtaagaatttctaaaatacataattttagaaatgaatgctacttgtgatactgtgaggtatagtatgaggtaagcatgtcattatttttctgttaattgcttataacatatattagataacccattattttccaacttctttaaactgctgcctacctttttttttaacattaaattatagataattgggtatgtttctgtgttctgatctgtttattactgtgcaggatttttctattttaaatagagtaggcttattagtaaggtttggtatcttgtaggacagttttcccattctttcttttcagaagtttctgtgctgtttttatttttgcgcattactttcttccacatggactttattgtggatttgtcagatccacacagcatgacatcagaattattattgtaattacatttcttagtcttaatacc

SEQ ID NO: 39723 - DNA, 158 bp, Macaca Mulatta
agggtgcagagcctccagctccaccacgagctgcatgccgcccacctcctctccagcacagacctgaacgaggcccaagcccaccggcgggcctggcagcagaaactcaactgccagatacagcagaccaccctgcagctgcttgtgagcatcttcag

SEQ ID NO: 39724 - DNA, 899 bp, Macaca Mulatta
ggatgcattgtaactacaaattttatttattgttatgaaactgtaaggtctacatataaagggaaaaagttaatgtggaaagctgatctacactcagctgatgccagcatatattaaagcagttcacgtgcagagaacaaagcaatgacaaccattggcccttagcattcccggcatacctattagtgtcttaaaaaggaagggaaaagtcttttgttgccctctcctatccttttgccatatgaatagtgttttccatgaaataggaaaatatcacttggaatagcatttctcttgctctcattttttgatttatttttattttctctttgtgggtgttatatttgatttctaaatctgaatagtttatggtcacagtccagcctcctccatgcagccctgtgtgctttgcacatttaccttacagtggtaagcagagaccatctgtgaccatagcctagctaggattttaaaaggggaaattttgttctctaggttttcccccaaataaacattgctttgtttctaataataaccaagacttttcaagcttctagatctcataggaaagcttgtaacagcaaaattgtaaattacaaggggaagaatctactttttagaaattgctttgttttccaagcagtaagtactacatacagtactttgtaaagtgttagctgtaagtaagcacaaaatacatttaaaatacaaagacgattttttcaggctgtgattatggtgaacataacaaaacccagtagtcaccaaggcaggtagtgtgataaatgaacacaccactctgaggctaattacctaatggaatacaagagcaatggtcacccgtgtttccttatcctagcctttatttctctgtcatttggatggctggtcaatgggga

SEQ ID NO: 39725 - DNA, 803 bp, Macaca Mulatta
gggggaagaataatcttgcaaacgctgccatttccttctgcaacatctgagagcatgtactctgaatagtcaatatttgatgatgtttaatttccattatttccttcaacactcaattataatcaggaggcatattgttgactcctatttcatataaagaatcttttagtaatataacagtgtatgtttttgctatttgtatacttcttgctctgtcaattttgaatgtcttacacctttttcaacttatgtcatagctcacaaaagtatcattgtctaaataagaactgtcttccctgtactataagttttcactgatatgtggaacaaaagttgttatttttaccttatatactatatatgtgtcaagcactgatttatattttctccacaggtaatttgtccaattgtaaaacaaaatatatactgaaacactcacgtgatagtaattgcttttctatattttgttgcatgacaatataagacatcgaatagaatcctttaataaaaaattttggtcaatagtttgtttcttcgcaagcattaaaatttgaattgaccatctttcccagcaagtattcaaaaattcttccctgttttttaccaaaggaaggccgtccttttccctggggtttcctcctttatccctaatccacaaaaccaaatggggcctttgggggctttgccaaggaaaaaaaatccgggaaagattccctttgaattttatatatcaacgggaattttaaataaaattggctaacaattggcatgaagcctcaaatagtatctcacttcagaaattg

SEQ ID NO: 39726 - DNA, 272 bp, Macaca Mulatta
ggttctctgctacaaattgatgtttagataaacttcagtgaaatgactcttcaggaattggtgcgtaaggctgcctcctgttatatggacaaagtagctgtatgttttgatgaatgcaacaaccagcttccagtttactacacctacaagactgtggttaatgctgcttctgaattatcaaattttctgctgttacactgtgactttcaaggaattcgggaaattggtctctactgccaacctggaatagacttaccctcttggattttagg

SEQ ID NO: 39727 - DNA, 914 bp, Macaca Mulatta
gacgaggctgagacgtatctcgtaaattaaaaaacaacaacagaatattctacgtgtggtaaagtgttaactcagcaagcttgggttgcttaaaccttgcacattccaaagaaaggtctgacctcagtgctgaactttggctcctggaaaatgagctctgaccccggaatatcccacctgataggaatgtctctgtttgcctgaggcgttagaccataccagatagacagtttatgctaacaatatgatttatagtgaatacctgttttcctgtgtctaagaccctggactgcactgtattcatttgacctgggggatttagggagctgagactggatagctaaagtaagtcacataagcactaaatgcttacctgtctgaccaccagtaaaactctggacatccagacttggatgagcttccctggttggcaacacttttcacgtattgtcacacaccattgctgggggaattaagcactgtctataaaactccactgtgaaatgacaactggaagcttgcacctggtctctcctgattctgctctatgcagcttttccctttgcctggttttaatttccattcttttgttgtaataaaccataatggtgaataaaacagcttgtctgagttatgtgaatccttctagttcatcattgaacctgagagtggtcttcgggacccctgacacaatgtgtctagagttctacggttctgactagtttaccttttcatgttatctttaacttgcttttcttgagtcctcctttgtatcacggccttttcttggctgtgctttaaggatccttttcctaagattcccaaaatggtggtcctacgttcttctcgaggggtgcgtctgtgaaggcgcccgaatatctggcctcgtgtgtgtgtcgttggacacccctcta

SEQ ID NO: 39728 - DNA, 836 bp, Macaca Mulatta
  misc_feature (1)...(836): n = A,T,C or G
ggcgagnnnnnnnnnnnnnnnnnnnnnnnnnnnctaggaggccaaggcannnnnnnnnnnnnnnnnnnnnncttcgagatnnnnnnnnnnnnnnnnnnnnnnnntcgtctctactgaaaatacaaaaaccagccgggcacggcggcgnnnnnnnnnnnnnnnnnnnnnnnnnnnnnnnnnnnnnnnnnnnnngnnnnnnnnnnnnnnnnnnnnnnnnnnnnnnnnnnnnnccnnnnnnnnnnnnnnnnnnnnnnnnnnnnnagcggactctgtcttaaaaaaaaatcacaataattcgtacaactcaacaaaaagacaattaagaataggcaagggaggctgggtgtnnnnnnnnnnnnnnnnnnngccagcacttcgggaggccgagacgggtggatcacgaagtcaagagattgtgaccatcctggctaacaccnnnnnnnnnnnnnnnnnnnnnnnnnnnnnnncaattaccctgcgcatagtggggggccactgtcgtcccccctactcaagggggctgaaggcaaaatggcgtgaaacccaaaaaggcggaacctggccgtgagccaaaaattgtgccactgccactccaccctggggcgacgggaactagacacccctttctcnnaaaggggaggagcacgctggacgacatggctcgcaaagacgccctaacgcgggggtgccaaccctccctaaaacccacagcacttttggaaggccccccgtcgtggtgggaacccccttgactgttaagggatgctttacaaaaactccccggggcccatgcggggggggaaacgtccccctctctcggatatgacccgcaacaa

SEQ ID NO: 39729 - DNA, 128 bp, Macaca Mulatta
tcagccgatgacaaattacagttcagctgttgactgagaaggttgtggtaggaaaacacttgccatattttctttgtatttgagtaattgtcttgtacttaggaaaaagtcatctatgaatgaccagt

SEQ ID NO: 39730 - DNA, 2083 bp, Macaca Mulatta
  misc_feature (1)...(2083): n = A,T,C or G
ggacctatatccagactttgcctgacactgcagggtccaagagaaataaagaaatatggaatgacatgaagaagattagttaaggattataggctttgagaacaaacacctcagtgaagnnnnnnnnnnnnnnnnnnnnnnnnnnnnnnnnnnnnnnnnnnnnnnnnnnnnnnnnnnnnnnnnnnnnnnnnnnnnnnnnnnnnnnnnnnnnnnnnnnnnnnnnnnnnnnnnnnnnnnnnnnnnnnnnnnnnnnnnnnnnnnnnnnnnnnnnnnnnnnnnnnnnnnnnnnnnnnnngccaatagaccaaggctttgcctctttccagccatcccttcatcatccttctactaatcaaaatcaaacaaagctgacatattttgatcactataatcagtatgaacaacaaaagatgcatctgatggatcagccgaacagaatgatgagcaacacccctgggaacggactcgcgtctccgcactcgcagtatcacaccccacccgttcctcaggtgccccatggtggcagtggtggcggtcagatgggtgtctaccctggcatgcagaatgagaggcatgggcaatcctttgtggacagcagctccatgtggggccccagggctgttcaggtaccagaccagatacgagccccctaccagcagcagcagccacaaccacagccaccgcagccagctccgtcagggccccctgcacagggccaccctcagcacatgcagcagatgggcagctatatggcacgtggggatttttccatgcagcagcatggtcagccacagcagaggatgagccagttttcccaaggccaagaaggcctcaatcaggggaatccttttattgccacctcaggacccggccacttgtcccacgtgccccagcagaatcccagcatggcaccttccttgcgtcactcggtgcagcagttccatcaccacccccctactgctctccatggagaatcagttgcccacagtcccagattctccccgaatcctccccaacaaggggctgttaggccacaaacccttaactttagttctcggagccagacagtcccctctcctactataaacaactcagggcagtattctcgatatccctacagtaaactaaatcagggattttagtaacatacngggatgaatcaaatttaggccttacaataatactcccatgaatcagtccgtaccnagatacccaatgctgtaggattccatcaacagtggtcaggactaatggacagcagcccatccacccannnnnnnnnnnnnnnnnnnnnnnnnnnnnnnnnnnnnnnnnnnnnnnnnnnnnnnnnnnnnnnnnnnnnnnnnnnnnnnnnnnnnnnnnnnnnnnnnnnnnnnnnnnnnnnnnnnnnnnnnnnnnnnnnnnnnnnnnnnnnnnnnnnnnnnnnnnnnnnnnnnnnnnnnnnnnnnnnnnnnnnnnnnnnnnnnnnnnnnnnnnnnnnnnnnnnnnnnnnnnnnnnnnnnnnnnnnnnnnnnnnnnnnnnnnnnnnnnnnnnnnnnnnnnnnnnnnnnnnnnnnnnnnnnnnnnnnnnnnnnnnnnnnnnnnnnnnnnnnnnnnnnnnnnnnnnnnnnnnnnnnnnnnnnnnnnnnnnnnnnnnnnnnnnnnnnnnnnnnnnnnnnnnnnnnnnnnnnnnnnnnnnnnnnnnnnnnnnnnnnnnnnnnnnnnnnnnnnnnnnnnnnnnnnnnnnnnnnnnnnnnnnnnnnnnnnnnnnnnnnnnnnnnnnnnnnnnnnnnnnnnnnnnnnnnnnnnnnnnnnnnnnnnnnnnnnnnnnnnnnnnnnnnnnnnnnnnnnagcattctccgtcggagccctttctagagaaaccagtgccggatatgactcaggttagtggaccgaatgctcagctagtgaagagtgatgattacctgccatcaatagaacagcagccacaannnnnnnnnnnnnnnnnnnnnncaaccacattgtagcagaggatcccagtaaaggttttggtaaagatgacttccctggtggggtagataaccaagaactaaataggaactcactggatgggtcccaagaa

SEQ ID NO: 39731 - DNA, 771 bp, Macaca Mulatta
  misc_feature (1)...(771): n = A,T,C or G
gggctggccttttctcttctttaccttccttggattatccttccgggttttcataatacatttatattttgtaaaaggattttgttgtaccaggctttgcatcctcactgaatctgactggcttttattttcctctccaaaatcaggtttttgttctcaacatttctccccatcatgtccagtcattgttttggttttggcaccatccgtatcaaatgtacaaacggttcttgctaaccaacaccaggtatatctgatgttcagatgagttccaataaaaataattttttttcaaaaggtgtcttttcttgagtgctggagggcttccaagcaagcccagacagctctgtgtagccccacactagtctagctctcatctggccaaagctgttatctcatttgtgtaatgggagtccttaagctaaatttggggtccaaatttgaagggctttgggggcaagaaagttggtgtgtgagttctgaagttggaaatgaattcaggtgtctttttccagtgagcacgtgtaggtttgggcggtagatcctctgagcctgcttcctcttctactcagtgaggatgctgcttccttggcaggtgattgtgatgtgaagcttaataagtcatagacgtgcaggtgcctggagagtcctgacattcagttgtggtttcgtttcctttttggaatcttcaaaggcagcgaattttcatatttgcctcacacccctggngggggggctctggggaaccaaccgggggggaaccttgcttta

SEQ ID NO: 39732 - DNA, 787 bp, Macaca Mulatta
  misc_feature (1)...(787): n = A,T,C or G
ggggtgcaaaggcagaggctgtgggagcagcatcaagcaagccttcgggcagtgattctaactattgcccatgaacaccatagccaggacgactttgacgaggcaatttattacttatgcgtagaacagtagctgtgctgaaactgggagcacagacacccccttgttttctaatttagagacttgcatctttttgacactcaacactatcaagacactctgctactacagggaaatcatcttttgggaacttatctaagaagaacttcttatgatatatgaagtctgggggtaagacctgcagtaatttcccttaaggttcgtttatatcaagatacaggcaacagaaaatttgaggaattcaaagagaaaaatatacatgtaaaagaatggacgaactctagagactcgactctttaacatctgccttgtatttggcttaaagtatgaagttaatgctctactgctctctaaccatccctcaaaggcctctgagagtcaagttttacttgccctaacttctcagagacggatggctccctgtgagcagtagattctccaagggaacttactgatactcattacaatatattcatcacagcagaagctctgttggctaaaggacgatgggcgatcatcttacagtaaataactctattctgatgagatcggttacagagaatcgtacacatgtattgagtagaannnnnnnnnnnnnnnnnnnnnnnnnnnnnnnnnnnnnnnnnnnnnnnnnnnnnnnnnnnnnnnnnnnnnnnnnnnnnnnnnn

SEQ ID NO: 39733 - DNA, 775 bp, Macaca Mulatta
ggggattttgtgaagagacgaagactgagcggttgtggccgcgctgccgacctcgacctgcagtcggtttcttcacgccgaatccgggagtaggagactcagaatcgaatctcttctccctcccccctcctgtgagatttttttgatcttcagctacattttcagctttgtgagaaaccttatcatcaaacacaatggccagcaacgttaccaacaagacagatcctcgctccatgaactcccgtgtgttcattgggaatctcaacactcttgtggtcaagaaatctgatgtggaggcaatcttttcgaagtatggcaaaattgtgggctgctctgttcataagggctttgccttcgttcaatatgttaatgagagaaatgcccgggctgctgtagcaggagaggatggcagaatgattgctggccaggttttagatattaacctggctgcagagccaaaagtgaaccgaggaaaagcaggtgtgaaacgatctgcagcggagatgtacgggtcagtaacagaacaccctttctcgtcccctctactcagctcctcttttgacttggactatgactttttcacgggactatttatgatagggatgtacagttttcccaccacgtgtacctccttcctccctcctattgctccggcctgtaatgccctcgaaaacgtcagccgtgtatcagggaaacaccttccgaaaaggggcaaaaatgggctttccatttttaaaaaggggaacagccgggggatctttccaaagtctgggaa

SEQ ID NO: 39734 - DNA, 1023 bp, Macaca Mulatta
  misc_feature (1)...(1023): n = A,T,C or G
gagtcaaaggagaaactgttaaagcttcaatagaaattccaaagagttcaagaagatgggattgcgataatagcgttcaaccagaaaatagcaccatgctccaaatgatcttcgtgaaacttccttgttcaatatgactcccagcccttaaatatgttggccgatctagcattaagctctgctacttcttcccncaccggtacntgagcctagaattcttcactgttcttctgaattgccacaaaatgatgttttgctctctaaagaaatttctttgcgaggtacatctgaccatgaatatcacagaggagttaaaagtcaaaaaggtgaattacttcctaacccatcttctgataggaagagtaattctgagtcagacttaattgttagccaagatgaagaaagcttggttccgtgtagtcaggcccctgctaaagcccagtcagcacttactgaggaaatgctagaatcttcagatgcaagtcaaagctcttctgtttctgtggaacattcttatgccctgctccttagagaacattcaaagaaaaatctacaggagagagagataccaagccctgtgtttcccaagaatgggacaaaaagccctgaagcagtaaccccagtggggaaagtcatgccatttcggcatcagcctggtcttttgcttcagcaaaagcctcctgacgagcccatggtgaagcccaaggatcgacaagcgtcttcccgtgtgaaaaaatcttcttgctctcgtatagtgtttagctgtgatgactccgttaagatcactttcaaatgtgaaacagaatatgcattcagcttagatagcaaatataccaacaacccactggagaaaactgtagtaagagcattacatgggtgagtatgagtgaagcttggtgaaaatggatgaaatttttctgttgagatgaatgtagtgagatggggaaacttgtgccaaactctggagaaggagaaagaagtgtgtgtaaaaccagaaatttgataataacatcaagcaaacat

SEQ ID NO: 39735 - DNA, 130 bp, Macaca Mulatta
ccatgtgtcttcgtcttttttactaatattgattataaaatgggtgaaactttggataaaatttctgcattagaatttctttttatatgtcctgaagcttgtaactacttgctcatgattttttgtgtat

SEQ ID NO: 39736 - DNA, 602 bp, Macaca Mulatta
  misc_feature (1)...(602): n = A,T,C or G
tttctattctgactcctaatcacaatcctattgacccttacctgaattggaagcgaaccagtagtccaaccccttaccactatcggccaagtagcatccataatatacttcatcacaattctaatcctaataccactggcctccctaatcgaaaacaacctactcaagtgannnnnnnnnnnnnnnnnnnnnnnnnnnnnnnnnnnnnnnnnnnnnnnnnnnnnnnnnnnnnnnnnnnnnnnnnnnnnnnnnnnnnnnnnnnnnnnnnnnnnnnnnnnnnnnnnnnnnnnnnnnnnnnnnnnnnnnnnnnnnnnnnnnnnnnnnnnnnnnnnnnnnnnnnnnnnnnnnnnnnnnnnnnnnnnnnnnnnnnnnnnnnnnnnnnnnnnnnnnnnnnnnnnnnnnnnnnnnnnnnnnnnnnnnnnnnnnnnnnnnnnnnnnnnnnnnnnnnnnnnnnnnnnnnnnnnnnnnnnnnnnnnnnnnnnnnnnnnnnnnnnnnnnnnnnnnnnnnnnnnnnnnnnnnnnnnnnnnnnnnnnnnnnnnnnnnnnnnnnnnnnnnnnnnnnnnnnnnnnnnnnnnnnnnnnnnnnnnnnnnnnnnnnnnnn

SEQ ID NO: 39737 - DNA, 470 bp, Macaca Mulatta
atgtctaagtcagagtctcctaaagagcccaaacagctgaggaaactcttcattggagagttgagctttgaaactactggtgagagcctgaggagccattttgagcaatggggaacgctcacagactgtgtggtaatgagagatccaaacaccaagcatgccatgggctttgggtttgccacctatgccactgtggaggaggtggatgcagccatgaatgcaaggccacacaaggtggatggaaagttgtggaaccaaagagagctgtctcaagaggagattctcaaagaccaggtgcccatttaactgtggaaaagatatttgttggtggcattaaagaagacgctgaagaacatcacctaagagatgattttgaacagcgtagaaaaattgaagtgattgaaatcatgactgactgaggcaatggcaaggaaaggggctttgactttgtaaccactgatgaccctgat

SEQ ID NO: 39738 - DNA, 773 bp, Macaca Mulatta
  misc_feature (1)...(773): n = A,T,C or G
gggataagaaaatacaaaatactttgggaaagatcatttttgagatagaagaatggaagataggtcagaactttaatgcttgtgatcaaagatagctgacaatcttctaaaattaataggccatggtgtggttagcgggaaagaagtgactatggaactaataatgaatgtcaggaccagattgtggagggttttgagtgccatggttttgggatcatccatgttatgtatgacctcctcccttgctgaggagtattctgttgtaagaatacacacgatttatctacctgctctcctgttaattaacacaggtcatttccaggttagaggtattacgcataaaggtactctaaatattcttgtataggtcttttttgtggttttacagtttcatttctcttgagttgatacctagaaatgaaagggtcctaggacaggtatatgttcagtttcataggaaactgccatatggtttcccaaaggagttgtaccattttacactccttccaacaatgtatgagttttggtttgggagcacatatatttaaatcaggaatctgaaagatcgatttcacagcagtgtaaatggagtggaaggaactgaaggtaaggggtcaatgcanggaatccacgcgcgagctactaagggtctgcacttgtgcagccacacaggggtgagaaaagaatgagctatttttgggagataccgtcaaataagtgaaattctatagaaaatagagggaatcaaagttatctcagaattttcagcttga

SEQ ID NO: 39739 - DNA, 741 bp, Macaca Mulatta
  misc_feature (1)...(741): n = A,T,C or G
ggatttatcatccatactaaatgataaactcttggaggttggagaccacatatagttgatttttatattctcaaatcgaacacacagtaggtactcaataaatgtttgctgaatgaatgaattaaatatatagctttaatgttaaaagtgaatattttatttattcaacaaccactgtgtgctgggcactgtgctagatgctggggcaaaggagaattatggtatgtaggttacaataattggcattcttttttttttggagacggagtttcactttgtcaccaaggcttgagtgcagtggctcnnnnnnnnnnnnnnnnnntctctgcctcccgnnnnnnnnnnnnnnnnnnnnnnnnnnnnnnnnnnnnnnnnnaactacaggcgcacgccaccacacctggctaattttttatannnnnnnnnnnnnnnnnnnnngccgnnnnnnnnnnnnnnnnnnnnnnnnnnnnagctcaggcagtccgcccactttgacctcccaaagtggtannnnnnnnnnnnnnnnnnnnnnnnnntggccaattgtcattctttgaagaaaaactctgaaaacagactgaatgccatttctgtacagaggtgaagttcctttgtctttttcccttctattaattcatccttcatactccttattttaaaccccctcccaaaactactgttcctgtggctgcaaaatctgactaccttagaataaggttaagagggaagatccagtttagc

SEQ ID NO: 39740 - DNA, 696 bp, Macaca Mulatta
gggggaccgcggtcacgtctgcagagtggtgggtttgtagccggtagattactttatcatctatattgtccgttcaattgctcctcataattagcaaggataacaaggtaacacaaggcttacttacattcacgcaacagaagtgtctctgtggagccactttccagtgaactgcatactgagagagggatttctggatgaggaccaagcaaagaaccgagaagagtttagggcaggttatgcgagacggaaatggcgcagataacggagggaaggatttgaggggctcaaacagtgtctgtgtttcgcaaaagttggagacattctaggctgcctctcgttgcccccatctcgctctgcgcgggttgttggaggcattagattcttttcttgtatctcccgttgttcccaaaatcctccggcacttccagtctccctgcagggggggcccatggcccagaaacctccggaaaaaaaggcttggcttggggaacttccggggtgtcaaaaaacaggggggaattcttcccggggaaaagaccgccccccccgaaaaaacggggggaaaacaccccccgaggggggaaaagacgcgcatttttaacccgtcgtgcagaaactggggggaagggggaaataattcttctaacagacgcgcctcgttgttgggaaaggagaaacaagccacgcctctct

SEQ ID NO: 39741 - DNA, 759 bp, Macaca Mulatta
  misc_feature (1)...(759): n = A,T,C or G
ttaaatgtggagaatgctttaacattattaatcaatgtgcttaaaaaatagacaaaagcttttgaaacatgggactgaagtagggggagcattataaaagcctaaggtaattggtagtgaagagttggaaaaacttacttagtctaatcttgtaatttacagatgaggaaactgagaagataaataatttattcaatatcacttgaaggttcattagtaaaagggccagcattaggatttgctcattttgtactctaggagttgttaaaagcacttaatatcttcttttcttaggtgttaggatttttcattttttaaatcatgctatttagtgttcttaacatttgaaacccaaatgctttatattttgtttttggattgctttgggaatgagtatgtactgttagagaatggcccaatccaaacactagagttttaataatttctactccctctgctggccaactttccagtaaaatnnnnnnnnnnnnnnnnnnnnnnnnntgcagcagtaattgaaacaaaaacaaaaactttaaaaagtgtcttcattataaagaggtgccatgccataaaagcctagctagtttcaaggtccattcttccattcctcatgatttcagggttatcttcattcagatctactctacttataatagtactttaaacacagcacagaattaaaccattagcatgtgaatctgccaaaagagaacttgtcttagactcttctaccagttagacttcactgtgcacact

SEQ ID NO: 39742 - DNA, 1089 bp, Macaca Mulatta
ccaggaggaagatggcggctcccgcagctgcagctgagccccaggcttctgggggtccgcggcacccagtgtgtctgttggtgttgggaatggcgggatccgggaaaaccacctttgtacagaggctcacaggacacctgcatgcccaaggcactccaccttatgtgatcaacctggatccagcagtacatgaagttccctttcctgccaatattgatattcgtgacactgtaaagtataaagaagtcatgaaacaatatggacttggacccaatggcggcatagtgacctcactcaatctctttgctaccagatttgatcaggtgatgaaatttattgagaaggcccagaacatgtctaaatatgtgttgattgacacacccggacagattgaagtattcacttggtcagcttctgggacaattatcactgaggcccttgcatcctcatttccaacagttgtcatctatgtaatggacacatcgagaagtaccaacccagtgaccttcatgtccaacatgctctatgcctgcagcatcttgtacaaaaccaagctgcctttcattgtggtcatgaataaaactgacatcattgaccacagctttgcagtggaatggatgcaggattttgaggctttccaagatgccttaaatcaagagactacatatgtcagtaacctgactcgttcaatgagcctggtgttagatgagttttacagctcactcagggtggtgggtgtctctgctgttctgggcactggattagatgaactcttcgtgcaagttaccagtgctgccgaagaatatgaaagggagtatcgtcctgaatatgaacgtctgaaaaaatcactggccagtgcagagagccaacagcagagagaacaactggaacgccttcgaaaagatatgggttctgtagccttggatgcagggactgccaaagacagcgtatctcctgtgctgcacccttctgatttgatcctgactcgaggaaccttggatgaagaggatgaggaagcagacagcgatactgatgacattgaccacagagttacagaggaaagccatgaagagccagcattccagaatt

SEQ ID NO: 39743 - DNA, 799 bp, Macaca Mulatta
  misc_feature (1)...(799): n = A,T,C or G
gatgaagaacgtcgaatccgtatcaggagacaggagcaagctgctcgctctgcccgaatgctctacgtcctccagcagcaggnnnnnnnnnnnnnnnnnnnnnnnnnnnnnnnnnnnnnnnnnnnnnnnnnnnnnnnnnnnnnnnnnnnnnnnnnnnnnnnnnnnnnnnnnnnnnnnnnnnnnnnnnnnnnnnnnnnnnnnnnnnnnnnnnnnnnnnnnnnnnnnnnnnnnnnnnnnnnnnnnnnnnnnnnnnnnnnnnnnnnnnnnnnnnnnnnnnnnnnnnnnnnnnnnnnnnnnnnnnnnnnnnnnnnnnnnnnnnnnnnnnnnnnnnnnnnnnnnnnnnnnnnnnnnnnnnnnnnnnnnnnnnnnnnnnnnnnnnnnnnnnnnnnnnnnnnnnnnnnnnnnnnnnngtttcagtgaaattcggagcagatttcctgttggtagccaaaaggccttagagagatggccnnnnnnnnnnnnnnnnnnnnnnnnnnnnnnnnnnnnnnnnnnnnnnnnnnnnnnnnnnnnnnnnnnnnnnnnnnnnnnnnnnnnnnnnnnnnnnnnnnntaagtaccagcctgctgcggagcttccggaggcccagaggttgcagagtgagcttgatgtattagatgcggacgtccttccggaagaaggaccatttattctagaccaaagtgcgagcttcaaagacgaggtgttagccgtggcaaaaacaaaagcagtgaagaagcagcctgtgactgagaatgtgccatttaggaagaaagatacactggcgccagcacggcagcaa

SEQ ID NO: 39744 - DNA, 796 bp, Macaca Mulatta
  misc_feature (1)...(796): n = A,T,C or G
ggaactaggcatagaaggaatgtacctcaacataataaaggccatatatgacaaacccatagctaacatcatattcaaagaggaaaatctgaaagcctttttcttaaaaactagaacaaggacgccagctgtcaccactcctattccacataggattgatgcctcaaatgccctgatttgatcactgtgaattgtaaacatgtgacaaaagtattcattgctctataaatttgtacaaattttttaaagagaaacaaataaataaaaagatatttttaattaggagaaagtcaagtataatttgaaaaataagccactcataaaccctaatctaagttaaaaaggtcactttgcttgagtatggaaaatgcgactggcaaatagagaataaagtgccatttgaggaaatatgtacattttacaagatgtttgttgcatgtaccctgctgaaatatcaccgagtatcttgaggaataagttttcaataaattcatattaattagctcgttattggttcctctaaaatatgtattgttgatagcaagtagaaaaaaaataagttcagtattcaataataaaataggaaattgcagttaacaataatttactgtatacttcaaaatagatagaagagaaagaattgctatgttccccnacccaaaagaaaacattaatattttgagggggatggggtaaccccaattatccttgatttgatcatcacacattgtatataggcatcaaaattatccctgtacccccctaatatggataactatgtatcaataatcttgtg

SEQ ID NO: 39745 - DNA, 621 bp, Macaca Mulatta
  misc_feature (1)...(621): n = A,T,C or G
ggggttgagtgttccttgtgtttggcccttcaaatttcatttattgcttgtacatattattaacccatttctctataannnnnnnnnnnnnnnnnnnnnnnnnnggagtctggnnnnnnnnnnnnnnnnnnnnnnnnnnnnncgnnnnnnnnnnnnnnnnnngctccgcctcccgggtttacgccnnnnnnnnnnnnnnnnnnnnnnnnnnnnnnnnnnnntaggcgcctaccacctctcctggctagnnnnnnnnnnnnnnnnnnnnnnnnnnnnnnnnnnnnnnnnnnnnnnagnnnnnnnnnnnnncatctcctgagctcgtgatccgcctgtnnnnnnnnnnnnnnnnannnnnnnnnnnnnnnnnnnnnnnnnnnnntggcctctataatgattttttaaacattttatattctctcggctaatcattgtacatactgcaggtatcttccagtcattgtcctgtctaacttttctttttgcatagaagctttttaatgtagtcaagtacagtactctgtcagcatggcttgcttttatctaataagatctttttccttctagggttataaagattcttcattttttgcttttcaagcttggctgttattggctgaa

SEQ ID NO: 39746 - DNA, 584 bp, Macaca Mulatta
gctatattgttagcacacagaacacttcattgttgtttttgggggaagggccatatgtcactaatagaatgtctccagagctggattgatgtggggaaaacacctttcccttctagtttcgagagccttcctcttggctcccagggggagggattccctgactttaacacacatggccaccttggcacgaaagccttgtggtatggaaaacaaaatttgtttttatgtcctcttctccctttccatctttcagcatagacttaactcccttaagcccagacatctgttgggacctgacctctagtcattggttaccagtgtggcaggcaacctggactttccagtgatgccactgagatggcgcctgtcaaaagagcagtggttccatttctagattgtggctcttcagataaattctgccattttcatttcacttcctgaaagtcagggtcggcttgtgaaaagttgttaaacaacatgctaaatgtgaaatgtcaaccctcactctaaactttccctgttcagagcatcagatgaagacttcattgggttttatagtggctttctgatttttggtagtccat

SEQ ID NO: 39747 - DNA, 552 bp, Macaca Mulatta
gggtcccgggtggggtggggtctgtacagggcctggtggctcaacaggaggggacctgctgagccgcgtgtggtcagaggcctgggctggtagagcaagaccccccagctgctgcctccttacccgcttctggagtgccagtggttccaggcgtgcctggcccaggtgcgtggacaccaggcatagcctacgggccactgacctgaaggaggggccctggcatttactgtccttcgcaggtggcaacaggggaccccaaagggttgatgcccgtcggccgtagcattttaaagactggagccgtttttgcagaacttggagcaggacttgtgggtccacccggcaagtgtccattgcctgaccacgtgggtgcagctcagccctcagacaagcctgccctgagcccccagcccgtgggggaggggacatggcaggtgggggctctgcctgcagagctcatgcagcggacagagcaccgctgctggccaggagcccgccagccctgcagtgggggagtccgtgcctgggggtgggaccgaggtgggccggaga

SEQ ID NO: 39748 - DNA, 476 bp, Macaca Mulatta
gtcttctgccgcggtgggattttttggtgtgtaaatgaaaatgggggaggatggctggatggtttcacttttagcgctctctggtcttaagcaacgtagacgctcctgaaccaagttctctttcctgcatgaaacgaagtcactgctctcagctccgcagccgtgcgttgtgttctgtctatgtaatgtgagattgcttttgctcaaatatctattttttagaaaatacaattcaataaatttcaagtacttgaactgagtgacataatacaacacacagatttatcttttcaataaaaagtgttttttaaaagaggaagttcgtgttcatgataaaatgttcaaataggacatcagggcatacagggaaaagtgtctccttcctatcctggctccttttttcagaggtagcacctaatcgcctgtattttcaaccaaaccctctgttatcctagcctgggaaagattttctcgtc

SEQ ID NO: 39749 - DNA, 550 bp, Macaca Mulatta
  misc_feature (1)...(550): n = A,T,C or G
cgggcacccaggggcgggcgggcacggtagggccatggcagagggtgaggatatgcagaccttcacttccatcatggacgcactggtccgcatcagtaccagcatgaagaacatggagaaggaactgctgtgcccagtgtgtcaagagatgtacaagcagccactggtgctgccctgtacccacaacgtgtgccaggcctgtgctcgggaggtcttgggccagcagggctacataggacatggtggggaccccagctctgagcccacctctcctgcctccaccccttccacccgcagcccccgcctctcccgcagaactctccccaagccagaccgcctggaccgactgcttaagtcaggctttgggacataccctgngaggaagcgaggtgctttgcacccccaggtgatcatgttcccgtgtccagcatgccaaggtgatgtggagcttggggagcggngtctggcagggcttttccggaacctgaccctggaacgtgtggtggagcggtaccgccagagtgtgagtgtgggaggcgccatcctgtgc

SEQ ID NO: 39750 - DNA, 795 bp, Macaca Mulatta
gggcacaaaagttaccaagaagcatgaaataatatggttaccacctggtgaccaagttaataaaacctgtctgatgaaccaccaagcctgccacatgtgaattctgcagtttctgtctgaaagccacgacagcataaattggtgaggaagacgtgaatcagggacctcttagtgcactttaccatacagatccccatgtaaagggcagctgtcaggtcaccaaatccagtgaggtgtgagatttggggtggcagtgagggggaagatgtcgggggagaataaaatgctttgggaatgaggacctgtgtgaagcaagtagccgtgcttacttcaaagagcaaggtctagacttggctcttctcacagctggcaatgaccttggcatctaagaaaatgaaaatcagagactcacaagatgggaggcgcttagagagtctgtctgggtctcccctcttgattgcttctggccaaaactgtgtccttccaggtgagccagaatattcctcttaaaattccccagaagaagaaatcctcctcattcctggaagccattttcatggtctcaaaccccacttgagatgggttttgcttttactttgaggttacaaaaccccagaatccctctgaattctggtggcctctattcatacatcaaaaactccacttgaacctggaaaaactgctcatgaattccctttggaacatcctagccctggtcgaaaccggtttaattttatccgaaattcttttccgggctggatgccctgaatcccaccctttcaaattcccgaaaga

SEQ ID NO: 39751 - DNA, 1617 bp, Macaca Mulatta
  misc_feature (1)...(1617): n = A,T,C or G
cgaggtgcagtccccagggctgccgaatcagcagcgatggagagcggcaccgggccctgcggagacgagtgcccacgtgaagtccagcagatgacagacagtgagggggctgccaaaatcccagcgccaacgaggtctattagtaacctggtgcaggaattcaatcgnnnnnnnnnnnnnnnnnnnnnnnnnnnnnnnnnnnnnnnnnnnnnnnnnnnnnnnnnnnnnnnnnnnnnnnnnnnnnnnnnnnnnnnnnnnnnnnnnnnnnnnnnnnnnnnnnnnnnnnnnnnnnnnnnnnnnnnnnnnnnnnnnnnnnnnnnnnnnnnnnnnnnnnnnnnnnnnnnnnnnnnnnnnnnnnnnnnnnnnnnnnnnnnnnnnnnnnnnnnnnnnnnnnnnnnnnnnnnnnnnnnnnnnnnnnnnnnnnnnnnnnnnnnnnnnnnnnnnnnnnnnnnnnnnnnnnnnnnnnnnnnnnnnnnnnnnnnnnnnnnnnnnnnnnnnnnnnnnnnnnnnnnnnnnnnnnnnnnnnnnnnnnnnnnnnnnnnnnnnnnnnnnnnnnnnnnnnnnnnnnnnnnnnnnnnnnnnnnnnnnnnnnnnnnnnnnnnnnnnnnnnnnnnnnnnnnnnnnnnnnnnnnnnnnnnnnnnnnnnnnnnnnnnnnnnnnnnnnnnnnnnnnnnnnnnnnnnnnnnnnnnnnnnnnnnnnnnnnnnnnnnnnnnnnnnnnnnnnnnnnnnnnnnnnnnnnnnnnnnnnnnnnnnnnnnnnnnnnnnnnnnnnnnnnnnnnnnnnnnnnnnnnnnnnnnnnnnnnnnnnnnnnnnnnnnnnnnnnnnnnnnnnnnnnnnnnnnnnnnnnnnnnnnnnnnnnnnnnnnnnnnnnnnnnnnnnnnnnnnnnnnnnnnnnnnnnnnnnnnnnnnnnnnnnnnnnnnnnnnnnnnnnnnnnnnnnnnnnnnnnnnnnnnnnnnnnnnnnnnnnnnnngtgaacactgtgggcagcgacaccagcttggttgctccatgtgggcagagcccatccatgacctggatttcgtgggctgcgtactagaggctgtgcgcactaaccccagccgcttccacacctcggggcggatccgaagggtcctgagcgtcatcactgaggagcttccggatatgcctctgtactgcaccctggaccagcagagcagcaccatccgctgcaacatgcccagcctcccgtccttgcggtccgccctcctccacgctcacttccgggtctcgctctcccaggccagtaagaaggctgtgaagacagatgcccccgcctccgccctctggaacatcatgcgctgctggaagaaggaatgtccggtgaaacgggagtgacactcagagaccagcccagtgttccgcattttcagtgtggagcccaggctgcaggccaacttcaccatccgggaaattaccaaccccagctcccgccagcgaggacagaagcgcttccgggccaacccggaagccaactggggtccccatcctcatgcctggccagggaacaaggcggccggcaaagctatggagtaggctgcttcggaacaagcggaaggagccgctagagggcagggcacagcgagctgccccgctc

SEQ ID NO: 39752 - DNA, 817 bp, Macaca Mulatta
  misc_feature (1)...(817): n = A,T,C or G
gggagagacagagtttcgnnnnnnnnnnnnnnnnnnnnnnnnnnnnnnnncctcagttgatctgcctgccttggcctctcaaagttctgggattacaggcactgagccactgtacctggccgacattaaatcttgtatctccatcttttctgagggctgattgtatagtgtccctggaacttgtgtcctcccattaaaattcccactaaaattccttcggaagttgaggtcatagataatataaagaccttttaaaatgtgctgtcgtatcaaaggtcctttattttatgagaaatagtttacatataataaaatttacataatttaaacacacggctcaataactctgaacatatatacagcaatgtaaccaataccactatcaaaacatagaacatttaaaagcctttgtgtaaatgtaaaatgcaatgcaagcttttggcctacataaaaatattaaataaaaaattgtttctctaatggtgatggttcatggttatgaagcgttgtggcctaaccgggcccacgccccgaaacagaggccctagtttatattcccagtttttcaagggagccaaaaggttttcttcttttagataatccctttacgggggaataattggaccctctaacccccctcctttttgggtaaaaaaagggggcaataatttttccccgcataaaattttttttcaacaccattcaacggggnannnnanntntccccanattaatccccctntaaaagggttttccacaaaacaaaaatccgggggacgaaatttcttttacctcccattattgttgtggtaagaaa

SEQ ID NO: 39753 - DNA, 591 bp, Macaca Mulatta
  misc_feature (1)...(591): n = A,T,C or G
ccacacccagacaaatcttttttttctgtatttttttgtagagatgggggttttgctatgttgtnnnnnnnnnnnnnnnnnnactgggctccagcaatcctctgtcttggcccctcaaagtgtgggattacagctgttagccaccttacccagcctacctaaaacctttcagtctcttttctaaactccagaaaagagaggactctgaaaagctgaactctctgggggctgtagaaggttctagcattgatatggtatttgacatctgtatagaaaaacttgccaatttctcttttatcttgtggtaattctggataccagtttaataattttggagatacttaaaactctcaatatgaggaataattcatatatttttactttattcctatgaatgagtaattgaagaatttcgtatagccagattgtttaattctcatcaattacataatatttctagttaaatccaaacttcattctatattacgtaacattttattcagatccatatctaaatagcaatattttgtaagatttactaagaatttttcctggtatgtatggttcaggtgtattggaaatgtacctctg

SEQ ID NO: 39754 - DNA, 246 bp, Macaca Mulatta
  misc_feature (1)...(246): n = A,T,C or G
gatggtggctcaaccaatggctgcaaccacgagaggtnnnnnnnnnnnnnnnnnnnnnnnnnnnnnnnnnnnnnnnnnnnnnnnnnnnnnnnnnnnnnnnnggctggcctactgcagacacctgtccaccgtgaggacccacctgtcagccctggtcaatcacatgatcgtgtctccggacttgccctgcgatgctggacaggggctgacagccgggatctgggagcagtaccttcaggacagcac

SEQ ID NO: 39755 - DNA, 1165 bp, Macaca Mulatta
agagctgaagcaaagagttgaagcttttgaactgaaccagaagctccaggaagaaaaacataaaagcatgactgaggcacttaggagacaggagcagaatataaagagttttgagaaggcctatgaccaaaagctcaagaatgaacttctaaagtatcaacttgaactaaaggacgactacatcattagaactaatcgactgactgaagatgaaaggaagaataaagaaaaagcagttcatttgcaagaggagctcatagcttttaattcaaaaaaggaggaactcaatcaatctgtaaatcgcataaaagaacttgagcttgagttagagtctgtcaaagcccagtctttggcaataacaaaacaaaaccatatgctgaatgaaaaggttaaagtgatgagtgattattcactactaaaagaagagagactggagcttctggcacaaaataaattacttaaacaacaactggaagagagtagaaatgaaaacttgcgtctcctaaaccgcctagctcagccagctcctgaacttgtggtctttcagaaacaactacagaaagcagaaaaggcaatagtggttgagcatgaggagttcgaaagccgcaggcaagctctgcacaaacaactgcaagatgaaattgagcatactgcacagctgaaggcccagatactaggttacaaagcttccgtaaagaggttaactattcaggttgccgatttaaaattgcaactgaagcaaactcagacagccctagagaatgaagtgtaccgcaatccaaagcagtctgtgatccatcattctgccaatggattaataaatgacaacatggtgcttcacaatggtgagataagtggggacttcttgaacaatccttttaaacaggaaaaagttctagcaggtatggttgcatcaaggatcacaaattatccaaatacagggatggagggtagttcccctgattctgaccttgagtttgtcaccaatactaatgcaagggtcaaagagcttcagcaagaggccgaacgcctggaaaaggctttcagaagttaccatcggagagacattaaaaactctgccacaggcccactaccagcaaagagcccaccatctctgcacttgctggaagccttcaaaaacattacttccagttccccggaaaga

SEQ ID NO: 39756 - DNA, 623 bp, Macaca Mulatta
  misc_feature (1)...(623): n = A,T,C or G
taggtatgaacaccaaaaactgctgttaagagtgttatattctggatacactaacagcatttcgtccaacttgtggagtggagagagtgggggaggggaggatagtgctaatgaactgtgacaggggctnnnnnnnnnnnnnnnnnnnnnttccctaaataagcttctactgggtgtcctccattcacatggagccagggccttgccttttaggcacttactcttccagtgtctattttataatatattcaagaaggatcccagaatcagagatttatagaattagagttaaaagggatagatattttttttgacccagaaaaagttaaggaatatgcttgagatattcagtggcagaggctggaatagatattcccaaatctcctgatgtgaagttctgtttgtcaaacatgactgagtaaaagattaatttaaatgtaatgacgtgttgtattcatagaagttatttcggtttctgtggaaacctcctcttgctagcttaaacagaaataggggtttcattggaaggaagctgagatattgcaccaaactgcacaaaattgaatgaagagctgactaagcaaggctgccattgagaacgaaccagggtggtctgggctgtg

SEQ ID NO: 39757 - DNA, 481 bp, Macaca Mulatta
ccattgcagtgaacaccggcacagctttcccgccctgtactacgaggagggcgccgacagcctgagccagcgcgtgtccttcctcaagccgctgacccgctccaagcgtgactccgcctactcacagctctcccccagacactactactcagggtactcctccagccctgagtactcatccgagagcacgcacaagatctgggagcgcttccggccctacaagaagcaccaccgggaggaggtgtacatggccgctggtcacgccctgcgcaagaaggtccagtttgccaaggatgaggatctgcatgacatcctcgattactggaagggggtctcggcccagcagaagctgtgaccccccttcctccctggtgaggtcggagccagagggctgggggccctttgggggaagggtccaggcggccagggcggggagcagactcgggggccgaggcccaggagaggacgcacatgcagaccc

SEQ ID NO: 39758 - DNA, 1315 bp, Macaca Mulatta
  misc_feature (1)...(1315): n = A,T,C or G
aaccgcgccccccgcgcacggacccccatacacgcgcgtcccaggcggggtcgacccagaagagccacggggcggcgcacagccccactaacagggcggccagtactcacgcgagcgggtccacgcagccacctatataggtgacaaaacactcaggaagccgtcatgcggggccgggaaagagcccccacccagagtcacggactccctcgtccgagggtccgcgcagtcccctcggtgagtctagcgaagcatcctcgctgctagggagggcggggagggcggcggagtctcccactcgcggtgacccggaccccgcctcacgagtgggcccacgcagggccccctctgccgcacgcggggaccagccacgccgcgggggtaccgggcagaagtcagcgcccgggtccatgcagtcccctccgcggcagacgcggggagccggggagcagtggggacgggaccggccccccacccgcagggcgaccgggacccccgcgcgggcccacgcggtatcgtagcaggcgcgaagcccccggtgccacccgaggccgagacaaagcccaggcgcaaggaccccggannntcggaccctgcggagccgagctcggagccgccacacccggggcagagacccccacccggtctggagaccccgtcgcccatggcgccgtctcacctcaggccgccgcctcgcagccctagctcctcgccgcggcgcctgggccgactgaagcgcagctgagcagccgacagagccacggcagcctcaacaatggagcccctgggcggggccgccgccgcgtcgcttcagcgcgtgttgcccgctcaggatccggctcggatcaaggagctgcagctggcgcggggctgcggcccggaaacacaccctgcaggtgcacacnnnnnnnnnnnnnnnnnnnnnnnnnnnnnnnngcggagccgggcgcctagggccccctccggccaatggggagcaagccgcgcggagagggcggggcctgggggaacaaaggcaggttgggcggggcggcgctgggattgggcgtgcggggttccgcgggaggaccagacccaagagctggccggatcctggcctcctagaagacccagctcaacgtccacctgcagtctggtctacaggacgcgctcatctcaagcccagaactcaggcttttagggcagagagcgagagacaggcttgctttacaaaaagtgaaactgaggtccaaggaataggattgcctgctgcccgaagtcacgtagtcccattcactcgttcactttgtcattcagcaaacatttggaagcacgt

SEQ ID NO: 39759 - DNA, 88 bp, Macaca Mulatta
aggctgcagcctgacagtgagcgtgacgagcggcttcagcagctagcggagcggtggctgcggcccccctacaggagaccaccagatt

SEQ ID NO: 39760 - DNA, 2211 bp, Macaca Mulatta
  misc_feature (1)...(2211): n = A,T,C or G
ccatcaaaatggaaaaggaaatgtaagcagtgtttgctgtccaaagttcacgtcaacaactccttattatgaaggcacttctgagcctttcctcctgcatctgggagctgccagcaacccagttccaggagagaaaatagctcgacacctcctgcagcccatggagtcctcttgttgggacaaggtccccccaggagagaggagcccccagcagggtcaacactggaggnagggtcagggaccacggagcccggggctgtggaccacaccagcccacggccactgtatgccccagaccggggctgtggaccacaccagcccacggccactgtatgccccacaccaacacgagaagagtgcagaccaacaacatcttcgtctnnnnnnnnnnnnnnnnnnnnnnnnnnnnnnnnnnnnnnnnnnnnnnnnnnnnnnnnnnnnnnnnnnnnnnnnnnnnnnnnnnnnnnnnnnnnnnnnnnnnnnnnnnnnnnnnnnnnnnnnnnnnnnnnnnnnnnnnnnnnnnnnnnnnnnnnnnnnnnnnnnnnnnnnnnnnnnnnnnnnnnnnnnnnnnnnnnnnnnnnnnnnnnnnnnnnnnnnnnnnnnnnnnnnnnnnnnnnnnnnnnnnnnnnnnnnnnnnnnnnnnnnnnnnnnnnnnnnnnnnnnnnnnnnnnnnnnnnnnnnnnnnnnnnnnnnnnnnnnnnnnnnnnnnnnnnnnnnnnnnnnnnnnnnnnnnnnnnnnnnnnnnnnnnnnnnnnnnnnnnnnnnnnnnnnnnnnnnnnnnnnnnnnnnnnnnnnnnnnnnnnnnnnnnnnnnnnnnnnnnnnnnnnnnnnnnnnnnnnnnnnnnnnnnnnnnnnnnnnnnnnnnnnnnnnnnnnnnnnnnnnnnnnnnnnnnnnnnnnnnnnnnnnnnnnnnnnnnnnnnnnnnnnnnnnnnnnnnnnnnnnnnnnnnnnnnnnnnnnnnnnnnnnnnnnnnnnnnnnnnnnnnnnnnnnnnnnnnnnnnnnnnnnnnnnnnnnnnnnnnnnnnnnnnnnnnnnnnnnnnnnnnnnnnnnnnnnnnnnnnnnnnnnnnnnnnnnnnnnnnnnnnnnnnnnnnnnnnnnnnnnnnnnnnnnnnnnnnnnnnnnnnnnnnnnnnnnnnnnnnnnnnnnnnnnnnnnnnnnnnnnnnnnnnnnnnnnnnnnnnnnnnnnnnnnnnnnnnnnnnnnnnnnnnnnnnnnnnnnnnnnnnnnnnnnnnnnnnnnnnnnnnnnnnnnnnnnnnnnnnnnnnnnnnnnnnnnnnnnnnnnnnnnnnnnnnnnnnnnnnnnnnnnnnnnnnnnnnnnnnnnnnnnnnnnnnnnnnnnnnnnnnnnnnnnnnnnnnnnnnnnnnnnnnnnnnnnnnnnnnnnnnnnnnnnnnnnnnnnnnnnnnnnnnnnnnnnnnnnnnnnnnnnnnnnnnnnnnnnnnnnnnnnnnnnnnnnnnnnnnnnnnnnnnnnnnnncctcgctggactcagggagtcggttccaggaccccatggacaccaaatccaggcacattcaagccccacaggtggacctgccgaacctgcgtgtacaaagaatcagccctccgacatgcgtttcacgtggcagaacactgtattttctccctgagtttggttgaaaaaatccacctataagttgacccgcaaagctcaagcttgtgttggacaagagtcaactgtatgcaattgacactgattcctaccaacaatatccaaatcttaccatgaccagcacgataaagagaatgagcaaaatttaaaaactaaagcagagttttttcctgctagttggggcactgcgtatcccctgtgggaaagacaacactggctgctgaccgaactccatcggcctcttcctccgtcctgagggcatcttcctctnnnnnnnnnnnnnnnnnnnnnnnnnnnnnnnnnnnnnnnnnnnnnnnnnnnnnnnnnnnnnnnnnnnnnnnnnnnnnnnnnnnnnnnnnnnnnnnnnnnnnnnnnnnnnnnnnnnnnnnnnnnnnnnnnnnnnnnnnnnnnnnnnnnnnnnnnnnnnnnnnnnnnnnnnnggacaccgagctgcccctcctcggcccacagcctcaggccaccggtatcatctgtgattgagaaacatctgcagctggaggcgggaggcgggacatgctgggatatacccatggccaggccgagctgctctgatcactca

SEQ ID NO: 39761 - DNA, 321 bp, Macaca Mulatta
actctgttgcccaggctggagtgcagtggcatgatttcggctcactgcaacctccgcctcccgggttcaggcaattctcctgcctcagcctcccgagtagctggaattacaggcatgtgctaccacacctggctaatttttgtattttcagtagagatgggatttcaccattttggccaggctagtctcgaacctctgacctcaaatgatccacccacttcagcctcccaaagtgctgggattacaggcagtgagccactgcaccctgctgaccttgtggtgcctatggatgtatatcaaccaggatcaaaatgcttttat

SEQ ID NO: 39762 - DNA, 550 bp, Macaca Mulatta
  misc_feature (1)...(550): n = A,T,C or G
aagctgactacccnatcaacgaaatgtttactagattcttcatgtaacacttttgaggggcatggggacataatgggttgtggaagatgtgttaacnnnnnnnnnnnnnnnnnnnnnattctacccaagttcattgttgtttgaaccatcctttaacctttaaatgttgtgcattttagggttgcatacaacattgtaacagcacatgatggtagggatggaattaacatgcatacagagcttaactttcttaattttcgcaagcctgaaccatcctaatctgatggtaggatgtatggcttcttccttttcaccttgtgtgatacctaatttgagacgatctagccataaaactagttaatcttgaattcctcttgaactggatggtggttagccattgtgataacagattatctttatatggaaattgtgcatattgttcaattttaaacacatggatttatcaactgataataaaatatatcttacaagatatccacttgttactcaatgtaaaattgcacaagggcttaagtttcattgcctttca

SEQ ID NO: 39763 - DNA, 639 bp, Macaca Mulatta
  misc_feature (1)...(639): n = A,T,C or G
aggctgactctaaattagagacttgttaaagtgcagacagatgcaggaactcatccaactggagacttttccaccacttganccactgaacacgcctctgcaaggctctgaatttcaagtgacaggattttgggatttcaaagaaaactcaatctttggatgaaccatgacacaagagggaagcatcacacgtttccctgttccttgggcctcagtgaggactgacttagccagtctcaggctcctggagacctcctaggtgatatgcactagaaaagtcttttcagtacaaactggggcaggtaaggggcccttgctctgatattctactctctgataatttggttttcagagaaaaacaaagacctgtgattccaggaagttcaaagcccacagataaggtctcctcattctcccgtgacagcccgagctctgcattccagaaaaaaaagagcatcttcccagcatgaagagccaggagcaaagagcaagcttctcacaggggtgagcaggacagaagccaccttggtcagtgggaaggaaacttgctcagctcacatctgactcagaatgactcagtcacacctgtgcagggtcacctgcatgtgagcatcattcatttgctgcaagactaaatac

SEQ ID NO: 39764 - DNA, 351 bp, Macaca Mulatta
ggcagcaggtcgtggggcactggaagcaccagaggttggggagcagcacagttctgggccctcgggaggcctgcgtcctgtggggggttctgtgcaagaggacgtgcaggccacacacaggactgcgtgcttgtgtgccctggccgccgccggcgtgtgaagctgaaaggcacccctgcgggctcaggtgcacccagacggtgccgtgcctggggcacccaggtagagcagggctgggaccagtaggcttctcctcgcctgccctagggacagccgcaccctaacgaccagggcccctggggggcttcaggggccagaattgcctcttggagggtgggatgggtcccatat

SEQ ID NO: 39765 - DNA, 845 bp, Macaca Mulatta
  misc_feature (1)...(845): n = A,T,C or G
ggctttattatttcctctgagcagtttccattgtaaggttgaatttccctttttaaaattcaaatcatcactaaaggttaagataatcaaataggagttaaaataagttatgtttgatctttttcccttgaaaataatggtgaacttattgtctacattctgattactaggcagaaatgcacttgtttaaatcatagcagtaattacatttggaggatataattactcgattttctagtggtgtgaaatacttaaaaattgtgcttgtctgtaactgaaatgttatagaattgtaatactatagggattatagagttatatttattagctctcctcaagagactgaagcaaaatatttttcatgtaacaattcttatccaagtgctgctaatctgttgtgcaaataatgaagctatttggttgccaatttagctatatcacaaataaatggtaatcttttgaaacaaatcttgttggtcaaattgaattaaaacttgggaaattgtgagttaaaacttttaggaaaaaaaaatccaatcggctccagcccctgtatagcaaaacctgtattggaaatccataagtgttttaaaacggggcttaacccgttaaaaataaaatttataaacggggcacaatatagcaaaccaaatggaatataaggggaaaaatttaaacatggtcaacaataacgttttgaccttgcaaagattattgtgggaaactaacaaaggatcctggtaaacggaagaggttccaattaattggtttataacctaataaagtattctccactaagcnnggggatggagtaataggagaatatatattcgatagtaagagag

SEQ ID NO: 39766 - DNA, 782 bp, Macaca Mulatta
ggctcggcggcgccctctcccgtcgccctgggcgccttctcggacgtgctggtccgctgcgaggtgtcccgcgtgctgctgctgctcctcctacaaccaccgccggccaagctgctgccggagcacgcccagaccctggagaagtactcctgggaggcttttgacagccacgggcaggagagcagcggccagcttcccgaggagctctttctgctgctccagtctttggtcatggctgcccacgaaaaggacacggaagccatcaagtcgctgcaggtggagatgtggccactgttgactgctgagcagaaccacctccttcacctcgttctgcaagaaaccgtctccccctcaggacagggagtctgatccatcccattcacccagtgactttttgcccagaccgcaggggattcccatcagtcacgtgaaccagatgactttgcctgttaccaaacctcacacatccacgtttgcatctggggaggaataaaaaagacatcgttcccgcttctgcgttttgttattcctgttgccgccataggaattatttcgttggctgaacgttacctgcatcccaagaacacactttgatagaatcagagtagaggacaccgccgtcttctaaaaagccacgacatgaaagtgacagtccctttcgtctccttcctctgcttcttacagccaaggcagcctcctgcctccggctttgtttcatagtgaggatctatgttgcacggcactctcctctaaatactacctagattattcatctgccctca

SEQ ID NO: 39767 - DNA, 405 bp, Macaca Mulatta
  misc_feature (1)...(405): n = A,T,C or G
gtgccctcaaccctctgcctctcttacccagcctgagacaggaaggccnnnnnnnnnnnnnnccgccagctgggagcaccacggcactgatccaaggaaggcgtggggagtgtggtgacaggagatgggacgagggggcagagccagctggaacatggatgccagaggctgcctccgtagtgcatctccagaagtcacagaggccctgagcgcccagagccacctgagccacctggcctggaagcccctgcgcaggccagacctgcaggccatggaccccagcaggaaccgaagtctcaccccaagccttcgtacacaaggagcagcccaggtgagggatggcggacgcannnnnnnnnnnnnnggacggccttttccctcctgccctgtgtggtgaccctgcac

SEQ ID NO: 39768 - DNA, 263 bp, Macaca Mulatta
gggagatacgttcgtcagcttgctcctttctgcccgtggacgccgccgaagaagcatcgttaaagtctctcttctccctgccgtcatgtctaagtcagagtctcctaaagagcccgaacagctgaggaagctcttcattggagggttgagctttgaaacaaccgatgagagcctgaggagccattttgagcaatggggaacgctcacggactgtgtggtaatgagagatccaaacaccaagcgttccaggggctttgggttgc

SEQ ID NO: 39769 - DNA, 399 bp, Macaca Mulatta
ttgaactgaaccacaagcaaacacctctctgcagagactcggagctcatttctggaatcggggtaactgtgaaaagggaactggattcccctccagggggtcagttcctgcacgtgaagaccttgagctacttctctggagctgctgcttggtcagagcccttggcaactattcttcctgtcccttgaacaacccagccatcttatgggaagttggggtgaccaccaggcggatcaagccgtcctatccttcctcacccaacagcccagatctccaaagatgatcgctggagtaggggcagtgcacccagaaccttccagaaggaggatctctgactgccactaagggtcactccagacactggtgactggcaccacctctgtgcctcatggactgtgc

SEQ ID NO: 39770 - DNA, 866 bp, Macaca Mulatta
  misc_feature (1)...(866): n = A,T,C or G
tcgcctcattccgagccagggggccaccgagctgctcgtgnccgaattcgagtgtgagtgctggggccagatgccaccccagaacacaacttcttttgcatcccccacccctgctattgctgccatacctgccccatttgctgaccaggacttcagggagtttcagacctgcagaacntgaagaagacctgcagaattccagaccgtcttgcagccatgaccagagagtaacatgtgctcaaccagggccacctgggaaaggagggatcagcaatagctgccctcttggcatgtactctgctcagtcctgccacgagctggagagcaagtttctgggcctgttcccataaatgaactggtcaccctcttgtatttcccctctggttgttcctaacccacacctcgcctgcgtttcttcaccctgtgttctacagttttattctctgactgacccaccaggacttcacccaatgcctcactgatctggcccaatgagcaagaggacaggctaccctgaactcctaaagccaatgaggccagttgctagctacaagcaggatggtgagcaggatggtatccagaaatgtccctagaagcctacactcgtttcatgccacacctccagcagagggcctggaagaggacccgacatctagcccagtgagagtgtgcaaagccacatgtcaaatggacaacttgaccgacatttgcccttgactgactgtgcaggctggttccacttacagcacttgagtctacctttgcatagattcctgtatcagggctcttggactgacttgccacatctggagccctttcatctcaccacattgccctcctgggcacccctggtggacagcacccaa

SEQ ID NO: 39771 - DNA, 623 bp, Macaca Mulatta
  misc_feature (1)...(623): n = A,T,C or G
gaaatatatataagagttaatagaaggtatgttttggttttgttttcccagaggctgccatatggcctttgagtgcggggatgccccacactggcccaccaatgagcatggcagcttcggccaggaatgccagggttagcttcccgggctcgtgggtgggcatgcctgccccatgccagcctacagaggcctggccaggccctccccagcctgtctgccctcctcaggggtagaggagtctctgggccccaggaggattccctcccagagacttgcacggtgctccctgctcacgcgttgtcacagttagcccggaaatgactgaaaccaggcattctcccggacctgggcgtgggggagcctccaggcagacgctggctatggagccgtggtgtcgtctgtcctgtatggtggccagtgctttctgccagcacttctggatggatagagggactatcattaatatcctaatacatggtgnnnnnnnnnnnnnnnnnnnntaaaattgattcagagtccactggcccttacagatgtaggtacacccttactggagagggggctctgatgaggaaatgctggtcagttactactttttaaattgctggtaagtctgacacttg

SEQ ID NO: 39772 - DNA, 654 bp, Macaca Mulatta
  misc_feature (1)...(654): n = A,T,C or G
ggggggagggaatcagtacaagtaactaattctcagctgatattggcctatgaaggacaataacttaggaatataagaattctgttaatagtagtacactttttggccttaaatgtcttctactactgaaaatagtttaaatcttagctttgtttctattactccctctctctgcctcagaaagaggaattgggaagaatggcttaaaggatgtggtgtcattgacatgttgctgatcttttagaaaacatttgtctatgtaaggtggggacttaattttgtttgtatatagagaagaaataatgctgccctgaaccaatcagatttagtttaaatcaaatcaatcaaaactccaactattctgtttctcttgtctttttacttagcaaaggaaaactttagtaagaatgctacttgacaagaagaaaagtcatttctcaagcacatacccaaacttgaaggtggtgattgaacccaaaataatgggtgggaaacaccaaatgaggtggaggaatatgagaaagatgtgtgggccaaagctatctggttatattttgatgttgccaatatcgcaagccaaaattttaatttgcttatttaatatatttgttgggccagagatctattttttatatcaatgtgcccttgcgtggn

SEQ ID NO: 39773 - DNA, 82 bp, Macaca Mulatta
tcaggagagctggtagttttcattccgtatagaactggacctgataattattgattatcctaacaaatgcacttcatttatt

SEQ ID NO: 39774 - DNA, 802 bp, Macaca Mulatta
  misc_feature (1)...(802): n = A,T,C or G
gaaccccccctcctgggagttgtttctcaaaaaacctctcggttttnnnnnnnnnnnnnnnnnnnnnnnnnnnnnnnnnaaatcccacgcccctgttttctaggccccggtttttctctggggaaaaacggttttggccccggttttcctttccctaagggggcgcccggggnnnnnnnnnnnnnnnnnnnnnnnnnnnnttccgagggcgggggggggcccaaaannnnnnnnnnnnnnnnnnnnnnnnnnnnnnnnnnnnnnnnnnnnnnnnnnnnnnnnnnnnnnnnnnnnnnnnnnnnnnnnntnnnnnnnaaaagagtttattcatttattttctttgatttttaatcctttttcagtttgccccaacagattttggttttttcttcttaatattttcatttattcctaagatgtacaattcaatggtttttaatatatctgcattaatttttttaaacagtacagaaaagataaaaaatttaactatgtagagaaattgatgaagttatttcctgtattacattttgactgtccattttgagcatttaattaggcaatcaataaaaatgtttggaagctactgacatctccatcctaggagatgtggaaaaataaagcgggaaatccatagtctcttccctcacaaagcttacattccaattaaaaacaaattattcaacagtaaaatgatgcagttagcagtacatcctaaggtttaatttttttagccttttgtttttgcttttggtttgtagggatggggtctcattatgttgcccaggccattttaaactcc

SEQ ID NO: 39775 - DNA, 608 bp, Macaca Mulatta
  misc_feature (1)...(608): n = A,T,C or G
acgtggtgaaaccctaaaaatacgaactaaccgggtgtggtggcacacacctgntaatcccagctacttcagaggctgagannnnnnnnnnnnnnnnnnnnnnnnnntgnnnnnnnnnnnnnnnnnntattgnnnnnnnnnnnnnnnnnnnaggtgagnnnnnnnnnnnnnnnnnnnnnnnnnncagtttaactgatcaagaaaaaatagatatctgtatgcatttttcctattttgtcttaagataaaaagcctcttattttaatatgaaattaccctggtaatgagcttggtaaattggggtggaacaaggaattaggcctcccaaaattgacctcctaacatttcaggggaggttattaagtaatttgatttgtgaagttatagtagactcttgattctttcacactttattatttccagtaagggatatagctaagatagttattgatgttgttgtctttggatttaccattgttattcagatatatttgtgaatgagattaggactcttaaagaagaaggagcatctgtattcatttaacctttgtatatcattggagaaatagccatttagtttggttttttggcatctgaagccaagatgc

SEQ ID NO: 39776 - DNA, 788 bp, Macaca Mulatta
ggataatagcttctgtttgtttgcaatttaccagtctttagaaaagaaaaactaaatacagaccaagaaccggttgttagcatcttctttgtcagaccagtttcactctaatgaaatcatttgtagcatactcttacattctagacctgagtttacgctgtggtcattataattagacctgagtgtttgcgtgatctcagaaataaaactttttttaagttatagagacacaccgttgataatttaattcctcagatggtttagttcatccatttacttgttgctttttgtcattgttccacttcagattgtgaatacgtcctcattctccttccttattgttaaagagccttgctgttgtcactatatactcgcaatatatctgtcccttatggaagcagtgagtccctcctcaaccccctttggtattatatcactgtagcccatggagtttctttatttctttgacattagagcatagactgacatctgtgttgcaaggtaatcatttgttaccttaagtatttcctgatgggcagcatagagtgatggtttagagtgtgaactctgaagccatagtctgggtttgaagtctgggctggcatttgtaaatcatgctcagcctcagtttcccatctttggcattttgatcaatcgggctccttgcctcaggttttcctgggttttaaaagggggatgaaaggggaagggccatggacataaataccccctgggggtcttgggaaaaatttccctggaaaaaactccgaaattccaggagaataaaa

SEQ ID NO: 39777 - DNA, 792 bp, Macaca Mulatta
  misc_feature (1)...(792): n = A,T,C or G
ggcccaacaggtagcagcctctagaagcttaaaagggcaaggcaaccattctcacctacagcctccatatgtaatgaagtctcactgacaattgattttaggatttctaacctccagaattataagatcataagacgtttttgttgttttaaaccactatcattgtaggaatttgttacagttgcaataggaaacggtaaaatatacttcagcttttcctcataaaaaaggttttcaggaacaggacagagtgggtgtgaataaatgtaacttctatttgtgttcccgtgtcatctacttagaacggactcacctggcttattggaagatgtatcctttaaataaacaacaaaaattgcttgtatcataatacgtctttctgatattctgatattcacatgaaactagaataattacatgatgtttaatatacagacttgtgcactgtaatttttacttcttacagtgtcagtgttatgggttaacactattacctaattcatatctcaagtgtatcaaaaagaatagatagtagtaataataacattggaaatgatggatatatatttttcactttggatgtagaaacagtttttgaaaaataaacgtgaatttggggtttattccagaaggatttggggagaaagattgaaagcanaatagtagccaccatcagaaattccttaacaaaattggtactttgaaggtcaaaagatagtttttgggttgtaaaaattaaacaaaaataagttttaaatggaccttgaaaactgnattatccagaaattaacc
